United States Patent Application Publication US 2015/0315605 A1 - sequence listing, part 9

SEQ ID NO: 12951 - DNA, 3587 bp, Zea Mays
ccccgttccaaattcgccaacccacaccaccttcctctctctcgccgccgccctcagatcagatcaaagcggaacaccaactcctcctcttcctcctcctcgtagggtttggtgtgttcacctcacctctcgcggcgacagcgaagccttctcttctcttcccctccgctccgctccgctccgctccgctcggtgtttcagccatgatgtcgcggtcgtacaccaacctgctcgacctcgcggagggcaacttcgcggcgctgggcccggccgccggcgccggcggcggcgggcggcagaggcaggggtcgttcgggctgaggcggatgtcgcgggtgatgacggtgccggggacgctctcggagctcgacggcgaggacgagtcggagccggcggccaccagcagcgtcgcctccgacgcgccctcgtccgtggcggcggaccgcctcatagtggtctccaaccagctgcccatcgtcgcgcgccggaggcccgacggccgaggatggtccttcgtgtgggacgacgactcgcttctgctccagctccgcgacggcattcccgaggatatggaggtgctcttcgtcggctccctccgcgccgacgtccccgtagccgagcaggacgaggtgtcgcaggcgttgctcgaccggttccgctgcgcgccggtcttcctccctgaccgcctcaacgaccgcttctaccacggcttctgcaagcgccaactctggcctctgttccactacatgctccccttctcctcatccgcgtccgccgccggcaccacctcttcctcctccgccgccacttgcaacggtcgcttcgaccgcagcgcttgggaggcgtacgtgctcgccaacaagttcttcttcgagaaggtcgtcgaggtaatcaacccggaggatgactacgtttgggttcacgactaccatctcatggcgctgcctaccttcctccgccgctgcttcaaccgcctccgcatcggattcttcctccacagccccttcccctcgtccgagatctaccgcaccctccctgttcgggaggagatactcaaggcgctgctcaactgtgacctaattggcttccacacttttgattacgccaggcacttcctctcgtgctgcagtaggatgctgggaattgaataccagtcaaagcgtgggtacattgaattggattactttggccgcactgtcgggatcaaaatcatgccagtgggagttcatatgggtcaattggagttgggtctgcgcttgcctgatagggaatggaggctttctgagcttcaacggcagtttcaggggaaaactgtcttgcttggtgtggatgatatggatatctttaaggggatcaatttgaagcttctcgcctttgagaacatgttgaggacacatcccaagtggcaggggagagcagtgttagtgcagattgctaacccagcccgtggaaggggtaaagatctggaagccatccaggctgagattgaggagagctgccagcggatcaatggagactttggccagtcagggtatagccctgttgttttcatcggccgtgatgtgtcaagtgttgagaagatcgcctattatacgatagcggaatgtgtggtggtcactgctgtgagggatgggatgaacttgacaccgtatgaatacgttgtctgtaggcagggtgcaccaggatctcagtcggtatcagaggtgagtgggccaaagaagagcatgctggttgtgtcagagtttattggctgctcaccgtcactgagcggtgctattagggttaacccatggaatatagaggcaaccgcagaggcgatgaatgaggccatttcaatgccagaacaggaaaaacagttgaggcatgagaaacattaccgttatgtcaggagccatgacgtcgcttattggtcaaagagcttcatcatagacttggaaagggtttgtaaggatcacttcaagaggacttgttggggcatagggttgggttttggtttcagggtggtggccttggaccctcatttcacaaagcttaacatggattcaatcattaatgcttatgagctttcagagagcagggctatattgctcgattatgatggaactctggttccccaaacttccctcaacaaggaacctagtccacaggttttgagcatcatcaataccctttgctcagatagtagaaacatcgtttttcttgtcagtggtcgagacaaagataccttgggaaagtggttctcctcatgtccaagattggggattgcagctgaacatggttacttcttgaggtggtctagagaagaagagtggcaaacatgcactcaggcattggacttcggatggatgcaaatggcgaagccagtgatgaatttatatacagaagcaactgatggatcctacattgaggccaaggaaagtgccttggtgtggcaccatcaggatgctgacctaggctttggatcctcacaggcaaaggagatgcttgatcacctggaaagtgtactagcaaatgaaccagtctctgtcaagagtggccagttcattgttgaagtcaaaccacagggaataagcaagggaatagttgccgagaggatacttgcatcagtgaaggagagaggaaagcaggctgatttcttattgtgcatcggcgatgataggtctgatgaggacatgtttgaaaatattgctgatatcattgggaggaatttggttgctccaagaacagcactgtttgcgtgcactgtgggacaaaaaccaagcaaagccaaattctacctggatgatacattcgaagtggtcactatgctgagcgcactggcagatgccacaggtcctgaactggagactgattcggctgatgaatctgtcgcatatatctcatcacttgatattggtgacgaacaatcagaatccagtgataaaccagttgaagggtcttagccagttttctcttgcgttttcagaacatgatgattgtttcaatagtcaattctattctacacaattttctgatgggaactcaacgactaacaactggttctacgaatgctccagagtgaagcttctcaatctgctgtgctccaagttctccagttgggcaagatagtacagtctgttgctccaaggcgtagatccatatgttcatagctgacttacttggcacgttctttcactttctcattcctggttgaattaaaatgaaaacctcacagaagacaaagggagcgctgtttggctcattggctgaagtaatctggggggaggtataggagtggcgtatgtgaaaggagcctgtgcgcaggttgtgatatgattccttattaacacgacgttacaaagtggtgtcacttcttgaactaccagtagtaacaatcccaagagtgaggttcgaattgattaattaattgcttcaaagccggatctcggatggttttgctccaacgttttcccctcgtgcggttttttttaataaattttctgggtttacgttgaaagatgccttggaagatagcatatttttaggcctgtctatcagttctgatgaccactgccaatcagcgctggatgcttggcgattgtgttgtt

SEQ ID NO: 12952 - DNA, 1458 bp, Zea Mays
tgattcctcttgtgggatcttggtggtgtcgatggaaacttttggccgttaccttgacttgcatgagctttataatgagttcataaattccaagttcggaacactgatggaatattcagcttatgttggctgtttctcccagacggacaagatctcacatagtcataaagctaccagagaatacttggaacatattttggaatatctgacatcatttctgtatcgcacagagccattgcaagacattgataagatttttttaaagctggagagtgaattcgaggaacaatgggccaatgaaggaatacttggatgggggaataaagggacagaaaaagagtctgaaatagatctcgattactacagcacagttgaagaacttgttgagcttggcccagaaaaattaaaacaggctttagctgctcgaggtttgaagagtggcggtactgttcaacagcgtgcagatcgtcttttcttgttgaaggttacaccgttggaacaactagataggaagcattttgccaaagttccacatactaaagatggctcaaacacagctcctaatggtaatgctttcaaggaggatatgaagaaagaaattgcattgatggaagtgaagatgaaacgtctttgtgagctgctagatgaggcctttgtaaggacaaaggaaaatgcggagaagaagcttactttgacatatgaagagatggaagcagaacgggaagaggaggaggtacaagttgacactgagagtgatgacgaagagcaacaaatctacaatcctctcaagttgccgatgggttgggatggcaaacctatcccctactggctgtacaagctacatggccttgggcaggaattcaagtgtgagatatgtggaaaccatagctattgggggcgaagggcttatgagcgtcatttcaaggaatggcgtcatcagcatgggatgcgatgccttggcattcccaatactaagaatttcaatgaaattacatccatcgaggaggcgaaagcgctctgggagaaaattcaagcacgacaaggggtgaataagtggcggccagacctagaggaagagtatgaagatcaggaaggcaacatctacaacaagaagacctacactgacctgcagcgtcaaggcctgatctagggctcctgctggttaaagttgtcgggatttgttcagaacttatctcatgtagttgtaactctgaaaatattggcccatctggcatacattttatgtaataacatgattctccggaactcatgtgcttttcccggttgtcatggttgtctcgtgtgtctgtttgcccagcttggtcgtccgtagctatgttatgttttatataatcgtaaatgtgttattgtattaagcacaagttggtgtttgcatcacgtaaaacatatttttataaaaaaattagaaaaaaataaaactaggctgtttttggtcta

SEQ ID NO: 12953 - DNA, 917 bp, Zea Mays
gtgacctgctccagcggcccatcgtcagagtcaacagttctggagtcatgcctatcatattttctacatcttcactggctttgcctggtactttggcacggttttctggcttagactttcttaagaaggctgccatagcccttaatccaggaggtgctctctatcttccaactaatgtattacttatagccttcttcaactattattacacgtttctccagttagatcctgatgatcttagtgaacaattgaagcggcaaggtgcttcgataccacttgttagaccaggaaaaagtacagctgcttatattaaaacagttcttagtcgcatatctgtcttgggatctgcatttctggctgtgctagctgctggaccatctttagttgaacagacaagtcacttgacagcattccgtggatttgctgggacttcagtgcttatccttgttggatgtgcaacagacacagctcgaaaagttcaagcagaaataatttcccagaaatataagaatattgagttctatgatgtcaaccgttttggccaatagttgatctcactggtcattcttttcaacctgtacttagatttttatttgtgtaattgaatatcggatccgtaaggccgtaactaagtatttccttgttgttcacttggatcttaatttttttctactgtgtatagtactgaaatctgtactcaaggtacacaaatcattcatctgtacgctaacatgtcagagcactcaaatcttaaacctatgaatgcttattgttattcacagttcttgttgctgatgatgtaacatgtattgttacattatgattcccttccatatttattgtgttcaactttattagatcaactgaagaattggcttagtcgtcatgatttctattagacaaggtgagatgtactg

SEQ ID NO: 12954 - DNA, 1042 bp, Zea Mays
gagaaggcagaaaagaggccccaacagccgcgctcctattcagaaatctatctgaacagcttgctgagattgtcaatcatggaaaactggtgtctgatgagatcatcataaatctgctgtcaagacgtctggaagagggagaggaaaagggtgaattggggttcatccttgatggctttcctcgaaccataggacaagcggagatacttgaaggagtcacagacattgatttggtgatcaatctcaaactccgagaagaagctctgcttgcgaaatgccttggcaggaggatgtgcagccagtgtggagggaacttcaatgtggcctccattgatattgagggtgaagatggtgggcctcgaatgtacatgcccccactgttgcctcctccacagtgtgaatcgaagctgattgctagagcagacgatactgaagaagtggtaaaagagcggctgcgtgtgtaccatgatttgactgaaccagtggaggagttctacagagcacgtgggaaactgctggagttcaatctgcctggtgggatacccgaatcatggccgaagttactgcaggccctgaacatagaagaccccgacaataagcgatctgcagcagcatgattcttgttttgttataggaatgcacattctaaattgaacatctgtagactatgtcaaagctagtcaaattggtgggcattccttacatctttgggaagcctactccattctggatccagattattgtggcatggcactcaactgtacagtagattgatcatcgattggcaaggtcgatcgatggatgtgctgactgtgatcctcgaacgtaaggtgtgtaaaaaggcaagaaaataattgttgggcgtcgagacattcacttgtaggtcgtaccatgcatatgcttgttgaaagaggggagcatgccagaaacgtctgatttttatttttatttttttatttgggagggctggctggctggagcttttcgtgtatgtgacgagctacctatgtacgcaatacactaatactacactgcatgcgag

SEQ ID NO: 12955 - DNA, 1188 bp, Zea Mays
ctggcactgtcccccttccaccaaacgcgagaaacttgattccaggcagcaacccctcttccattccattcccgccgaccccgacgccgccctgtctcctcggctcctctctccgatccaatggcctacgccgcacgcctcgtagccaaggtccacctcgccgcgacgccgcaggccgagccgcgccacctctccagcttccgcgtaggagcactcagtcgatccacaaccgttcaacggcaaaagtttgttgctaaatctgctatctcggctgtggaaagtggtgatacatttgttggagtaaagcaaaatactagacctatcatagtcatagacaactatgatagcttcacatataatttatgccagtacatgggagaggttggagctaattttgaggtttatcgcaatgatgagatcactgtggaagaaattaagaagatttctcctagaggaatacttatttccccaggccctggcactcctcaagattcaggaatatccttgcaaacagttacagagcttgggccctcaataccgttgtttggggtttgcatgggtttacagtgcattggagaggcatttggagggaaggttgttcgatccccttacggcgttgtgcacggaaagggctcccttgttcattatgatgagaaacttgatggaactctgttttatgatattcctaacccattccaggctggaaggtatcacagccttgtaatcgagaaggatagtttcccgcatgataccctggaaattgttgcgtggacagatgatgggttgatcatggctgctcgccacaggatatacaaacatattcagggcgtgcagttccatccggagagcatcataactactgaagggaggctcatggtcaacaattttatcaagattattgaaggctacgaagcctcgaattgctctccgtgatttatctagttggaagcagcagcagccctgcgtggggcgggtgacaataagatgatgtaaaagcttgtaactacatagctcgaacatgtaaactcagatgtatatgttcggatgtcacaaactcacgacactcagagtccaactactgtacatggtcgcatgtggcgtgtcgatgtcaaatcaaatcattgaacttttagctcggtgaccgctatatttgtttttttacagtagttaccactatatttgttcatt

SEQ ID NO: 12956 - DNA, 85 bp, Zea Mays
ccggaagagcaccgcacatcgcgcggtgtccggtgcgcccccggcggcccttgaaaatccggaggaccgaattccgtccacgcat

SEQ ID NO: 12957 - DNA, 981 bp, Zea Mays
ctggggagtgacaccggaggaaagttgctgggtgatctggatctggatgctgctaagcaagggggttgtagccttgaagtatagctaaacatctggagtctgctaacacaatgttctcatttgtgtggtggataattggattttattgggtatctgctggtggagaagttcttacccgtgatgcgcctcaactttactggctttgcatcgtatttttggcgtttgatgttttctttgtcgtcttctgtgtggctttggcctgcatcattggtattgctgtttgttgctgccttccttgtatcatagcaattttatatgcagtgtcggatcaggagggagcatctgaagatgacattcgtcaaattccaaaatacaaatttcggaagatggaagagcctgaaaagcagtctgttggtgtgcctggatcttctggtggaataatgatagaatgtggaaccaatcaacctattgaaaaagtacttgcagctgaagatgcggagtgctgcatttgcctctcagcttatgatgatggcgcagagctccgtgaactcccttgtggccaccattttcattgtgtttgcatcgataaatggctgcacatcaatgccacgtgccccctatgcaagtacaatgttcgaaaaaacagcagcagcagtggcagcgaagaagtataaatctctatacgagaatattgagaattcatacccaacagttctggcttctcgcagcaaattttttatcccataatcccatgagttcgcattcgtatctgtggcagtgtgatgaagaaaatgatccatgtaaattctcttgttcgtaatacggctatagcaataattctgtgtcaactttgctcgtgctgttctcggtgtgtttagatttttatagtatgtgtacttgttatagaatttctgtagagcagcttgtttgtgtagtctaatgttttataataatcatactagcagtacatgttcttgctca

SEQ ID NO: 12958 - DNA, 1481 bp, Zea Mays
aaaacccacacttgagccatcatcccaagtccaacctacccccatcagcatcacgcattcacgcgcccgccccagcgccgtcatcggtcgccatccctgcatcgaccgcaccgcatcgcaccgtctccgccgccatgcgccgcttcgcagccgacagggcgcgccgcgcggtggccgcgtctctgcacggtgcagcgtccagatcagcagcgccgtcgcctcacgctccggcgccacgtcatccagcctccccggtgggggcggcggcgatggcggccgccatggtgaggaccatgtccacgacggccgcgggcacgcccccagtgtcggtcgccaccatcaaccccaaggtcttgaagtgtgaatatgcagttcgaggagagattgttacacatgctcagaacttacaacaagaattgcagaaaaatccagaatcacttcctttcgacgagatactctactgtaatattggaaatccccaatcacttgggcaacaaccagttacctatttcagagaagttctctctctatgtgatcatccagctctcctggacaaaagtgaaactcatgctttgtacagttcagatgctatagagagagcatggcaaattctagagaagataccaggtagagcgacaggagcatatagccatagtcagggtataaaaggtttacgtgatgaaattgctgctggaattgctgcccgtgatgggtttcatgcaagtggagataacatctttctaacagatggagcaagcccagcagtgcacatgatgatgcagttgttgataagttctgagagcgatggcattctctgccctattccacagtacccactgtactctgcatcgattgctcttcacggtggttcccttgttccttatttccttaatgaagagacagggtggggactcgatgttgatgagctgaagaaacaactggaggaggctcgatctaagggcatcactgtcagggcgcttgtggtcataaatccaggaaatccaacaggacaggttcttgttgaggaaaaccaaaagaaaattgtcgaattctgcaagaatgaaggacttgttcttctcgcagatgaggtttaccaggaaaatatatatgttgaagataagccattccactcattcaaaaaaattgcacggtcactgggatacactgatgatgatcttcctttggtatcattccagtcagtttctaaaggctactacggagaatgtggaaaacgaggcggttatatggagataactggattcagtcctgaagtacgggaacaaatttacaaggtggcatcagtaaacctgtgctccaatgtttcggggcaaattcttgctagccttgtaatgaacccaccaaaggctggggatgaatcctttgaatccttcatgtcagagaaggatggtatcctttcatcgttggctcggcgtgcaaagagtcctaatatggaaatatcaaacaagaataaaagctatacc

SEQ ID NO: 12959 - DNA, 1563 bp, Zea Mays
caagcgaaagctcaagcaaatacaagctctcagttagaccacactcaaaccagccacggacagcctcaaaatcccgagcaggagctcgctcgtagccccgagaacccgaaagctctgcagcgagatgtctcccgagctgaccggcaagatggccgccaaggccgccgccgccgctgcggcggtgaagcccgcgacgagggcgtacgtgacgttcctggcgggcgacggcgactactggaagggcgtggtgggcctggccaagggcctgcgcaaggtcggctcggcctatcccctggtggtggcccttctgcccgacgtgccggagtcccaccgccgcatcctcgtctcgcagggctgcatcctccgcgagatcgagcccgtgtacccgcctgagaaccagacgcagttcgccatggcgtactacgtcatcaactactccaagctccgcatctgggagttcgtggagtacgagaggatggtgtacctggacgcggacatccaggtgttcgagaacatcgacgagctgttcgagctcgagaaggggtacttctacgcggtgatggactgcttctgcgagaagacgtggagccacaccccgcagtacaggatcggctactgccaacagtgcccggacaaggtggcgtggccgaccaccgagctgggccctccgcccccgctctacttcaacgccggcatgttcgcgcacgagcccagcatggccaccgccaaggcactcctcgacaccctccgcgtcactccgcccacccccttcgcagagcaggacttcctgaacatgttcttcagggaccagtacaggccgatccctaacgtgtacaacctcgtgctcgccatgctctggaggcaccccgagaacgtccagctggagaaggtgaaggtcgtgcactactgcgcggcggggtccaagccgtggaggttcacgggcaaggaggccaacatggacagggaggacatcaagacgctggtgaacaagtggtgggacatctacaacgacgaggcactggacttcaagggcctgcccctctcgcccgccgacgccgacgacgaggtggaggcggtggccaagaagccgctccgcgcggcgctggcggaggccggcacggtcaagtacgtcaccgcgccctcggccgcgtgacaccgtgcttcggcttcccgccggtggccgcgctatggcttttgcgcggtcctcacaagtccgtaaagaagaatctcactataaggcctttgttttgaattttgtttatgaattagggtgtctaattttggatcagttcctttcccttgtgtgtctatttagggtgtgagcttatatatatatagtaccaattcaaggtgcaagcgttcgtcaggaattgggctttatgaatacgcccttcggtcacagctagagtatttgtcctgtaccgagggattatgtgtattttgcttggtgaattaatatataaaatacgaagccgagaaaatgtggacacatttctgtcaagaacaggtaccgcaggatgaggcgcatggaggatgctatgatgagttcgtgagaggtctagg

SEQ ID NO: 12960 - DNA, 892 bp, Zea Mays
cctgtgcgtccttaagccaaagacagtttaagtgagggcagaagtaaatgaatctggaagtgttttggctgttgatgcactctcgcaagttaaacatgttctgcttccagtccttgatcgcaacccttacctttctgaaggcacaagacaggctgcagcaacaaccgcttccctcgcaaagaagtatggagcagatattactgtagttgttattgacgataaaccaaaggagtctgtcccagagcatgatactcaaatgtcaagcattagatggcatctctcagaaggcggattttcggagtttagattgatggagcgtcttggggaagggcagaaaccaacagttatcatcggggaagttgctgatgagtgggacttagacctggttgtgctaagcatggaggcaatccactccaagcatgtcgatgggaatttgctcgctgaattcatcccttgccctgttctactgctcccgctctgacatagagctgatttgcatctgtcatgtttttttgagacaaatgatctgtttgtccttgaagatgtaactcccgcatgttccctggatacgaggggtttgcgtcagctgatgattctattatgttgatgcagtttttttcgaatttgtgtgcctgtgaatattgctaagaaaattatgttactcttttctttatttcttctgaatgagcagtttcaggtatatgctgctgctgtggttgggttaggatgcgttttttggggtgtttaaaagaaccagcatgtttaaaagaataaatcagtattaatgtcagacaaacagagaaaacaaataataaaaacatttggagatgcggggtatcgatccccgtacctctcgcatgctaagcgagcgctctaccatctgagctacatc

SEQ ID NO: 12961 - DNA, 2144 bp, Zea Mays
catgtatccttttatatttacttccgctaactatttcggttcagatagtggctgggaaaccatggggaagaagtcgaagaaacccgggcaagccggggggagacagtgggcaccatggagttccacaaatgtgacacctaacacagcaaggccagcatggggtggcagtggttcctcgcacccttctggaaccagctgggctcaagctccagatcatggtgctgctaccagaggcaatcctagaccgccatcacaaacatcgcgccctgttctggctccacctctggcaaatggttggcagtggcaatccaggcctcgcccatctggatctgaagtcaagaaggatgatgctcctccatctggttctgtccctgaggtggagaatgttgatggcaacaatacatcagatgatgatgatgatgatgacgatgatttgagtgatgatatcagtgatgactatgattctgacgcaagtgagaaaagttttgagactcgaaaaacgaacaagtggttcaaagagttctttgaagtattgaatacattgagtttggaacaaattaatgaacaaactcggcaatggcattgcccggcatgcaaaaatggacctggggcgattgactggtacaaagggctgcagcctttagtgagtcatgctagaacaaagggttctacaagggttaaacttcacagggaattggctgcattgctggaagaggagctttctcgcaggggaacttcagtgttaccagcgggtgaacaatttgggaaatggaaaggactgcaagaaagcactgatcgtgagatagtgtggccaccaatggttattgttatgaataccttcttggaaaaagatgaagatgataagtggaagggcatgggaaaccaagagctccttgattattttggagaatatgaagcaagtaaagcacgtcatgcctatggtccctctgggcaccgtggtatgagcgtgttaatatttgaaagctcagctgtgggctacatggaagctgaacgtctgcataaacactttgttaatcaaggtacagacaggaattcatggcacctacgcaaggttcgatttgtgcctggtgggaaaaggcaactatatggtttcttagcaaacaaagaggatatggaggcatttaacaagcattgccatggtaaaagccgtctgaagtatgagatgaggtcttacaatgagatggtggtgattcaaatgaaacagatgagtgaagacaaccaacaactgaattacctgaagaacaagatggttaagacagagcagcgatctaaagcagtagaagaatcattgggtgttgttacccagaagctacgtgagactattgaagaaaatatatttgttaggagtaaagcaaaagagaagcacatggagtacgaggaagagatgaagtcccaggaggaaatttttcatggtctaattgaggatattcacaaggccacagaggataaagaaaagcagtttgagaagttgttgcaggaagagcgctcaaaggccagacgctttgatgttgattctggaactatgaaagatcgtcagctaaggaaggaatatgtgcagaagttcattgattgccaagtcaaggatgtggcagagtttgaagttgagcgagatgagctgatcaaagtccacgaggacaagaagttgaagctcaagaaagaatacatggatctggagctggagctggagaaggagtttgacgcagccctgacgggcctgatggagaagcataagccagataccttcgaggcctccagctcgtaagggggcttcagcggctaagcgctttccttaggccccagctaagcttggagcagtctcgtacatgctcctgcttgcttatccatgaaataatgcctggacagtctgtagatgttgcgaaaacatggtgccccctgtggttgccgcgtgtgtagtaagtatctctcagtcgtagtgtggttgaagcatctgaactcttgagcggtttgcctgtgatggcatatgggtcaaactacaactggagtgtgatatctagtttatatggtccagcgctcttgttgactgcgggtggtggtttgccccggataatttactgattatgtctgctccgatcgtcaaagtgcctctttctgttttttttctt

SEQ ID NO: 12962 - DNA, 1569 bp, Zea Mays
cctcaagcctcaacctccaaattctccctcgttgtcttaccgtgtcgttgttgccgggttttcttggcgagcgacggagccacagaaatggagtgcaatacgggcgcctaattttagcggcggggaggggagcgaagcctgggcagccactcgccggcctccaagaaaccgtcgccattttttcatccgagtgccgccgattttgatttcattattgtctgtcttcgtggggaaccaattcggttttgtttcggaagaagggagaggaggatgcagtgggcgggtctgagatcgcaggcgccggttcccacggcggcgtggacggggccgaggccaagaaccgcgaggtgcccgcagggtagattccccacagcgcgccgggcgctggtggcgtcggcagcggcctcggacgctaattcgagctcgaattcgccggggaaggacgaggagggggaggaggtggtgcgaagggagaaggaggagaaggcggtcgcgtcgcttctgatgagaagccagaagtacgccatgctaaagcagcagctcgccgtggccgcccaatttgaggattacaaggaagcagcgaggttgagggactcgctgaggtccttcgaggagaaggagcctgtgttgtgcctccgccggttgatgaagaaggccattgaggaggagaggtttgaggatgctgctaaatacagagatgaattaaagattttggctccacactccctcctcaaatgttctagtgatgcaactactttggggataagagttcaagtcaggagcgtctatattgaaagccggagccagccattgaaaggatggaaatggaaggacagaaaacatttggggagttggagtagtgggagaacaacctgtcatattcccgaagactggttttgagtactcttctgcatgcccattgagcactccaaatgggagaatggaaggtgactttgagatgaagcacatcgacaaggctggatcatcaacattcaatgttgcaattgcgccattctctctgtcaattcttggtgacgataatgatgttctgctatgaactacactgaggacttgcttgggagcaaatggattgaagggaattaagggggctacaatcccttactattcaattttgaatagtaagggattttagctcacaatccccttctgcaaacaagccctgagatttaaactagacacacaaacacaaatatttattgtaagtgatgtaattgagcgcaaggttcaggtggaactactatggttgacttatggctggagccaagtgccctggtgcaaggtcaggtagagttctctgggatgttgaatctggaccatgcgagtatcaattgtgaggcacaataggacatcctaccaattgtacttctaaatgtacagcatggaacttagagcttgctacatgtattatacagtacctttttatttttcccatcacggtatcaccttagttatcgcggcctttgattatattgtatatcagctcagcaaaatatggtgttttttgttggaactgcaatgtaagatgtttgatatgaccgttggtgcttc

SEQ ID NO: 12963 - DNA, 3060 bp, Zea Mays
cagaatgcagctcagcccagtaaggcagtaaccctagagtccagttgcctagttgccttctctggtagtccagtctaacgctgtccaaccatttgtggcggctgccgcaacaggctcaacgctcacgcgcacacacaatccatagccgcctcccacatctcactctcgttccgagcttccggccatggcggtgacctccggcgcccccaacgacaacggccgggacgctggcgccgctgcgactgacgatgagcaccgcgtggatctggaagttaggcacaaggacgccggcactagggactcgccagcaccgatagcggcagctgcgcctgcgtcccaatcccgagtggctggaaagcttggcccctcagatccaaagcacctcatctatgcgggatccaaattaaagcatattaaagctgcacctgctgcaccagacaagaatcgccgaccacctttgtctccaccagcacctgccgtcaatcgtggtcgtggatctgtgcgcacacctttgggattaaaaaaatgtctaccgaaagtggcagtcaatccccattatctcaagcatcacaagcaccgatgtctccatctcatgaacctgaatcgtctcgtcctgagtcagataatgactcgatgccaatttaaatagatgacaatgacaacattgaagtagaagaggaagaatacgacgctgaagctggttctaagagaaagctcacctcaactgtttggaaagagttcaagagagtgaagttcaatggcacagtccgggcaaagtgcaactattgcttcaagcaactttctgcgtcaagtaataatgggacaaaacatcttcatgttcatttaaaaagttgtgtgcaaaggaagattaagttgaacgggaagacattggcacaagcttctttgagatttggtagaacggatggtggaacagtttcaatagagaattacacatttgatcaagaaatagctagaaatgaacttgctgcgatgatagttctgcatgaataccccttaagcatggttgatcatgtgggtttccgaagatttgttggtgctcttcaaccacttttcaagatcggaaccagaaacatgataagatctgatattatgaagcattatgaggtggagaagaaaaaagccattgaatacatggctggaatccagtccagggtagcggtcaccacagatttgtggacgtctgacaaccaaaaaagaggttacatggccataacagctcactttattgatgaatcctggactcttagaaatattataatgaggtttatctatgttcctgctcctcatactgctgacgtcattggtgaagaattgtatgagtcattggttgaatggaatcttgatgagaaaatatcttctgtgactcttgacaactgcacaactaatgatgcggtaatctcttctcttgtgaggaatattggaaagcacaaacttatgaatgatggaaaattgctacatatgcgatgttctgcccatatccttaatttgatagtaaaggatggtttagaagtacttaaagatgcaattgagaacatccgtgatagtgttgcttattggacagccactccaaaaaggtttgaaaagtttgaggaaatagctaaatttgttaaagttgatatcaagacaaagataggatttgactgtaggactagatggaattcaactttcaccatgcttgccactgcagtgccttacaaggctattttcataagagcaagtcgtgtagataggcagtacacgtgtttgcccactgaggatgagtggaaatttgctaaggatgttgtggagaggcttagattgtttaatgacattactacactattttttggaactgattatgtcactgctaacgtctacttcactagaattgctaagattagaaatcagattaggttgtggtcatcatgtggcaatccgttggtagaagaaatgttagtgaatatggtagccaaatttgacaagtactggactgacattcaagggctcatgggcattgcaactattcttgaccctcgattcaaaactgcagtcctattgatatgttatgaggacttacttgttgtgtccggtagtgaatgtgaagatagagttgctaatgtgaagaacttgctagctgatttgatgaatgagtaccatataactgagaatattgagaacaatgagtcatcaacaccatcagttggaaacagtgatgacttcttatctgacattagtgcccgtattgcaagtagaaggccaacaagcatggggctcaaatctgagctagaccggtacttggatgaagaaatggtgaacatgcaaaccaaaaacttcaatgttttagattggtagaaggtagctggaactcggtttcctattttaagaaggattgcaagagacatatatgttatccctgttacaactgttgcttcagaagctgctttcagcactagtggtagagtacttagtgagcatcgcagtaggcttacttcaaagatgttggaggctctcatgtgctctcaagattggcttaggaacaaatacaaagttgatgagaaaactaaacaacctgccaccttttggtcctgtctccaagacatgcaagagggcctccaggaacttgcactttgacattttcatttcaaggatttaggtggcgttaatcttttggctgttgacatgtagtgaacaagtcaagtacaagtagcaattgacaagatcacaagaaccttttggctctcatgaacacttgatatggatcttttggttctcatgtttttactcaatggtgaacttgtaatgaacttgtaacagatgtgcttttgggagcggtttgcacatctgttgatgcgcacctatgttgtaagcacattgtatgtgttaatttggaaatttggatgtttaatgtggtgaactagtggcgccatgctaggggtggtggacactaactggatattaatctagctgtgaacatctgatgtctgatgtgatcaatggtgttatgatttgtgaaacacttaacattgaccactctatcagtcttattgttgatgtttctta

SEQ ID NO: 12964 - DNA, 76 bp, Zea Mays
taaagatgtgcaacctctacagagtataaaaccggtatactagtcgtgatcacggtcatgagcagctcggaccctc

SEQ ID NO: 12965 - DNA, 434 bp, Zea Mays
ggggaaaggaaaaggggaagttctcgccagcgtgctgccttgcaagctgctaactagaataggaatccgacgtcgcccccgcccccccctgtgaaaattcgtgatgcggagaacagctaccgccgccctcgtcctcgtccccctcctcgctgcggcggtacagacctccgccctgcctttcatcgtcctgcacgggattggggaccagtgcgtcaaccatggcgttgccaagttcactaaacttctcgccgattggtccggctccgacggctactgcctagagattggcagaggaacatgggactcttgggtcatgcctcttcaacaacaggctgatataatctgcaacaaggtcaaggaaatgaaacaactgagaggtggctacaacatagttggtctgtctcaggtcatgcagctactatactaaaaccctg

SEQ ID NO: 12966 - DNA, 132 bp, Zea Mays
ctcgtattttcccaactcctcatcaaagcattgtacctcatgtctattggcccgttcctttgcattattaagatgtgttgttggtttaggtgcccatctctgacctcgcgtctgcattgccttggcttgtgc

SEQ ID NO: 12967 - DNA, 72 bp, Zea Mays
ccctcatcaccgacctggagagcctctccaaggaggcgcgagacgtgaagcgccacaccggcaacttcgagc

SEQ ID NO: 12968 - DNA, 746 bp, Zea Mays
atctgcgtgacagcagccgagagctgggcccaggtggacatgtgtgggcatcgaagtgtgcgtcagtgtgtctcttggaccatgacttgaggaaggaggaaccatctgtagttgagtcctactataacaagcggatagtcggctgccctggtggtgagggagaggatgaacacgatgttgtatggttctggttgaaaaaagatgagccgcatgagtgtccagtctgctcgcaatactttgtgcttaaggtcattggtgatggtggtgatccagatggtcatgacgatgaagatgatggacatcactaaggatgccttgtggttctgaaaataagaatttggtgaggcagatgaatccaatacacttctttttctagaaccagactgctccacggcatccttgtttatgaaaagacagttggccatcaagcaggtggtagttttcacctaggtattttgtccaaacaaaagctgtttgagatttgacccttgcgtttctttaagagcatcgtcgaataaaagatgactgcagtcagattgctttcttttgatacctcatattggcccatcgggtgtgatggacatgtaatattcagtaatggaacagccccatttctatgcttagcgtgctgggaattttgcaaaaggcctcctatatcattgacgagttttaagccagagtttgatgatccaacatgtttatgaccattgttttaatagtcatgctattctgtgacaatctccatg

SEQ ID NO: 12969 - DNA, 2535 bp, Zea Mays
gagagtgagggagaaagaaatggagcggcgggacgaggaggggaatccgggaatccaaagcagacggccagacgccgtgccgagccgagcagtccaactcccgggcagaggcagaggcagaggcggagggcggggcgagagagccgtgcggctgtccaactccccttccctatccggtagcagctgctcctatatgacccccgcaccccagcaaaaaccttcccctttttccccttcacagccccgtactactatccccgctaccgctagccgccgcgctgctcatctggtggcggctcgcctccctccccccatccgccgccgccggctcctcctctagctccctccttaccccgagctttaagctcgtgctacctgcctacctatccgtagggagagagagagagaggggagaaggttcggtcggtcggtcgggggctctcggatctcgccgctgcctccccgtttcttcgttgggatctcgctcgcttcgcgccatggccgccgtcgcgacgccaccggcccccgcgcccgccgcgccggcaccggcaccggcaccggctgctgctccggctcccgtcaccgtcgcccctgccgcggaccaaaccacggatctgctgcagaagttgtcgctggattcgcagcccaaggcggcgggtgcgacagagcctgctgctgctgccgccaaggagggtgctgtgacaagccagccgctgagtgtggccatcccgccggagcggtctatcacgccggtgcttcaggactttatggatcccaacctgttctatctaccagcgtattactatggaggctacgacagttccatgagcgagtgggatgattatccaagatatctaaattcagatggagtggagattgccccagcagtgtatggagatatttatggatatgggtatgctccttacggggcatactctccggccacttccccagttccaacggttgatggtcagatgtttggcgcacagcattaccagtatccaaccacgtattttcagcctcctacaccaattccttctaccactcaaagcaacctccagtcttccaacaatcctgaaaagccagcagctaaagcagatcctgccaaggcaaccgctaatggtgttccaaatggtactggtcacactcacagttacagtggaactgtaccaagccaacaaagttcagcactgacgcctgatggaacttatagggcgcccttgctaggtggagttccttctgctggttacctagacacgacatattatgggtatgacagcacaggggcacaatttgcatggtatgatggctctgcttatgcaaatggacagcaaagaacaaccacaactaatcgttttccatcctcgtcattcagtggtaatggttcatctgcaatatatcagaacaagagctccaccacgcagcagatgcgaggatgacatccacaagagcgtaaaatacaatgtgtgggcaagcacaaccaacggaaacaagaagcttgatgctgcttaccaagaagctcagtcaaagggatctgcatgccctatattcttgttcttctcagtgaatacaagtgggcagtttgttggtgttgctgaaatgactggcgccgttgattttgagaaaaccctagagtattggcaacaggacaagtggaacggctccttctctgttaagtggcacattgtgaaggacgtgcccaacaatattctcaagcacatcatcctggagaacaatgagaacaagcctgtcacaaacagccgcgacactcaggagatacgcctcgaacaaggccttcagatgctcaagatattcaaggatcatgtcagcaagacttccatcctcgacgactttgccttctacgagagccgccagaagttgatgcaggataagaggtcgaaacagcagcagctccaaaagcaggtctgggacactaggacccccgtttctgtcaccggtgagcgaccgcaggaacctgctaatgggaagcccaatccgtccgtaccagatggtgtcacggcagaggtgaaggcggtgaaggctcccgcagagaacggcatcactgctcctgttgtttcctatgcagcaaaggtggcccagacagcaccagagaaacccgtcctctccaacggagtcgccaagaccggttaactcgatcgtgcaaccagagctccatagccaggatgcggtgcaagggaactggtgaccaaccaaggcaggctgtggaactggcagcatggccccataagcgttgctcgatctcctcatcgctactggatggagagcagttggctagttgttagcggtttccctagtttctcttcctcttgtgttccccgtttcagtttgcttatagccccgaagactcttttctcccgtagtgtcggaatgccagggtctgtccctgtgggtgtgttgcgtaactgggatccgagtataccctgctgtgttcgtcgttacattgaatggatctgaatgaaagtgggttagattggagctaaaaaagaaaaataaaaaggcagaaaaacaaaatag

SEQ ID NO: 12970 - DNA, 1463 bp, Zea Mays
agataaccgactgctgaggaccttttgaagtttgttcttttaacaatatgtcgagggaggagaatgtttacatggccaagttggctgagcaggctgaaaggtatgaggagatggttgagtatatggagaaggtggctaagactgtagatgtggaagagctcactgttgaggagcgtaaccttctgtctgttgcatacaagaatgtgattggggctcgccgcgcttcatggcgcattgtttcttccattgaacaaaaggaggagtcccgtaagaacgaagagcatgtgaaccttatcaaggaatatcgtggcaagatcgaggctgaactgagcaatatctgtgatggaatcttgaagctgcttgactcccacctagtgccttcttctactgctgctgaatcaaaggtcttctacctcaagatgaagggtgactatcacaggtatcttgcggaatttaagactggtgctgagaggaaggaatctgctgagagcacaatggtggcctataaggctgctcaggacattgctctggctgagctggcacctacccatccgataaggctgggacttgctcttaatttttcagtgttctattatgagattctgaactccccagacaaagcttgcaacctggcaaagcaggcgtttgatgaagctatctctgagttagacagccttggtgaggagtcatacaaggatagcactctgatcatgcaactcctgagggataacttgaccctttggacatccgacctcacggaggatggtgctgatgagggcaaagatgccccgaaaggtgatgcaggcgagggacagtaatcttcggagggggtgcaaagttgttcgagccccaatgttttagatgctctatgctgtcgaagctgtgctgtgccattattgtagctgatttcgtctccattcacttcttttttcttgttagtaggctggtagtggtcgaattaatttgctttgtgttgccgctagtccatgtggactggtattgttcccctggatttatttggcaagcgtgtccgtgctcgctctagcgttttattgagcttttaaagtcatcgcattcttttttgattgcaatcagttattggctggatatgcggtggctgtttggatcagaagtacagccggagtttcctcaccggagcgtgtaacatgtggaaattggaaaccacgcaaacgtctctcttatttgtacccctgagtacatagggctttttttaacagcttttctgaaaagctgcgcttgtttggtttgacttttttctgaacagcttttctgaaaagctggctgtggggagaagctggtgattagaatctgggtgttggttcgcctgctgtggagagaagctggtggttaaaatctaggtgtttggatacacagattctgagattgtaagattgtagattctgattaaaaaaggaaacagataaaaacaccgaaccaacaag

SEQ ID NO: 12971 - DNA, 3070 bp, Zea Mays
tgtcgcctacatcactggctggcagagcagtaagcagtaaagagtaggcgcagcataaagccgaggcgagcagccgtcgccgcctatatatcgcggcgcagggcgagggacggagcgagcagggaagcccatccaccagccagccaccgcgttcctgagaagcgaggagcgagaaaagcgaagagcggccatgttctggcacggggtcgcggaccggctgacgggaaagaacaaggaggcgtggagcgagggcaagatccgcggcacggtgaggctggtcaagaaggaggtgctggacgtcggcgacttcaacgcctcgctcctcgacggcgtccacaggatcctcggctgggacgacggcgtcgccttccagctcgtcagcgccaccgcggccgaccccagcaacgggggccgtggcaaggtggggaaggcggcgcacctggaggaggcggtggtgtcgctcaagtccacggcggacggggagaccgtgtaccgggtgagcttcgagtgggacgagtcgcagggcatcccgggcgccgtcctggtcaggaacctgcagcacgccgagttcttcctcaagacgctcaccctcgagggcgtcccaggcaagggcaccgtcgtcttcgtcgccaactcgtgggtctacccgcacaagctctactcccaggaacgcatcttcttcgccaacgacacctatctgccgagcaaaatgccggcggcgttggtgccttatcggcaagatgagctcaagattctccgtggcgacgataatcctggaccataccaggagcatgatcgcgtctaccgttacgactactacaatgaccttggtgatcccgacaagggcgaagagcacgctcggccgatcctcggtggcagccaagaacacccgtatccccgtcgctgcagaactggccggcacccaacaaagaaagacccaaattcggagagcaggcttttcctgctgaacctgaacatctacgtcccgcgtgacgaacgctttgggcatctcaagatgtcggacttccttgggtactcgctgaagacgatcatcgaggctgttcttccaacactggggactttcgtcgatgacacgcccaaggagttcgattcgtttgaggatatcctcgggctctacgagctgggcccagaggcacccaacaacccactgatagcagagatcaggaagaagatccccagcgagttccttcgaagcattctgccgaacggtagccatgaccacccgctaaagatgccccttccaaatgtcatcaaatcagatgtgttgaaaaaggctccggagtttaagtttggctggaggactgacgaagagttcgcgagagagacacttgcaggcgtgaacccagtaatcatcaaacgtctgacggagttccccgctaaaagcaccctggacccaaggcagtacggagaccacaccagcaagatcactgaagctcacatccggcataacatgggaggcctgtcggtgcagaacgcactgaggaacaagaggctcttcatcctagaccaccatgaccatttcatgccgtacctcgacgagatcaacgagctggaggggaacttcatctacgccagcaggaccctactgttcctgaaggacgatggcacgctgaagcccctggccatcgagctgagcctgccccaccctgacggccagcagcgcggcgcggtcagcaaggtgtacaccccggctcacaccggcgtcgagggccacgtctggcagctcgccaaggcttatgcctgcgtaaacgactctgcctggcatcagctgatcagccactggctgaacacgcacgcggtgatcgagccgttcgtaatcgcgacaaaccggcagctcagcgtggtgcatcccgtgcacaagctgctgagcccgcactaccgtgacacgctgaacatcaacgccctggcacgccagacactcatcaacgccggcggcgtcttcgagcgcaccgtgttccctgcaaagtacgcgctggggatgtcggcagacgtgtacaagagctggaatttcaacgagcaggctctcccagcagatctcgtcaagagaggtgtggctgtgccggaccagtcaagcccatatggtgtccgactgctgatcaaggactacccctatgccgttgacgggctcgtcatctggtgggcgatcgagcggtgggtcaaggagtacctggacatctactaccctaacgacggcgagctccagcgtgacgtggagctgcaggcgtggtggaaggaggtgcgtgaggaggcgcacggcgacctcaaggaccgagactggtggcccaggatggacaccgtccagcagctggctagggcgtgcacgaccatcatctgggtggcatccgcgctgcacgcggctgtcaactttgggcagtacccatacgccgggtacctcccgaaccggccgacggccagccggcgcccgatgccggagccaggcagccacgactacaagaagctgggagcggggcagaaggaggcggacatggtgttcatccgcaccatcaccagccagttccagaccatcctgggcatctcgctcatcgagatcctctccaagcactcctccgacgaggtgtacctcggccagcgtgacgagcctgatcgctggacgtcagacgccaaggcgctggatgcgttcaaaagattcgggagccggctggtgcagattgagaatcggatcaagacgatgaacgacagtccggacttgaagaaccggaaggggcctgtggaaatgccgtacatgctgctgtaccccaacacgtcggacgttaccggcgagaaggccgaggggcttactgccatgggcattcccaacagcatctccatatgagcctgggcagattgtgtctcgtagtaaattgttgtgctgcgccgtgcgatgtgtttcttcattggttttgtcagtctcagggtaggggatggagatcataccatgatctttgtagggttgagagaggagtccacgcttgaatattgttgtcatgtatgtaattcttggttaataataaagttcgtcagttcatttcttagcctatcagtctccagc

SEQ ID NO: 12972 - DNA, 641 bp, Zea Mays
ctgaatccaagaggacttcacaatgcatcaacgaggtcaagcatccttgtgctcctccgcagcgtcatggtactcgccttcttcctccggcacggggtgcagcacatcctcagcaccaaccgcggcggacaaaccagcggcctccccaccctcggcagagccgtcatcagggaagcgcaccaccacaacggggcagacacagtggtgcacgcagtagtcgctgacgctgccgagcctgcccttgctggtcctccgcgcggcgccgaagcccttgctccccatgatgacggcgctgagcgagaggcgctcgacctcgaggcagaggcgctccttcatgtcgtggtccctgacgatgtggatcttgtaggggatgccggcgtccttgagcgggctggcgaagtcgtcggccttggtggccgtgaaggcgtcgtagtcgtcctccatcctgcgcgcggcagcggcggtctcgcagtcgccgtcgccgtcctcggaggcggcggtggcgctagggttggggagggagacgtcgacggcgccccagtcggcgccggcgccggcggggcctgcatcgcgggatcttctgcggcgatcgctcttggagcttgcttagcggggtcgaggtcctgtggactggcgagtag

SEQ ID NO: 12973 - DNA, 1651 bp, Zea Mays
gattatcaattgtaaatctcaagactgcttcagctcatagttgggcatgcatggatctctacgtttttgcaacaccatataggataacatgggactattattttgctgctcgggagcacactttggagattaaatcatgggaggaagaagcggaattgaaatatgtgaaggagcatggcatttctatttttctcatgccatctggaatgctcggaactttgctatctttgattgatgtcctgcctttgttttcaaacactgcctggggccaacattccaacctagcctttttagagaagcatatgggagcctcatttgagaaacgaacccaaccttgggttgctaacattagaaaggaggatatacaatctggtgactttttggctttatcaaagattcgaggacgatggggtgggtttgagacattagagaaatgggtgactggtgcatttgctgggcatacctcggtttgcttaaaagacgagaagggtgatctttgggttgcagagtcaggctatgaaaacgagaagggagaagaaatcattgctatagttccttgggatgaatggtgggccatggctctcaaggatgaatcaaatcctcagatagccctgcttcctttgcaccctgatgtgcgtgccagattcaacgaaagtgctgcatgggaatatgcccggagcatggttggaaatccttatggctaccataacatgatatttagctggatcgatacaataggagataattatccacctcctcttgatgctaacctggtaatggcagttatgtcaatgtggactagattgcagccagtttatgctgcaaacatgtggaatgaagccctaaacaaacgacttggcactgaggatttcgaccttcaggggatcattatggagattgaaagacgtggaatgtcttttgatcagttgctcaccatacccgagcaagacgaatgggtgtacagtgatggtaaatcaactacttgtgtcgccttcattcttgcaatgtacaaggaggctggaatattcacccctttctcggagtcgatccaggtcaccgagttcactattcgtgacgcatacatgctcaagatatttgaagacaacccggcaaggcttccaggttggtgcaacgcaggcacggacaagcttcccttttgccagattctcggagagtacagaatggagctaccagagtacaacacgattgaaccttatgcgaaaatgaacgagaactgtccgtccttgcccccaacgtacaaacgacccgcacgctgctgactacgagattgtctactatgtatctttctgcagctgctgcctttacacagtggcattagagtgttgttgctatgttctgtaaataaaagacactatatatataggtgcttggtagatggtagttcttaccagtaatgtagctgcgatgtattcaggttcacggttttcagtcgatcagttctgaagccacggcgtcggcgaccaatatgaaggttaggatttgtcagctccggaaagttgcttatatgtatcaatgtatgtatgtaggcaacattatggcttggtcataaattgtgaactccgtcaagaaataaatctataatgcaacgtcaggtgattctgatatgtgattaagaaaataaaaaaacaaa

SEQ ID NO: 12974 - DNA, 1226 bp, Zea Mays
tcacttagacctctttctcaatgagttgcttttactggaagtacagagactggtaagaggataatgatttcagctgcccaaatggttaagcctgtttcattagagcttggtgggaaaagtcctcttattgtctttgatgacattggtgacattgacaaagctgttgaatggaccatgtttgggatcttcgcgaatgctggtcaagtctgcagtgctacttctcgtttactgctgcatgagaaaattgcaaagaaattcttggatagattggttgcatgggcaaagaatataaaagtctcagatccactggaggaaggctgcagactgggttcagttatcagtgaaggacagtacgagaagataaagaaattcatctcgactgcaagaagtgaaggtgccacaattctgtatggaggtggccgaccacagcatctcagaagagggttctttcttgaacctacaattataacagatgttagtacgtcaatgcaaatttggcaagaggaagtctttggaccagttatctgtgttaaggagtttaggacagagagtgaagctgtggaacttgcaaatgatactcactatggtttagctggtgccgtgatctccaatgatcaggagaggtgcgagcgcatttcaaaggctcttcactctggtattatttggataaattgctcgcaaccatgcttcgtccaagctccttggggagggaacaagcggagcggttttggtcgggagctcggagaatggggtcttgataactacctgacagttaagcaagtcaccaagtattgctcggatgaaccgtggggatggtaccagcctccatctaagctgtgaaggggcattcactccagggaatgtaatgcatcattaactgacagcatcagtcctgttaatggacaggagctcgtgtacagtacagtgctcgtaaaaaaagctctttgatggtaaagttgcttgctgctatcactactccagaccagaattcaggactggagagtacgatgtcatgagttgtactacttgttagtctgcactcttatcattcgaagtttggcagtggtgtgtagttgcacttggaagattgcaataataataaagataattggataattgatccattttaatcatatttcttaaaaaaagctgaataagctctggagtttcttcttctttttgattaaaaaaaacaattttggaagcctttctaaaacgaaactttg

SEQ ID NO: 12975 - DNA, 99 bp, Zea Mays
actgggggaggtcgctagcctaatccccggactcgttgaagtcttggaactcctggagattcgcctcgacaccttctttacctgagcatagattgcacc

SEQ ID NO: 12976 - DNA, 1161 bp, Zea Mays
gctgtgttcccccaccctccaggctgcctgactcggggtctcgggcaggttccgccgcatcgtgtcgtttcttccctttcccgtttcccccgttcagttcagcttcggttggctcgccgtactcgggttgttcctcgcctcgcttcgcttccttcctccgcagtcctcgtctcgaattcgctcgcggtgggagaaatcggggcgcgaggatgaccgtgatcgacatcctcacccgggtggacgcgatctgccagaagtacgacaagtacgacgtcgacaagctcaacggcgccaacgtcgccggcgacgacccgttcgcccgcctctacgcgtccgtcgacgcggacatcaaccaatgcgtcgataaagcggaaacggcgaagcaagagaagaaccgggccgcggtggtggcgcttaacgccgagatccggcgcaccaaggccaagctcctcgaggaggaccttcccaagctgcagcgcctcgccgttaagaaggtgaaagggctgacaagagaagaaattgcgacccgtagtgatctggttgccgctttacctgacagaatacaatcaatcccagatggtagttctactgccacaaagaaaaatggaagttggggagcctcaggatctcgcactggaggagccataaagttcgactctactgctgatggaaactttgatgatgagtactttaaggggacagaagaatctaatcagttccgtcgggaatatgagatgcgcagaatgaaacaggatgaaggtttggacgttattggtgaaggactggaaactttgaaaaacatggcatctgatatgaatgaggaattggacagacaagtccctctgatggacgaaatggatgataaggtggatagagccaatgcagatttgaagaataccaacgtgagactgaaggagactgttcttcaacttagatcaagtcgcaacttttgcatcgacatcatccttctgtgtgtcattcttggtattgcggcctacctttacaatgttctaaaaaagtgaggtggagtcttcttgccttggaaccgctcatgtcgtggtccctttgtcaccatggttctacccagttctttgagcgatttgtggcttgctgttacgcagcctggggaacgtgtgcacacagcgctgggtcgagtcacca

SEQ ID NO: 12977 - DNA, 1218 bp, Zea Mays
catctctctcctcatataaaattcgaagcatcctgccgtgcgtccccgaagttccgagtccccattcggtcccccccctctgctctctcgaagcctccaggctccagaacccccaccccctctcctctcgcgccgcgaggggttgatccgtccggcgatctgggccctccggccggcgcccgcgcctgggaggcttttccttacccgccgcacgggcggagatgctctcgctccaacagcagcacggcggcgctgtcgccgccggcggcgatgcgcgccaccacgcaccgcagccgtcggtgctcggtggaggcgcggactggctagtgttcgggggccgcgccgacctggaggagcccgcgaggaatgccccgtcgcccgccttgttccttcttccgcccgcggggctcgatgacagggcggcccagcccgagcccaatcccaagcccgcacagctcgcaggagctgttgatgaagagcgacatttggcacttgcacatcaaaactacaggtcagggaagtaccgagaggctctagagcatggtaatgtcgtttacgagaagaatccacgtcgaactgataacctcctcctccttggagctatatactatcagattcgtaattatgacatgtgcattgcaaaaaacgaggaggctcttgccatagatccacattttgctgaatgctacggcaatatggcaaatgcttggaaggagaaaggtgatattgatcttgcaattcgttactatcttactgctattcagctgcgaccaaacttctgtgatgcatggtcaaatctcgctagcgcatatacaaggaaggggagactgaatgaggcagctcaatgttgtagacaggcacttgctataaatcctcgattggttgatgcacatagtaatcttggaaatctgatgaaagctcaaggctttattcaagaggcatacagttgctacatcgaggcgttacgtattgatcctcattttgcaattgcatggtcaaaccttgctggtctgtttatggaggcaggagacctcgacaaggctttaatgtattataaggaagctgttaagcttaagccatctttcgctgatgcatatcttaatcaagggaatgtttataaggctttgggaatgcctcaagatgccattatgtgttatcaacgtgcactgcaggcacgtcctgactatgctatggcttatggggaacattttcatgcag

SEQ ID NO: 12978 - DNA, 968 bp, Zea Mays
ccgcgccggcgccgcccattaatttctccccttctatccgcgatcacctctcctcgctgccgcggcatcttcttctgggtcctggcccgtcctcgtcgcaccattccatggccgattcagccgcgctctccacctccctcccccgctctctggcgtccaggaggcccctctcgtcgcctctccacgccagagcccgggcccgctcccagcgccgctgccggctcggatcgcgctcgctccaccggttgcgtgctcgggcgggaaaggacgacccggaggacctctacgggccctacccctgggaccagcccttggatctcaccgctgggtccgacattcaatgggtgcctgaagacagagtcacgctattcacttctgatgggctgatccagattgggggttccttggttcctcgtcgagtttctgcttctgagaagaggcaacggaaactgaagagtggacaaaagttgcgccggtttcaggagagctcttacatggatccaaatcaaagtctttgccttggagcactatttaacatagcagcaacaaatggcctagacatgggcagaagattatgcatctttggcttttgccgttctattgaaatgttaagcgatgtagtggaagatacggtattggagcatggcggtgagagaaggcaagcagtaacggcctccaggagaagctaaccatgtctgttgcagtaccattgctgtggggcgttcctccagcatcagagaccctccatgtcgcggtgcggagcggtggaggtattgtcgataagatctattggcagtgggacttattctagatgtccagcattaacaaaattggttccaagatgtatatgtctctctaattttctgcacgcgttgtgcagcaactgtaaacttagtctctacctgtacagacccggtcacccttgtgcatatatataaaagaactttgggatcacaacttaaccggag

SEQ ID NO: 12979 - DNA, 81 bp, Zea Mays
cgggacgctgcccgggatgaccccaacccgacatcgggcacatcagcacaaacatccattgcgccaccatctgccggctct

SEQ ID NO: 12980 - DNA, 171 bp, Zea Mays
ttacaggattgcgtgaacagtaaaggagtactgttcatctatttataggcacacgatgcagcctgtgagaaactacaatcatgccccttacaaagtattacaattatgactcagacccttatggactaagaagtcatttcatctttaagttggttcgaaccttcgtcttta

SEQ ID NO: 12981 - DNA, 5003 bp, Zea Mays
gaaagacaggtggcagctgtagtggctgcggacttgaaccatatcttgtctgaacgtggagcttgtggtgttggatttgtcgcaaacttgaaaaatatgtcttcatttgacattgttcgtgatgctcttatggctcttgggtgcatggagcaccgtggtggttgtggagcggacagtgactcaggtgatggtgcaggactgatgagtgccgttccatgggacttgtttgatgactgggccagcaagcaagggcttgctctctttgacagaagaaatacaggtgtaggcatggtcttccttccacaagatgagaagtcaatggaagaagccaaagctgcaactgaaaaggtttttgtggatgaaggccttgaggttcttggttggagacccgttccttttaatgtatcagttgtaggtcggaatgcaaaagaaaccatgcctaatatacaacaaatatttgtgaaagttgcaaaagaagataatgctgatgacatagagagagaattatacatcagccgaaagctgatagagcgggctgcaaaatcttttagttgggcagatgaactttatttctgctctttatcaagcagaacgattgtctacaagggaatgctacgatctgaggttcttgggcaattctatttagaccttcagaatgaactgtataaatcaccttttgccatatatcatcgaagattcagtacaaatacaagtcctcgatggcctcttgctcaacctatgaggttacttggacacaacggagaaattaacacaatacaggggaacttgaactggatgcgatcaagggaaaccacactaaagtctcctgtatggcgaggtcgtgaacatgaaatttgcccgtttggtgaccctaaagcatctgattcagcgaatcttgacagtacagctgaattgctgctaagaagtggtaggagtcctgcagaagctcttatgattctcgtccctgaggcatataagaaccatccaacattatctataaaataccccgaggtaactgacttctatgactactacaaaggacaaatggaagcttgggatggacctgctttacttctatttagtgatgggaggactgtaggagcaactcttgataggaatggtctccgtccagcacgctattggagaacgtcagatgacttcgtttatgtcgcatctgaagttggtgttataccaatggatgagtcaaaagtagtaatgaaaggacgattaggtcctggaatgatgataactgttgatctacagactggacaggtgcttgaaaacacagaagtaaagaaaactgtggcttcagcgagcccctatgggacttggttgcaagaatgcacacgtttgataaagcctgtcaactttctctcttcaactatcatggacaatgagactgttttgagacatcaacaggcatttggctattcaagtgaagatgtgcaaatggtgattgaatcaatggcttcacaaggaaaggaaccaacattttgtatgggcgatgacattccattagctgtgttatcacaaagaccacacttgttatatgattatttcaagcagcggtttgcgcaggttacaaatcctgcaattgatccccttagagaaggtttagttatgtctcttgaggttaatattgggaaaagaggcaacatcttggaggttggccctgaaaatgctgatcaggttgcactatcaagccctgtgctgaatgaaggtgaactggaaactctattgaatgactcaaaacttaagcccaaagtactgtcaacatacttcgatattcgtaaaggtctagatggttcacttgataagacaattcaggctctttgtgaagaagctgatgctgctgtgcggagcggctctcaacttcttgttctttctgatcgttctgaagcacctgaacctactcgtcctgccataccaatacttctagctgttggcgccatccaccagcatttgattcagaatggtctccgtatgtctgcttctattgttgctgatactgctcagtgttttagcacacatcattttgcctgtctgatcggatatggtgccagtgctgtgtgtccttatctggcactagaaacatgccggcaatggaggctgagcaacaaaactcttaatttgatgcggaatgggaagatgcccacagtgaccatcgagcaggcacaaaggaactttatcaaagcagtaaaatcaggtctgctcaaaattctttcaaaaatgggtatctcactgctctcaagctattgtggagctcagatctttgaaatttatggtcttggtcaagaagttgttgatcttgccttctgtggaagtgtatcgaaaattggaggtctcacacttgatgagggagaccttatcattctgggtgaaggcgttctctgaagatactgcaaagaggctagaaaactttggatttatccaatccagacctggaggtgaataccatgcaaataatcctgagatgtccaagctgttgcacaaagcaattcgtgagaaacgtgataatgcgtacactgtctaccaacaacatcttgcaagccgtcctgtcaatgttcttcgagatcttcttgaattgaaaagtgatcgtgcacctattcctattggcaaagtggagtctgcaacctccattgttgaacgtttttgtactggtggaatgtccctaggagccatttcaagggaaacgcatgaagctattgcaattgcaatgaatagaataggtgggaaatctaattcaggagaaggtggtgaggatccaatccgttggaatcccctcactgatgttgtagatggttattctccaacacttcctcatctcaagggtcttcagaatggtgacacagccacaagtgccattaagcaggttgcatctggacgttttggagttacaccaacattcttagtaaatgctgaccaaattgagataaagattgcgcaaggtgcaaagcctggtgaaggaggtcaacttcctgggaaaaaagtcagtgcatacattgctcgtctgaggaactccaaacctggagttcctctaatctccccgcctccacaccatgacatttattctatcgaggatcttgcacagttgatttatgacctccatcagataaatcctaaagctaaagtatctgtaaagcttgtgtctgaagctggaattggaactgtagcttctggagtttcaaaggcgaatgcagacataattcagatatcaggtcatgatggtggtactggagctagcccaatcagctccatcaaacatgctgggggtccgtgggaacttggtcttacagaaacaaatcagacacttatacaaaatggattgagagagagggtagtacttagggtggacggtggattcaggagtggtcaagatgttcttattgctgctgctatgggagctgatgaatatggctttggttctgtagccatgatagctactggatgtgtcatggcacggatttgtcacacgaataattgtccagttggagtggctagtcagagagaagagcttcgtgcaaggtttcctggtgttcctggtgatcttgttaactacttcctctttgttgccgaggaggttcgagctgcattagcccagttgggttatgagaagttggatgacatcattgggcgaacagatttgcttaaaccaaagcacatctcattggtgaaaacgcagcacattgatcttggatacctcctatcaaatgctggattgcctgaatggagcagctcccaaattaggagccaggacgtccacactaatggccctgttcttgatgagacaatccttgcagatcctgagatagctgatgctattgagaatgagaaggaagtttccaaggcatttcaaatctataatgttgacagagctgtctgtggtcgggtagcaggtgtgattgccaagaagtatggagacacaggttttgctggccagctcaacatcacgttcaatggaagtgcagggcagtcctttggttgtttcctgactcctggaatgaacattcggctagttggggaggccaatgattatgttggaaagggtatggctggtggagaactggtggtagttcctgtagacaaaacaggatttgttcctgaggatgctactatagttggaaacacttgtctgtatggagctacaggtggtcaggtatttgtgagaggcaaggcaggagaaagatttgctgttagaaactctctatgtcaggcagtggttgagggcaccggagatcattgctgtgagtacatgactggtggctgcgtagtcgtacttgagctgggaggaatgttgcagctggaatgactggtggtcttgcctacattctagatgaggatgatacacttgtcccaaaggtcaacaaggaaatcgtcaaaatgcagagagtgaatgctccagctgggcagatgcagctaaagggcttgattgaggcctatgttgataaaacgggcagcgagaaaggtattgcgattttgagggaatgggaggcctatttgccgctcttctggcaactggtaccgcccagtgaagaagactcgcctgaggcttgtgcagagtttgagagagtacttgccaagcaagcaaccacccaattgtctgcgaagtgatcgaatcagactacaggaaggtggtaggtgttttctatttgacacaaagtgatctcatcttatcacttcaagaaaatcgaagaccataaccggcgctctgaggcaccgaagtgcccgtctgaagactgcaactttgtggaggctctgcccaggccatctttttgagttgagctaacagaaccgagggttcttctcgacgctcgtgcacctaggtaacccctgtaaattggtttgctgacgctaggctgcaaggggcctgccctgtttgaactgctgtactgtacatgattcttggccgttgccctgtgtaattatgttttggttagctcgtaaatttatacgcatccaatggaggcatacaatgcaaaaaaataattaagatacaacaataa

SEQ ID NO: 12982 - DNA, 2142 bp, Zea Mays
atgcaaacttgggttaaacgacagcaccatgaccagggccctacttgtggaaatcatacaaggagatctacgacgaggtgctgcaagcaggctctgcgttgcagaagctgggagtgcagccaggttcccgggtggggatctacggagcgaactgtcctcagtggatagtggcaatgcaggcttgcaatggctatagtctagtctgtgtcccactgtacgatactttaggtgcgggagctgtcgactacatcatcgatcatgccgagatcgatgttgtcttcatacaggacaagaaaataaaagagatactgtccccaaactgcaagtctgccaagagactgaaagcattggtggcgttcacttcggcgacaactgaacagaacaaagaagcggatcaaattgggatcaaaatgtatgcctgggacgatttcttgaaagtggggaaggataatcctcgtcaaccttgccctccgcaagcaagtgacatctgcactgtcatgtacacgagtgggacaagcggacagcccaaaggtgtgatgctgacccatgaaagccacgccatgtatgtgaaaggggtggacctcttcatggaccagtttgatgataagatgacaacagatgatgtcttcctgtcgtttctcccgcttgctcacatccttgaccgcatgatcgaagagtatttctttcacaaaggggcctcaattggctactaccacggagatctgaatgccttgagggacgacattgtggagctgaagccgactctactggttggggtgccccgagtgtacgaaaggatttatgaaggtatcttgaaggccattgcggaactcagacctctaagaagggtcatctttaatgctttgtacaaccgcaaactggcaagcatgaaagcaggctactcgcacaaaaccgcttcacctttcgcggacatgctggcttttcgcaaggtcaaggcaaggcttggaggtcgtcttcgcttactgatttcaggaggggctccgttgagtaatgagatcgaggagttcatgagagtgaccacctgtgcatacttcatccaaggctatggtttaacagaaacactgggacctagcactgtctgctacatcgacgacatggccctggtcggaagcgctggtgtgcctgccacctacaccgaaattcggctggaagaagtgcccgagatgggttataatccactcggcgttccttcgcgtggtgaaatctgcatccggggaaaatccctcttcgctgggtactacaaaagtccagaactcacaaacgaagccatcgttgatgggtggtttcatacaggtgacattggagagatgaccccagacgggatcttgaaggtgattgacagaaaaaagaacatatttaagctgtcgcaaggggagtatgttgcggttgagtacctggagaaagtttatggcttccctccactcgttgaagatatctgggtatacggggacagtttcagatcaagtttagttgcagtagtcaatccacaccaagaaaacacaatgaagtgggcagagtccaatggctacaagggttcttttgatgaaatctgcaaacttgaaggactcaaagagtacatcctgaaagagctggcagccgttgcgcagaagaacaagctacgaggcttcgagtacatcaaaggcgtagtgttggatcctgtgccttttgacatcgagagggatttggtgactgcaacaatgaagaagaagagaaagaatatgctgaactattaccagtctgagattgacacaatatacaaaaagctggaggcgcagaagagtgctgccagagctaagtgaagagatgtgccctattcgaccatcagctgaaaacaagggaaacgacaccgttgtaaatttcacattaatattgcgaagtaacaactcagggctatgagtaaggaataaaatgtatattgtgcctttgtctatagtaccggatgattcccaaatcccaactagagttgagaagagtgaaggccgtcaccaacaagatggcaatctggaccgaacctcacccgctcacccccactactgttcaaaagcatagcatcctaactgaagggggtgtctggatatcgccactaaattttaatccctactgtggatgctagttagaaat

SEQ ID NO: 12983 - DNA, 532 bp, Zea Mays
ccaagacagagccatttgtgaaggtatcgagaggattattgggatagagactatagaaggcgaagccagagcagaagtagggagcgatatgaacaggccgggtacagagatggtgatcatcgtcgccataggactcacagtattagtcctgattatgacaggaaacgtaacagacacagggcacctcatgaaggaatacctagcaagcccagagatggccgcgctgcatgttctggaagcccttgaccctgagctgtggctgaatatcacacagcttctcctggacagcttgaggcatctaagcagttctcatcatttgtattttcttactaagatggcctttgttttagtccaggttgagtagactgagctttggcaaaaacaacaatgtctgcttggttactgaatctacatggtgacaatgatggaatattgtgtggcacagcattcaacttccagtactgcgttttgtaaacatctaagcctcatttgggaactatatgcatgatggatattgtcatttcttactata

SEQ ID NO: 12984 - DNA, 75 bp, Zea Mays
cacaaaccgatctacggcgactgttcttgacagatctaaacttaagcaaaacccgcctctaacaaggatgtggcg

SEQ ID NO: 12985 - DNA, 2905 bp, Zea Mays
ggaacggtgcaagacaatattctctttggatcttcaatggacaggcaaaggtaccaagaaacgcttgagaggtgttctttagtaaaagaccttgaaatgcttccatatggagaccatactcaaatcggggagaggggcgtaaatcttagcggtggccagaagcagcgtgttcagcttgctcgtgcattataccaaaatgcagacatttatcttctcgatgaccctttcagcgctgttgatgcccacacagcaactagtctttttaacgaatatgtcatgggagctctgtcagataagactgtccttttggtgacccatcaagtcgattttttgcctgtatttgattctgttctgttaatgtcagatggtgaaattattcgtgctgcaccttatcaagatttattggcacattgtcaagaatttcagaacctcgtaaatgcccataaagacactattggtgtttcagatcttaacagagtcagatcccatagaacaaatgaaaacaagggatcgattgatattcatggaagcttatacaaagagtctttgaagccatcaccagcagatcagctgatcaagacagaggaaagagaaatgggtgacactggtctcaagccttatatcctttacttgcgccagaataaaggcttcttcaatggctctatgggtattctttgccatgtgattttcgtatgtggccaaatagcacagaattcatggatggctgctaatgtccagaatcctgatgttggtacacttaagttgatttctgtgtacattgcaattggattcatcacagtgttcttcttgctgtttagatcgatagcacttgttgttcttgggatccaaacatcaagatctttattttcccagttactcaactcattgttccgtgcgccaatgtccttttttgattctacccctcttggaaggatacttagccgggtaaggatacttaaacaaattgttcatatccctgagatatattgggtggtatcttcagatttgagcattgttgatcttgatgttccatttggattgatgcttgctcttggtgccagcataaatgcatatagcaatctgggggtgttggctgttgttacatggcaagttctgttcgtctctgtgccgatgatggttttggcactcaggttgcagaagtactatttagcctcagctaaggaactgatgaggatcaatggcactaccaaatcagctctggctaatcacttgggagagtcggttgcagggtctataacaataagggctttcgaggaagaagatcgtttctttgagaaaaattcggaacttgttgacaagaatgctgcttcatatttctataattttgcagcgactgaatggctgattcaacgcctggaaacaatgagtgctgcagttctttctttttctgccttcatcatggctctcctccctgcaggaacttttagctctggctttataggaatggcgttgtcttatggtctgtccctgaacaattcctttgttttctctatccaaaaccagtgccagctatcaaaccagataatctctgtggaaagggtgaaccagtacatggacataccaagtgaagcagcagaggtcattgaagaaaatcgaccatcaccaaactggccccaagttggtagggtggagcttagagatctgaagatcagatacagggaagatgctccccttgtactgcatggaatcacatgcacttttgaaggcggagataagattggtatagtcggccggacaggaagtggaaagacgactttaatcggtgcattgtttcgtcttgttgagccaactggggggaaaataattattgactctgtagatatcaccacaattggcttacatgaccttcgttcacgtttgggtatcattccacaagatccgacactctttcagggaaccataagatataatctagatcctcttgagcaattttcggatcaacagatatgggaggttcttgacaaatgtcagcttcttgaagctgtccaggagaaggaacagggattggactcacttgttgtggaggatggctcgaactggagcatgggtcagaggcagctcttctgtttgggacgtgcactgctaagaagatgccgtgtcttagtcctcgacgaggccactgcatctatagacaatgctaccgatgcgatccttcagaaaacaatcaggacagagttcagagactgcactgtcatcactgtcgctcaccgtatacccactgtcatggactgcagtatggtacttgcactgagcgacgggaaactggtggagtatgacaagcctacgaagctcatggaaaccgaagggtctctcttccgtgacctcgtcaaagagtactggtcgtacgcatcgaatgggaatatctagaagccacctccaaactacgaccgtttgcatgtttccactcgctgcatcctcttgaaaggagatacaagaatctgggcttgcacatccgaagaactattgtatctgaaatcttgagaaaaggcgtcaggcattgtcatgaaatgcttgttgtcaagttttcaccactcgtttttcagcaactttttggtagtttctgttttgggtcattgcttcccttccaggcgctgaataaaagaaaacatgtctccatccccccccccccttcttctcccctccaaaaaaaagtagaggaaatcctcaacatttctttgctcacagtgatactttatgctcataacaaaaattcttaggcttggtgctcaacactattccattcagaatttgtggtgtatgcttacattcgtacaaagctgtagtagggtatatgatgtctgtttttttggggtgcaatcatggcttttcagcaccctcttgttcatgtttgatgtatattcatcggtgtctggagccaagcaat

SEQ ID NO: 12986 - DNA, 657 bp, Zea Mays
ctaactgttgtcccaagatgaattagtggaaacagctcctgttattgctgaagctgtgtcatatttgacaaaaaaagtggattccaaaacaagagatgtaaaagttctccagcctacaatagccactcagacggtgcgaacaacagaggctaattccctctatgagatggacaaggcaacacaggaggtggtcaatgcaattgttgaagcacagtcatgcggtcttgggcttgctgtgaataagatctccattgggcccaacttgccaactatcaagcttgagagatctgttggcctacctgagctcagaagcctgcggagaactttcatcaagctggcagggcagtacagtctgagtgggccaccaccaccgacagatgctgacagcgcaaagaggatgtttgtcgactacttaaaccgtgaacttggtgcatgataattttcattcgcctgcgttgcatgaacactatgtagcatgtggttaacttgggggaatagataattgaagacaacttgattgtacttgttccttgttttgtggaaatctttatatgactatcttaacgtccttgacgccttggtggacatgcaacatgaatatttttttctctcaaacccgcatgagaggtgctcatcattatattaagaaaataaaaa

SEQ ID NO: 12987 - DNA, 1992 bp, Zea Mays
ttcattactacgatgtgaaatctccttgcaagcgctttcagttgcgttctcgcttctcttctcgtggatccccaaatcctctccggccaccggcatcgctcctctcccgcccgccgacgccgaccgctcctatccacgccaccgcgtcggtgctcgagttgcctcagagagggagagagagagagagagagggagggagggagggagggagggaacggcgctcacgctgttccgattcgaacgagctcgcccggcgatttttttttttcctggaacgggctggctccgaatctcggcgaagtgtggggagcggctccaccctccaaccaagcaccgcaggatcaaccagaaggcgggcgcgcgggcggcaggcggcggtgctgagaacacgggtggcactgtctggacggacgctgcggatctcggcgattcttcgcggcctgcgtcaagggcggatcggcagcgatgagcggcggcggcggcgggagccccaataacacggagtggcgcttcaaccagaccctccgcaacgtgcaaggaatgcttaaaggacgcagctttcctgggaaggttttgctaacccggcgatccgagcctctctcccctcctgattattctccaagctttgagagcgagcacgatgaagatgagcgcaaggagggttctcgtcaggagggagaaggtcaagcatctggaaactcatttgacaatgcaagttcaaagaaatcaaatattctgtcaacaagtagttcaaattcattgccagatgctcaggggctagtttctggggctagagctactgattctgcaagaattgctaaattcacaacggaactatctaggccagctgttatattagacaaattgcgtgaactatcttggagtggtgtgcctccatatatgcgacctaatgtatggcggcttcttttgggatatgcaccgcctaataaagatagacgagaaggtgttctaacaaggaaaaggctggagtacgtggaatgtgtttctcaatactatgatattccagatagtgaacgctcagatgaagaaattaccatgcttcgccagattgcagttgattgcccaagaaccgtacctgatgttacattttttcagaatcatcagattcagaaatctcttgaacgcattttgtatacatgggctattcgtcacccagcaagtggctacgtccaaggaataaatgaccttgttacgcctttcttggttgtcttcttatcagagcacctagatggcaacatggatacttggtctgtggacaatctttcagcgcaggccatttccaacatagaagcagactgttattggtgtctctcgaagttccttgatggaatgcaggatcattacacctttgcgcaaccaggaattcagcgcctcgtttttcgattgaaggaactagttcgtcgtatagacgaacctgtttccaagcacattgaagagcaaggattagagtttcttcagtttgccttccgctggttcaactgccttctgatacgagaggtacctttccatctcgtaacgcgcctgtgggatacataccttgccgaaggcgactatctgccagattttctcgtgtacatatcggctagttttttgctgacgtggtcggacaagctgcagaagctggattttcaagagatggtgatgttcctgcagcacctccccacgaggacctgggcgcaccacgagctggagatggtcctctcgagggcatacatgtggcacacgatgttcaaaagctctcccagccacctcgccggctaggacccacccaagtccaccatgcctgtaagcggcagtcagttccttctgttttttttttgttaagcgcgtgcatactatactatcggtcgcgtcgcaccgatttgtatattttccgtttcctaccgaggaatgcttatctataatgaacaccagaggacaagtattagtgctcaatttgatattcagaccggtagttgtattgaaaaaaga

SEQ ID NO: 12988 - DNA, 1563 bp, Zea Mays
ctcagaggttggtggtggtggggctgttacaaagtcaagtgagctcccacactccactatcccatttttcccaacagggcatattgatcattctgcaagggtcatgaaaataattacatggaatagatcctttaaaggaatgcaaaatggcgatgatgggaaagatgacttcgaaaatgatgaattggagaccttggcaactgtagttgataaaatcttagcatgggagaaaaagctctatgatgaagtgaaggctggtgagattatgaagcttgagtatcagaggaaggttgctttgttaaatagacaaaagaaacacaatgctgccattgaggttcttgagaaaacgaaagctgcggtaacccacttacatactagatacatagttgatatgcaatcaatggattcaactgtgtcagaaattcagtatctccgtgataaccaactgtacccaagactattggatcttactgaccggatggcaaaaatgtgggaggacatgaagatacatcacgcaaatcagctgaaaattgtcctaaatctgaagtctgttgatattcctgattccaatattgaaacaagtgattatcaccacagccacacacggcagctgcgtgatattgtagataagtggatcacaaattttactgacttcatgaactgtcaaaaggaatacataaatgctctctatggctggttgaagttgaaccttatacccatagagagcagcctgaaggagaaagtagcatcgccacctaggatgcagcaacctcctatcaaagcctttctttatgcctggcatgagcacctagccaagctgcctgatgatcttgccaagacagccattgtcacttttcgagcagtcttggataccatattgggtgttcaagatgaggagttgaaacagaaggagatctgtgagcagactcgtagggaatacatacgtaaggcccgggcttttgaggattggtgccacaagcatccacagcccagagcgatcgacgtcgatccagatagcggtgaggggacaggacataaggatgtagtcaccgagaagagattcgcagtggagagcttgaagagcaagcttgacgatgaaattgaatcccataataagctatcaaagcaggtcagggagaagtccctctcgatcctgaaggcacatctcccagagctgttccgtgctctgaccgacttctccgacgcctccttcgaaatgtactcgaagctgaggctgatgtcgttgatgcaggatcagggaaacaactagatggacagtatgttcagaagttaggatcagtaatatccctcccccaagtgttgtaatgcatgtgttctacccctttctgtggtatgtgtaaaaggctagtagctcattggatgaggattcttgtttaatttattggcttgatgaaaccatcgggtactttgtagtgtggacatatgctggatagttagcatgtgatgaactgattacaatctgtgggggtaaaagccgtcgtctatgtaaatgataaattttgttgagatatccagccgtccagttttttgaggcactcgtga

SEQ ID NO: 12989 - DNA, 116 bp, Zea Mays
ccgaggtgcagggtcggaggggtggaggccatgcagtggaggagcggacggcggagaagcggacgagcggggaaggcggagggggagtcggccgcgggttccgtgaaggggcggcg

SEQ ID NO: 12990 - DNA, 77 bp, Zea Mays
cgaacaaaggcaggcaggcgggcgggcgccgccttttggttctctgattgtgcaaattttcaagtcattgggaaaga

SEQ ID NO: 12991 - DNA, 489 bp, Zea Mays
caaaatataattttggggtgtttgtatttggtccaaaaaagtgctaatattttggaacaggacctaccttacatagccgaatacattaatcaatgaaacacaaatagtagagcgggtgctcactcaccagatcggtgatctgacggcgtggacccgatgctgatcgaatgacccaaagagacggattgcaggcctgttccaccgcgcggcctcgatttccccttaacacaacacagaggaagcaggcggcggcgatcgggcgatggcatggcgggcgagcctgtctcggagcctaaaggagatccgcgtcctcttctgtcagtcctccccggccagcgccgccgcccgtgagttcgtgaagaagaactatggtgacatcaaggctcgcaacccctccctccccttccttgtccgcgagtgctccggtgtccagccccagctctgggcgcgctacgaatagagacaatgctcaactttacaggcatggcc

SEQ ID NO: 12992 - DNA, 1350 bp, Zea Mays
gcccggacggcggagcacggcacggcacgagaggcccccacgacgagaccccccgtcccgtctggccgtttccccctctccgcaccgcactcggcactccactctcctccccctgaccccgagttgagtccactctgctgtccgctcacaccaactcctccatccaactcggcaactccacgcagccagcccggcgcctcccatcagtgggtgggtgggtggttcgcctcctcatcctctcctccccgcacgtccacggcgatggcgcccgcgcccccgcactgctgacccacccccgccgcgcactctcatgaccgtggtttggtaggtggggcggaggttggtaggccgggacgtgccggcaggcggttacgggaggcgcggccgcgatcccgggccggatctggacgccgcgatggaggacgccgttgccgctgagaatgggatcgagggggagggctacgtcgtcgtcaaggcggcggcggccgcggaggcggagggggactccggcgccagcgatcgtggggatctcgccgcccccgctgaggacgcggcgccggccggatctgaggacgccccggccccggcggtgacgccggacgagaccgcggcacctgccaaggcgccggccaagaagggtggatccggggacgccgccggggtccggaaggcgaggccgcagaacggcagggtgcccgccgccgccgccgccgcgccgagggtgaagaagcccggggtcctctcgcagagcgcctccttcccggcgcggggtgccgccgccaagaaggcctcggcggttgctactcccaagcaggccaagggcgtcgtgaccaatggatcagaggcggcagcaggccgggcagccgagaagaaggcgaattcagcgcggacacctgtcgctcgccggtcgatgcctgtcaagtctggatcagcggatgcggccgccccaaatgacgcaattcccgctgtccaagagccacatgaaaacaccgacaagccattgaaacaaatgcagccagggaaaacagaggatgatgtgcgctctaccacatcaagtaccaatactccgcgtgcagcagctcgcaagagtgctgctgttgctgctggttttagtttcagattggaggagcgtgctgagaagagaaaggagtttttccaaaagcttgaagagaaaatccacgcaaaggagctggaaaaaacaaatctgcaggagaaatctaaggagagccaagaggctgagatcaaactgctgaggaagagcctaacatttaaagccacacctatgccaagcttttacaaggagcagccacccaaagttgagttgaaaaagttccttatgctgtggttttg

SEQ ID NO: 12993 - DNA, 990 bp, Zea Mays
gaaagacggaccggctaggatgagtgaatcacagagaatcaggcaacgcaggggcagaatatttgcacttcctgaggagccggaggttgctcgtgtttggcttccaaggtataactcgcctggattggccatggctagggcatttggagacttttgtctgaaggatcatggtgtaatttctgtgcctgatgtttcctatcaccacataacggaaaaggatgaatttgttgtgctggctaccgatggggtttgggacgtgctatcaaatgatgaagttgttaatactgtcagccgagtcacatctcgggcctctgcagcacgatttttagtcgaatcagctcaccgtgcttggcgaactcggttccccacttctaaagtcgatgattgtgctgctgtctgcctattcctgaacacaaatgaagcaagtgaatcttcgagttccttggccaacaatttggcagatgctgtacaagttagcactgctcagtgctccaaaactatccaggtgagcgcacctatagacggaaacgaggtgtctgttgttgaaacgaggtgatttgcacaatgatggttgaggcgcaaagtgagcttgcatgctgtgcctgtgactgagatctgctgaacgatagtagttgaggcagagagagcgggggcatgaacatgctgtgctgtgcctgtgattggcatttgtggagccaagatatagcacgtcggtgggtttctgcttgctatttttttctggacgcaagtgtggttattatatgcgacattagatttttataggagaaacataaattgtagggtacttgaagttttggctttaaacatttatgttaacaagatatctgtatcattctttagcctcgttgctactcacagaaaaggttctagagcttgttgatcacataattttattctgatggtcataatttcattgcatgcaatgtggatttgtactcgtggcacgtgaaaattcaaaataaaataaag

SEQ ID NO: 12994 - DNA, 789 bp, Zea Mays
tttgatcaaactgaatgtttactacatttgagttcctattgagatcatcgcatcatttaggagaatgaagaaactcgttcaagacctctcagtaattgaagctgcactcaggacatcatcaaagctggttgtaagttcaaatgggaaacgggtcaggaggttacatccattgccacacaaagaattgaaagattcaaagaaaagcactgttttggtcgaaaatctacctccagatttctcaatggagagtattcaggaaaaattcgcaacagtgggcaaagttgtgaacataacaattaatgatccagaatcagtgaaagaattttcaactgctaagaagcctgacttcaatttaagttttaaggctcatgtacttgttgaatatgaagcagtggaggctgctgagaaggctgttactgccctaagtgatgagagcaactggagaactgggatgaaagtcaggcttctgtctaaacaaagtgtaatgggaccaggaaagtataaaaaaccttctaaagaaaatcaagatgcagtttccaaaatgattgatcagaatcaacattcaaaagaagaccagcttaaaaccttggaaaagatctccggtgctgatgcagtggggattaccaaggacagagataatttgaaacctgtttttatcactgagactgagcaccaagatcagaagccaaatgctagaggacgaaaaggatggtacaaaggtcaaggtcagatgcagcaaaatgcaaacaaacaagatgaattttaagcatggttatcctaagaacactt

SEQ ID NO: 12995 - DNA, 545 bp, Zea Mays
gtcaattccttcactagacttgaagattggcaaattggtcctgagattcgtacagggtttttgaaggatggtaaaccaattaagctaaccaagggtcaagagatcactgttaccactgattatgatatcaagggtgacgaaaaaatgatcgctatgagttacaagaaactgcctgttgacgtgaagcctggaaatgtcatactctgcgcagatggtactatctctctggccgttctgtcttgcgatcctgatgctggaactgtgcgttgtaggtgtgagaacactgcaatgcttggtgagagaaagaactgcaatttgccaggaattgttgtggatcttcctacattgactgagaaagataaagaagatattttgggctggggtgttccaaatgacattgacatgattgctctatcctttgtccgtaaaggatcagatttggtgactgtcagacaggttcttgggcagcatgccaagcgcattaagttgatgtcaaagttggttagcgaaatgcaattctgttaacttgacgctacatttccacc

SEQ ID NO: 12996 - DNA, 2159 bp, Zea Mays
gcgactgctttgggagattgggtgggaaaaggcccttgctgaggaggcgaagtccagatatgacaaggcaagcttcaaagtcgtggacttggatgattatgcagcagaggacgaggaatatgagaagttgaagaaggagaagctagcgttgttcttcgtggcaacgtatggagatggtgagccgactgacaatgctgctaggttctacaaatggttcactgagggaaatgagaggggtgtctggctaaatgactttgagtatgctgtgtttggtctgggcaaccgacagtatgagcatttcaacaaggttgccaaggtagtcgatgagatcctgacagaacaaggtggaaagcgccttgttccagttggtcttggggacgatgaccaatgcattgaggatgacttcaatgcatggaaagaagctctctggccagagttggatagattacttcgggatgaaaatgatgcctctccaggccctacatacacagctgcaattcctgaataccgggttgaattcatcaaacctgaggaggcagctcatttggagagaaacttcagccttgcaaatggccatgcagtccatgatgcccagcatccttgccaggctaatgtggtcgtgcggcaggaactccacacccctgcttctgatcgttcatgcactcatttggagttcgacattgctgcaactggtctcacgtatgaaactggcgaccatgttggtgtatacaccgagaactgccctgaggttgtagaggaggcagagaggttgttgggctactcgccagacacatttttcaccatccatgcagacaaagaggatgacacttcactaagtggcagttctcttgctcctccgttcccctccccaatcacagtgaggaatgcacttgctagatatgccgaccttctaaattcaccgaagaaggcttctctggttgcattagcttcttatgcttcagatcctgctgaggctgatcgtctgaggttcttggcctctgctgctggcaaggatgagtatgcccaatgggttgtggcaagtcagagaagcctgttggaagtcatggcagagttcccttcggcaaagcctccactaggagtcttctttgcagctgttgcccctcgacttcaaccaagatattattctatttcatcttcacctagtatggcaccaaccaggattcatgtcacatgtgcgctcgtgcgcgaaacaacacccgctggaagggtacataagggagtttgctcaacttggattaagaatgctgttccttcggaggagagcaaggaatgcagctgggctccgatatttgtgaggcaatcaaacttcaaactacccgctgatccttcagtaccgattatcatgattggccctgggaccggtcttgcacccttccgtggcttcttgcaggaaagacttgctcaaaaagaatctggagctgagcttggtcgatctgtgttcttctttggatgcagaaacagcaagatggacttcatctatgagggcgagctgaacaatttcgttgagcaaggagcactgtctgagctggttcttgccttctcgcgccagggccttgctaaggaatatgtgcagcacaaaatggcacagaaagcatctgaaatctgggacatgatctcccaaggtgcttacatctatgtctgtggtgacgccaaaggcatggccagagacgtacatagagttctccataccattgttcaggagcagggctccctcgacagttctaaggccgagagcttcgtgaagaatctccaaatggagggcagatatctgagggatgtgtggtaaagagcgattggatgaacattcgttcgtattacacacgtgtacaactactaccggaagagcactgacaatggactagatctgatatttttattgcttctatatttatttttattttcttttgcttcgttctcttcaagagctctttgctttctttgcggttctcccaagagttctttgtacctatgtattacaaattctttatatgtataagatgaggacaattttggcaataagcctgtcacgatgttattagtattgccaaataggctttcgtgtgattatgcataatgtataaatgaatccacaaagagtttaggatttggtctaagcagtggagatgacaatggctatc

SEQ ID NO: 12997 - DNA, 1309 bp, Zea Mays
cccaggctgtctatgtgtggcctaccttcctagctgaggtgataacatctgctgaattccatcctacccactgcaatacgttggcatatagtagctctaagggatccattcgacttgttgatctgcgccaatcagccctttgcgacactcattatcaaatctttgagcagcatgaggccccaggctcaagatcatttttcactgagattatagcctcaatttcggacataaagttttcgaaggatgggaggcatcttctcagtcgcgactacatgactctgaagctttgggatgttaagatgaattccggtccagttgcaacattccaggttcatgagtatctaaggcctaagttatgtgatttatatgaaaatgactcaatttttgacaaatttgagtgttgtcaaagtggtgatggattaagagtagcaactggttcctacagcaacattttccgtgtgtttggttgtggtactggtaacagtgaggcgacaacacttgaagcaacccgaaaccctacaaggaggcagctccagaatcccactagagctaccagatccctaagttctctgacaagggcagttagacgaggtggagaaagcactggaatagatgtcaatggaaattcttatgatctgagcacaaagttgcttcatttggcttggcacccatctgaaaatctaattgcatgtgctgcagccaatagcttgtacatgtactatgcataaacaagccaaatgaacagagcgacagtatttttggtggttgctcccggtgagaaagacacttttagctcctggtggatttgaagccaggagttgctggggagatggtgtatcttgtgccagtcagatgcagttcttttcggtgccatatagagctgtccagagtccaagaggaagtgactcgatcattcccgggaagcagctttgattctgatttatttttttgtggggaaaggcttgtctttcccccataggtccatttagatttaaagataaggccctagtttggcaatttgtagtagatgttaagaggatgacgatgatccaccgttgtattcatgttgggcatgggtttgtaacttcagggtggccgttgaagctttcgataattttatcttacatacggatcaaccttttttttttctatcttatgtgaggaaccttattttcgaggaataccaggaccttcgccatgtttaatgcgaaccctagaataggtaatatgctgtgtcattttattgtacgtacattttaaaatagctgcaagtggttctactgtttagttattataagtatattctttt

SEQ ID NO: 12998 - DNA, 104 bp, Zea Mays
atcaagttaatgatacaatatgtggctcccaacagtatgcttggttttgcatgtcttgtgcctgctattttctaccaaccatttaagtgtgtttgtgatgaata

SEQ ID NO: 12999 - DNA, 2080 bp, Zea Mays
cgagtgtttgagtagtgtgaggcggtgttgcacagtggtggaatgaacaagatggttatcaatcacttggacaagctgtttgtcacaaacgatgctgccaccatcgtgaatgagcttgaggttcagcacccggctgctaaaatcctggtactggctgccaaggctcaacaggaggagattggggatggagccaatctcaccatatcgtttgctggtgaactgcttgagaaggctgaggagctcatcaggatgggcttgcatccgagtgagatcatcattggctacaccaaagccatcaacaagacaattgaaattttagaggatcttgttgagaaaggctcagagaacatggacgtaagaaacaaggaggatgttgtgttgaggatgagatctgctgtcgcaagcaagcagtttggccaggaggatatgctgtgccctcttgtggctgatgcctgcattcaagtttgccccaaaaatcctgcaaactttaatgttgacaatgttagagtggctaagctacttggaggtggtttgcacaattcttctgtggtccgtgggatggttctgaaaaatgatgctgttggtagcatcaaaagggcggagaaggcaaagattgtcgtatttgctggtggtgtcgacacctcggcaactgaaacaaagggaaccgtgttgatccattccgctgagcagctagaaaattatgctaagactgaggaagctaaggtggaggagcttatcaaagctgtcgctgactctggtgccaaggttattgtcagtggagctgcagtgggtgacatggcacttcatttctgtgaacgttataagctgatggttctgaaaatcagctcgaagtttgaactaagaaggttctgccgtactactggggctgttgcaattttgaaacttagccaacccaatgcggacgaactaggatacgcagattctgtttctgtagaagaaattggtggtactcgggttactgtcgtcaagaacgaagatggtggaaattcagtggctactgttgtcctgagaggcagtactgacagtatactagatgatcttgaaagagctgttgatgatggcgtcaatacatacaggtcaatgtgcagggacagtaggataattcctggtgctgctgcaacagaagttgagctggcaaagagattgaaggagttctctttgaaggaaacagggttggaccagtatgccattgcgaaatttgctgaaagctttgaaatggttccaagaaccctggcagaaaatgctggacttagcgcaatggagataatatcctctctttatgctgagcatgctagtggcaatgcgaaagttggcattgatctggaggaaggcgcctgcaaggacatctcgactttaaaaatatgggacctctatgtcacaaagttttttgccctaaaatactctgccgatgctgcttgcacggtgctgcgggttgaccagatcattatggcaaagccggcaggaggtccaagaagagatgcccagcctggtggcgggatggacgaggattagtttgattatagttgttttctttgtatcacgtatgtgaggtttcagagcagagatcatactttatcttggcttttggttctgtagaaggtttgggtgcctggagttcacttttggaaggtctgcacggttgcgcggatatcacataggcaatttgtatgttttttcctggtgtattgcggtgcggatgtatcaaatgattcattacaggggccgttccgtcagttcatcacaccaactgagctcttgtaatgtctcgtttggttgggttgagtactaaagattagtcatttcattttagtccttaaattgccttaaattgccaagcggagagactaaaataaggactaaactgtttgtcttagtctggagtaactaaaagagactaaacaatattaattccaccttttgtcatcttttcttttatgtcagttatattgatggcaagagaatgctaagggtattttagttctgttatgatttatttaatgagttttaaatacgtaggcactaaactttagttttttaattaaattttagtccctgtatt

SEQ ID NO: 13000 - DNA, 340 bp, Zea Mays
cttgaattctttgctcgaagctacaagaagaggctgagggctgttcccttctgcacaatcagcttctcagtattcctattggtacatggtctccacatacggggaggtcaagtagcaggcaactcagaactttgctactgagttctcctctaaatacctgcctggatattctgcttcaagatagagtaagctcaattcctatagttgatgacaatggatccctccgtgatgtctactcactcagtgatatcatggctctggcgaagaatgatgtttatgctcgcatcgaacttgaacaagtgaccgtacaaaatcattcaacacaagtcctttgcagtat

SEQ ID NO: 13001 - DNA, 73 bp, Zea Mays
cgggaggtggaggttgcagtgagctgagatcgtgccactgcactccagcctgggcgacagaatgaaactccat

SEQ ID NO: 13002 - DNA, 1543 bp, Zea Mays
atctggctataaatttttttggcaaattttggtccttttgcagagcagattgcagatcatttaacataaatggctgactcagaggacattcagcccctagtctgtgacaatggaactggaatggtcaaggctggctttgctggagatgatgctccccgtgctgttttcccaagtatagttggtcgtccacgccacactggtgtcatggttgggatgggacagaaggatgcttatgttggtgatgaggcccaatccaagaggggtatcctgactttgaagtatcccatcgagcatggaatcgtaagcaactgggatgacatggaaaagatctggcatcacaccttctataatgagcttcgtgtagcaccagaagagcacccagttcttcttacagaggctcctcttaaccctaaggctaacagggaaaagatgacacaaatcatgtttgaaactttcagtgttcctgctatgtatgttgctattcaagctgtcctttccctttatgctagtggccgtaccactggtattgtcctggattctggagacggtgtcagccacactgtcccaatctatgaaggctatgccctcccgcatgccattcttcgtctcgatcttgctggtagggacctcactgattccctcatgaagatcctgactgagaggggttactctttcacaaccactgctgagcgggaaattgtccgtgacatcaaggaaaagcttgcatatgtcgcgctcgactacgaacaagaactcgagaccgccaagagcagctcatcagttgagaagagctatgaactgcctgatggacaagtgatcacaataggcgcagagcgcttcagatgcccggaggttctcttccagccatccttcattggtatggaagctccaggaatccacgagacgacctacaactccatcatgaagtgtgacgttgatatcaggaaggacctgtatggcaacattgtcctcagtggtggatccaccatgttccctggcatcgccgaccgcatgagcaaggagatcactgcgctcgcgccaagcagcatgaagatcaaggtcgtcgctccaccagagaggaagtacagtgtctggatcggaggatcaatccttgcatccctgagcacatttcagcagatgtggatctcaagggctgagtatgaggagtctggtccagctattgtccacaggaagtgcttctagacgtcacctagccttaattctcctctggaaataccttcgtttgatgacatatctatgggtggttgctctgctatagctcgcagtttttgtgtttgccaatatatccggtaacattgtggagtcagccgtccactgtatgaagtttgttcattctccgactgatttgggcactggcgtgttgcttctccaattttttgtgtggtgcttatgttctcacaaccacaagcatggaagaaaatgactggattgagggagattaaatctaggagtctacttcttctaaccgaacaagccataagatttttttttaggagcgagaggattgagcaggctaaaatcc

SEQ ID NO: 13003 - DNA, 1516 bp, Zea Mays
acaccgcacacccttgcttgtctccaggcgtacttgcgtttagcgtctcttccctgctgccatctctgtccggagggcaagccatggcggcgggcggggacggcgtcgctcgccaggcggagctccgccggatcgagggcaacatctgcttcaagaaggcgcgcctcggcgccgccatcgactgctacaccgaggcaattgcgctctgccccgacgtcgccgtctactggatcaatcgggccctgtgccatttcaagcgcaaggagtgggccaaggtcgaagaggacagcaggagggctcttgcgcttgattacactttagtcaaggtcacattcttgtttcttctttcgtctcaaaactaaagcgccgacttcagttacctctacattatgggcactatctgctggggtgtgcgctactcgagaaggaagaatctgctcttgctatcaaggaattcgaaaaggttctcgactggatttggtgtttctggggggagtacgctcatccacgagttctattcaagggaagtacaaaaccccatccatcttacagtcgacactggcttcactaggggggaggcttccatcaaagcctacatctcatccaatctgtccctcagagatagtcaactcgctgcacaatttcaggaaatccctctggatctgaagatgattgaggcggaaaaggctggatttgagatcctgaaatctactatggtagagaagctccccaatgatctggaaggaatggagtcatcgatggggaagctttacattcttatcgatgagatctacaaatacgtcgatgatgttgtggaaggacgcgtggcacccgacaacagaattggaaggttcatctctgattcttttgcttcggtgccgaaattgtccccggctgctttcgataagacaggataaccttgcgctggtatacctgtcaagcatcacaaggacacaaatcagcatcgccgagaagttgaacactgctgctcaagtgctgtaggtttggcggtgtggcatctggtttggacgtggatggcttgatgctatctgtgatgcttggcgtaagtgtgattggtgacagaaatgcatttttgtactcattattattattgctaaatgagagacctgatggaaagggttagccaacgatgagatcccataatgttgccagaatgccagtagagtggtggatggcgagatgtttctgtttggatagtattctgtgctccaggttgaatatttgtaatgctcgttggttttgtgtagcgacacatcggcaatgtggagcaatgaagagatttgctccacattttacgtcgtcatttagaggtgtggtggcatgcaatgtgatgctgttgttgcaggaaaatcggttttgctgtcctgttatagcaagctttcctcctgcggccctgcttttcatttccctcttgattcttgcctctgcccttcgaaaccggtctaggccgggaacaatcacgtcatcccatgttatgtgtctagcctgaacgaac

SEQ ID NO: 13004 - DNA, 662 bp, Zea Mays
tgtatttagatgtagatcttatatctctgaaaatagcacagattacagagtggaggatgcaatcgagatcctggagcatgtgctgaaggtgagggaagagaagcttggcacggcgaacccagacgtggatgacgagaagaagcggctggcggagctcctgaaagaggcggggcggtctcggaaccggaagcagaagtcgctgcagaacctgttcgggaccaactcgcagcgggcgaagaaggaagccgggaggaggtggtccaactttgggttcagaagctgaggaagctgcactgttggtcgtcgtcgtcgtcgggcggttgtggcctttgtaacataaaggagggatgggaaaggaaaaaaaagcacgtgtaaagatgttgctgtaggttattattattaggaatgtgatggtggtgttggtttgctgtttgtgtatgtgtggcactgcattactgtgttacttgtcttgggttatattttcagtagcgattattgttaactgggtgctgttataccttgagaagagaacattggttttgtcgtggaggaatggtgttgactggtgggtgatgagaattacatgtgattgtttgttagtacattgcttccttccattgatcgagttgatgaggatccctgtgtgaccctgtcagggtttg

SEQ ID NO: 13005 - DNA, 76 bp, Zea Mays
ttttcacgcaaaattcgcgcgctacgcggttgttagtattcgaaccgtcgacctcaccctcgcgcgtaacctcccc

SEQ ID NO: 13006 - DNA, 1533 bp, Zea Mays
ctttgcagcagatcctttgtgcagttcattggtgcacatttctctagctggagaaaagcacatgagaataacatgggttaccaatgataactctgtcccatctgtggtggactatggaactaaagaaagtacatacacaatgaaatctcaaggagaaagcacatcctacagctacttattgtatagttcaggaaaaattcatcatgttgtcatcggacctcttgaagataacactatttattactaccgatgtggagggcagggtccagaattccaatttaagaccccgccctcccaatttcctttgtcattggctgttgttggtgatcttggtcagactagttggacaacatcaaccctgaatcacattaagcagtgtgagcatgatatgcttttactccctggtgatctatcttatgctgattatatgcaacacttgtgggattccttcggcacattggtggagccacttgctagcaaccggccttggatggtgacagaaggcaaccatgagaaggagcacattccattttttgagtcaggatttcaatcttataatgcacgatggaaaatgccttatgaagagagcggatctagatcaaatttgtactactcttttgaagttgctggtgcacacatcataatgctaggttcatacacagattatgatgatagctcagatcagtatgcttggctaaaggctgatcttgccaaggttgatagaaagaggacaccctggctcattgtgttgttgcacgtaccatggtacaatagcaattgggctcatcagggtgaaggcgacagtatgatggcttcaatggagcctttgctgtacgctgctcatgtggatatggtaatagcaggtcatgtccatgcttatgaacgtgcggagcgagtctacaattccagacctgatccttgtggcgctgtccacataactatcggcgacggtgggaaccgtgaaggcttggcccgcaggtaccgtaacccgaagccagcgtggtcggtcttcagggaagcgagctttgggcacggcgagctaaagatcgtgaactccacccatgcccactggacctggcacagaaacgacgacgaagagccggtgagaaccgatgacgtgtggataaactctcttgctggttcagggtgcatccaggagggcagccgtgaccgtgagtcgaggaagatcctgatgtctccttgatgcttagcagtatagcttgggcctgcgatgtactgtgtatataatgcgtgctacttgataatctaacacctagtaaaagttaatgcgtcgtgctgcttgcctgcgtgtatactggagactggtttgatctggcgcgtttgctgctcttgttgtgttgtaccactatggatgtttgtagcaaagtgacatacgacggtgttgtaatggactgaagatgaatagatgatgttccagtaaggagtgttttgccgtgtctaggaagatacatcaaaatataaatcactccctccttatcaaaatacagttttttcttgctttcttttttttct

SEQ ID NO: 13007 - DNA, 689 bp, Zea Mays
atggcaacgacgacgacgcatgcagctaattcatgtacaggggagggagaggggtttcggggctctctcctctcgtcgttaaaagtgccactccggcaaaactcaaaaaaagaaaggcagcgagtgacactgacacggaggaggcagacagagcaactcaactccgcagcccgcaggctccagtcctcagcgagttccgttgcagcctctgctctgctggtgccgtcactcctcctcccactcgtgcgtgtcacacgggaagcagccctcctgggcgacgtccgtgatctggacgcccgtgtcgtagacctcgccggcgcgccgccaccgcggcagcacctcgcggtcggcccacacccacttgccgtcgtacccgcccgtcaccaccaccctgagctggagcgggcccggcggcgcctgcctcgtgctccacgccggcccgtcgtcgcgcgtcatgaacctccagttggacgaacccacctgcgcgacgtctacggcgacgatgtcggtctgcccgccctggtagaggaacctgatggcgaggtcgccgggggccggggccgcagcgtggctcctctcctccaccctcaccgacaggtttctcttgtactcgacgtcgactgcgcggcgtgctgcgaggcgtggggccatgccggggcgcgccatggccgcgaacgcggtgctgctga

SEQ ID NO: 13008 - DNA, 1974 bp, Zea Mays
aatttgccacaaaacccaggcagaatgtctaacctggacaagttctcgctccagtcaacaataacctccaattgtcgcccttggtcctgtttcaaatgtcagcagtcctatagcagtaaatgccgagcgacctgatcggatcttgcctgcagtgtcgacaagtggcttggcacctatggatgctagcagaactccagatgttaagccaagaataacagatgaatccgaaaaggtcaaaacctggaagttggctgacattgttgataatggacatcttcgagctctgcatttgacagacacagacactaatccaagcaaaattgtccgtttgttatatacaaataatggggttgcactcttggctcttggctccaatgctgttcataagttgtggaaatggcaacggagcgacagaaatcctagcggcaagtctactgcatctgttgcacctcacctgtggcaacctgcaaatgggattctgatgacaaatgacacgaatgatggcaacccagaagaagcaaccgcctgcattgcattgtccaaaaatgactcctatgttatgtctgcatctggtggcaaagtctcgttgttcaatatgatgacatttaaggtcatgactactttcatggcacctccacctgctgcaactttccttgcattccacccacaagataataatatcatcgccattggaatggaggactctaccatccaaatctacaatgtccgcattgatgatgtcaaaagtaagctcaagggacatcagaagaagattacggggctggccttttctcaatcaatgaatgtgctagtatcatcagctatgtgtgtggagtattgatggctgggaaaaaaagaaatcaagatatatccaacccccagcaaaccgacctggcactttggttggtgacacaagggtgcagtttcacaatgaccaaacacatcttttggtcgtccatgagagccagttgggaatctatgatgggaatcttgactgtttgcgcttgtggtctccaagagatgcactcccagctccgatatcgagtgcgatatactcgtgcgacggtctcttggtttacgctgggttctgcgatggtgctatcggagtcttcgaagcagaatctcttaggctgcgctgccggattgctccttccgcttacattccaccttcaatactagcctgtgctggacgggtctacccgttggtagtcgctgcgcaccccatggagcctaaccagatcgcgatcggcatgagcgacggcaaggtccatgtggtggagccattagacggggacccgaagtggggatcggcacctccacaggacaatggagcgcacccgcacccgcatccagcgatatcagcggcaccgtcgaccgccaccaaccaggcatctgatcagccaacaaggtgactctggcctgcagcactggaggagattcgttagcgcagagactggtaggacctgtaggagatagggagaaagggtaaacgattagatgacgagaggatgatgctatatttatcaagtccgcagcgcctctcttgtggtggcccgcgacacaggtggggtgattgacagtgacatcgctcgctctaagttaggttttggttcttccctggcccccggaaatcatcacctggcgccgccacattcgaatggagatggatctgctggcatcatcttgcttcctcttttgtaaagcttttcctgctgagtttagtggtaccttagattgtcgtccatttctgccctgttctccgggcagctatttgtagtgtaaaaatatggtggcgtgctggatggtgttatttatgcgtgcgtggcctgtcatgacgaattccaccatgtttggggctatttgatggatgtttactgatcatggctcgaattttttttttcttcgtgccatttgcaattgtagaccgtggacgcggtgtgagttgatgagatttgctggtgagctgtttctgga

SEQ ID NO: 13009 - DNA, 1693 bp, Zea Mays
gctttgggttttggtgctaggagtagatcctaccaaagctgtaagcgcatcccaatttgcatgggcaaagatgttcaaggaatcaacagtgtctaagatggttgacatcccactgtgccatattcctgaggctgtcatcaagactgcgagtgattggatcagtcaaagatcttatgatgccctgggagactttgttttgtggtgtatagatagcatcatgtctgaattgtcaggcccatcagcaggacctaagggttcaaagaaggttgcccaacagtctccaagggcccaggttgcaatctttgttgttcttgccatgactttaagaagaaagcctgatgtacttgtaaatgttatgccaaagataatgggaaacaataaatatcttggacaggaaaagcttcccatcattgtctggtttattgctcaggcatctcaaggtgacctagtgactggcatgttttgctgggctcattttctatttcccacgttatgtgcgaagccaagtgggaatccccttgcaagagatttggttttgcagttgcttgaaagaattttatctgtcaccaaagctcgttctatcttattgaatggtgctgttagaaagggggaacgcctagttccccctgtttcatttgacttgttcatgagagccacatttccggtttctggtgctcgggtgaaggctacagaaaggtttgaagtagcttatcgaacaatcaaggagttggctcttgccggttctcctggctctaaaactgtgaaacaagcatcacagcaacttttacctttgtgtgcaaaagcaatgcaagaaaacaatgcagagctcaccagggaggctgttgatgtgttcatttggtgcttgacacaaaatgcagagtcctacaagcagtgggaaagaatttatcctgaaaatactgaagccagtgttgctgtcctgagcaaaattgtgattgattggaaggatgtgtctcctaagctcagttctgaagctctcaaggcaacagtgaagaacttgaaggctaagaatgaggcagcgctggagtcagcaacagatgctggaaagcaggcatctatcaagaagcagacaagcactgcaaggtgatccttggaaagctgacgcgcagttccacctgcctgaagagcagccttgtgggcatcgccctcgcagttgcagctagtctcgtgctatcatctcccgacatggaccttccgctcgagtgggagaagatccaggcgatggtctcatcgcacctgtcgttctgaacatacctgtccaggatctccagacgtgggtggatctaagtcatggatggctgactcagcagtgaagagagctcaacgggtggtgagaataaggaggggggggggtggataggtggtagaaccgaaaggttacagttttcatgagtcgccgttttttcccgcgcttcctccagcagcagcggtgcatggtaggagggagatgcagtagtcgactttgcagagagttggtttaatcggtagactggtgggtgcgaagaaggttgagtcaaatggctcgaccagaggattaacaccttttgcttttctctttgtgcatctgagatgatgttggcaaacagttttggttatctagaatcttgaatcgtattccgtgatgtgtgcttgtcggctacatgtatctgttgcgttgatatctgcttaaattgtg

SEQ ID NO: 13010 - DNA, 1914 bp, Zea Mays
acagtgccgcagtatcccaagtcccaacaaggtcaagtcgcgtggattcgccactagcgggtattgattaccttgccgccccttgaccaaaccaaataacacaagtccccattgcttgcaccctacagctcctcacacccaaggtatggaggaggcaccaacgagggagccgaagaggctgcgccaggacgccgcggttacttccgccgcggcggcggctgaggagcctcagtacgtgtacctgcctatcgccgacgccatgaaggttcccggcgtccgggtttgcctcttcgccgttgtctccgagatcggcatcaccgaccgcagccgtggcacggatttcactcttaggttgaggattgtggatcaatcatgcatggatggaatctctgtaacagtttttgctgacaaaactactctattgccttgtgtcaagtcaagtggagatgtgatcagtctccataacgtcatgataacgatgcatggggagttctttgtttcatttaacaaagaagtttcttcatttgcgctatttgaaagcaaagtagctgagtgcagcccatatcagacttctgtgaaatatcatggcagcaaacatgacaaagaacttttaacccagatgagaacgtggcttgcatataatcctctaggtctgaaagattttgaattgcagttaagaagtttaaaatctgattctacttttgatctagtatgcaaggttgttcatgtccatgaagataacgacaaattgatattttatgtttgggatggaactgatacccctgctgttgagtttcaggcaactttggatccaaaggcagttgaatcaccccctctatttgaagggccacctctacccagggaggttttgtgcacaatgccaattatcggaactgttttgaggattttttcagatatgcctatcaaggaagtatcccacatgcaaaatagggtttattgggccagattctgtaacattacttgcaaggaagagtttggcatttggaaaggcattttgctggcctctagtaaagttcggcttttatctcatgaagatggtagcgttgttgatcgtcgaaagatgtatgccattcgtaaggccaaccaagttctctgccagccgatggcaagctttccctctaatgttactgttctatcagatgtagaatatgaggaagaatggcactcaacgttaatgcagtctttaactcataaagaggtgacacacaaactcaaaaccttggcccgtgttgtgggagcgtatccatgtcaagctagtggtctccgtttgctgtcaactggtaacattcatctgcggttgactcttgaggatcctacagcgagaattcatgcgtacgtccataagaattatctggtccaattcttcggtggttttctgacagaagaagcgataacaaagaagatgaacaagctacttggtatcccagaaccagaggacagcgaggaaggtgcccccttgactaggaatccaccttggatatggtgctgcttgacatcattctatatggacaaaaacaatccctgggacagcagaaagtaccgaatctttgccacagagatgagggattgaggagggatgctgctcgaatatgcaggaacggccttgcaaatgaaccgaactgattctatgtagtatttctgtgtgctctcgttggcattttgcttggaggggcatcttgctgggatgcagcgagacacgctttagttgtagcctgcgtactgtcagtattattccctagatgcaatgttgttgcagtgctgctgctgaccttctgctccatccagaacactggtagcagtctgtatgcgcgcccacgctacagaactctagattatcttgtgaaatgttagtgcacacagcaccaacttttggcttggaacaaaaaaaaaaaa

SEQ ID NO: 13011 - DNA, 1100 bp, Zea Mays
aaaaaagtttttgtaaagtagcaatatccacaggcccctcgagttatcgacgcacacgtaccactagaatgcagccatgatcgtctcctccttcctcccgctccgctcctccgtcttcgtcctcccctccagcgccgcctcccgctcccgtcccgccaccgccaccctccttccctttccaaggatcaccctcagccggcgccgccgcttggccgccgccgcgactgagagcagcagcagcagcagcgaagaaggagaaggagaagcggcgggcgggagtacgaacgggtccctcccgggcctgccccctgtggaggaggaggaggagctgtgccccgtggactgcgtgacggagttcaagacggacgaggagttccagcgccacctgaaccggtccagggccacgggcgctctggtggtggtggacttctaccggccctcctgcggcagctgcaagtacatcgagaaggccttcacgcgcctctgcaaggggtccggcgacgacggcgctcccgtcgtattcctcaagcacaacgtgatcgacgagtacgacgagcagtcggaggtggcggaccggctgcgcatcaagatcgtgccgctcttccatttctacgtggacggggtgctggtggagtcgttcccaacgagggacaaggagaggatcattgccgtcatccggaagtacacctcggtcgagccagaaccagaacctgaggaagagcagcaggagtgattccatttccactccagtggtggacatcagtttcctcgagggtgcagatagcctgctgaatcagagatatcatgcacaacagcaccacaggattgtttggagattggagtttatacacctatcccagcatttgggatgtgtgagctaccaccagcagtatatcatgaatctggatcaatgtaccactatctgtaatacgagatgatgtatagtttctgaatcaaacatgagcacttatcttgtacgccgtatctcgaacggaactgtgcaggacgcaaattagaacctataaaatttgatatatcgggagagtaaataacaaagtacatcaatacattttttgagaggtttgcatgaaaaaaaaaat

SEQ ID NO: 13012 - DNA, 524 bp, Zea Mays
gcaaaggagtttgaccggcctgcaaatctgatcgagaggccatctctgtttggagcattggttcaagagtacgcgaaccgttcgtccgacgtttagcatttcagggtggcataattttttgactcgagatttgggaggaaacaatgattggaaatttctcggtgtggtgaacgagcaatgctgcattcatgctccaaataaaactgcgagccctcaaaatttcgcgaaacgtaattgggtcatgtggaaggccagaggagaagccacgatcggatgaaggagacatcgagatgactaggatagtaagtagttatcgagatgtatttgagcggtttaagctgaaattttaagactgagctgaagacgatgtatgaatctatgtattgttcaactagaatattactgcgcatgcaaattttctgccgactagtgttaaaacaaacatacaacaaaccaatcaaaagtcagtatgcaaaaaattcaatcattggaacctacaagtggatgttaagcttatggcacat

SEQ ID NO: 13013 - DNA, 2375 bp, Zea Mays
gcaaatttgagcactatggtttcttatctgaaatatggcattcactcgtattcaccaggttgaactttgtcttacaggaaatttattcgattaaattgcctgggaatccaaagcttggagagggaaaacccgaaaatcaaaatcatgccataatatttactcgtggaaatgcagtgcaaactattgatatgaatcaggataactactttgaggaggcacttaaaatgagaaacctgcttgaggagttctctctgaagcgtggcaagcattacccttctattcttggtgttagggagcatgtcttcacgggaagtgtttcctccctggcctcatttatgtctaatcaggagacaagttttgtgacattaggacagcgtgttcttgctaacccgctgaaagtgagaatgcactatggtcatccagatgtttttgatagaatttttcatataacaaggggtggaattagtaaggcctctcgcagcatcaatatcagtgaggatatatatgcaggattcaactcaactctgcgtcaaggatgcataactcatcatgaatatattcaggttggcaaaggtagggatgttggacttaatcagattgcactatttgaaggaaaagttgctggtggaaatggtgaacaagttcttagccgagacatatatagactcggacaactttttgactttttcaggatgttatccttctacgtgacaactgttggattctacttctgtactatgctaaccgtgctgaccgtgtacatatttctctatgggaaaatgtatctggccttatctggtgttggagaatcaattcaaaatagagcggatatactgcagaacgcagccttgaatgctgctctgaacactcaatttcttttccagattggtgtatttactgctgttcccatgattcttggtttcatccttgaatcaggtgttttaacggcttttgttcagtttattacaatgcagttccaaatgtgctctgtattttttactttctcacttggaacaagaacccactactttggccgtgcaatattacatggaggtgcaaagtatagagcaaccggtagaggttttgtggtacgacatatcaagtttgctgagaactaccgtatttattctcgaagccattttgtgaaagggatggaggttgcacttttgttggtgatcttcctagcgtatgggtttaacaatggtggagcagttggctatattttactctctataagcagttggattatggcattgtcttggctttttgctccctatttatttaacccatctggatttgaatggcagaagattgttgaggatttcagagactggacaaattggctgttttatcgaggtggtattggtgttaaaggagaagaaagctgggaagcttggtgggaagaagaactgcaacatatttacagcattcgagggaggatactggaaaccatattaagcctgaggtttttcattttccaattcggagttgtttaccacatgaatgctagcggaggaagtacagctttattggtgtattggatttcttgggctgtgcttggtggccttttcatcctcctcttggtctttggtttaaaccccaaggccatggtacatttccaattgttcctgcgtttggtcaaaagtgtagcgttattgatggttttggctgctctggtccctggcaattttgtttacgaaactcagtgtgagagatgtttttgcttccattctagcatttgtgccaactgggtggggaatcatttcgattgccatggcatggaaacctgtcgtgaagaaattgggtttgtggaaaactgttcgtgccctagctcgcctctatgatgctggaatggggatggtcattttcatacccatagccatttgctcgtggtttccattcatatccactttccagacgcgacttctgttcaaccaggcgttcagcagaggtttggagatatctctgatccttgctggcaacaatccaaatgctgggatctgatggtggcagttccggccttgcttcattaatctgtggacctttcgtacttgaattaatcctcacttctcagttaacagtagcgatgtacatatctgatatctctatgttcaccggagttgtttgccgtgggtataaatatcaacggctatatttctagagttcaccggcttgtacctgtatttttgaacgggtgaactttgtatggcccttcttttgacattgacatgtgctgattacgtggaaaaattgcttttttaggtcgcttcgaacttcgtttttagcaggatacttcagtatccacatgtttttcccgaaatcccggatgggcttgagtaattatttttctagcaacttttctaaaaatataaaaa

SEQ ID NO: 13014 - DNA, 1406 bp, Zea Mays
gcccagtgcagttgtctgcaaggattcttggtgttcaatgctgttggtggtggtactggctctggacttggttcactgctgttggagcgcctttcagttgattatggcaagaagtctaagcttggtttcaccatttatccttccccacaggtgtcaacagctgttgtagagccatacaacagtgtcctctcgacccactccttgctcgagcacactgatgttgcagtcctcctggacaacgaggctatctatgacatatgcaggaggtcccttgacatcgaaaggccaacctataccaacttgaacaggctgatctcacagatcatatcatcacttaccacctccctgaggtttgatggggctatcaatgtggatgttactgagttccagaccaaccttgttccatacccacgtattcatttcatgctttcctcatatgcccctgtaatatctgctgagaaggcctaccatgagcagctctctgtgcctgaaatcaccaatgctgtatttgagccctcaagcatgatggccaagtgtgacccaaggcacggaaagtacatggcttgctgcttgatgtaccgcggtgatgttgttcctaaggatgtcaacgctgcagttgcaaccatcaagaccaagagaactgtccagtttgtggactggtgccccactggattcaagtgtggcatcaactatcagccaccctctgttgtccctggaggtgacctggcaaaggtccagcgtgccgtgtgcatgatcagcaacaacaccgccgttgccgaggtgttctcacgcatcgaccacaagtttgaccttatgtacgccaagcgtgcattcgttcactggtatgtcggtgagggtatggaagagggtgagttctcagaagcccgtgaggacttggctgctcttgagaaggactatgaggaagtcggtgcagagggtgccgatgatgagggtgacgagggagacgactattgagtagctggctaataagtagttctctggtggttaatggttgggttattttgagtatatactctatggttccactccattggatactgctgctgtgtgtttccattttgtactatgtagtaaattgttcgtagccccctattggccatgattgttcatatcatccttctttggtttgcaacgctattcgtccaatttcggtgtatatgctataatgctattatgttgcaagtgtgctgtgctcaaccattgggttttatttatatttagaaacagaaggcattattactctgcgctgcagcttgtttctggatcatgggaacattgagatttgagaagttttgatagcagtctatcactgtgagggcctaaggaggcccacggaggggctgcggtagcagcagccatgggtcctccaaggaagaatagataag

SEQ ID NO: 13015 - DNA, 2812 bp, Zea Mays
attttgcgaagatccggtttaggcctttgatacttttcaagaggtaaagagcaagcgtgataagaaaaaggaggttaaagaaaccctagatccaagatctcgaggagcaagtaactcctgtcgatccagtagaggtggtatggaccgtgctggacgaagcagttcagtccagtctggatccagtggcactgattatgtgacttcaaggtcatccatattgggacctgctgtgccagttaagccaacagttcctagtttgtcaacaaacaaagatgtggtttttaatggatcagttggagcaccacaatcatcatctggttttcagcataattggtttggggtgccaggtcagatgtcaatggctgatatagtgaaaatgggaagacctcaagtgaggtcttctggaaagcctatggctgcagcagacacatcatatgctggtcaaaccccatctttatctagctctgtaaaccagaactcgaaacaatctgctagcacaaccctaccaactacttttgatcagggctttcctgctctcccagaccctattccacatactgtgaattctagtcatggttctgctgggaacaaccatacacatgagaatgattggtttcctcaggatgagcctcaatctggagttcagtccacaggcattgaggcatctggtgaccaatcgctatctgtggcatcactggaccaatctatgttggttgctggtactgcttactcacaagaaaattctcatgcagaagagaacaactcaactgcagttaaagcaacagtgtcttccgaaagacacttggaaattgtggaggaggacaatcattacaacgatgggttattgcagaactgtgcttaccaggctcaagtgcactcctatgttgataatgaagttggggtttctaatgttgatgcagaatcagccgtggcaaactttcagcatttaagcctacagaatgaagatatagttgtaaccaaatctgaagataaccatgcggttatactccctgatcatctacaagctacaaatgcagactgtgctcatctgagctttggtagttttgaatctggtgccttctctggcttgttttcatcaaaggtcacaaaagacagtttggaggacaacgaggtgcatattccagatgaatccccatcagttaatctcgatgccaggaatcaagattactacgacaacgatgctctaaatttgtcagcaaatgaggatgttgagacaagaattggtactaacatggataacattgatggaccttcagtttcacagtctgatgtaccgaggcagggggccatagatgtgcctggtcttcaatatgacatgccatcagttccaagtcatgcatattcaagcacaacgcagccaagtaaaatggaagacccacaaggaaacacacaagcacaacccctttcccatttttctggcttactgcaagcaaatactctacccaattacttgttggggtcaaatcttacccctattcgggagtttgacttctcgcagttacttcagacacagtcagctacaaagtataacccatctgcggcacctaataatctgccagcaatctccatgcaagagactttaaaaccaggaggctttcccaacactcagtctacgcaacatgttcccaatacgagcataccatcgggtcttcctctcccacaacaattgcctgtatactctcagccaactctgcctcttgggccttttaccagcctggttggctatccatatttgcctcagaactactacctaccatctgcggccttccagcaagcgtactcaagtaatgggcctttccatcaatctggtgctcctgctgtgcctggagctggtatgaagtattcgatgccacaatacaagagcagcccacctgcttcgagcctaccacagccatcatcactctctggttatggagggttcggaaatgcaaataatattcctggaaatttcagcctaaatcagggtgctccctctgcgcctacaactttgggatttgatgaagctttaggcacacaattcaaagaccccaatcactatgcagctctacagcagagtgataattcggcaatgtggcttcatggaggcgctggttcaagaacagtttctgcagttccgcctggtaacttctatggtcttcagggccagagccagcagggtggcttccgccaggcacatcagccctctcaatacggtggtcttgggtacccaagcttctaccagtcgcagtcgcaggccagtctgccacaggagcacccccagaacctcaccgagggaagcttgaacaattcccagggcgtaccatcccagccatcgcaccatctctggcagcacagctactaaaccttctgtgctctcttgggagatgcctctctacgctgccaggttatctgcaagccttggcacgctgcgccgtgaagcgaacagactagctgaactgccgtcttgagcggtgctgagcagaggacggtccatccaacagcgatggagtgcttgtttttttccctttctttcccagttgtgttctgaaactaatttaagctgtcgcggtttttatttgatagtgagtggtgttgcaaaggtgctatcttgtaacggtgaagtcctaactcatctaacagatctgcttcccatacccctgtaatatgccattttgttcttgatgcctagaagcttgaagcttctacgtgttgctgctactttcatacgcatgtatgtctatgaagctgaaatcctggtttgcggactgggtgtttggttcctaccatctaaagtttagggcttgtttgggag

SEQ ID NO: 13016 - DNA, 128 bp, Zea Mays
gtatggaagttgtaccagcagctcccaatacaagaacctggcatatgtgctctctttcctgccatactactggcgagcaatgcagtgtctgagaaggtacttggaagaaggccacgacatgaaccagc

SEQ ID NO: 13017 - DNA, 1902 bp, Zea Mays
gcagccagagacgcaggcagaacccgagcggcatcttttctccacctcccacgcgccaaatgacccttctgccctcccgggatctccatcttctccccccttccccttccggtataaacccaccgacgacgcgacgggactcccccctccctccctccctccgcccgttcgttccccaacagcacagcacgaagacactagacagcagccgccgccgccgccgccttcgcccgcgtaaccgggacagcgtacgcgcacggtggatcgcacggtgtgccggcgatgatggcggggaacgaggaccagctgcgggcggtggcggcgcgggccgtcaccgactcgctgcgcgcggccgcgtcccgctgctcggccgccgaccgcgccgcgcgcttccgggactgcgtccgcagcctcgaggccgagaaggccaagatggaggtcttccgccgggagctccccatcagcgtccacctcgtcgccgacgtgatcgactggctcaaggaggagctcgcgcagcaccgccgccgcccgtcggacctcttcgcgccaccagcgccgccgccgccggcaaaggacggagccgtcttggcggacgcggacgccaacgacaagcgcagctggatgagctccgtgcagctctggagctgcggtagccacgacgacagcaccgccaacaccaacggcgccgccgccgccgcccacaaggtgtccagcgcgttcgtggcactggccgccagcccgccggcgccgacgctggcgaggccatccggcgacgcggcgggtaagcccggagccagcgccagcgccatgccggtcgcggacctgtccctctcgtccccggcggccgccgcctctccgagcgccgccagcagcgccgtcacggacgcggccggggcgcaccgccggcaacatgcgcagcagaggaaggcgaggaggtgctggtcgcccgggctgcaccgccgcttcgtcgccgccctgcagcggctcggcggcgcgcaagtcgccacgccgaagcagatcagagagctgatgaaggtggacgggctcaccaacgacgaggtcaagagccacctgcagaaatacaggctgcacacgcggcgcgcgtcgtcggacggcggcgaccagcacgcgggcgggctgtggtcgtcggcgccggagcagcagtacacgacgtcgcagcacagcacgtcgcagtcgcagtcgcagtccgggtcgccgcaggggccgctgcagctggcggtgtcgagcagggccatgtcggccaccgccggggacagctgcgacgccggcgacgaggcccagggcggccggtcggagagctacggctgggagatgccgcagcacgggacgaaggcgtcgtcgtcttgatgatccttgtccttggacgggatcacaattcacaacagtatagaagacggtgcggcgtggggcatggtactgaggacaactgcggaagaggcggcattttttgtacaggcgttgagatgatttcatttttcccccttccttttttttctggtagagggaggaggatgtgatggtgaagatgaactgatctggtgttgttgatcgagagtgaggcatatgagatgagatgttattttttacatcccattgtacaatctggaggctggatcgcgttgttttaacggggatggatcggttttcgcatctacgaaaggagggtgaggattgctagcgttgctgcctgacatgggaatacacgtctgccatctctgctgttcttgcaatctgatgcagattgatccatcctggattcctgtcactgttcatattgctcatgtggttctcttcctgccttctggatagaattcctatcactgtttattgctcatccggttctcttcctgccttctggatagaattcacaaaactgaaagc

SEQ ID NO: 13018 - DNA, 855 bp, Zea Mays
gtttagaaactctttttttaactgtttgccggagccggaggcggtttcgactttggagccctccgaggctcttcagaaagaaacaagaaaatctgcaaacgaattgtttgtccaggagaaggcccccgacgggattattctttctccccgcgtgctctctatctctcccctctttctctccctctgcccgacgactaggccgccgccgccacggccccgccgccgccgccgtgcccaggtctttgtcggtccttgtccggcaacgagcaccctacagatggctgggaggcacaccattattctgatgcagccatctcaaaatagggcttctagaacatttatggattacaattcgattaatcatgcattggatggaatctgtgggctttatgaaaggaaaattagggatatcaacccaatgatcccaaacataacttatgacatcagcgacctctataacttcattgatggcctagccgacattagtgcgctggtttatgatcactcgattcaggcattcctgccatatgatcgacagtggataaagcaaaagttgtttcaacacctgaagaaattggctcagcggtagcacaactgttgtttgttcttgatgccttttatccaacaaacaagcatgcgtgacaataggtgtccaatcagtggtattgggagttgtttcttgtaaactttgtaatgttacatgacagatttgctcccttgtattctggatgtttgactcggatttcattggtggcttgcttgtggttgtggtatgctaaacttgttttgtttcgcagtgctgggaatcagataacccttttgcctgttgtaaaaaagattttttcctgtaaaaac

SEQ ID NO: 13019 - DNA, 73 bp, Zea Mays
actggtcctgaaacccgagatggagtcgcagccgagtcagacttgatctccttcctgttgtggcgcccttgct

SEQ ID NO: 13020 - DNA, 2414 bp, Zea Mays
atccccgtgcaacatggaggtggcgccggcgagatcctcgtcgacccccgtgctgctgccgcatccgctgccccttccaggcgagggggaatcgccgtgccgcgggccggggaggccgcttccgccaccggtgccaaggatgctcgacggggaggggaaagggcctgcagcggacgctcccggtgttttagagactgggagccaaaggatgacgccgttactcgcacggagagtggcggtccaaactctaccaaaggctcatgagcacaacgactttcggttaaatgggactacctgttgtcagcggagaaaggcttttaaagagaagttccaggataagaactgtgatgaaactttgaacttcagattgaacattcctgctaaaagtgctccaagcagtgggttttcaagccctgtacaaagtcctcgaagactgagtaatgtagatttctcatctgctgcaatctctatccaagataccaatgtatggtcagcacggtctctctggtcttctgatgcgatgggatcttcacctccttgtgattcacctgacaagtttgcaggtggtcaggagcgttctcctctctctagtccactgagaagtccagttttaaaatcaagaaacccaagtgcacctccatcaccaatgcatccaaagttgttcccggagaaccatgtttctcgccctgatggcaatggaagtgctagttttcacccattaccgctccctcctgcttctgtaagcccaaagcagacaaatgctagccaccagttagttccaaaagctgagatgccttcggtggctggtcaatggcagaaaggaaaactcttgggtagtggcacctttggatgcgtgtatgaggccaccaataggcacactggagctctttgtgccatgaaagaggtgaatataattccagatgatgctaaatcagtcgagtctctgaagcaattggaacaggaaattaagtttcttagtcaatttaagcatgaaaatattgtgcagtactatggcagtgaaactatcgaagatagattctacatatacctggagtatgttcatcctggttcaatccataagtatgttcatcaacactgtggatcgctgacagaagcagtcatccgtaacttcacacgtcatattctcaagggtcttgcttttttacatagccaaaagattatgcatagggatatcaaaggggcaaatttgttagttgatattaacggtgtagtgaaattggctgacttcggaatggcaaagcatttgagtactgcagctcctaatctttcattgaagggaacaccatactggatggctcctgaggttgttcgggctacactcgataaaagtgcaggttatgatcttgctgttgatatttggagccttggctgcacaatcattgagatgtttacaggaaagccaccttggagtggtcttgaagggccggctgcaatgtttaaggtgttgcgcacggacccaccaattccagataacctgtcccctgaagggaaggattttctgagatgctgcttcaagagaaaccctactgagcgaccaacagcaaacaagttgctcgaacacccatttatccaaactttgaaccactacagcccacatagcgttgtacattcattttcgggaattaaatctccagatactgtgcacagcagtgcaagagataaagtaccctggaaaagtgattcatatatgagagggaaacatgcaaatggtgaaacaagcagtgctcggtcgtcagagtcattggcttatcggttgatgacacccctacccaacttgggaaccaatagtttgtcacctccacctttgagttcggcctccagttctggctctgcagcacatacaccgaacagtatgcatttttcagtcccataccatcagcctagtcctttgccaaagcctaacgggaaggaagcaataaatttggtttcgcattgaataacagcatgccacctatcacaacatctgggcaaagtccacataaacagcgcaagtgtatccgtccctagcgtctgacccttgtactgccagtaatagctaacaattttctgggtcgtgtaaaaataatttccatgtaaagagatcaccgcgatatgatcacagggaaatgctgctaaatgagggagctttgtgaaatctgttgtatcgtttgatttctgggaaactgattggattgcccatgtaacatatttttattagggtgtagctgtaggtgaaactaatggtcaagattgtgccgacaaataggacattagggttgtagctgtagcgtgttgttgatgctgtgtaatgatcatacttgatgtaatcattattgatttttttggggaaggtaataatgcacgtcaattggcaaaaggggattgagatcgcagatccatgtactccctccgtt

SEQ ID NO: 13021 - DNA, 1290 bp, Zea Mays
cggcgacaagtttttgagaacggagcatggtttttaaatcgggtttgtaagttttagatctttatgtcaactaccaatctgaggcggcgactccatcatggagacgttgatggaaggaaaaacgagcatgttgacatatccagtgctgattccctcaatgaacctctattagggaagtccaatgatgacaactttggatcagaggtgtatgatcctagaaaacaggatctgtgggatgatgatatgaagaaagaacaactacactggtcatttcttttctcaaacttgattacacaatgggcacaatggttagcaagcattattgtgagctcaggatctatctttggtagattatcccccttctcttcagagaaccaaataaatccagtatatcttagccctttacaggaacaaaggttggatactttaagacacagattgcaaatctcttttgatggctcccgtattgaacatcaagatgccttgaggcaactctggcgtttagcttatcccgctcgtgagattccaccactcaaatctgaattatggaaggagatgggttggcaaggcaacgatccatctactgatttcaggggtggtggactcatatcgttggagaacctcatcttttttgctaggaactaccctaattcatttcagatgcttctgaacaaagtacaagggcagagatcagattgggagtacccttttgcagttgctggtatcaacgtttcattcatgctggtccagatgttggatctgaagtcaagtgttccatcttctaagtatggaattcgtttccttgaattgcttggacgtgatgagaacgcctttgaccacctgtactgtgtggcctttcggttgcttgatgctcagtggcttgtgaaacgtgcctcctatatggaattcaatgaggtcttgaaatcaacaagaactcagctggagcgggaactggttctagatgatgtgctggaggtgaaggacctgccgtcctacactatgctggatgagtaagctaaagccgagctgttgaacttggacgctggagaattgactaagctggtctgatggctaatagttatctagcgtatgctgatgtctgatcctaaatgcttaggcggcccacatgccattttacattgccgcatattttttttcttgttgtatactgaggtcttatgaggtgtttatatatgattcctttgtaaatattgtgtttgttatatgttatccttttggacatgctggttccaaggaaataaagcaatcgatctcgtattcattttcagc

SEQ ID NO: 13022 - DNA, 998 bp, Zea Mays
gtggagaggtggcaagtgcaacagcaacattcgtgatgatgttctcctcctccctctctgtggtggagttttacttcctgcacagattccccctgccttttgctggctacctcatcttcatttccatattggctggattctggggccagtgtttggttaggaagatcgtgcatgtgctcaagagagcatcgcttattgtcttcatcctctcctctgttatcttcgtcagtgctcttacgatgggtgtcgttggaacccagaagagcatttcgatgatcaacaatcacgaatatatggggttcctcaacttctgcgagtaactcaaacaccatcagactgtcgatccgtccgggagaatccaggccaatgcctaattgacctcatctccctcaaaatctagaagaataaagtcgccgagtatgtgcacaagttagctcctcgccaacatgtgcgcatttagaccgacagagtcgctgtagtgaattcagctcgtgttagctcctggctaacgagctgaccatacggctttagttttgtgaagtgggcgcgatttcgtcatgtcatgcatgtgttagctcctggctaacctgcaaatgcgtgtgttggtgcaggtttttgtcacgtctgcgtcagctcctggctgaccagcagttgtttgtcgttcattctctgcgtcagctcctggctgaccagcagttatttgttgttcattcttgcgctagcaccaggctaggctgcaaaactgcaaatatttgttgcatggaacattgtaaatatcagtcaattcccattctgtttgtgcaagccgagtgcgtttcaagccgtatttccgtgaaaatcagaacatgttcgctgcggcttccaccgacttctgttttttctacagtatttttattatagctaaagcagtccaaacagctttaatctgtctctttgagtgaagatgctgttttggacctaaaatatgatggatcgaaatcatataaagcactggcaat

SEQ ID NO: 13023 - DNA, 3452 bp, Zea Mays
ggcggtgtgtgtgggaccagggtggggggcttccttatcttgcagccgaggatctgggaagcacccacagcttatgccttccacccccagatgggctgttgccaatggagctggagttatattaagtgtctgtgatgaggaggtagctcgttatgagacagcaaatttaacagcagcagctgttcctgcgcttctgctacctccaccaacaacacccttggacgagcatttggtggctggcctgccccctcttgaaccatatgctcggttgttccatagatactatgcaattgctacaccaagtgctacacagaggttgctttttggtcttctggaagcaccaccatcatgggctccagatgcacttgatgcagcagtacaactagttgagctacttagagcagccgaagattatgcttctggcatgcggcttccaaaaaattggatgcatctgcatttcttgcgtgcgattggaactgcaatgtcaatgagagctggcattgctgctgatacagctgctgctttgcttttccgaatactttcccaaccaacgctgctttttccaccactgagacatgccgaaggagttgaagtacatcatgaaccactaggtggctatgtatcatcatataagaagcagttggaagttcctgcatctgaggccactatcgatgccactgcacaaggcattgcttctttgttgtgtgctcatggccctgatgttgagtggagaatatgtaccatctgggaagctgcctatggtttgctaccgctaagttcatcagcagttgatttgcctgaaattgttgtagctgccccgcttcagccacctacactgtcatggagcctgtacttaccattattaaaagtatttgagtatctacctcgtggcagtccatctgaagcatgccttatgaggatatttgtggcaacggttgaagctatacttaggagaacttttccttctgaaacatcagagcaatccagaaagccaagaagtcaatctaagaaccttgctgttgctgaacttcacacaatgatacattcactctttgttgaatcctgtgcctcaatggaccttgcctcccggttgctatttgtggtgttaactgtttgtgtcagtcatcaagctttgccagggggtagcaaaagaccaactggtagtgataaccattcccacgaggaagccactgagcattcaagattaacaaatggaagaagcagatgtaagaagagacaaggccctgttgctacgtttgattcatatgttctagctgcagtttgtgccttatcttgtgagctccagctgttccctttcattactaagaatggatcacattcaaatttaaaggattccatgaagattatcatatctggaaaaaacaatgggatgaataatgagctacacaacagcatcagctcagcaattcttcatactcgcagaattcttggcatcttggaagccgttttctccctgaagccatcatcagttggtacctcatggagctatagctcaaatgaaatagttgcagcagctatggttgctgctcatgtttctgagttatttcgtcggtccaggccatgccttaatgcactctctgcactaatgagatgcaagtgggatgctgagatttcgaccagggcatcatctctctaccatttgattgacttgcatggtaaaacagtttcctccattgtgaacaaagctgagcctcttgaagctcacctgacccttacaccagtaaagagggataatcaacatcaccgtgaggaaagcaataccagctcattggatagtgtcaagttggaaaacaagaatggttcaacatcacacaagaaaaacggtttctcaagaccactcttgaaatgtgcagaagaggtcctactgaatggcgatgttgcaagtacatctgggaaatccattgcaagcttacaggtggaagcatctgatttggcaaacttccttaccatggatcggaatgggggttaccgagatgtctgcagaaagtacatcagctcaccaaggatggaggaaggttgttgatgcactttgtgatgtcgtttcagcctcaccaaccaaggcatcagctgctatcgttctccaggtcaagatattgctatattgcacgtttggtcaaaactaaatttggtttaaagtttgttcgatttatttcaaaacaaattcaattttctttttctgattaatctatttcaaaacgaacattctctgtttttttttggtttctgacatctatttcaaaacacattttaactacaatgcctaggtggaatatggacctgtttcctagtcatatttcttgacgcttattttttttttcgcaggccgagaaggacttgcagccttggattgctagagatgacgaacaaggtcagaagatgtggagagtcaaccagcgtatagtgaagcttatagctgagcttatgaggaaccatgacagccctgaagcgttggtgatactcgctagtgcctccgaccttctacttcgtgctaccgatggaatgctcgtcgatggtgaagcttgtactttgccacagcttgagcttctggaagtgaccgctcgggctgtccatcttatcatcgaatggggagattcaggtttatcagttgcagatggtctttcaaatctgctgaagtgccgtctatcaaccaccatccgctgcctttctcacccaagtgcacacgtgcgcgcactcagcatgtctgtcctccgcgacatcctgagcaacggatccgtgaaccccaacaagacaatccaaggggaacagcagcggaacggcatccagagcccgtcctaccggtgcctggccgcaggcatcatcaactggcaagcggacgtcgagaggtgcatagagtgggaagcccacagccgccgcgccactgggctgacgctcgccttcctcagtgccgcagcgaaggagctcggctgccctctcccgtcatgacaaggccattcctggatctgacatcggcttccaattgacggtcagtgctggcacagctgctgcagggtccgcgagtaggacggctctaatctctccatcacgtgttattatctggtgtttccataatgcgatttgatttcaatttggcgttagatgttgtacacgtgtatttaactgcttgagttgtacgtaatttgtatacttgtaactttgtttaataatatggctattactcaagaagcggaacatatcttatcctttttatatgctgctgctagatccgttcaacgtgagtgccatgcaaatgtccacgaaatgtttagtatttgttagggggaaaaggtctcggtggaaggtaaaataatttctaactgttattcaggataaatgatttaacgtggtttgaattattacaaccttcgtcccttaaccttcatcagactattttgtcagatggcatcgctttgtctaatcagcggagaaccaag

SEQ ID NO: 13024 - DNA, 1393 bp, Zea Mays
ccaattcccatcccacccccgcacccaccgtggcccgagtagccgtggccgccgcggcaggccggcagcgccctcccggcggtgagcgcagcccggcgcgcgcgtcgcggccaccgccgcgctcgaagcgcccagatctagggcctagcggcccccctcctccatggcgcggcgactgccgttgtggacagcgctgctcctccccttcctcctcaccggcgttggtaccgccgccgccgcatccccgccccacgatgagtgcccggtgcctactatcgtggaatccgttcttggtactcgagacacgtgctcgacgctggatcttggcaacccggtcggcgtcgtggagggggatgagttcaccttagcaacggcagttaatcttcttcatgcaaacaaggatgactatattgctgtacttttctatgcctcgtggtgcccattctcacaagaatgcaaaccaaatttcgagacactggcctccttattcccaaccattagacattttgcatttgaggaatctgcaattaggccaagcataatttcaagatacggcatccatggtttcccaacactctttctcttgaattcaaccatgagagtacggtatcatggaccaaggactgttaaaccacttgcagctttctatactgatgtctcagaaatcttaaccttgttcttggtggttactatactttaagtcatttacggaagataaattaatgtggtgaaggtatcaatgcctcggtcaatgtcaagtcaactgcaggggagaccatggtacatcccttgcacgatattgagcggcaaaaggatgctgaacaggaaaattgcccgttttggtgggctcggtcgccagagaaaatacttcagcaggatacttatctagcattggcgaccgcatttgttattttgaggctgctgtatcgtctttttccaaagattgattcctttgctagatgggcatggaggaggcataatctgtttgcaaacttgatgggggcacatgaatatttcctcacctaccttgagcaaggaagacagaagtttcatcggctatacccttcaagttcgaagcgaggaaatctgcaggagggggcaatgaacgctaccgcttgggcctccaaatcattagcatctgtttcgattggagaaccaagtgcgattggaaggacaaactctaccagtgagcttagatgaagtgtaaccctttttttctccacagagatatatgtacagtacagtagagcgatcttatggacacccagaatctgttgtaacggctgtatttctctttgtatcctctcctccttagaataagtatatccatggttttgcacctttttttgagaataaggggcgtctcaacgcctcccaaattagatcctgcact

SEQ ID NO: 13025 - DNA, 925 bp, Zea Mays
ggacaatgttggttggtggaatttgctccaagagggccactttgaggtgtcaggagctgttacgatgagggcaagcgtacagccgaaacgttgaccatggattaccaccgtggtgccaaccttgaggttaggatcgcacgtatcttcaacacatatggccctcgcatgtgcattgacgatggccgtgttgtcagtaacttcgttgctcaggcactgaggaaggagcccttgacggtttatggtgatggaaagcaaaccaggagtttccaatatgtttctgatctggtcgagggtctgatgaagctgatggaaggcgagcatgtaggaccatttaacctgggcaaccccggcgagttcaccatgctggagcttgccaaggttgtccaggacaccatcgaccccaacgcacggatcgagttccgtcagaacacccaggacgacccacacaagcgcaagcccgacatcggccgtgccaaggagctccttgggtgggagccgaagatccccctccgcgagggccttcccctcatggtcaccgacttccgcaagcgcatcttcggcgaccaagacaccgcggctgccaccaccggaaaccagcaaggctaggacggaagaggagcacgggacttggaaatttttggtggcctgcttctagctgcttggtcgaccctcctctccttactgacaaaagctatggccatgtagttcgtcgggaatgtgtcgctgaaataccttggttgatgctgtaatgctattctttctcctgtattttttctctctcagttcgctcagccattagctatacaaaaaaaattccagttgaaccgttggggataaacctggatgatctaattctttgttgagagcatagcatcatatatatggtatagctcacttttttttgtttgcttttgcaagtgtgccc

SEQ ID NO: 13026 - DNA, 1781 bp, Zea Mays
ggtgtttccctttttgctacctccattccattgtctttccatccccggttggccggttccccacgcccaccttttcttcttcccatctcgtctctctcttcagcgcgcaaggatctcttcgtcggggagagaggaccaaggaagcgcccgcggagagagatggcgctggcgatcctagcgaggcggcgggctgcagcggccgtgttgcggcggccgcagacggcggcgggggcggccgtgtccgcctggagggcgtacgcggcggcgggcgaggagagcgacgtggtggtggtgggcggcgggcccggagggtacgtggcggcgatcaaggccgcgcagctggggctcaagaccacctgcatcgagaagaggggcactctcggcgggacctgcctcaacgtcggatgcatcccatccaaggctcttttgcattcatcacatatgtatcatgaagcaaagagttcttttgcacaccatggagttaagttttcaaatctggaagtggacctcccagccatgatggctcagaaagacaaagctgtggcaggactaacaaagggaattgaagggctctttaaaaagaacaaggaataacaattgatgagaagaaagttgtttcatctactggtgcactgtgcttgtcagagatcccgaaaaaactggtggtaatcggagcaggttatattggccttgagatgggttcagtctggaaccgccttggttcagaggtcactgttgttgaatttgccccggatatagtaccatcaatggatggcgaggtcaggaagcagttccaacgcatgctagaaaaacagaaattcaagttcatgctcaagacaaaggttgttgggtgtgataccagtggagatggcgtaaagctgacactggagcctgcagctggtggtgagcagaccatccttgaagcagatgttgttcttgtctctgctggcagaagcccatttacttctgggattgggcttgaaactcttggtgttgagacagacaaggctggcaggatccttgttgataagcgcttcatgaccaatgtgaagggagtctatgcaatcggggatgccatccctggtcccatgcttgcccataaagctgaagaggatggtgtcgcatgcgtagaattcattgctggaaaagaaggccatgttgactatggcacagttcctggtgtggtctatacacatccagaagttgcatctgttggcaagactgaggagcaggtgaaggctctaggaattgcctataatgtggggaagtttccacttttggctaacagtcgtgcgaaggccattgatgacgctgaaggggtagttaaggtgatcgcagagaaggaaacagataagattctgggcgtgcacattatggcacccaatgctggtgagatcatccacgaagctgtcgtcgccttgcagtatggagcatccagtgaggacgttgctcgaacatgccacgcacaccctaccgtgagtgaagccctcaaggaggcttgcttgcaaaccttcgataaagcaatccacatataatttctcattttttgtgtccaaactccaaagtttgtggtaattttgggtctgttggaaaaaaggcccctgattgtccttttgtttttgtcggcaatactgtgaattgaccctttgagttgtccatcttagcggggttttgtgcttccttggcttggtttatccatccaaataataacctgatactatgttttacattttatgcccatgaaccattgatggatatacatttctaaggttccagtaacc

SEQ ID NO: 13027 - DNA, 902 bp, Zea Mays
catttatgtcaggagcctgacattatgtcgtactgcgttcatccacaagactctgtcggcattggtgaacttgcacttgatccaactttatttggatcatcaacaacacttctaaacgctgatcatcaggaggtttacttcaacggaatgccagaatggcacgggaaaatcctccgcaggcatggagatgaatttgagcgtacttctgacgggtattatagagctcatgggcgtgcagatgatacaatgaaccttggtggaattaaggttagttccattgagatcgagaggatctgcaacagagtacatgacgccatccttgaaacagcagctatcggggttccacctgtagggggtggccccgaacaactaaccatagccgtcgtgttgaaggaccagagctctcaaatagaggacttgaaccagctgaaactagcatgcaacatggctctgaagaaactgaaccctctcttcaaggtttcctccgtcgtcatcgtcccgtccctccctaggaccgcctctaacaaggtcatgaggagagtccttcgcaaggagttcagccaggccgcccaggcaaagcattcaaaaatataggtagttattagaaataattagtgttttctgctgcaaatgcacctgcagaaagagtaaaacaccaaactgggcatatcgggaagtcctgttgtttgccaccaaaacggataaatgagatgtacttagatttcgggaaataagggagctgtattcctgccaacgttcagcactcacttgatgtgctgcactaataaaacactaatgcaatcacttgcattagatcacagtctgaactctaagggcttgttcgtttacgtcggattgcacctggaatcgttccagctaatcaaagtttatataaattagag

SEQ ID NO: 13028 - DNA, 937 bp, Zea Mays
catggaaccttgccttgcttgtcattatattctctatgctgccttttctagcttctggatgctgcaagccaccgacgtcatgtgcgttcagctacatgaatgagacgtactggacacaaaaccccagcgtcccgacggtgaccaacgacccagactgcaaaaggtggagcaacgaccagcagacgctgtgcttccagtgcgactcgtgcaaggctggcgtcctcgcgggcatcaagaagagctggcgcaaggtggccgtcctgaacatcgtggtgctgattatccttgtgatcgtctacgtcgcgggctgcgccgcgttccgcaacgcgaagaggatcgagaacggcgaggcggtcggcatggcgcggatgaccaagtcccatccgagcaggttccagttctaggccgctgctccgctgccactgcgggttcgaaagctcttgccttgtacaaatggcctgtggggtgtggtcctaaggcttgggcttcgctatgtcttgctgaattgcggattctactgcatttggtggtggaaatggaaagtccagtgtagtttggggttgtgtttgtttgagtgtttagggtaggcctattatgtggggttggctggggtacaatatgagatctgcaagaaacaagagaagttgaatcatctaggagttgttttgtaaggggagatctttaaattctagggggatagttgtatgatggtgccagccatgatgcagtgttttctgaatttctcagattgtatggcaatactagaggtatgatgatatggctgtactgcagcttccaggactgtaggggtgcttcagctctgtgaagtgtgaactgtgtggtatggggagaattctgatgcctgttgcaatttgtcaatggccaagtcctaggtgattgttgtgggccctcattgcagcctacaaaacccttttct

SEQ ID NO: 13029 - DNA, 520 bp, Zea Mays
ataacaagtgaagaagcatgttgatgtgtgtcccaatgaaaaagcatccggtacgtcttgtgttgctgctgtgtttggaagtgggattgcacacgctgaggatgaagttccaagcggaggtgattcacaagagccgtttgccgaatacgatggtaccagcaatgaatgtgatgtacatcattggcagaaattctagcttggctgcatcagcatggtaaatagggttttgaggattcgggggtttgatgtcctgtacgcagcagcagccttaaaagtttctgtgcccagccagcatctctatttggtttgcaaatgtaattactagtttgtactgtcttgtttttggcaaacttgctgcgagcctcgtgcttagtttggtttatttatttatgaactttaggcctgttcgaagcacccagtttgtaagaaaatggattatataaactgaagtgattccaaatatatcagtttatgtctcagtttataaaaattggattaccagtttctaaaaaaccaagaa

SEQ ID NO: 13030 - DNA, 1249 bp, Zea Mays
tgccaatttgacttgcagagtgggccccacatttagcagtgctagtgttggagcaaaacgaaaaggtggtcctggagggttaaacaaagtctgtggtgtgtctccagagctgcaagctatcgttggtgaaccagccatggctagaactgagattgttaagcagctttgggcatacattcgcaggaacaatttgcaggatcctaacaataagagaaagattatatgcaatgatgagctccgattagtttttgagactgatagcacggacatgttccagatgaataagcttctgtccaagcatatacgtcctctggagagtaaaaatgattcgaaaccagaagcaaagaaattgaagccacagggtgatgaaccaatttcttcagttgaaactgatgttaaccaacttccccttatggtttctgatgcgcttgctaccttttttggtaccggagaaagagaaatggtccattctgaggctgttaagcgtgtctgggatcacattaaaagcaatgatttagaggatccagagaatcctacggtgatactgtgtgactcgaagcttaaacaactctttggacgtgaaagtcttaccgctcatggtgtctcggaggttgctttcagaccacctttacacgcaatctaccaatatctgactggcgatacgattttctggactcggctgggctaacatcctgggtagtaggcgctgatgaaaggacaagggatctgctcaaattaagtgttgtatttgtatcctccatattggtgaagactgatttacagtagtaagggaaaaggaaatggcagttgtgttgcatactatctagtcagacatagtagtctacgtgacttggaatgatgcggcgttaaactaaaaaggacagcgagagctgatgtaaattcggcagccgtataccgtaggcgcgtgcgttttctggtaagactctcttgcattgctagtgccctaagttgactcgaaacatctgtacctcgaaatgttgctgtgttaggtgatacctaaccttaatacagtttagatcgttatccttactcatccttttcctgaacccctgcatgtatcatcattgtgtgtgcatcgtatgcggcagcagctgtttacgaaaggaacagctagctactgcttttttctgttcctgcatgatgcaggccgtttacaagatcctgcctactgtacaaggctagatacttgctccttgccctcctggtggtgctgctggtggcgacggcg

SEQ ID NO: 13031 - DNA, 1483 bp, Zea Mays
aaccactttgcatgtgttcatggttaccttttaaagaaaagcgcaaaaactaatgggtggagcaaaagatggtttgttcttaatgagaagagtggaaagcttgggtacacaaagaaacaagaggagagacattttcgtggtgtcatcactcttgaggagtgcaaccttgaggaggtagaggaggaagagccttctaaaagttcaaaggactcaaaaaaggcaaatggatcagaaaaaatctcaagtcttgtatttaagattactaatagggttgcatacaaaacggtcctcaaagctcacagtgctgttgtgttaaaggctgagagcatggccgacaaggttgagtgggtaaataagatcaaagctgttattcagagcaaagggggttctttcaagggtccaagtactgagggtagttcaatgaggcaaagcaattcggatggcgctttagatactatggcacgtagacctgctgatcctgaagaagaacttagatggatgtctcaagaagttcgtggttatgtcgaggctgttttgaatagtctggcagcaaatgttccaaaggctattgtgctttgtcaagtggagaaagcaaaggaagacatgcttaaccagctatacagctcgataagcgggcaaagcaatgctaagattgaagagctgcttcaagaggaccataatgctaagcgcagaagggagaagtaccaaaaacaatcatctctcctgtcaaaacttactcgtcaactcagtatccatgataacagggcatctgtttcctcttattctaatgacaccactgaagccgagagccctcgaacaccaacccgctcaggtgaggactggaggtcagcttttgattccgcttcaaatggtcctgttgctggaagcacaaacagtcaatcaaggtccaaaagtgctgacggtcgcagtcggcgctatgagaacggggacgtgagctcaggtgccaactctggcagccggcgcacaccaaaccggttgccaccagcaccgccaaaatactaatcgtgctgattggtattcatgaacatttatgtattcttgcctggcacatgcgcccagatcggctgctagagattgtggtgtagtggatggagtatcgggtgattgcgtgaacattgtgttcgcaggtcgctgcgtctcagatgagctgtttatagaaaaatatacaggtaaccgtggtttctactgtttattatctctgtatatttatgacgtccctgccttttgattttgttggggcattcgatctgcttccgcacttggtcgatctaggacaacggctgtcagactaagatttatcttgtcctgccccgcatattgttcgttgccactgacgattcttatttagtcgtggtttatctctactacttattaaggtagtaagggtagtctgtcattttctgttctgtcttttttcattttctgttttgccctcatccctgttatggcttaaaaaataaaa

SEQ ID NO: 13032 - DNA, 1298 bp, Zea Mays
aaacaaccatagctcgcaatggaccggaggaggcccacggaggattcctttgagctccctcggcgggactcctcaagagacgcagatattgaaatgggaatgcatcaggctgatgcttcagacaacttgaaagatttcttgaagaaggtcgatgcaattgagagtataattgcaaagctgtcaaatctattgaataagctccagactgcaaatgaggaatccaaagcagttacaaaagcaagttccatgaaagcaattaagcagcggatggagaaagatattgatgaagtggggaaaattgctcgtcaggcaaagacaaaagttgatgaactggaaagagataacctatcgaataggcaaaaacctggatgtggaaagggttctgccgtggaccgatcaagagagcaaactactggagcagtgaaaaagaaattgaaggaacggatggatgattttcagaccttgagagaagcaatcaggcaagagtatcgagaggttgtcgaaagaagggtttttactgtaactggtaatcgtcctgatgaagagacaattgatgacttgatagagaccggaaaaagtgagcaaatattcaaagatgctatccaacatcagggaagaggccagatactggacacagttgctgaaatacaggagcgacatgatgctgtaagggatctagagaggaagcttttggagttgcaacagatatttatggacatggcagttcttgtcgaggctcaaggagacatgatcaacaacatcgagacacatgtctcgaatgccaccaaccacatacaacaaggcgtgagcgcgctccagaacgcgaagaagctgcagaagaactcgaggaagtggatgtgctacgccatcatcttgctgctggtgatagtggcggtcattgtcgtcgcggtcatccagccatggaagaagtgagcctagggtggctctaaacagggaggagggcgtgggagatacgtttttttttggctgtctgtgtaatatctgtgcagttgttgtgggtggttctgtgatttatggttgtacttatggtcggcaccagagaagctttggtatttccattctttctgtttgggatagttcgtgcagtccattgaccatagctctcagaaatgttattgtggtgaccatatattcatatgtcggtcagctgatgaaaagaatggtgcttctgaatctttccacaaacagtgtgctggtgcccggtaatggctgttggattaatgtaggtttgattcaattaatatttaataatagtcaatgctaatagtctactttaa

SEQ ID NO: 13033 - DNA, 719 bp, Zea Mays
cactgctctgttgacaagttgaataaatgctgcgtaccttatccttcgaggcatgaaaacacttcatctccgtgtgcaatgtcagaataacactgctcttcggatggcccagtttttagaggaacatctaaagattgcccgtgtctactatcctggcttgcctagccaccctgaacatcacattgccaagagtcaaatgactggctttggtggtgtggttagttttgaggttgctggagactttgatgccacaaggaaattcatcgattctgttaagataccctatcatgccccttctttcggaggctgtgagagcataattgatcagcctgctatcatgtcctactgctctgtggcttataaacagggattcaaaggagcagagggacatctatgggatcaaggacaacctgatcaggttcagcattggagtggaggattttgaggaccttaagaatgatcttgttcaggccctcgagaagatataagctccaatccatttgcattaataaagttatgaggtgatggttgtctggatcttgtagagatttgtgatgatacatgagctgttgactgcgattaagttctcttgtgcttattttattctttgaattcaataagctgtggttgctgcatcttgcatgtagtgttggacttaattttacttgtcaaattacaatagtttggtcccataataagaaaaaagtacaaatgagaag

SEQ ID NO: 13034 - DNA, 3532 bp, Zea Mays
gttataaataggatatggatggcggagtccaattcacgccatttgaaatttacaaacatatactcagcaccaatttaatgcacgtgagagcgactggggtttcacatcatttatgcctttgagtgacctatatgacccaagcaggggctatcttgtgaatgacaccattattgtggaagctgaggttgctgtccgcagaatggttgattattggacttatgactcgaaaaaagaaacaggttttgtaggtcttaagaatcaaggtgctacctgttatatgaattctctccttcaaacgttataccatacaccatattttagaaaggctgtatatcatatgccaacaactgagaatgacatgccatctgggagtatccctttagccctgcagagcctgttttacaagctacagtatagtgacaacagtgtagcaacgaaagagttgactaaatcctttggatgggatacctatgattctttcatgcagcatgatgtgcaagaactcaacagagttctttgtgagaaactggaagataagatgaagggaactgttgtggaaggaacaattgaacaattattcgaaggccaccacattaattacattgagtgcattaacgtggactataaatctaacagaaaagaatcattttatgatctacaacttgatgtgaaaggttgtcgtgatgtttatgcatcatttgataagtatgtggaagtggagagtctagagggtgataacaagtaccatgcggagcgttatggcttacaggatgcaaggaaaggtgtgcttttccttgatttccctcctgttttgcagcttcaactgaagcgttttgaatatgattacatgcgagatacaatggttaagattaatgaccgctatgagttccctcttcaacttgatcttgatagagacaatggaaaatatctatctccagatgcagatcgaagtattagaaacctctatactcttcacagtgttcttgttcatagtggaggagtacatggtggtcactactatgctttcattcggccgacactctcggatcagtggtacaaattcgatgatgagcgggttacaaaagaagacactaaaaaggcacttgaagagcagtatgggggtgaggaagagttgcctcaaataaaccctggtttcaataacacaccattcaaattcacaaagtattcaaatgcctacatgcttgtctatatacgtgagaatgacaaggataaaataatgtgtaatgtcgatgagaaggatattgctgagcatttgcggataaggttgaagaaagaacaagaagagaaagagcacaagaagaaggagaagtctgaagctcatctctacactatcataaagattgctcgagacaaggatttaaaggagcaaattggtaaaaatatatattttgacctggtggaccatgaaaaagtttgcagcttccgcattcagaagcagttgccttttactgcattccaggaggaagttgcaaaggaatttggcatcccagtacagtttcagcgcttctggttgtgggctaagaggcagaaccatacataccgcccgaatcgtccattgaccccccatgaggaagcacaatcagtcgggcagcttagggaagtctcaaataaggcacacaatgctgagctgaagctgtttttggaagttgaacttggaccggagctatgtccaattcgtccacctgagaagagcaaagaagacatacttcttttcttcaagctctataatgccgagaaggaagaactttgttttgtcggtaggctttttgtgaaggctctgggaaaaccgtctgaaatattgacaaaactgaatgaaatggctggattttctccaaatgaagaaattgagctatatgaggaaattaagtttgagccaaatgtgatgtgcgaacatattgacaagaaacttactttccgttctagtcagcttgaagatggagacatcatctgtttccaaaaggctcctgttccagatggtgatccacaagtgcgctatccagatgtcccttcattcttggagtatgttcacaataggcaggttgtgcactttcggtctctggacaaaccaaaggatgatgatttttctttggaattgtcaaagcttcatacttatgatgatgttgttgagagagttgcacataaacttgggttggatgatccatcaaagattcggcttacatctcacaattgttattctcagcaacctaaaccacaacctattagatataggggagtagaacatctactggatatgcttgtgcattataaccagacttctgatatcttgtattatgaggttctggacattccactgccagaattgcagtgtttgaaaacgcttaaagttgcattccaccatgcaacaaaagatgaggtggttgttcatagcataagacttccaagaaacagcaccatcagtgacgtgatcactgatttgaaaaccaaggttgaactatcaaatcctgatactgagctccgcttgcttgaagtattttaccacaagatttataagatttttccgcctcatgagaagatagagaacataaatgatcagtactggacattacgagctgaggagattccagaggaagagaagaatcttggcccacatgaccgtttgattcatgtttatcattttatgaaagaccctaatcagaatcagcagattcagaatttcggagatccttttttgatggttatccgtgaagttgagactgctgcagaggtactggagcgcatccaaagaaaacttagagttccggatgaggacttctccaagtggaagcttgcattcatatccatgaaccggccagagtacctccaggacactgatgttgtatcagcacgttttcagaggagagatgtatatggtgcttgggaacaataccttggcttggagcacaccgatacaacatcgaaaaggtcttacacagccaatcagaatcggcacacctatgagaagcccgtgaaaatttataattgagaaaacttaaagtttcaatcgattgacggaggcctcgacaacagtatgcccaagatgatgaggcttagaacagaaaaattggcagaggaatatagttgctgcctgtgctgaggcctatacaagcccatgaatgccacgtcaaccttcagtgttgttactgctgttgtctattggttcttctcgaggctttgcttccaagcaaccaagcatgtgtgttggttttttcatcgtgtctagtatgatggcccctgctaggatagtttgcttaatttgtagagcaaagcgagtacataaaaaaagatttttggtagggggcatgtatacaggattatagccgatactgattgctgccgcttgctgctgtgggaacaatggcagagattgtataatgggtttgttattggttcctaattttcgtgatgttgagaaatgtaagaggagaaccgcgtggatagtacagttttgagttccagcctaggctgtttgttgcaacttggcatatttggtataatattctgctttccacaa

SEQ ID NO: 13035 - DNA, 681 bp, Zea Mays
ggaccttggcaatcaacgtaatctcctgcgagggcctggaaaggatggagaggcccgagacatacaagcagtggcaggtgaggtatcagagagctgggttcaggcagctcccgatcaaccaggacatcatgaagcgtgctcgcgagaaggtcaggtgctaccacaaggacttcctcatcgacgaagacaacaggtggttactgcaagggtggaaaggacgcatcgtgctggcgctctcaacgtggaagccagaccacagatcgagcactgcactgtagatggaggcctgttcgtatctttggatgcttgggctggttgttcctgggctgcaacatatagctaggctaggcttgtgctattcgaactactaaagcatgttttgcactgtctcatataatagtgatgccatcaagggtccctgcatgttaggttatggttcagttttggacaggaacagttagtgcattctttgatgggacaggctaggtatgttagttagtagttacgcggtagaccctagggttgtttcatgcatggatcagtcttatggattcttgtattatatttgttccccccattaaccagtgctgtcaaagttttgggcttctttggtaggtagtagtagtaggtactacaaactttgttgcacctccatgaggtacagatactggccagtgccga

SEQ ID NO: 13036 - DNA, 76 bp, Zea Mays
gagagcagataatcctatcctcacttgaggatgctatgtggagcatgcacaaatcaatccacagatattcatttaa

SEQ ID NO: 13037 - DNA, 106 bp, Zea Mays
gggctatgtcgttgctctagttagccgaattgttagatggttcggttaagctcgtaatcatgatgaattgcttgttgtggtctaaatgcgtatggttatgttcgcg

SEQ ID NO: 13038 - DNA, 1177 bp, Zea Mays
cacacatccacactcacctgttgcctctatatccaccgccccaccgccgtagcaccagaaagaaatgtacagtctacacagctgaccagagagctagtgcaagcgatctagcaagttttaatcttggaagaagccagctaggcgcgtgaatatggatcgcctcactgtgatggcgccgccgctgctcgtcctcctcctgctgctcctctcgcggtgctcggcggcggcgtcacggcgcggcgggggctggtgggaggagggcgagggggagtggaggccgagcgaggaggaagagaagggcaaaggcaaagggagggggctgttcctgctgcaccgggtggagaaggtggtggagtcggagggcgggcaggtgcgcgtggtgcgcgacgtggtggtggacgaagctggttaacagggtcgtcggaggggcggctggcggcggcggcgctgcggaggcgaacaggaagggcaagaagaagaagggcggcgcgccggagccgtacaatctctacgacagcgagccccggggttccggaacgcgtacggaggaggggttgctgctggggtcgatgctggcgccgcacgtgaaccctcgggcgacggagtacggcgtggagctgggcggggaaggcacggtccaggtggtgttcccgaacgggtccctggcgatgagcgaggtggtgcgccccggcgacgtgttctggatcccgcgctacttccccttctgccaggtggcggcgcgggccgggcccttcgagttcttcggcttcaccacctcggcgcgccgcaaccggccgcagttcctggtcggcgcctcctcggtgctccgtaccatgctagggccggagatcgccgccgcgttcggcgctcgcgagaaggagttcagtaagctggtgcgtgcgcaacgggaggccctgattatgccgtcctctcctgggaaggaggaggaggagcatgggaagaaagggagggagaaagaggagtcactgccgatggttgtcgagcaggcggcggcggagtgagctgcttgatctttcagtcttggactcttggcttcctcagaagcgcgcgcgcgccaccggaaagtgtttctactcttgttactgcgccttgtcagtgatcgtgttgttggttttttttttcgtggcgccgtctataaataaaagtgctttgtgcg

SEQ ID NO: 13039 - DNA, 1027 bp, Zea Mays
cttttcccccttctaatacggtgcggatttgggagcgaagctgcccatgctaccggtttggtaagaacatgcggagagccaatctcggatcttgcttccttcagggaatggtttactgcattctgttggctgctgtcctaatcagcctaattgccttttctgtaacaaggcatcatatatatttatatatgggaatcggctctgtcctcttgatagccatctatactggttatttccggagaagaatcaggaagcaattcaacattcggggtactgagagcagtctggacgattgtgttctccatctcatatgtccttgctgtacgctgtgccaggaggctagaactttggagatgaataatgtccagtgtggtgtctggcatggccgaggtgataccatttgtttagggagcaacggtgcaggaaacaaggctttcgctgccctgaacaaggcctctctcgtgcctgtaaagtccccggggctgtgtggcatggatagatcgtcaagcgcagctgacgagcagcagccgcttgtcccaccggaccaactggagcaggtttaggtattctctgtcgccacgacctctgcactttcctagaagggcttggacagcgccgacggaaaaaaaaaatcgtcctctgccggattattaggcgcctgcatctgcatccattggtcccgagaactggactttgcagctaccgtacatgggtgatgggcgcagtcgacctgctgctggctgctgctgttgtaaaattcagtgatagattttctcttgcagtcgaattgtttaggtcgaagactgtatcttcataatgtcacgacacgtgctcaggccttttgcctgaatccaactgtaaatttcagatccaatctagcagttcgagttacatagacaggaatgagatggtaatgttcttttcaccggccgtgcttgctccctgtatctttcatacgctgccccttgtcgttcctgttctcaggagcttgattaacactgttttctttacgaaacgtcattttccg

SEQ ID NO: 13040 - DNA, 1755 bp, Zea Mays
agccaaccctgcatttttgcacagagaggaaatgcaagttaataatgaggcaccactagggtgcctcaagccaaatatttctcagtataactctccagagcagataggtggtgttgaagggtttcctgagaataatgaaaaaaggaatgatattgttgctgcggaaaaaatctgggaggcgactccaaaccaaggccttagcaggcccatctaccgacaagaattttatgcctggccatatatttattcagattatcaaatcgtgcgtcagccactaccttatggttttgacaaccaattttatcagataaatagggaccacggtttccctattgagaacagggttcaatatcttccattcaagatgctccctcaaggtcacccccatgatgcacagcttcaggaatttcagtattttgtggttattgactttgaagcaacctgtgacaaggtgaacaatccatttccacaagaaatcatcgagtttccatctgtcttggttaacagtgcaactggaaaactcgaagaatgcttccaaacatatgttcggccgacgtatcatcaatttttgactgatttttgcaaggagcttactggcatacaacagattcaggtggacagaggtgtgcctctaggtgaagccttactcatgcacgataaatggctagaggacaagggcatcaagaacacaaactttgctattgtgacctggtctaactgggactgccgtataatgctggagtcggaatgcagatttaagagaatcaggaagcccccttattttaacaggtggatcaacttgagggtaccgttccaggaagtgtacggggacgtccgctgcaacctgaaggaggcagtccagctggccgggctcacatgggaggggcgcgctcactgcgggctcgacgacgcccgcaacaccgctcgcctcctggcacttctgatgcaccggggcttcaagttctccatcaccaactcactggtgtggcaacctgccgccgctccgcagtcaaccgccgccacctgccacttctccccggaccgctctccggacccagtcgtcgtccagctccagcaccagcagcagcagcacaagccgaaggaggcgctggggtctcccgcgtcgctggtgaacccatcgtacgccacccccgcgggagggaaggacagagccatgtactgctactgcggggtgctgagccggtggagcgtcgtgcgcaagccgggacccatgcaggggcgctacttcttcgggtgcgggaactggaccgccacccggcgcgccatctgcccgtacttcgcatgggcctcgtgaatagcaaagcaagcagagatctgggctggtgctttaaccgagggaggcgcgccatgttgctgcggctggctgctgcgcctcccagttccgtatatattattattgttattattatggtataataactttgctcgcgagacaatggaggttatctaggtagtgtctctaacctgtcgtactgacttctgtcgatagaagagaatggggccagatgctgcttaggtgtgatctatcctatccatccatggataataaagaagtttgtggattgctgttttattaacttgatggaactcctccgtaggtgtggtttgtgcaacttggattttgaaggcttgtgcgtctgtgagtgtttgatcaaatcgaaggtggtgtttgtttgctgaatgaaatggttatggaaggtgcctattattcctgacaagctctgttcagtgaga

SEQ ID NO: 13041 - DNA, 1225 bp, Zea Mays
gagaagggagaaggagctgcaagcaagggaagcggaattgaacaagagggagaaggaactaaaacggagagaggaggctgcagcgagagctggcattgtcattgaggagaaaaattggcctccttttctgccactcatccatcatgatatcaccaatgagataccgagtcaccttcaaagaatgcaatatgttgcatttgcgtcgtttcttgggttggtttgctgcctcttctggaatgtcatagcagttactacagcttggatcaagggggaaggcgttaagatctggttgttggcaataatctacttcatatctggtgttcctggtgcatatgttttgtggtatcgtcctctatataatgcaatgaggactgatagcgcattgaagtttggattgttcttcttgctttacgtattccacattcttttctgcgtattttctgctgtggctcctcctgttgtatttgaaggaaaatcattggcaggaattttgccagcaattgatcttattagcgtgaatgctttggttgggatattctactttgttggatttggactgttctgtctggaatcattgcttagcatctgggtcatccagcaagtgtacatgtacttccgtggaagtggaaaggctgcagagatgaagcgtgatgcgacgaggggtgcaatgagagccgcattttaagtgtggtgtggtattttttttgtgatgacagtcctaggcccaagcgcatacttccggtggataggttgtgcaccgaacaaaaagcagatgtttcttccttggttgctgactatgataccaaactgccagtaggttatcatgatgttacaagtgacattatatcactccccgtcctgatctaacaagaatggggaatgtgcagcttttacagctttacttaatcgttttgttcttgctagttgaaatgtggaatggattatgaatcaagtttagttaagttgtacagtgctgttaactatttgtactccttttgaacggctattggtacttcgttggaacaataatacagtggtgatattggcggaagcatttggcaaggcagcaaatgatcatgcgtgatcgtgtattgtttgaatgcggtgtttgaagcgtgtgcgtcttcaattgaaaaggaatggttttgcaaaattagatgcttagcttattttgatgtcatggagtggtatgaaaataagctagtttttagcttttaaaaaaaat

SEQ ID NO: 13042 - DNA, 1091 bp, Zea Mays
acatctagagcggaacaggcccaaagcccgcagctcgggctaaaaccctaacgacctggcctcgccaagacgccaacacaccggaacccccaaaatggcaccggcgccggaaccgaccgcagcggccgccggccgcaagcgcaagaaaccgcacgggccctccaaaatcatcgcgaagaaatccgcggatcccaaacgggcatacgcgaagaagaagaaagagaagcataagcaaaaggagaagaagtcgcggctaaaacccgccgagccggaccaaatcgccgccaccatcggagatggcgtcgcaggggcaacggtcctactgtcggcattgatgcagccgtcgcggcagctcgagtttctcctccgtagcttcgagcgcgcctctaagatgcgcctctctcctctcgaactcgattcctactcagagggctgcatggtgcagcttgcggagggagcagcccaggacgtcgagagcttcggtgatcatgtaaaaggggtgttcggctcttcgtggaaggaagagctctgtgagggaaatcacatcgatggtgagatcgccgtgggcagcccaacacttctggttatcagctcatctgctttgcgatctttagacctactgaggggtttgaagatgtttactaaagaatgccgaccagtaaagctctttgccaaacacttgaaagtggaggagcaggtggcgatgcttaatgctcgagtaaatattgcctgtggtacaccgagcaggatcaaaaaactaattgacatggaagctttgtccttgtcacgcttgaaactagtggtacttgacatgcagaaggatgcaaagtccttcaccttgtttacattaccacaagtcagcaatgagttctgggacctgtacaaaggttacctagatccaaagatccgagaagggaacatgaagatatgtttttatggtgccgtgtccgagagagacatcaccaaaacattttcactagctgagtaaatgcctgtatgagttcattgtattctgcagattaatttaacctttttggagctgatttttgatgatgctgaaaaatgagaaattttcggtgcattcttttaaa

SEQ ID NO: 13043 - DNA, 993 bp, Zea Mays
gcccaaggcacaccagctgcttgtggtgctggttgcacacttgaaccgcaccaccagttcaccccctctcctctccgggagcttagacacctgtaggctagcgcattgttctcaaggtcagagcttcgccgaggaggcgaggacgatggcaatcgccgggcagtgctcctcctgctattatacgtcacccaccctgcagctccaccgacgtcacagccacctgccgcggcagccccaagccgcacgaagagcgcggcggccgaggttgcaggtggccgcagctgccgacagcgggcccatcagggcggccacggacgccgagttcttccagccttccgacaccaggccaatcatgctcttcgacggcgtctgcaacctctgcaacggcggcgtccgcttcgtgcgggagcacgaccccaacaggagcatcaggtacgtgccgctgcagagcgagtccgggaggaagctcctgcagaggtcagggaggtcccctgacgacatctccagcgttgttctcgtcgagaaagacaggtctttcatcaagtctgaagcggtgctgaggataatggagtacctcaacctgcccttcccgcagctcgccgtcttcctcaagttcctgagggacttcgcgtacgacaacgttgcgaacaacaggtacgccatgtttggccgcgccgaagcagaagcatgcgagatactgtaacaactggtgcccctgagatctcgatacttagtctatacgattcgatgtcaacagtcgcatacatgatgtcccacgaacatctatgtgtgcgtagttttagccatctaaacaaagctcaaacaaaaaaaaccttgctctatctctatgctccttgcagtgcagtgagcgataggcactgaagggcgtatgctagctacaaaggctgtaaaaactgtatctttggcacgacgacgccctcggttgtcccgtgggcgttcagaatagtagcgttggacggggcggtgtggttg

SEQ ID NO: 13044 - DNA, 628 bp, Zea Mays
ccatgcccagtcggttgcggaccagcacatccgctcgctcataatcgttgtcctctacatcgattccgacaactacacccactgtcgtgagtagatgctgctcactcttggcaagtactccctcaacgaccacatcctctctgcctcaacgccaccctcccctaactagacttgcatggattgcgtggtcaagtcgtggatctacgacactctccaccgacctcgtcgacacagtgatggagcacagttgcaacgccttctcggcctggcttgccattgaatcccatttccttggcaaacgggagcaccgcgcgctccttgacgcgcggttccggacctttgtccagggcgacctttccatcaccgactactgtcgtcgtctcaagggcatggctgatgccctcggtgacctcgttcatccggtcactgatcgcaccctcgtccttaacgtcatccgcggcctagaagaagatcattcatggctaagataacaatggcacctttacagctccttgctgctcctatcctccccaagcggtcaaggggtgccacaaaacatggtactgcgctacgacggagccgacatgttgcaggggcaggggtggaatttaacatgcaggatctggag

SEQ ID NO: 13045 - DNA, 1080 bp, Zea Mays
tctttgatccccctccgccctctcaaaacttgtattccttgtacatgagctaagtaacacaacaaatccctttttacaataaaatttcactttcctattaaccctgccatatatcatacaaagttggccagaacatgctgccaccatctctaaccctcgtggtgccttcaaactggcaccatgatgcctgttcacctcaagcagggacattgctgcagaagtgctgacagcatgccaattcagctcagctgattacttgtatctttcaagcaatcttgattttcaggatcatagattgagggtgcatttttcagactttgccattgcttaatctaggttcatcattgtactctcagatcgtcaactctgtcgatcatatcaagggcttttatcctgtcgatctcaaagtcgatcacaggaagcagcctcctgattgatagcgtctctttccggttgccactgcttggtgaatggctattacttttgcttaacctgctttgcttattatgcctttccttagtgtcaaactcctggcttttgcttataccagggatgaatttcctgtacttgacatcccttagcatatcttgatcttcttgcgtcagaagaggtgatgaattgctgctgtttttgtttggagataatgtgattgaggcccctctttgtgtaggagaccgaacaggagacttgattggagacctttcaccatttgcagttttggataggctgataagatgatgaagccaaataacaagctcgaggatatatgcttcagtcttctccttgtcagcgtggtacagtgtctcaattcggatcaggtctatctgcccatttggcttgcagttcacatctgacctgttatttgcccactctccaacccaaccgaaaccatggtgagccctggtatggacagatcataaaaaaatcagtaacaaaaagggataagtggaagctctggctattttgcatgttatgaaggtagttaagattttgaattacttggtggtgttacttgcaatagggacaagccaccgcagggtcttctccatttcagccttgatttgagaaacagtaagctct

SEQ ID NO: 13046 - DNA, 1084 bp, Zea Mays
cctctctcaaaataaaacccgatagagatacagaagaaaagagagaaaaaaactaagctcgcctgatcctttttaagagacgggacccctcaccactctgtaggtcccgaaggcccgaaccttaggatcgccggcgaaccaccggagctgagccccacaaacatcactgtaccacacggtttggtggtgtggcgactggcgacgaagcgcacaagaacaaaacaagagggcgagaaacatagggagaaaggaggagaggaacggagagctggaaaaggcaggaaagacccggcttttgaccccaagtaccctgttgagggcaatggcggccacctccgaggaggcaatcaagcagttctcggcgctcatggagcagctagaggagccgctaaagagcacattccagaatgtgcatcaaggaaatctgagagggactttgatgcgttttctgaaggctagagaatggagtgtgcctaaagcttataaaatgctaatggattgcttaaactggagagtacagaatgagattgacatcgtgttagctaaacccattctgccatctgatatatatagagttattcgggacacgttacttgttggattgacagggtactccaagcagggacaacctgtttatgcatttggtgtgggtcttagtactttcgacaaggcctcggtgaactactatgtgcaatcacacatacagatgaatgaatatcgagatcgtgttgtcctgccggctgcatcaaagaagtttgggagacagattaatacctgcttgaaggttatggatatgactggcctcaagctgtctgcactgagccaaataaagatgttgacgatgattactactgttgatgaccttaattatcctgagaaaacggaaacttattacattgtaaatgctccatatgttttttcagcgtgttggaaggttgtgaagccactcttacaagaaagaactaaaaagaagatccaagtcctgtatggctctgggagggatgagttactgaagatccctgttcgaaatgttttgagctttatccacgccacaaagcctgttactaaactgacaccaatggcg

SEQ ID NO: 13047 - DNA, 3218 bp, Zea Mays
ggtaagtctttcggaggcttcaagcagaaacccccatggcttccaagaacaataaggtgttgaagtaactacaagatccggtggcgggccacggcacgatgagcaatcttaagcttggtgttgaagttaccagcgctcatgatctcctcccgaaagagcaggacacggccaatccttttgttgaggtcgacttcgacggccagaagttccggacagccgtcaaagacagggacctcaaccctgtctggaacgagcagttctacttcaacatatctgatccatcccgcctcccagagctacaccttgaggcctacgtataccatgcagaccgtgccagtaattccaagtcctgcctgggcaaggttcgcatatcgggcacatccttcgtcagccagcctgatgctatgcccctgcactacccgctggagaagcgcacgatcttatcacgtgcgcgcggtgagcttgggcttagagtcttcctcacagatgatccatcagtacgagtgtctgctgctccagctcagcaggagttcgatatgctaagcacgcctaccactgcgcaggagcagcaggcagcagccaactccatctcaaatcctttccaagagaccagagcaaacccagtgaggcagttccagcacttaccaagagaacagcagcgtcctgcacagccacagccatactacgctgaaggttcatacggagaccagcagcagcaacagagaagcttttctgcggttgcgaacaaagctgcagcccctcagcctcaggttcaggtgtcaaggatgtatgctccaggtccacagcagcctgtagacttccagctcaaggaaacaagcccaacgcttggcggcggccgtgtcattggcggccgggtgtaccctggccagaaggctggggcgtacgaccttgtcgagaagatgcagtacctcttcgtgcgcgtggtcaaggcacgcgacctgcccaacatggacatcactggaagccttgacccttacgtggaggtgcaccttggaaactacaagatgaagacaaagcactttgagaagaaccagaggcctgagtgggacgaggttttcgcgttccccaaggaagtcatgcagtcgacgatgcttcaagtcgttgtgaaggacaaggatgtccttcgggacgactatgtcggccgagtgagcattgatctgaatgaggtccctctcagggtccctccggacagcccactggcaccggagtggtaccgtctgatgggcaaggacggcgtgagggacagaggggagctgatgcttgcagtctggtacggtactcaggcagatgaatgcttcccaagcgccatccatgcaggatcgacaccggttgattcccatcttcacagctacatccgcgggaaggtgtaccccgcgccaagaatgtggtatgtgagagtcaatgtgattgagggacaggacatatacccaatggagaaccgcatacctgatgtgctggtaaaagtgaggctgggccatcaactgctgaggacaaggcaggttcgctcgccgaccagaaacttcatgtggaacgaggagctgatgttcgtggcagcagagccgtttgaggacgacttgctcatatcagtagtagaccgtgtggcacaagacaaagacgaggtgattggtgaggctatcataccgctcgcgaggcttccaaggcgggctgatcacaaaccggtactcccagcatggttcgatctaagaaggccagggatcatcgacgtgaaccagctgaaggaagacaaattctatgcgaaggtaagccttcgtgtctgccttgaaggtggttaccatgtgcttgatgagtccacacagtactgcagcgatctccgtccgacgatgaagcagctgtggaagccaccaatcggcatgcttgaagtcggcatcttaagtgcgaacggtctcaatccaacgaagaccagaaacagccgtgggtcgtgtgatgcgtactgtgttgccaagtatggttccaaatgggtccggacgcgcacgatagttgacagcttgagccctcggttcaacgagcagtacacatgggaggtctttgatcatggaactgtgctcacaattggtctatttgacaactgtcacataagtggagatgataacaaggacggttcctcaggccacatggataaacccatcgggaaagtgaggattcggctttcgacacttgacacggcgcgtgtgtacacgcactcatatccattgctcttcctcagcccatcaggagttaaaaagatgggtgagctccaccttgccatccggttcacagtcacatcccttatcaatgtgctcttcacatactctaggcctctcttgcccaagatgcactacgcacagcctctgtcaatagttcagcaggaaatgctccgccaccaagctgtgctgcttgttgcgcagcgcctgggacgcatggagccaccagtccgcagggaagttgttgagtttatgtcagatgctcgctctcacctgtggagcatgcgacggagcaaagctaacttcttccgccttatgcaagtcttctcagggttcattgctgcagggaaatggtttgctgatgtttgtcagtggaaaaacccggtcaccacagtgctggtccatgtgctctttatcatgcttgtgctctatccagaccttatcctgccaacaattttcctctacatgttcttgatagggctgtggaattaccggttccggccacgcttcccaccacacatgaacacaagaatatcttacgctgatgttgcacttccagatgagcttgatgaggaatttgacacattcccaacctcaaagagcccagatctcatccggatgaggtacgataggttacgacacgttgctgggaggatacagactgttgttggggacattgccactcagggagaaagattacagtcactgctcagctggagggacccaagggcaacagctatgttcctgatattttgcctgattactgcgattatactgtatgtgacaccattccaagtggttgcactctgccttgggttcttcgggatgaggcatcctcggtttcgccacaaggtgccatcagcaccagcaaacttcttcaggaggctacctgcaaagacagattctttgctgtaaagctccttggaagaccagctatcaacaatgtctattgtacctgtttttgttccccatatattgttgtataatagccttaag

SEQ ID NO: 13048 - DNA, 907 bp, Zea Mays
gcccactccagcccagcccagccagtagccgccttctcagtcacaccctttatcactttccccaaattagaatcaaaccctagcttgtcctcctcgtcgatttcccctgaccccccaccagggcaccaggcgactcgccggaaccctaggtagccgcagatcctacgcgccgtgaaccacgggaatcacgtgagcagcgcagggagtctagagaagagagggaaggaaggattgagcgtgatagaatccgtgaggagcgcagacgcgagagggagagggagaggaggcttgaagccaaggatgctgcaatgggcaagaagagtaagatcacaagggacagggatcgtgatatcagtgagaagattgctcttggtatggcaagcactggtggtgcaaaaggtggtgaggttatgtatgaccagcgtctgttcaaccaggacaagggaatggactctggttttgccacagatgatcagtacaatatctactctaagggtctcttcacagcgcagtccacgatgtccacgctatacaggcctaagaaggatggggattctgatgtatatggtgatgcagatgaacagttggagaaggttatgaagactgagaggttcaagcctgacaagggatttactggtgcttcagagaggactggcaagcgagacaggcctgtggagttcgataagcaggaagaaaatgatccatttggtctggatcagttcttgactgaggtgaagaagggtaagaaagctgtggagaagattggaggtggaggaaccatgaaggcgagtggtgggtcctcaatgagggatgattatgatggtggatctgggaggtcccgcatcaactttgaaagggggcgctgaggtatttgctctgcttctgcagagctgtatcaagttggtcg

SEQ ID NO: 13049 - DNA, 90 bp, Zea Mays
gatacggtcggttggtgaggcaatttggccaaggttgcttcacaacgaagcctgcccaagctgggcttcgggcgagtcgagggtgcgccc

SEQ ID NO: 13050 - DNA, 1788 bp, Zea Mays
ctgaggaccaatgttaatggctgaaagtagatcacaacagcaaaagtgggtgctcacagtgatgagcttgctgctgcttcgaggctggaagatagcatcaacttttatcagacttcgactcctgatgttgctaagcttttccatatcgatgcagcagcgaagcgtccatccgtagtgctgctgaagaaagaggaggagaagttgaccttctatgatggggagtttaaagcatcagccattgctggttttgtgtctgctaacaagcttcctttggtgaccacactaactcaagaaacttccccttctatttttggcaatccaatcaagaagcagattttactatttgctgttgcaagcgagtccaccaaatttctgcccatctttaaggaagcagcaaaaccatttaagggaaagttattatttgtctttgtggaacgagacagtgaggaagttggtgaaccagttgccgactactttggtattactggacaagagaccacagttcttgcttacactggtaatgaagatgctaggaaattttttcttgatggtgaggtgtcacttgaagctataaaggacttcgctgaaggtttcttggaagacaagcttacaccattctacaaatcggaaccagtgcctgaatctaatgatggggatgtgaaaattgttgttgggaagaatctggatctaatagtttttgatgaaacaaaagatgtacttcttgagatatatgcaccatggtgtggtcattgtcaatcgctggaacctacttacaacaatctagccaagcatctacgtagtgttgactcccttgtggtagccaaaatggatggtactaccaatgagcatccacgtgcaaagtctgacggatacccgacgattctcttctatccagctgggaagaaaagctttgagccaatcacttttgagggggagcggacagtggtagatctgtacaagttcatcaagaaacatgctagcatccctttcaagttgaagcgccaggagtcgagaaccgagagcactcgggcggagggtgtgaagagctctggtacgaactcaaaggacgaactgtaaagagctcagggttggatgtgtgttggagtggatcagggtgaaagtttccatctcaatacaagtagatcgatcttggtggatgcgagtgcagtgttggcctgagggaggagcagcagagatgagtgcttactgcttagagagaggaatgaaatcagcaactaatcaaataaaatcaaattccattattccttttatgcgtctgttttgctgtctttactttctttcatcagtatacaatacatggagactggatgtatagctggagtgactctacgcagggctaccatgcagatgcggcacaccgcctcctcggccgcgatgtcctcttgctcttggtcttcctggtcgaccatcctaccagaggtgatgatgaagaacagaccagcgaaggtgacacgttcactacgaagaagcaacaggagggagtagctgtccagacacggccacgtcgacagaagcggaacaacgtgagagtggagtgtatatatgggcctaaatgggtcgtttaactgggccgtggagcttatatgcttccctatctctggaaggagggtatcgagaaaccagtaaacaaacactacggcagctatagccgcccccttccctatcttcttccgcacgccgatctcccctgctctcctatccctatcttccatggagcgctaacaatctggtatcagaggtcagacaagttggatcccatcagcaact

SEQ ID NO: 13051 - DNA, 1446 bp, Zea Mays
cacccggccgccacgtcgcctgcgtccgcgttgccggccacacccagccattgatgcttgctacttgctggacctacttctccgttccaaattggccctagaatggtgcgtgatgtgttccgtttggctaaggagaatgctccagcaatcattttcattgatgaggttgatgctatagccactgctcgctttgatgctcagactggtgctgaccgagaagttcaacgcattcttatggagctactcaatcagatggatgggtttgatcaaacagtgaatgtgaaggttataatggcaactaatcgggcagacactctagatcctgctctgttgcgtcctggtagacttgacaggaaaattgagttccctttgccagaccggcgtcagaagaggcttgttttccaagtctgcactgccaaaatgaacctgagtgacgaggttgatttggaagactatgtttccagaccggataagatcagtgctgctgatattgctgctatctgtcaagaagctggcatgcatgctgtccgcaaaaaccgatatgtcatcctccccaaggactttgagaagggctaccgaaccaacgtgaaaaagcctgagacggacttcgatttctacaaatgaggcaacctgagtgttgagctcgtttcttgtttatcaattgaatatgttttagcataaagatgagtttcaggatagttgccaatatcaaatgtcgaagttgatggctgtaatgcttgagtcaatctttttacttgaaggtacagcggtgttatggaagttatgattatgtagggtggattaaccttttaccgacacggtggggcttggatttggcattaagccaatcttaccaatcaatcaccagatgtgatgtctcattggtgatactaatacctgcagatctggtctgtctcaaccaaattatgccgaagacaatagaaaaactacgtttgcgcagatcttgtattctaagcttgcctgttcatttattactgagagcaagtgtaatagtgatatagttgatgctaaggtagaggtgagaagagagttatgctgttgtagaggttagaagagaagagtgcaatcaacgagctcagcattttttgtgtgtgtgtagctttctgaactagataacaaagactatgtatgttttttttgtttagatttctgaactaggttcgctctaaaaatctacaatctgaaccaagtacaatggcaggatagattgtatagaaaatctatagatttttatagttcaattcagaatcactttctactcccaaggtttctagatttttgttatctatgttaccaaagtatcaatattttacagaatctatatttaacagctgtttgaacctaacatattacctaatatatattttagcttttcatcactgctaagattaaaattttaagaatctacagctgagccaagccaaa

SEQ ID NO: 13052 - DNA, 1134 bp, Zea Mays
gtgcgtgacacggtccgctcaaagtccacggtggaccacttccaccctcccccaccaccttccttctctacttctctcctctctcccaccgcatccgatctcgtacctcacttcatcgccccgccgccgcttcgacggcgcgccgaccggctaggacgcgcctccgacccggatagtgttccgctcggtcgaatccgacggccgctcgctgctgcagcgggcgcttgctgtgcgtcgcgtgggctcggctggaggcaggcggaacctttcctgggtctcggagatggcggcgcctccggcgagggcccgggccgactacgacttcctcatcaagctgctcctcatcggagatagcggtgttgggaaaagttgtctccttttacggttctcagatggctccttcactactagcttcatcaccaccattgggattgacttcaaaataagaacagttgagcttgatggtaagcgcataaagttacagatatgggatactgctggtcaagaacgttttcgaactattacaaccgcctactacaggggtgcaatgggaattttgcttgtctatgatgttactgatgagtcatctttcaataatataagaaactggataaggaacattgagcaacatgcttccgacaatgtgaataaaattttggtaggcaacaaagctgacatggatgaaagcaaacgcgctgtaccgacttcaaaagggcaggctcttgctgacgagtatggcatcaagttttttgaaacgagtgcgaagaccaacctgaatgtggagcaggtttttttctccatagcaagagatatcaagcaaaggctttctgaatctgattcaaagccagaggatcgcacgatcagtattaacagacctgatggcggtgaggcttcggcttcacaaaaatcagcttgctgcggatcgtgagggggttacattgtcacaaggaagataaatagtgtgataccatgcttgtaatttacccttctacctttttatctggcttaatcgtccacttctaacttttaattgcaattccttgaattcagacttctgtgttgtaatgtgaacaattttagttgtacccccctgttagcaatgcaagtgctcgtaaaaaaaaaacaatgtaaaaa

SEQ ID NO: 13053 - DNA, 106 bp, Zea Mays
taccactcgacgaaaaagctgatgaggcaaaatttccatccacaaaagtttcttcagtgaatctagtatcccacaacaaaagggaaaatatgagggaaaccttctc

SEQ ID NO: 13054 - DNA, 1399 bp, Zea Mays
gtgtaattgactctccgtggttttggtttctggaaaagaagatccagacttggagctacctccagccatggatgctctcatgagagtttttaagcgtgtcactgggataacagatggagctgctgagggcactcaggccgctgctactcctgatgtatgtgctgcccgattgttggttcctggagctcaggcaattaatctaattgggaagcaaggtgcaactatcaaagcaatccaggagagcacgagtgcaacaatacgggtaatatcagtagatgaacatgaacgaccattctatgtaactgacgatgaaaggatagttgagatacaaggcgatacagagaaagttctaaaagcactgcaagcagtttcaaatcatcttcggaagtttttggttgatcatagtgtacttccattatttgaaaagactaatactacagtgagccaagatcgcaatggtgatggttggagcgatatgtcacgtccttcaattggttctgcacaagtgaatcaactaccttcagtgttagatgactatattcttcaagtgaagagggatcctctgtaccttgaacgagaatctttggtagatcataacattcatcgctcaggcgtatcactttatgggcgtgatccagccttgtcaacactacgaccctctgcagtacatggtgctggctcactacttacacagataacccaaaccatgcaaatcccacttacctatgctgaagacattataggagttaaaggagcaaatattgcgtacatacgagctaatagtggggctgttgttacaattcaggagagtttgggtagtcctgatgatattactgttgaaataaaggggacatcttcacaggtgcaagctgcacagcagctcatccaggactcgttggctgcacaccgagaacctgtcaggagcagttatgtgggggcaggattagattcagtatataggtccagctactcacaatatggcagctcaatctatccctcgtcatcactgccgtcttattctagcatcgatgatgttagtagatacccgtcttcaggccttggtggctatggttcgagttaccggtactaatagcagtttgtcctcgggcttgaatgcttgatggcaccagtgatcattgtatcccagtacccagacttcagggtctgctttgttttgacaaacaattaattggttttatagattttcgccactcatggattcagaaattgtacatgtttgctggtgccttttttttttccttagcgctacaatttaggagctgtttggttggtctttttcagaccaccaatgatttccggcgtggatgtggatgtatgtatagtgctattttttgtttggatggctgggcccgtatcaactacagcgtaaattgatccg

SEQ ID NO: 13055 - DNA, 3884 bp, Zea Mays
cggaagcccccctataaccgcggccgccgctgcaactgcatgcacggcacgaacctcccttctttctcaaattctctctccgcctccctgctccgatgccgcggtgacgcgtggtgcatgcgtgcgcgcgcgccttttcccctgcctggatcccccgtcctctctcgatcggttccagttaacactcgcagcctcgttctcgagtctcgactctcgacttgagtcgccagtggccacgcgcgccgggacacgggcgcgctttctcgctgccgcgccaaagcaggaaacagagcaacggccaggaaggactcacgcgcgaggcgaaaagcgaagcgggtgggagaagcgtgggcgcctgggctagtgctcccgcagcgagcgatctacggtagagttccggccgggcgcgcgggagaggaggaggtcggggggaggatccgatggccgggaacgagtggatcaatgggtacctggaggcgatcctcgacagccacacctcgtcgcggggtgccggcggcggcggcggcggcggggaccccaggtcgccgacgaaggcggcgagcccccgcggcgcgcacatgaacttcaacccctctcactacttcgtcgaggaggtggtcaagggcgtcgacgagagcgacctccaccggacgtggatcaaggtcgtcgccacccgcaacgcccgcgagcgcagcaccaggctcgagaacatgtgctggcggatctggcacctcgcgcgcaagaagaagcagctggagctggagggcatccagagaatctcggcaagaaggaaggaacaggagcaggtgcgtcgtgaggcgacggaggacctggccgaggatctgtcagaaggcgagaagggagacaccatcggcgagcttgcgccggttgagacgaccaagaagaagttccagaggaacttctctgaccttaccgtctggtctgacgacaataaggagaagaagctttacattgtgctcatcagcgtgcatggtcttgttcgtggagaaaacatggaactaggtcgtgattctgatacaggtggccaggtgaaatatgtggtcgaacttgcaagagcgatgtcaatgatgcctggagtgtacagggtggacctcttcactcgtcaagtgtcatctcctgacgtggactggagctacggtgagccaaccgagatgttatgcgccggttccaatgatggagaggggatgggtgagagtggcggagcctacattgtgcgcataccgtgtgggccgcgggataaatacctcaagaaggaagcgttgtggccttacctccaagagtttgtcgatggagcccttgcgcatatcctgaacatgtccaaggctctgggagagcaggttggaaatgggaggccagtactgccttacgtgatacatgggcactatgccgatgctggagatgttgctgctctcctttctggtgcgctgaatgtgccaatggtgctcactggccactcacttgggaggaacaagctggaacaactgctgaagcaagggcgcatgtccaaggaggagatcgattcgacatacaagatcatgaggcgtatcgagggtgaggagctggccctggatgcgtcagagcttgtaatcacgagcacaaggcaggagattgatgagcagtggggattgtacgatggatttgatgtcaagcttgagaaagtgctgagggcacgggcgaggcgcggggttagctgccatggtcgttacatgcctaggatggtggtgattcctccgggaatggatttcagcaatgttgtagttcatgaagacattgatggggatggtgacgtcaaagatgatatcgttggtttggagggtgcctcacccaagtcaatgcccccaatttgggccgaagtgatgcggttcctgaccaaccctcacaagccgatgatcctggcgttatcaagaccagacccgaagaagaacatcactaccctcgtcaaagcgtttggagagtgtcgtccactcagggaacttgcaaaccttactctgatcatgggtaacagagatgacatcgacgacatgtctgctggcaatgccagtgtcctcaccacagttctgaagctgattgacaagtatgatctgtacggaagcgtggcgttccctaagcatcacaatcaggctgacgtcccggagatctatcgcctcgcggccaaaatgaagggcgtcttcatcaaccctgctctcgttgagccgtttggtctcaccctgatcgaggctgcggcacacggactcccgatagtcgctaccaagaatggtggtccggtcgacattacaaatgcattaaacaacggactgctcgttgacccacacgaccagaacgccatcgctgatgcactgctgaagcttgtggcagacaagaacctgtggcaggaatgccggagaaacgggctgcgcaacatccacctctactcatggccggagcactgccgcacttacctcaccagggtggccgggtgccggttaaggaacccgaggtggctgaaggacacaccagcagatgccggagccgatgaggaggagttcctggaggattccatggacgctcaggacctgtcactccgtctgtccatcgacggtgagaagagctcgctgaacactaacgatccactgtggttcgacccccaggatcaagtgcagaagatcatgaacaacatcaagcagtcgtcagcgcttcctccgtccatgtcctcagtcgcagccgagggcacaggcagcaccatgaacaaatacccactcctgcgccggcgccggcgcttgttcgtcatagctgtggactgctaccaggacgatggccgtgctagcaagaagatgctgcaggtgatccaggaagttttcagagcagtccgatcggactcccagatgttcaagatctcagggttcacgctgtcgactgccatgccgttgtccgagacactccagcttctgcagctcggcaagatcccagcgaccgacttcgacgccctcatctgtggcagcggcagcgaggtgtactatcctggcacggcgaactgcatggacgctgaaggaaagctgcgcccagatcaggactatctgatgcacatcagccaccgctggtcccatgacggcgcgaggcagaccatagcgaagctcatgggcgctcaggacggttcaggcgacgctgtcgagcaggacgtggcgtccagtaatgcacactgtgtcgcgttcctcatcaaagacccccaaaaggtgaaaacggtcgatgagatgagggagcggctgaggatgcgtggtctccgctgccacatcatgtactgcaggaactcgacaaggcttcaggttgtccctctgctagcatcaaggtcacaggcactcaggtatctttccgtgcgctggggcgtatctgtggggaacatgtatctgatcaccggggaacatggcgacaccgatctagaggagatgctatccgggctacacaagaccgtgatcgtccgtggcgtcaccgagaagggttcggaagcactggtgaggagcccaggaagctacaagagggacgatgtcgtcccgtctgagacccccttggctgcgtacacgactggtgagctgaaggccgacgagatcatgcgggctctgaagcaagtctccaagacttccagcggcatgtgaatttgatgcttcttttacattttgtccttttcttcactgctatataaaataagttgtgaacagtaccgcgggtgtgtatatatatattgcagtgacaaataaaacaggacactgctaactatactggtgaatatacgactgtcaagattgtatgctaagtactccatttctcaatgtatcaatgtatatagaagttaacgtgcatgaggagataatgatgactcagaaaaaaaaaag

SEQ ID NO: 13056 - DNA, 789 bp, Zea Mays
  misc_feature (788)..(789): n is a, c, g, or t
aaaaaattgcccacgcccgactcttcttcactcgagccaaaccccctcaactcaactgctgaacgcagagttcgatctagcacgcgcagcggcggccgccgcccacaatggcgtcccttttcaaggacccgagcaagctctcagcgtacagggaccgccgattcaagggcacacaggaggagtatgaggcaacgctgcatgcgtcgacaacgctgtacattgggaatatgtccttctacaccacggaggagcaggcctacgagctcttctcccgcgctggcgagatcaagaagatcatcatggggctcgacaagaactctaagaccccatgcggtttctgcttcgtactgtactactccagggaggatgctgaagatgctgtcaaatacatcagtggaacgatgcttgacgatcgtccaatccgtgttgatttcgattggggctttgaagaaggcaggcaatggggccgtggacgaagtggtggacaagtgagagatgagtaccgtacagattatgatcctggtagaggtggttacggtaagatggttcagagggaactagaagcacaaagagaactagttgactatggtggatctttccaaccaaatgcaccacctccctatgagagaggtgagcggaagagaggatacggggactctcataggaatgacagaggagattaccagcggaaacgctaccggagcagcgatgaccggtcagcaccagaggagtccaagagagcgcccgactctgatccagcggagaagaatcctagatttcgcgagaann

SEQ ID NO: 13057 - DNA, 1026 bp, Zea Mays
ggaaaacatagcaacatggaaaagttcccgcgttcaaaaaaacagggtctagattgtttgcagttcgtgtttttccttttatttttgtttgtttggattctctatatttttttttctattgttatgcatcctttagccaaatatcatcttaaacaaaagatggaccaagccaagagctaacagttctgtgtcttgtaggtgcagaggcatcttctgaccaatgaaaatggtgaaaccagtgacccagcctgtgatgtcttctcgtggtcattctcaagctggctgaagttccccttctccttgatcagctggatgtggtggtgcttgcagtacagcttcccctcgtgcgcaatgtagttagaagggctgatggtgcaccctccatggcagcacttgaagcagctcttgtggtacatagtgttattaacagtgacctggatgcttaaccggttgtcaagtgaagaaggctcaaactaccggaagaatgattgagatggttgaacacagaatcttaccctctcagttggatagactgtcttgctgcatccaacacatttctctctggtgccagcaaaggcgcttgagactttagtagcattcttgagggtgcccttgcagtggtggcagcggaagcaggccttgtggtagatgcggttgtcggcggtgagcttgtccacaaggtacaccgtcttgtcgcaggcggtgcacttggtggtcgtcccctggaaggaggtcgccatggccgccgtcgtctctcttccaacgacacactctgcttacggaggcgaggctgtgtagccgatggctgcctatatgggaactgtgggttggttggttggtggtggtggtgagctgcagccgggtattgataccgctaggtaggcaggacacagctagctagtgagggagaatgttgggggtgtcaccgtgtcaggcatcagccatgggaaggagagagagagagagagagcatacgaggtggaggtgggggtcggtcctgcacgaatgccgccataccaccatgat

SEQ ID NO: 13058 - DNA, 1297 bp, Zea Mays
gtaggacgctacccgtacagcccccaggccgctcctcggagcacagcacaggccgctcatatgtggggccctcttgcatattcggtgcaggaaggacccgtcctgctccgggcggacggagacggtgatcatcaccgacatgaactactacccggtgtccaagtaccacttcgacctcagcggcactgcgttcggcaggctggccaagcccggcctcaacgacaagctccgccactccggcatcatcgacatcgagttcaccagggtgccgtgcgagttcccgggcctgaagatcgggttccacgtggaggagtactcgaaccccgtctacttcgcggtgctggtggagtacgaggacggcgacggcgacgtggtgcaggtggacctgatggagtccaagacggcgcgcggcccgccgacggggcggtggacgccgatgcgcgagtcctggggctccgtctggcgcatggacaccaaccaccgcatgcagccgcccttctccatccgcatccgcaacgagtccggcaagacgctcgtcgccaacaacgtcatcccggccaactggcgccccaacaccttctaccgctccttcgtccagtacagctaaccgatcgggatccgtgccctgcccgcaattggagctggctggctggggcgctactcggctcggtcaccatcgtctacagtactatactatgctctactaccactagactgctgctgttactactagtctactaccaccaagtacggcggaacggaacagctagtcgtcgtcggcggccttgggaggggaggtgtctccggtcaccgtgccgttgcagttgtatcgtgatcatggtcctgggagttgttgcatccggggcgcgctttttaggtcaggcgtcgtgtgcgatgtttgtggggtcaggctggcatgtcatgccgtgcgtgaccctgattgcgagccggcaagcaagaagacaaaaaaactaaagccgtgtgggaaaatggaggaggcaggcgtacaagctacgctctcccgcccactgttgcttttataatttatcatcatcatcatcttcattccgatcggtgattaatcgaaaagtatattgtaatgtataaacgccattttcctttcgtcagtgccttttttttcctggttgtggatgttttgtttgcgcattcagccttgctgtgctgaagccaaacgcaagtaatgtgctgaagccaaacgcaagtacacaagtaatgtacataatgaagatgtgaaagaaagaaaaaacgacagaaatataaactcccgtttgacgat

SEQ ID NO: 13059 - DNA, 5976 bp, Zea Mays
ggagagggaagcggccagacgagtgagaagggggcagcggcacgcagccggaaagtgaggcaggcgtggtgaagggcagggggaggcttgcaccgcagagaagccagaggagcgttagtagtagaagagcagagagggagagggaggaagagccacgcgacgagagccgaggagccatccaccgcccgcctaatccttgttcgctgctagattcgccagaccaccgaggcgctgctccccggatctacggggcggcgtcggtgctcatcggaatccagagaggtggcggttgtttgccggggatcggcgccgcatgtctcagatctgagatggacaggatccgggacggcaggaggggcggggtgtcggtcggaggcgttccgccgccgccgcctccgaggaggcgcctcaggagcaacggcggagggggccccagggactcgcctcgctccgagcgccgacggggcgagcgcctcatgctcaacggcgggggtggctgcgccagtcgggacgacggcgacgacatctccgacgagagcctcggcgacgacgacgacgacgccgagcaggagctcgtgccgcggtaccaccagcagcggcggtcaccgagcacggcgccacctccttcctcgccacctccgcccggcggtggccaccacagcagtagtagcagcggtggcgggggttatcacaaccaccatcacggccagcaccaccagatgcagtggaagggcggctccaatcccatcgtgtccaaggctgtagacgagatgattggtgtccctgttccgaggaaagcacgctccgcttcaacgaaacgttcttcgcatgagtggcctgtccccggcggcggaaccagtggaggcagcaccggcgcaggagacggctcgcagattcaacggcctttgtcacggccaatctctccagcgtcagcctccactaccgtcccggctcggaagaagcttaaaccacttggaggtgggagcagcggtggtccaggacaagcgtcaaagcagcgaccatcaccgtcgccagctccatcaacaaccccgccacaaccaccgccaccgaagatgtcgaagtcgccgtctttcattcaagaggaaatcgaggttgccgaggtgctgttcggactcaccaggcagttctcgtgccctcccaaacaagaggtcaaccacaagctcgatcccagagatgtgccagagtccaagtgtgggaactcttcgtcggccccctcttctggcgcccgaccctctgattccacctccctttccgctatagcgccaaagaggaagaaaccacggctggcgaagtacgatgaagatagccgtccggcgagcccaacgaagccagagttggtggagccgtcctcaaagccggagccacctcctgtggctagatcagaagcaaagatggcaacgtcggcagcaaccgaaagtggcaccagcaccgcacctgcggctgttcaactcgagactttacgaaagccagagaagacggaggactcagagctccgtccaagcgaaccagatcggcgaaatcacagcctggagagccaggcggagctgccggcgtcgttgccggcgccttcagtcaagccggatgctgaagcaaagccggtaggatccgaggccaggaacggcgaagctactgcgacgacaaagattgagctggcatccgatggcgctcggcatgacaagttttccattgatctcatggctccccctcctgggaagctgtctgatgatatagatgcctcctccgaccctgatgcagataagaagggattggattctgagatggacatgttggggagaggaaattcggaaaagaaggatggtgaaaggactctgggagggctggatattgatttggaggaccagaaggtgcaaagaattccagccgatgagtccacgcccaagaagctcacactgcagttggatttggagaagcccagtcttggtgatgaaaaatcaccatcacagcgacggcagccgcatcaacatccacaacaattgcagcagctgaagccctcaaaagctgagataaagcacgagaaatctgctatgcctgctgttacaccacctatacctatacccgttggaggttggcttgggaatttcccaccgtttggttaccttagtccagtcccaggcctatcaggagctggtcttcatcatcccatggacgtgaagccagggtcttctagtggattacagcatgctgcattgcttccaccgccaacacgctcaaagagatgtgctacacattgctacattgcgcaatttatccagcaccagcagcgggttgcaaagatgaactccttctggccgccagctgttgcagcggcagccgccgccgccaacagatcagggccactctttggtgcaaggccattcagcatgggtgttgtgccaccgacagatgctgcctctatgcttgtgaacccaatgcaggggagctaccccatcagggctcacactccaatgcaagaagcaaaggctcctatggctacttcattccaggggagtctctcgaaggataaagcactgggcaatgctgctggtcctgaatcaagccagaggaaacaaccgcctgctcatgaaacacagcagtccactcccatgccaaacatgctgcaagccctggcattcatctttccattcaatcagcaacatgctatggtggcagctgcaaatgctgccaatcgagcaggggatgcaaaatcatctggagccagcaatgcaatgccgccatctgccagtgctcacactttggcagcaaactctggtgccacggccatgaacttgagctttgccaacttgcaaccggctgatgcccagttcttggcgatcttacagaatggataccaattccaggttgctgctcatcctggagggcctccatatcgaggcatggcaccaccaggcccagctgttccattcatcaatggacatgtgtattcctctcccatgctgcacccatcacagcagcaaggtgcgcaaccacaaagtcatcagaagacccagctgccaaacttgcccagttcatcacagaagcaccagccacaacattcccaagggctattgggatatgcaccaaatgctaacgcagcagcagctgctagtaattcgcacaattattcaagtggaaatcagcgccctgtccttgcgcaccgacaggagagtgacaaaactggagaagatggtctatcgagtgatgacaagccatcccactctcagaagagcgggtatgaacacaattttgctgttccagtccatctaccgaattttgcaatgatgccagctgctcaacctgctggcagtcagagtgagaagaagttaagtgaccatcaccaccagcagcagcagccacaagtcagtcgtggccagggtgtgaggattgatcttgcgtcttctcagccttttgtgatgccctttggctccattggtcctcctggatctgccccatctggtctcgacttctcggcattggcgcagagccatgcatttttacagagccatcaagaagcagcccggcatggttatcctcaacttaattttgctgcagctcaatctacgcagcacaagccccagcatggagaaacaaaatctgtcgctggggattcatccttgacacacattgccggagacagccagagaaagaaatcaacttctacaaagtattctggtgattcacagcagcattcgctgtccttcaccaggacagaaagcaagaatcatgtgcctcctttccttagtggcagcacaaatgaaagttcgtcccgaaccctaagccttattggaacagaatcttcaaatacatttatgggaagcaaatccacaaattccaccactcctgcctcaacaccacctgcagcttcgtctagcatttctcagcagcaccagcatttccttcagatgcaagtgcagcataagcatcagcatcagcagatgattcagcaccaccatttgaatcggcctagatctgccgcaccaagtacacaaaatagtgcaggtgggtacccagaccgtctcaatatggcgagctttcagaatatgatgtacccaccaaatgctgcccaaggccaagggagagttcaatccccccagttgaaggcatcctcagggagagggacaccttcatctactgctaccactccccctgctgctgcaccccctaatttgattgtgatgaagacaagtagtctccacccgcaacaagcaaagattcctatgcaggctctctccactcctggtcaccaatcccagagttctctaagcatgagttcatcaaaaatggctcctgtaactaacctttctactggaggaggggatctatctcgatcttcaaatgcccctgttgcttctggttcaccatccaattcggtgtccaaaagcactggtggcagcccgcctgccacaggaaatgcaaagggtgttcagcagcctgtccaattgccatcaccacaacagcagttagccaagaactctgtgtcgacgtgtggctccaagtctactcctgcaaaccatttcagtatggctatgccatctatccttggccaacagcctaattcatcgcctggttctaataccgggagcaagcagcagtcacatatgtcatcgtcaatgaaacagcagccgttccctcaaggccatttcttcatatccagcacgtatgctcctcaggctccaggagccggcggtgctgctgcccttggcctataccagaagcgaccaggcgacaagacacagccacaggcaccacaccagcagaacgccttgtcagccgctgctggcagtaacatgaaatcgcttcatccttcgtccggtggatttatgcatctcgcagcggcaacccagtctgcaggtggtggcatgccacacacccacatgcccgcggcgcaactgagtttcggaacaatgccggtgcctttaaaaccctcaagcgaccagaagcccgctgctggaaaataaacagagcccaggtgaccatgcgtcggagtggtaatctgagctggcgagctcaagtgcttatccagcggaagccccaaatggaggaggaaagatacaatgagaagagaaaagcaggccacagctcgaagaacctgcttttggttgctgctgtggtgatcaggaagggggaggaggggcactgcgaggacacgccttgctaacttaaaaggttgttcgggtctgggaatggctgatgtgagtgaatacttttgtgtagttttggctggttatccatcctcccatcccatggtgtaaaggtcggaggagtgcatagaatctgtctcgtagccccgttttttgtgcatggatggatgtcgaaggctgttctctccctctattctcttgtagcttctccagttcctcgtttcttttgggtggggggtctcagctttaaccggaggaggaaagattcaatcagaatgcagatctcaggtaactttgttatgcaactgatgctcccattacacactgtctgtcgatacactctgactggattgttttagtaccagcaagaagaggagaaaacaaaatctattccaactagaatagggtccagccatgattggtgtgggtggcatacagtgacatgcgtctgggtttgttgttgtaagtagctcttgtgggtggggggggggggggggaggaaatgaatgaatggaattgcctgattatggatgctgtacctgtggccccctgcgacgacagatcattcgcctctgcctctcaatgttgtgatgatgactgtgcagccctcgtccggagatgaaagtggggacagtgcatgtggaggggggagtctagcagctccatcacttgtgtttgatatttctgtgcgtgtgtggatgggcaagatgccgtgctcgtaccagaggaaggggggcggtgcatgtggatggaagctgtaggtggtgagcacacgtgcctgtgcccgtcgccgttggacgtgcaaggttgaatgaaa

SEQ ID NO: 13060 - DNA, 1579 bp, Zea Mays
tgtcgttacttggaacaatagtgttcgatcgtcttcaacctcgcactacgtggcacccgggcaacttcctcatcggatgctccttcctcatattcatcctcaccacacggttcatcgggaggaggtacaagaagctgttctggctgtcagcgatctcgcctctgctgtcggtcatcctgtccaccgctgcggtctacgcgacaagggctgacaggcacggcgtcaagatcatccagaaggtgcacgcgggcctaaacccaagctccgtgaagcagatacacctcaacgggccgcacacaacggagtgcgccaagatcgccgtcatctgcgcagtcatcgccctcacggaagctatcgccgttggccgatctttcgcctccgtaagagggtacagactcgacggcaacaaggagatgctggccatggggttctccaacgttgctggttctctgtcctcgtgctatgtggcaacaggttcgttctcccgaacggcagtgaacttcagcgcgggggccaggtcgaccgtttcaaacatcgtcatgtccatcaccgtgttcgtcaccctggagctgttcatgaagctcctctactacacgcccatggcggtgctcgcctccatcatcctgtcggctcttccgggactgatcgacatcaaggaggcctgcagcatatggaagatcgacaagatggatttcctcacctgcctcggtgcgtttgttggcgtcctgtttgggtcggtggagattgggcttgcagttgcacttggcatttccttcgcaaagatcatcatacagtcgcttcggcctcaggtggagatccttggcaggctacaagggacagatatcttctgcagcgtcaggcagtaccctgtagcctgcctaactccgactgtactgcctatacgcgtcgacacatccttcctctgcttcatcaacgccacttccgtcaaagaaaggatcacagagtgggtttgggaaggagtggagacctcaaatggaaaagcgagggagaggatacaagcagttgtccttgatatgtcaagtgtggtaaacatcgacacttcaggactcactgcactggaagaaatacacaaggagttggtgtctcttggcttacagatggctatagccagtccgggatggaaggcagttcagaagatgaaagtgtcacaggtggtggacagggtaggacaggactggatcttcatgacagtaggtgaagcggtggaggcctgtctagctgctcataagggcacagctctcgcatgttgagtatgcgttaattactactattagtactcctaaggataatcccataagcgatgcggttatttgcatcctatgaaggtgttactggaaatgcttacgaaacagaaatgcatggtttgcacatgatggaggcaaaatacctatggtatgacttgactggagtggtcgtggcgagaaacaaacctgctctgggaaggacattccttgagctccacaaaaacatgtatggtgatatcttgatgatgtgtaactgtacttagtaagtaaacaagtctttttgttttaacaaaacagaaaataataaaaaaaaa

SEQ ID NO: 13061 - DNA, 107 bp, Zea Mays
cattaaggactaaatagtctttatccttttttggtcactattgtatttggtcttcgtcatcaactcgagccgaagtcccttgattatagcttcgtcgcccatttttg

SEQ ID NO: 13062 - DNA, 1503 bp, Zea Mays
ccgcaacccccacgcccacccactgcaccccggcccacgcaacgccgccggccacacgcacactgccacacggagctagctagctgatcgatcctcctctcggccgcccgcccgttaattaggtagccgacagtatctatccagctaggtagccagccagcgaggagccgccgttgcttcctagctgcacctccgcccggccggccgaagaagacgccgacgatgaaggtgtcggtgctggcgctgtggtcggcggcggcggcgctgttgctggtggcgcaggcgccgtcggcggcggaggcctcccaccacggcggcgcgggcctcaagctggggtactacaagaagacctgcccgggcgtcgagaacgtggtcaagtaccacgtcgccaaggccatcaaggccaaccgcggcgccggcgccgcgctcgtccgcctcatcttccacgactgcttcgtcagggggtgcgacgcgtcggtgctgctggacccgacgccggcgaacccggagacggagaagacggcgccgatcaacatcgggctggcggcgttcgaggtgatcgacgagatcaaggcggcgctggaggagcggtgcccggggacggtgtcgtgcgcggacatcgtggtgtacgcggcccgggacgcgtcgagcctgctgagcaacgggcacgtccacttcgcggcgcccgcggggcggctggacggcgtggtgtcccgcgccgccgacgcgcagcgcgacctgccggactccaccttcaccgtgtccgagctgatccgcaacttccggcgcaagaacttcacggtggaggagctggtgatcctgtcgggcgcgcacgccgtcggcgtcggccactgctcctcgttccgcgcgcgcctgtcggcgccgccggcgcagatcgtgccggcgtaccggaacctgctgtcgggcaagtgcgcggcggcggcgggcggcgccgacgaccccgtggtggccaacaacgtgcgcgacgaggacccgcgcgccgtcgcggcggccttcccgtccttcctcgggaagctgcgcaaggccagggactttctggacaacagctactaccacaacaacctggcaaggatcgtcaccttcaactccgactggcaactgctcacggagaaggaggcgctggggcacgtcaaggagtacgccgagaacggcaccctctgggacgaggacttctccgacgcgctcctcaagctcagccggctgcccatgccgccgcacagcaagggcgagatcaggaagacgtgccgctgggtcaaccaccactgatcctgctcaagctctgcacccggccggacggaaatataccagatgggtcttcacgccgatttgtttcgatcttctttcattttgttgctgtatgtttgtttgattattatctgatgatatgcatgtgtttttttatgcggttgatctcttgttgtatcttgttctttcatgtatgtatggactatgggcaacactagtaaaacaaattaaacgttg

SEQ ID NO: 13063 - DNA, 822 bp, Zea Mays
cttttgttgtaatcaagaaattccagctgaagtttgtttgaggataggcgacagctttgcgagtccttcgtgttgaaggagaaattgtagctgaagtgaaaaaacagcagggaacgatggcactatcacgaagtatgagagcatgtttgcacagtggaagacttgcacttcttgccatattggtctctggtggaattgtattgcaaatcttggtaagcatctaacttcaatatctatgtggcagtttgttatcttttccactgtcacctaaatttctataattcttgctccttcaggcttgtgctctctataacaactggtggccaatgctaacagttctcatgtaccttatcctaccaatgcccctcatatttttcctgggttctgatacttcctccatgatgtccaatgggggagacggctgggtgaacttcacgaaattcttgacgggcgcatcaatagtagggagcatcgccattccgtcgatcctgaagcatgcgggcgtcattggatggggagccctgacgatggagctgtcatcctttgtggtctttggcgtggcaatcctgtggttcctccagatgaacggtgaagacgagtacagcggagtgttctaatccaaacctgctgctgctggttctcttgccagcgtggcactctgtgcatggtagttgtgaactgggctgtactgctacaacaggggaagcattgccctgggacctgatttactgacaccagtacatgtttggtctgcgatttttgtttgtcctcgtaggtttgcctgacttccagaattttgtttacgtggccgtggtatctaga

SEQ ID NO: 13064 - DNA, 1144 bp, Zea Mays
gtgcactcctgtacaccgcttggcagatattcatcatgatgtggacgctggtaccttgaagaaggttgttctttctgatggtgcagtcgtaacagtgaagggtgctagagctgtgagcctccggttgccgcttgaattaccacttcctctcaaccgtaccacttacaagggtcgcctctcaagcctgatatccatcgcacaagccctgcgtggtgcagcccggtctaatcagaaacccctgctctctcttcgcgttgagggtccagtttccttgtcctcgactccttccatgtctcccaaggacaagctcaagctcaaacggttggccccaggccaagtggagctctcctcacaggcgggggcaatccctgctatcaccgaagacgaggatgaaccacataaccctggattgtggcctcttttgtctctgaatggttcagatggcagcctgcaggggtttgaggagctattggcctcagtacttggaaagaaggcaggcgagaagggtaccttcaagctactgaaggcacgggcctcggctcaaacctatgtcaagatggcattcacggtggagaagaagcttgctgaaggggatgtgaactggtcaaatattccagaatggaagacgaagcccaagaggatgagagcgcactatgaagtccttgctcgagtggaggagggtcaggcgatccctgagaggatagcgcaggtacagcctttccaggccaacgaggccatgtcggagagtgtgctcaccggcaacgtcacgaggtcgaagatggaaatcgtccatccaccgccggtttacttcactctctgagtgagggaagaactggatgctgtttgatgttctcttcagagctactacacgttgggtggtgggtagtttacgctggctcgtaggcaacaaagttgtacaagcggcaagagtttgttgcctatacactgactgcgttgacatgaatattgacgttctatgtgtactgaaaggctggcaagcctttaatattatcaattggaataatgaggaataagaaaattctgtacatctttagagggccaaagggctgagttcttagtactgagaaattgggtagccttgtccctgtctatatttatatcaactggaacttgttgagtcgtg

SEQ ID NO: 13065 - DNA, 2129 bp, Zea Mays
atatctccgacgtggcgagccggcactggccccgcgtatacggaggccggattcctgcggggccccggcgctatcctccgacggccgacgtgtcctgccggcgtccacacggggctggggaaactagtcgccggcgtacgcggaggtccgctcaatccggcggcgtcgtggggccggatcgaatctgcgccgcttgatcgttcgcgcggccgccgcggacagcggactgaaagcgaggtgatgatcctgctggctcggccgatcgacagggctgggccaccggcgccgcgcgcctcgtgctcttgcgtgctgctgttggctgttgccgccgagaccgagagctgctcctcctgctctcgtatacgtgctcaaggttgtcgggtacatgagacggcgctttcgttcttccggcgtgaggttgacgctgacaatggcgtgcgtggaattccagtgtcgtcgagacttgagacggaggccctgtctgctcgtgctcgtctcgtccaagagcaaggaggccgggcgggccagggcccagggccaccacggcaagcaatggccattggaagtaactgacagggacgagggcgagtcgacggcgacgccgccgttccaagccggccccaacttgcaagcgatttttggtttttgtttttttgtttttgctcgcgcctcgccggtggagtcgacgcctctaatactaataattcaaataaacaccagccatgaaaaaacgcagcttgttctttttctttttatgttttgtaccagccaaataagaatgctatgagcaactggaacgggaacctctcgtagtatatatatgagagggatcgggcaggaaactgcttcgtgaagaggctgagagctcgccttgcatgcacgcgcacacctctgcttgggtgtacgtgcacagcggcagcagcggactaggagctccatgcatctgtctctagggtgtagagatcctgctcattgtacggtagctgccaccgtctcatcgtcaaccatgtctgctgcttccaccgtggatcctcatcctcctcatcagcagcagcagtgcgataaggtgtcgtccatggagatggagatccccgccgaccttatcatccggatcggcgagtccgttttccctctccacaaggcggcggtgacgcccgcgggtgagcggaggagccgccgggcgtccatgtccgggacgacggcggcgacggagctcggtgccgccaggcccggcgcgctggagaaggtcgccatgatggtggacgaagtggcggcggagatcgcgacggaggaggcgctgcccatctccaagttcgtcggcgtggccggcgcggtgcccaaggacgcgcgcccgtcgcacgactgcctgtaccgcgccgtcgacatctacctcaagacgcacccggagctggacgagatccagcgggagaaggtctgcagcgtcatggacccgctcaagctctcgtaccaggcgcgcacgcacgcgtcgcagaacaagcggctgccgctgcaggccgcgctcagcgcgctctactacgacgagctcaagctccgcagcgccgcgacggccgacgtggtattggacacgcagtcgtcggccgcggggagggcttgcgcgcaggccagggcggcggacgcggcgctggcgcgagagaacgaggcgctgcggtcagagctggcacggatgcgggcctacctgtcagggatggagcgcagcaaagggggccggtcaacgccgccgtcctcgccgtctcggagggcaaagaaagcaagcttcctgggctccgtgtcccgcactatgagtcggctgaacccgtttagaagtggggggtggatggcgaaggttacgaccagtaacgccgccggtggtggacgccagagcaaaacgatgatgcagcatgtggtgacacccaagaggaggagggcatccataagttaataatcatgacgctgtcgtgtaattttaggaggataccgtgtgtgcatggcttgtagtttgattattattgtgtgtttttagtttattattgtgctaatatataaatgaatgcgtgtgtagtaccaagtggtttgctaaatcagacgataattttacatgttcgcatcgtagtcatcaattttaggccctg

SEQ ID NO: 13066 - DNA, 1564 bp, Zea Mays
tgtatagataaagagcctcttgattggaacacacggatgaagatagctgcaggtgcagctaagggcttagaacaccttcatgacaaggcgagtcctcctgtgatttaccgggattttaagtcatcaaacattcttcttggagaaggatttcatccgaagctatcggactttggccttgcaaaacttggtccggttggtgacaagacccatgtttcaacacgtgtgatgggtacatatggctactgtgccccagaatatgcaatgactgggcagctgacggttaaatccgatgtgtatagctttggtgttgtgttccttgaacttatcacggggcgtaaagcaattgacaatactaagacccaaggggagcaaaatttagtggcatgggctcgtccactgttcaaggaccgaaggaaattccctaaaatggctgatccaatgcttcagggccgcttccctatgaggggtctataccaggccttagccgttgctgccatgtgcttgcaagagcaagctgctacacgtcctcacatcggggatgtcgtcactgctctctcatatcttgcttctcaggcatatgacccaaatgcccctgttcaacacgtccggagcaattcatccacccccagggccagaaaccctgctgggtggaacggcgaccagcgcagcgtgcgctcgcctaaccatcattctccagacccgcggcgcagagacgctgcgggggcatccaagtatggagcagaggttagcaggactagctctaccagcgactctggccggcgatcaggcctggatgacatggacctgaccgggtcgcaagtgggaagcccagcgcagaccggaagaagaagagaagctccaaggggcaccgacagacagcgtgctgtcgcagaggccaggacatggggggagaattcaagggagcgaacaaatggccatggcagcttcgacagcacccatgagtgaagccgtcaggttctgttccagtcatcattccagaacccccaccatgggttgagtccactcattcatcagcaccagtcagatccgatcttgggacatggcgtcggtccaagtgtctgtgaataaggcttttcttgccctcctgtggcgaatgcaattctcctggcgcccattccttgccaatgcgacctgtgtgtgtcatgcctctggcgactgggagcctcaggaggagcctgtaggattcagtcagaggtagacaggtcagtgaagaaagaggaggggcgcggagtcacattggcgagtgttttgttttttttggcggctaaatgctgagtatgttcagctgcatgtgtcctttttgtgtatgtgtacgtgtaagacgtgtaatagcaaccgtgtcaggtttggctacctgagaggcctttgaagcttctgctgctgcttccttccccttgggaattgggagttcagagttgaaatgtaggataggcgatgttgttgagtacatcaactgtttttacccttccatgttgtacggcgacgcttccctgaacaatatgaccatgatgtgcccccctgtccgccaatggccaatccgtgt

SEQ ID NO: 13067 - DNA, 2714 bp, Zea Mays
ctcacacccaaaacattgtgattcttagttcagaacagcaaacaaagatggttttagctgcagagattgacgcattatgcgtccaggagactgcaattattgatcttgggggagcaagaggaacagttgacctgaatgacataagaacacaggttcctgcattacctggaagggatgtgctaggtgatgaaattaagggttcagaacaagcaaaaatcgaatcgattgcagagatcgaaacagtgggcgtcaaggagaatgtcattgctgatcataaggaaacaggtattgaggttgatgctcatgttttggaacaagcaaagatggtttcagctctagaaccagactctactccagaagtttgtgctgacaagttagaaccttctggtggtgaggctcattgttcagaacaaataaagatggcttcaattgcacaagcggtgtctagcatggctttagtaggatattcttcttcagaagactcaatggtggatgctgctgcccgagtaactgatgctgattttgtggatagtaaagcagctggtgtttatcgccaagaaactatgcctactcaaaccacctctaccctcccagagaacatggattctcctgcaactgctgctaccatggttgaatcgaagtttgctgcctcgtctgagcacgttgcaggacccgagccaattgatgaaacttctgttatgcaagtggaactggcaacaagcacaggggatggatgtgcagcagatggtcacaatcttgtttcatctgaaactgttgttgaagtgaagcttgctcaagaaattgttgttcctagtccaggtggtagcatagaagctaataatacttctaccatcagcgaagtatacaaagatacccagtctcgtgcatctggtgaagcatgcaatgatggtcagtctcatggtgatgaaaatatgaaacttggtgaagcttacactgaactgcagctggcaccttcctctggtgaggaggccatgacatgtatgtgtagtgagctgcccagccaggaggtggaggctccaagcagtgaccctttggagaataatgaagaaacgaaaaatgaagctgctgctcaaggatcagtaaatgaggattctgctcctcgtgctgaaaatgcaaagattgatgaagctgacacagaacaggaactgcttccatctggtgaggccacggtagacgaatccagcgagctactcagccaagacgaaaaggtggctcgtaaagatgcaaagatggaagagtctgctgctgctgctgctgcacagagacagctaactactgaagttgctcatgcaagtgaaaacgcgaaacttggtgaagatggcacggagctgcaactgccaccaccttcaatggtagacatatctagggagcaactcagccaggaagtggaggttgcaagctctgggccttcaggaactgatgaaactgctgagatgaaacggctaaacactgaacattcacctggtgatgaaacttcaaaacttgttggaactgatctaggactgcaattgtcaccttctggtgatgccatggtagatatatctaataagccacccagctgccaagacgtaaaggaggccccgagcagtgacattttgggaaatgatgaaaattcagacaccgagaagactcctgctgccttgcatggacggctgaacaccgaacttgctcctagtggcagaaatacagaatttagtgaagctgacactggaaaacaagagacacccgtgtctgctgaggctatggtagaatcatcgagcgagcctcgcagccatgaggcaaaggaagctccaacccctgacctgtctggggatgatgaaaaagcgaagtcagcaagggctgctgttgttgcggaactttttggagatgcaacagaaggtggttcggatcagccattgccgtctcctagagaacaaggcaaggaagcagaggccgatggaggcttttagagtaaagttgcaaatattgtatcaagagatactagaatccgtgtaagtaagaactgctaatagtgcttttagttgtaactggtgtaagcttctactcagaatcaaaagcgacgtgctgagattacagcaacagtggcctacggcagtttactactgttttgtgcaatattgctgctgagttttgttgagacaggcaattgatctgtcatctgtctcgtcttgcatcgaagttggcagcaccatggtgaggtgctcccgccttaacctggaagcgctgacagagggaagaacaatactctctggtttcctaatgttttcctgttcactgttttgatttgatgctgcattgcagtagtgtgacttagtaacataatggtgcgtttggatagacggacataccgatccagaatcatctgaacctaaatattgagtacaagcttagattatctgtttggtctgctttatgtctgggtgcaatgctctctgatttctggacggagtggtaccgcaatccaaacagactttaatgtttgggtgcttcaggtcataatcaaccatctaatttactttgcaaatgaatgtttcaaactggactgctcaagcctaccaagtttaatggtccttcctagtattgaatccttttgagtctagcccgtttcctcatttgaattttcactgttagtgtgcctatacttgcctcacgtagaattttgaaagcttatggttgggtgcgttgtactcgac

SEQ ID NO: 13068 - DNA, 75 bp, Zea Mays
gggaatgaaccggaagccgggttacggtgccaaactgcgcgctaacctagaacccacaaagggtgttggtcgatt

SEQ ID NO: 13069 - DNA, 939 bp, Zea Mays
ctggccatgtcttccccgcgtgatggtccaccttcgtggacggattgcaaactctgtgaatgaagggaggcttgtgccggaggacatcatatttgggttgctgacgaagcggcttgaggacggatacaacaagggtgaaaatgggttcattcttgatgggattccacgcacccgtatgcaagctgagattcttgacgagattgtggatgttgatttggttcttaatttcaagtgtgctgatggctgtttcatgaagaagcaatcgagaggcaacatctgcgcccactgtggacagctctttgacgtcagcaattcagcatctacgaactgtagccccagcctcgggagctatacatggcattctcaggcagaacctgctggtgttttaggcctcgaagcctcaaggatggagaggatgcgcacatatgctgagcagaccaagcagctggaagattactacaagaagcagaggaaaattgtggaactgaagacatctgctcgcccggtggagacatggcaggggctcgtagccgccctgcacctccagcatctggactcgcccccgacaccgcacaaactcaccgcgtaaatatcattattaattttgctacctccgagtagagagtctaaaggatcagaattccgatcctgcctgcagcatatctaatatccctatgtttgtgggttctggctcgagagagtcagtcggctgtcttttgttttgttttgttattgttatagataaaggtaagcgattttgcagacacgcttattgtatggttgtaaccgagagttgtggacttgccttggcttgcgagtgtactcgcttatatgctcctttgtgatgatgttttgcacctgtggtatcttcagttgctccattgtggtgttgtccaccatatgttttgttctgtgcatgatgttgatagtcatgccctt

SEQ ID NO: 13070 - DNA, 681 bp, Zea Mays
tggaagagcctccccctctcgcagatccccacctgctccgccgccggccaccgcgttgctcccctcggcagccaggatgacagaagcaccatttctgccgcgtgagaggctcttcaagcagcaacattacttccagaacttgaccaagcacacctacctgaaagggcgctacgacgtgatcacatctgtcgccatcccccttgcactcgctgcctccagcatgttcatgattgggcgtggagtttataacatgtctcatggggttgggaagaaagagtgatcttccactggttaactattgtttctgcttgtcatggaagtcataccgtcgagactgcgaagtcctcttcgcttgcaaaataatacggccaaataacaattcgactacattttcgcatcaattttctgtttgtatttgtgggtgtgaagtggcagtaacttgaaaatcagcactgtcactgttttggttagttactccattcctttcgtcttttgtgtcccctttcaatagaagcaagctggccttgtacttcctccattcttttttttagttgtcacggtttagttcaaaaaaatgaactagcgggcgacaattatttagttcaaaaatgctctgttcatcaacatgcacgtaacgtaaggggtctgtggtgcacaaaactgtcaaaacaggcggaaatt

SEQ ID NO: 13071 - DNA, 75 bp, Zea Mays
ctcgcctgtatttagccttggacggagtttactgcccgatttgggctgcattcccaaacaacccgaatcgttgat

SEQ ID NO: 13072 - DNA, 2097 bp, Zea Mays
ttatgatccaaagggcacacgagaatttgaaaaacaagaaatcactgacctttgcgcctgaagcgtctgaggatgttctgccactggatttaggggaacttcttgcttattttgtaaagcaatctgtaccactattcgaccaacttggtataaaaagagatgtatgtgacaagttggtggagtctctgtgcagcaagcgcaaggaccaccctgcatatagttttttgtcagcaactgaatcatcttcattgaaaaatgacaatgttgggaatgaactcgacctaagaatagctagcgccctacagagtacaggacaccattatgaaggtggattttggagtgatggccataagtctgacatatctggcaagagacatgttgccatagtcaccactgccagtcttccctggatgactggaacggctgtgaatcctttgtttcgagctgcatacttggctaaatcttgcaagcaagatgtaactttggtagtgccctggctttgtaagtcggatcaggaacttgtgtaccccaacagcatgacttttagttcaccagaagagcaagaaaaatatatgaggaattggctggaagaaagagttggtttcaagacagacttcaaaatatcattttatcctggaaagtttcaaaaggaaaggagaagcataattcctgctggggacacttcacagttcataccatcaaaggaagctgatattgcaatcttggaagagcccgagcacctcaactggtatcatcacgggaaacgatggacagataaattcaatcatgtgatcggtgtagtgcatacaaattatttggagtacatcaagagggagaagaatggtgctattcaggcctttttcgttaagcacattaataacctggtcgccagagcttattgccataagatcttgcggctgtcaggtgccactcaagatcttcccaagtcgacgatctgcaatgtgcacggtgtgaaccccaagtttctggaggttggagagaggatagcagcagagcgggagtctggccagcaatccttctctaaaggagcttattttctggggaagatggtgtgggccaagggttacagagagttaatagatttgttcgcgaagcacaacagtgatttggaaggcttcaagctggacatctatggaaacggtgaggattcacacgaggtgcaatcggctgccaggaagctgaatctgaacctcaactttcataagggccgggaccatgcggatgattctcttcatgggtacaaggttttcataaacccaagcatcagcgacgtcctctgcaccgcgaccgcggaggcgctagcgatgggcaagttcgtggtgtgcgccgaccacccgtccaacgacttcttccggtcgttccccaactgcctgacatacaagacctccgaggacttcgtcgccagagtgaaggaagccatggcgcgcgacccgcagcccctgaccccggagcagcggtacaacctgtcgtgggatgccgccacccagcggttcatggagcactccgagctcgacaaggtcctgaatggcgacagcaacagcgaatgcggtggctctgttggcaccgaaaccggcaagagcgcgggcacaatgatgaggagatccgcctcggcgccgaacatgtcagacgtcgtggacggcggcctggcgttcgtgcactattgcttcaccggcagtgagctcttgaggctgtccacgggtgccgtccctggaacccgggactacaacaagcaacatagcctggacctccgtctcccgccgccccaggtacagaacccggtctacggctggtaattactagatatataggtatagctctgcagtctgtagcactagctttttcatctccgcgtgtgtttgtttgccaaaggcgagccttgttcattattacctacaaacaacaactacgactgtaaggatgacaacgctgcgtcgtgattttgtaagactagtgctagatagagaggcgagcatttcttcaatcaaaaaatttaaaaaaaaggaaaggaaagaaagactgaggcggggcaggccctctgtttccaactttttgttgccaacaattgcacgcaccgcc

SEQ ID NO: 13073 - DNA, 1624 bp, Zea Mays
gacaagacaacccatgcatggccggtccgatggagcgagagggacgagacgcagccgagaagcccctcttggtaagggtgggcggcagcggtggtagccagggcggcagcgcctcctcttcttcggttgccgtggtggtcggctgcaccgccatcgccgtcgccggctccttcgagttcggaatgtcgatcggctactcgtcaccgactcagctgggcatcatgcgcgatctccgcctctcgttagctgagtactctgtgtttggctcgatcctgaccatcggagcgatgctgggtgccattgtcagtggatctgtagccgatcgagcaggtcgaagaggtgcaatggcgatatcggatgttctctgcgctcttgggtatctcctgataggattttcccagagctattggtggcttgacatcggaagggtgctgatcggatgcggaatcgggattctgtcatatgtggttccggtctacatatcagagataacgccaaaggaccttagaggaggctttgcaactgtaaaccagttcatgatttgctgcggagggtcgcttgcatttgttcttgggacatttatcgcctggcgcaccttggcgatcgttggagtggtgccgtgtttagtgcagctggttggccttcttttgattcccgagtcccccagatggctggctaggtttggacacccaggtgcctttacaggagcactgcagacgctaaggggacatggaaccgatatctctgaagaggcctcagaaataaaagttttcacagaaaagcttcagcgccttccgaagtcgaagatgttagacctgtttcagaaggagtacatccgtgctgtcatagctggagttgggctcatggccctccagcagcttgggggtgtcaatggcgttctcttctacgccagtgaagtgttcgtctcggccggtttctcgtcgggaaacacgggaacagtggccatggcggtagtgcaggttccgatggtcggactaggggtgcttctgatggacaaggctggaaggaggccactgttgatgatctctgcagctgggacatgcgtgggttgcctgctagttggtctgtcattcttgtccaaggagcagcactgggaaagggacctgaacgtgttggctttggccggacttctggttttcatcggatccttttcactgggtatgggcgggataccatgggttataatgtcagagattttccctataaacatgaaagggtcggcagggagccttgtgaccttagtaagttggctcgggtcgtggattgtctcgtacgccttcaacttcctgctgatttggagttcttacggcaccttcttcatcttcgcggccatttgcggactcacggtcgtgtttgtgcatcggctagtgccggaaaccaaaggaagaaccctggaggagatccaagcctctatgaactcgtccttgacacccttccacaagtattagtttgcttgcatagttgattagtgtcacagatacggttcattgtatacaaagagagacatacaaatacatgtcatttctccataatactactatctcattattatacagtgttttaaatagcgggaaaatgaatttatcctcaatcttctaaaaag

SEQ ID NO: 13074 - DNA, 1459 bp, Zea Mays
ctccctatcctgaaacgccaatccgataaaaagcgcgcaccggcgtggcgcgcttcgcccccaggagccccgatcatctcccgctcccttccttcctcctcctcctcctcatggctctgtcgtccgccggctcgttcgtggcctgcagcctccggccaagcggagctagcatccatgccccgaggtcgccgccgggcgaacgcgaccaagggcggcgtgtccaccgtgtgcgagccgctgggccccgacaggccgatctggttccccggcagctcccctccgccgtggctcgacggaagccttccaggagactttggatttgaccctctcggactaggttcggagccggagctgctgcggtggttcgcgcaggcggagctgatgcacgggcggtgggcgatgctggcggcggcgggcatcctggtcccggacctgctggcgcggtggggcttcatcgacgcggggttctcgtggttcgacgccgggtcccgcgagtacttcgcggacccctggacgctgttcgtgtcgcagatggcgctgatggggtgggcggaggggcggcggtgggcggactacctgaggcccgggtgcgtggacatcgagccgcgcttcccgaaccgcaagaacccggtgcccgacgtggggtaccccggggggctgtggttcgactgggccaactggggccgcgggtccccggagcccgtgatggtgctgcgcaccaaggagatcaagaacgggcggctcgccatgctcgccttcgtcggcttctggttccaggccgtgtacacgggccagggccccatcgacaacctgctcgcgcacctcgccgaccccggccactgcaacatcttctcggcgttcacgtcccactgatccgatcttgcttcggagctggcggagagactgcgaaggattaaaaaaaagggcatcctgttgagggagaaagaacttcgcttggtcggtatcattttggccttgctggacatgtcaacattttgtttgtagtacctgcgtagaaatgtcaaaccacctgtacaaacgtacaaataccaccccagggatcgcgatgatgctagccagcagtccagcacacactagcttgtcctgaagatccatgcaacaccgtatacagaggaaatttatggacacggcaatggacgtctgtagccaaaagtttaatacgcatctgcaggagaaagaaaagaaagaaaaagaaattatcatccagagaatacgtgggaaataagcaggaatacataaccaagatatttgccaggccatcatgcaaatccttggagttggcggccacaaagataggagtttgttgtaatcttttcctattatttagaataagttagttttatatccagttagagacgggatatataagcactattgtaagctgcaaagacgagagatcaacagttatcattttctttaatctactacatattccttt

SEQ ID NO: 13075 - DNA, 640 bp, Zea Mays
gttcttgaccgtcgcatccaatccaacggcattctggttctagggagcccgcaggaaggcacctctgcggcgaccagcgtgaagaaaggggatcggaacgcctccatctcaaaccccacgaaggatactccttattccttgctttagtcattgaccggctgcacaactatgtcaaagaaaatcgaaggctcaggaagaaattggaagaggtgttgaaacagaataaggcactagaagaagcaacaaatggaaagctagaagagaacaggcctgaccagaaagacctttcccatgccaaggataattaacaatgacatgcgctcaagaaactccctgccatcactgcctatgcctgaataggatgccggtcactgatgttctccctgttgagaattagcattggtaaatgaatgctcggttacaacgtgctaaatcctttgcatctggccaaatttgtaaataagcactgggtgatgcccatcagtaaacacatgatgctactgctgttaaactaaatgtggcaaatttcataatgctagttggcttcggaactaaacactacccaatacaacgccggtactgtgagcgataaagaccgacccacgattttgtttctggctgagctatgcatttctgtatc

SEQ ID NO: 13076 - DNA, 100 bp, Zea Mays
caaccctggaaatcggttcagccggaggtagggtccagcggccggaagagcaccgcacatcgcgcggtgtccggtgcacccccggcggcccttgaaaatc

SEQ ID NO: 13077 - DNA, 1888 bp, Zea Mays
cgagttcccggacccgagctccccgtcgcccccctctctctcgctcacgccctttattaacgcacagaggacagcacactgtattgcgggaactgaaagcaaaccaaaaaagaaagagagggggagagacacagaggcctcactccacacactgtcttgtctctcagtcccagagctttcttggatcgcgaggaatccactggaaattttgcaattgtagtagagaactgtatcgtccgacgaaggtgcatggtgttggccatgggtcacggcagggaacagagacgagcaggtcggcgctctccccccagctcattgatcctgtcctcgctataaggtagtcctgcggtggcctccgaatttcactcgatcgaacacgacatgaagcggccacgcggcgccagtccccctctggctgcgatgaccaatccgaacgatgatggttacggcgtggtcgggatggaggcggacgcagacgcggacgcggacgaggagatgatggcgtgcggcggcggcggggagaagaagcggcgcctgagctccgagcaggtgcgcgcgctggagcggagcttcgaggtggagaacaagctggagccggagcgcaaggtcgccgtctggttccagaaccgccgcgcccgctggaagaccaagcagctggagcgcgactactccgcgctccgccagtcctacgacgcgctgcggcacgaccacgacgcgctgcgccgcgacaaggacgccctcctcgccgagatcaaggagctcaaggcgaagctcggggacgaggaggcagcggcgagcttcacgtcggtcaaggcggagccggcggcctcggacgggcctccccccgtaggggtggggtcgtccgagagtgactccagcgcggtgctgaacgacgcggacccgcccgtggcggaggcgccggtgccggaggtacggggtactcttcttgacgcgcccggcgccgtggcggcgaaccatggcggcgtgttcttccacgggagtttcctgaaggtggaggaggacgagacggggctcctggacgacgatgagccctgcggcgggttcttctccgtggagcagccgccgccgatggcgtggtggaccgagcccacggaacactggaactgaaccgaggcggaggtagatgcagcgcagcgtagactcgggatctgggccgagcggtggaggaataaagaattcggagcgagaggcgggggcttttctgcaaattttgtaaaatggagttttacgtagccctctttcgtcaattctcgcgcgaatattttagcagtagcagtagtctttaggaacccagtcgagatcagtacctggttgcgtttggactcgaatgcaaaaaaaaatgcaagaaaaagagatgagaccaaacactgatgcagaaaggggagagagggacagtgggaagaggagtgtagaggaagagctgagcgaggtagggagtaaaggacaagctgtatgtcactgttagtgggcccagggccacgtgaaagtcaggcattgttggcgcccaattgaccgccggacttgtcagtgatgcggatcggcgacgtgaacgtgtctggccgtgcgctcccccaatggcctcttccgcggaagcgtggctctggctccttcgtcgacctgtcgtgcgtctctgtatctaattttggatgctcgccgacgccgctagatagctgtttggatgccgtgccgtgagaaatggcgatcgtttttgtgccctcttgctcgagcagatgcttgtccttgttataaaaaaaaaccctgcgaggtgttatataggctagtgtggggttctatctttttctccaataaatatgtagccctttataataactaatgaataaaagataacgcaagaaaaagattttct

SEQ ID NO: 13078 - DNA, 161 bp, Zea Mays
gtcagaagtactcagagaaatgatacgactactgttcgtggagccaatacctgaataatgaaccgaagctgtttgcttgtcagataaaaaaaattatatatgtgcttttgaaataattgtcacagtcatgtttgaggacatgcatggtgtgatattatggg

SEQ ID NO: 13079 - DNA, 118 bp, Zea Mays
tacctttttaaggagctttgatctctccgacactcggtccaacagcttccggacatatgtatgattctcacgcgaacaacactgaaatggtctagaaccgagagcattccgaaatctg

SEQ ID NO: 13080 - DNA, 579 bp, Zea Mays
gagcacgccattgccagagcaagttaatttgtatgtcaggtttagctacacatactacgaaaagaagcacggtgccatccataaatctatcgaggccttggaccgtatgggcatggagatcatagagactggcgatcccgtagcgttcaaagaatacctgcaggagtacgagaacaccatatgcggacgccaccccatcagcgtcttccttcacatgttgaaacattgctcgacaaaaattaagataggctttgtccgctacgagcagtccagccagtgcaagaacatgagggatagcagcgtgagctatgcatccgcagcagcgaaggttgctggtgcatccggggaagaagataaacaagactgagcgagctacagctctgtttgatatactatatataagccgccaaaccttggtgcggaatgtgtgactggtttcccataagaaaaagaacatgtgatttggtaaaacattttcttcttcagtaaaataaataaatatgcagactgctggggatctgtactaattaattaagagattttcctaacaaagtaaaaaaatatataaataataatcaa

SEQ ID NO: 13081 - DNA, 76 bp, Zea Mays
acaaggtgcagttggtggacgacctaaagaatgatggacttaaccagtggatgctcaccaagcgagtacctccccc

SEQ ID NO: 13082 - DNA, 1506 bp, Zea Mays
aagttgccagtagcaggcggctccgtatagtagaaagagaagacgacgtgtgttttggcctccggaggagcaagccccccaaaaaaaacgagcagggagcggttaaaaagcaggcaaaaaaggggagacgccacgagcggaagacagacaggcaggcaagcgagaccaaggcgggggcggagcgcgagaggcgacgcgagaggcgagaagtggaggcggtgctgcggtggcatgccatggttataaaaagtaacggagcgcgacgagggtagaaagaggaaggcccgccgcttccccttcttcattcccgtcccacacacgccgccgccgccggtgcggctcgcttccgtcccccccggtccgcgcgggctgcctgcgggagcagggtggcagggcactccggcaaccacgtgggtggggaggcgacgacaccaccctatgctctgtcctcgcccgcagggtaagcagcagtgaatttgggagcttgaagcattcatctgagacatggaaaaagtgatctgctgggcatatctccttcaacgcaagcagttctcgaaagaaactcttgattgctgtgtcttagctcgtgggaacactcctctctcctctctcgtgaactacacatagtgattatatgttcctctatgctcaacaacaagcaggctgatgcgatattttgctgaagttattatatttcagtctatgccagacatctacatggttgatatatttgctgtgttcagcttacatctgttgcggccctagttagctatttgtcttttgtgtactatctgaggcaagagattgatcagctaggacttggcgaacacttgcctgtgttggctgttcatctgaagggggaaatttgcacgagacacctcggatattacaacaatggatagattcaagttgattaaggaagttggcgatgggactttcgggagtgtatggcgtgctataaataaacagaatggtgaagttgttgctgttaagaaaatgaagaaaaagtattattcttttgaggaatgtatgggtttgcgtgaagtaaagtctttgcggcgcatgaatcatcctaacattgtgaagctcaaagaggttatccgagaaaatgatatattatacttcataatggaatacatggagtgtaatctctaccaacttatgaaggataaggtcaagcctttctcggagtctgaagtccgcaactggtgctttcagatatttcaggctcttgcttacatgcatcagaggggctactttcatcgtgacctcaaacctgagaatctgttggttagcaaagatgtcataaagctagcagactttggtcttgcaagggaagtttcatctttgccgccatatacagaatatgtctcaactcgctggtatcgggcaccagaagtattgctccagtcatctgcttatgattctgcagttgatatgtgggcaatgggtgccataatggctgagttgttgacactccatcctctctttcctggaactaggaag

SEQ ID NO: 13083 - DNA, 1352 bp, Zea Mays
ttctgccctcacaaattaacaatacaacgagccaacaagttgatgtggagaccagatcagatcacggacgacacagacggccaccaaatctgcacctgccccagatgcagcagaggtagtcgccacggcgccacctgcccactgcactgcccccagagcctccaagctgcatatcggaagtgaagcgcctcgcagtcctcctctcggatctcgcggtggaagtcgccggtccactcgatcagcgagcgagtcggtgccgcgcggcggattccccgacccgagcaaaggaaccggacatgcggccgcggctggtgctcttcggcgactccataaccgagctgtccttcgcgtccggcggatggggggccgcgctcaccgaccgcttcgcccgccaggctgacgtggtgctgcgcgggctcagcggctacaacacgcggtgggcgctcaaggtgctgccgcgggccatggagggcgcggcgggcgcgggcgcgggcgcggacccggcggccgtgacagtcttcttcggcgccaacgacgcctctctgcccgaccaggtgcaggcgcaccagcacgtgccgctcaaggagtaccagagcaacctccgcgccatctgcgcctatttcaaggagcgatggccctccactgctgtcatactcatcactcccccaccgatttacgagccagcgagaatccgagacatgtatggagacgacgagccttcacgccaaccagaaaggagcaatgaggctgccggcgcttacgcacaggcatgcatagatgttgccacagaattgaaccatccagttatagacatctggaccaagatgcaggaatttccagactggcaaacatctgcattgagcgacgggctccacttcaccccagtaggaaacaagatcctgttcgaggaggtggtgaagacgctggagacgagcatcggtttcagccaggagcggctcccgtcggacctcccgctgttccacgagatcgaccccaaggaccccatgaaagccttcggagcttagcttgggccttatcggaggagacgcacggtcgttggatcagccacgtctgctgcatttgagttcgtcgtcagtatgcccgaggcctgctgaggccattacaggaacagtgagctttaataagcggtgttttcagtaccgtttggttgtcagcgcatcacgtgttgttggaacactgtggttggataaaaaaatcataccctctccgtccgaaattaaaattcattttaccttttttataattcgtacaataattaattaatacatgtgttatatatatatatagattcattattatttatttgaatataaacataaacataaagaact

SEQ ID NO: 13084 - DNA, 1424 bp, Zea Mays
attatcgccctctcgctgggtggggaagaatcttgcttatacaggtttgcaagcggtaccggctgtactaccagcaggttcacacggtgatcaactcgttcgagacggtcgccgggttcagcaacgctgccccgttcgcggcgatggcgctgagagccatggcgaagcacttcaagtgcttgaagggcatgatactgagccagctgcgcaacatcaccaaggcccctgccggcaaggaggggctcagcaaggacatcgccatgttcgggcttgccggtggtagcgcggccgccctccagagaggtagcagtgtgggtgccttcggccagccgcacaacatctggcggccacagagagggctgccggagcgtgcggtgtctgttctccgcgcttggctcttcgaacacttcctgcacccatatcctactgatggagacaagcaaatgcttgctaaacaaacgggtttaacacggaaccaggtatccaactggtttataaatgcaagggttcgtctttggaaaccaatggtggaagagatccacaaccttgagatgaggcaggtgcacaaacaccctgttctcgacaagggccagcacgtgctgcatcaccaaacccagcattcgttcgagagcagtggaaagccttctgacccttccgactctcagcttggccaaagcagcagcatcacgaggaaccacaacatccctgcgtcccagggatttgccgatgagctctccgagatgtcccattctattcagcaggggcaggtaaccttcgcatacaatgggatgtcggcgccacaccacagcctcgcttcgtcacagcaccaccagcaggccgggccgatgagcggcattggtggcgcggggaacggtggcgtctccctcaccctcggcctccaccagaacaacagagtctgcatagccgagccactcccggcgtccgtccctcccaacctcgctcaccgttttgggttggaggaggtcagcgacccctacatgatgggctctttcgggaaccaggaccggcatttcggcaaggagattggcggccatttggtgcatgattttgttggctgacatggcagctgctgctgcattgttgcttctggtcagctgatctgatctcagcttgctgatggtgcacaagcatgtatttgtaccactactagtatgttagaatggtatataagtgtatcacttggtggctttggcttgatcagtttgaatcaattcctgaggatggagaaaaaacattgctgaattggcgagtccttgttggtccaggcgtgctatcaaatgctatttgacttccaaggctagaagcgattaggtggtttgccttccctagttcacacttgtttggtctgaattgagatttaactaaggggccctttggatccttcatttaaaaggaattgaaat

SEQ ID NO: 13085 - DNA, 738 bp, Zea Mays
attttactcatatagataatcttatataaaaataggtttatatatcctggtgctcttgccatggctggtgcatcgctcctctccccatcctgcacgctcctccgcctgattcccagcgcgtcgcacttcaagagattcgatcgggttcgccggttcgcgcccgccgccatggcgacttcctcaggaccaaaggaggcgccagcgaataaccctgggctccagaccgaggtcgaccccgccaccaaaggctacttcttgcaacaaacgatgttacgtgtgaaggacccaaaagtgagccttgacttctactcacgtgtgatgggcatgtcgttgctgaaaaggttggattttgaagagatgaaattcagtttgtattttctaggttacgaggatgtgaccttagcccctgatgatcatatcaagcggactgaatggacttttaggcaaaaagctactcttgagctcacccacaactggggcacggaaaatgaccctgaattcaaaggttaccataatgggaactcagaccctcgtggttttggtcatataggagtaactgtggatgatgtccacaaggcatgtgaacgctttgaacgtcttggggttgagtttgtgaagaaacctgatgatggaaaaatcaaaggcatcgctttcatcaaagatcctgatggttactggatcgaaatatttgaccagacgattgggacgaagagcctgtgaccgaggatcctggcgacc

SEQ ID NO: 13086 - DNA, 546 bp, Zea Mays
cctggcccgacttcagtcgcccagcgacgctagggtttcactctcctcagtcgcagcggttcccactctcgtctccagaagaagcgccgcgatgggttccccgccgctgacgccgtaccgccgatgggccactccactgcactccagcagaagcttgaggccaccacacagttcaggaagctgcgctccatagagcgaagtcccccaattgaagaggtgatcagcacaggagtcgtgccccgattctacgggcatgtgatgattttatatttaactgttgcctttacttgcctatgatgatatgttttataatgatgatcaatcaagggagtatgacttgtagcagtcttttcagtgaatcaaggatgagtttctgtttaatgcgtacagtgagaatacattaacaattactagcagtcattcatagtcagtcaacataggccatctgctgctagtacctcttttcttctcatgagttgtagcaatttctgtttaattcatatgaatgtaattacaattatattttaagttgctactatagtttct

SEQ ID NO: 13087 - DNA, 1662 bp, Zea Mays
ttccgaatctgtttgttgttaaatcgtagggaagggtaacgtcagatcaataaccactaaccactaaccacaacaggactctcatcgcatccgtccgccatggtgaggaagaaaagaactggccctggagagagttctggggagtcttctggagcgcctggtcatggctcctcacagcgtcctcaggcaacacaacagggtacccgtggtggagggcaacaccagggccgtggtggatatctgggccctggagtgccgccttcacagcacccaggtggtggcccacctgagtatcatcaaccgcttgactaccagggacgtggtggatatcagggccgtggtggaccaccttcacagcatcctggtggtgggacaccccctgggtctcaaccgcgtggctaccaggggcacggtggataccagggccgtggcgggccaccttcacagtatcctggtggtgggacaccccctgggtctcaaccacgtgactaccacggacgtggtggtccgcgtcccagagggggaatgccacagtcataccgtggcgggcatgtgggaggtagtgttgtaccaagtgttccttcaggtccatctaggccagttcccgagctgcaccaagccccagatgtccaacatcaagcccctgtggtggcaacaccatcttcgccaggagctggctcgtcctcgcagcctgggaaggctgaggtgagcgctggacaagtccagcaacagttccagcagcttgcgattcgtaaccaaagcttagccagccaagctggtcagatggcaccagcgtcaagcaaatctgttaggttcccattgcgccctggcaagggtacgcatgggtccaggtgcattgtgaaggcaaatcatttctttgctgagctgcctaataaagaccttcaccaatacgatgtatcaataacacctgaggttacttcacgcggcgtcaatcgtgctgtcatggcagagctagtaaaactttacagacactcccatttggatgggcgtctgcctgcatatgatggaaggaagagtctttatacagctggagcgttgccatttgcttcgaagacattcgaaattactctgcaagatgaggaagacagtcttggtggaggccaaaggcgccagagggtatttcgggtgaccatcaaatttgctgctcgcgctgatctccaccatctggctatgtttcttgctgggaggcagccagatgcccctcaagaggctcttcaagtacttgacatcgtgctacgtgaaatgcctactgccaagtattgtcctgttggtagatcattttattctcccaagttagggagacctcagcaacttggtgaaggtttggaaacttggcgtggtttctaccaaagcataaggcccacacagatgggtctttctctgaatattgatatgtcctctactgcattttttgaggccctccctgtaattgattttgtttctcagcttcttaatagagatatctcagttagaccattgtctgattctgatcgcgtgaagattaaaaaagccctacgaggtgtgaaagtggaggtcacacaccgtggaaacatgcgtaggaaatatcggatatctggccttactccacaagcaacaagggagttatcgtatgtgcatgtttcttagtttatatcagttgat

SEQ ID NO: 13088 - DNA, 3710 bp, Zea Mays
caaaaccttccgcatttttggttcagatcggcagccactccttcaccttcgaccatgtctacggcagcacaggcacgccgtcggcggccatgttcgacgagtgcgtggcgccgctggtcgacggcctcttccagggctacaacgctacggtgctggcatacggccagaccggatcagggaagacgtacaccatgggcactgcctgcaaggaggggtcgcatatcgggatcatcccacgagccatggctgcgctgtttgacaaaattgagaacctgaaaacccaagtggagttccagttacgagtatcgttcatcgagattctgaaagaagaggtgagggatctacttgaccccactgctggtaccgtgggcaaagcagagaatggcaatggccacgcaaaactgtctgtgccagggaaaccccctgtgcagatccgagaggcgtcgaatggagtcataacgctagctggatccactgaggtgcatgtcaccactcagaaggaaatggccgcatgcctcgaacaaggttccctcagtcgcgcaactggaagtaccaacatgaacaaccagtcaagtcgttcccatgccatcttcacaatcacattggagcagatgcgcaaaatagaccccatcatgactgcagatggaatgcctattgaagagatgaatgaagactatctctgtgccaaactacacttagtagatcttgctggatcagaacgggctaagagaactggttcagatggcctgcgcttcaaggaaggtgttcacatcaaccgaggacttctcgctctcggcaatgtcataagtgctcttggagatgagaaaaaaagaaaagaaggtgctcacgttccttatcgggacagcaagctcacccgtcttttgcaggactccctaggtggaaatagtaagactgtcatgatagcttgcataagtccagcagatattaatgctgaagagacattaaacactttgaaatatgctaaccgggcacgtaatatccaaaacaagccgattgtcaatagaaatcctatcgctgatgagatgaaaagaatgcgccagcagattgaatacttgcaggcagagcttgtttcggctcgaggaggagccacatcagatgatgttcagggtctcagagagaggatttcatggcttgaacaaacgaatgaagacctctgcagggaactatatgatagtcgcaaccggtctcaaaatgatccatgtgaacctgaaatacaaaggactttaaacggctttaccaaaagcgaagggctcaaaagaagcttgcaaagtacagatccatttgatgttccaatggctgactcagtaagaggcaaccctaaggatattgaagatgaagtagctaaagaatgggaacacacaatgctgcaggatagcatgggcaaggagttgaatgaattaaatcgacaacttgagcgaaaagagtctgagatgaaaatgtatggatgtgatactgttgcacttaagcagcacttcggaaagaaacttatggagcttgaagaagagaaaaaagcagtacagcaagagagggatagattgttggctgaagttgaaagcctaagtgctgatggccaaacacataaactccgagatgcgcagctgcagaaactaaaatcccttgaagcccagattctagacctaaagaaaaagcacgagaaccaaattcagattttgaaggaaaagcagaagagtgatgaagctgctaagaaactgcaagaagaaattcattttataaaagcgcaaaaggttcaactacaacacaaaattaaacaggaagcagaacagttcaggcaatggaaagctacccgcgagaaggaacttcttcagttacgcaaggagggacggagaaatgagtatgaacgccacaagcttcaggcacttaatcagcggcagaaattggttttgcaaaggaagaccgaagaggctgctatggctacaaaaaggctgaaagagatattagaagctaggaaatcttccgcccgtgacagttccgctggcagcaatggtacatctcaaggctataatatgggtgagagatcgctgcaaaaatggtttgatcaagagcttgaagttatggtgcatgtgcatgaagtccgaaatgagtacgaaaaacaaagccaactgcgtgctgcgcttggtgaggagcttgccattttgaaacaagaagatatacgggctggtggatctagtccccaaagagggaagaatggaaactctaggacaaataccttgtcaccaaatgcaagacaagctaggatagcatcacttgagagcatggtgacaatctcttcaaacactcttgttgcaatggcttctcaactctcagaagctgaagaaagagagcgtgccttctctgggcgtagtcgttggaatcaattgcgatcaatgggggaggcaaagagcttactgcaatatgtctttaatgttgctgctgatgccagatgccaagtaaaggagaaggaagtggagatcaaggaaatgaaggaacaaatgacagagctggtgggcattcttcgacacagtgaatcacgcagaagagaaatggagaagcagctcaagcaaagagaacagacaactccaatggccactacacctccgaaaagtggaaatggcacgacgaagcactctgctgatgaccccaacacaccactgtcccctgtcgccgttcctgcacagaagcagctcaagtattctgctggaattgtaaatagccccagcaaaggagttgctgcgataaaaaaagagcaacttaagatggttccaattgcacagttgtctgcggggaagagagtttcaatagcagggcattcaggaaagctctggaggtggaaaagaagccatcaccagtggctgatgcagttcaagtggaagtggcagaagccgtggaagttgtctgaggtgatacgacacagtgatgaaacaatcacgaggattaggcccagacctccacttcttccacataaacctcataactgatgtgaaacggacttgtttttgtctcaacaagaactgacacggtttgcaaacctacacagctaactgcctgcacaaggtaacaatgcagttaatactccatgagatctccttcgtgcttgtttttacttggccacgggatcgacaagtatgtgttcatgggtgactcttgtctatggatagatgtaaattccctgtgggttggtataaagtgagatgtcaacgtagagaaagaaaatagttagtgggtgagtgagcagagtgaatgggcattctttcatgcaaatactgagcacaatgcttaatgtttcagccttcactgacggtgacatgtcaatagttggtgttcgtcttcacaaaggaatctgtcaaaggaaggcgccttgtaaagtctttcttgtgctgttgtgtgatagttttgtgtgaagggtaactgaaagttgaatgggttttgtgctcgagtgatagtctattttcccctcttcttttgtttgttgatactaaaatgagaaaagacaagtgatattggtttggtttgctaggagtattgtgatgtaatgcagaaacttgttcccctatatcagtacacccttttaatctatgtattgtggagtactgattgctgactactgttgatgtccgaagggatccggattacacaccgcacgtcttcggttgacacacgacattaaatacagcagggaacatagaggatgg

SEQ ID NO: 13089 - DNA, 695 bp, Zea Mays
tgagaactctcaaccttgtgcttccgacgaacgaaattgatgctgcatgctcaggctctcacgctggctgccttggctgggtccgcgctggtggagtactacgaccaccagcaagggtcaggatcgaaagttcaccaatatgcaaagcagttcctttcatctgatagcaatagcggccaacaaaaggagtagctagccagtgtccttgcgaagtgcaagcagcggagtgggcgttatttcctgatcaaataattttgcctatggcacattctgtggaaactttgacggatctttgcctgcttttctatgcgatgtaagctgctgaaacctgcactcatcaaatgttgtgtatgcagatggtaccatgcatttgtttccctgaatggcttcaaatgaaatgaatgtttttttttatcggtatgcatcatgggacgtcacaacgattttagctgtttgtctaagtcgagttcagcagaatgttctctgtttacacaacatctgagtgcaggctttgatggccaaaaagtcacttcccactgacaacgacaacgagatctaatatccagtcacaggacatcggctggagaaaacctccaaagaacataggcgacaatactttaccataaaatagtgttggagatgccaaacaaaccttcaaaggacacagacttgtaataatttattatataacagtg

SEQ ID NO: 13090 - DNA, 90 bp, Zea Mays
ctcgcccgtgtgtagatatcgcgccggcgccggcgccggtggccgcggaggtggcgagccggaaggaagcagaaccgaactcgatcgtcg

SEQ ID NO: 13091 - DNA, 490 bp, Zea Mays
ttttaccatacctagtcatgacagctgtttatttcctggaagtaagctgctgaacaacgccactggatccggcaacacgaacacatcttcgacacctacaagtgacgctgagggatctgcgatatggagactaagaactgggagggacaaagggctgttgctcttccttcggttggtacttagcattgcggtggctatcgtggtggattcgaacttttggacatgacaagaggttgctagctgtataataaactaaagccagaaattttgggtggtatgttagaggaggaaggaaggaggtgggcgggggattgggttatgcttagtgattctttattgttagataagcattaataaattgctcatttttcttcatctgatgaaatgtgtctataatttgttgaaatgtcccgatatttcaatctgctgggttcatgtccatacaatagttttttttatcaaattactgtaggattggcctacagttttt

SEQ ID NO: 13092 - DNA, 2054 bp, Zea Mays
tttctttttttttggtcatatatgaactgaattattagttccacacaatttcccagcttctggttcggcatgtagataaactgaattattaagcttcacacgattccccagcttctggtccggcatgtagatgaactgaattacagtacatgttattatggccactctacgcagatggaacccgaacgggaaaccagatctgtcagtactcagttgccgccagcgcagaggagggcgtcaaccttgtccttgaggtgcgcctcgtcgtccccgaggcgggcggcggcggcgccatcctcccagcggatcagcgttggcacgcccttgagcccgaacctggggtccaccctccacgggtgcgccgggtcgcgccaagtgggcttgtccccgacgtaggcgcgcaggagcaccgcgtccttgccctccagtgcctccagccgctcgtagatcaccggctccgccacgttgcagtctgccgcgccgcacaacgacgacggtggggtgaatgggagtcaattattaaagcttacgagaaggaccatgtcttccttggagaggcagcgcagatcatggttcaaaatgttaactatgacattccatatcagaggaagcagatgcagaagactcagcagcagcttgcagagcttgatcgaagggaggctgacatcaagcgtcttgcggcattgtcagcgactagatatgtagaagcctgccaggaactcggtttacagggaataaatgtgagggaagaactaatagagtccgcaaaaacactcccatctacttttagcaaaatcttggaggtcctgaacagtgatcctgtctcaaatgctatggagtactacacaacttttgttaaggactgccatactgaggacaagagaaatagtgattctgtgctacccaaactgaaagacttgcaggccaatcctccttctttgcatgtctcagtatataatgagatcaagagttctcttggagaggcatcaaaatctcctgggtttactgtgatcgcgggagaaattgactcaaatgttgctgctgctgatgatattgattgggacatttctgtggatactaatgaaattgattgggacattggtgctgtggaacaacctggtgaagaatctggcgatggctttggatcgtatgaaattattgatgctaatatagagctggccggttctgaaaattataatgttggtgtctcagacaaatcaatgaacaaagaagatcttgcatcatctgagtctggtatttgctgggacatcactgctgatagttctgaagaaattgctagtatacagaatgcttcatctgtattagagcaatctcagtctcaaatgatagctgaagatagaagtttgttgctggaaaaagaatataggaataatattctggatgatttactcgaggtaaaatcatttttgactcaacgcttaggggagatgaggaatgcagacacatcatctctacagcatcaagtgcaagctgtctcaccttttgttctccagcagcatgctcctgacagtttggagaacatgcttgtagagatctcgtcagcaatctcattgctaactaatcagaagactcttgaccttataatgatccttaactctaaaaggtttctggatagattagtttcaagcttagaagagaagaagcatcacgaagtaaaactacgggaaggtttaggtgatttatctgttaagcgtatggagctgcaaaacgcactgtcatcatcatggccaaagcaagaggcagcaattacaaaaacaagggaactaaagaagctgtgtgagtcgacactgtcgtctgtttttgatggaagaccagtgtatataattggagagatcaatactttactgagctcaagtgttagtcaattagctggatgactgtatttccgttcctggaccaaataagattgcaaaaatattatcttatggtatatacttctgaatatttatggtttcctggtcctgtttctttgctgcacggaagtgcggatgtatgggtttgaattaaagtgtcagcttcatcgtagggaccgg

SEQ ID NO: 13093 - DNA, 1646 bp, Zea Mays
cctgaagagagcatcccaacatggcaacatagagctagatcagctggcagcccaccacgctgctggtacgacacagaccacgttcaattcaaaacccaaatcaactccgacgctcccagacaccagaccaccgtcgctcgctcgcctgcacaacctctccatccaggccacagctcgagaccaacgaccgacgcctagacgcggctgggcggtcggcctcacctcgttcccccgcctcccttcttcctgctccgcgtctcgatctcgactcccccgccgcgtcgcgcgacccggccagatctcgcccaccctgcgccgcggccatggataacttgatcaccctcgtcaacaagctgcagagggcttgcacggctctcggagaccacggagaggagagcgccctcccgacgctctgggactcgctgccggctatcgccgtcgttggaggacagagctctggtaaatcatctgtgttggagagcgtggttgggaaggatttcctaccgaggggttcaggcattgtaacccggcggccgctggtgctgcagctccacagaattgatggtgacagggaatatgcagagttcatgcatcttccgagaaagagatttacagattttgctgctgtgagaaaggagatagctgatgaaactgaccgagaaacaggccgttcaaagcaaatatcaactgtccctatccatttaagcatattttctccccatgttgtgaatcttactcttattgatcttcctgggcttactaaagtagcagttgatggccaaccggagagtattgtacatgacattgaaaacatggttcgctcatatattgaaaagccaaattgtatcattctggctgtgtccccagccaatcaggaccttgctacttctgatgcaatcaagatttcacggggaagttgatcccaaaggtgaaaggacctttggtgtgctcacaaaaattgatctgatggataagggtaccgatgctgttgatatactggaaggaagatcttaccgtctccaaacaccatgggttggtgttgttaatcgatcccaacaagacatcaacaagaatgtggacatgattgctgctaggcgtagagagcgagagtattttgcatctacaccagaatataagcacatggcttctaggatgggatctgaatatttaggaaagatgctttcaaagcatttggaacaagtgatcaaatcaaggattccggggatccaatctcttataacaaagacaattgcagagctggaaactgaacttaatcgtcttggaaaacccattgctaatgatgctggggggaagctgtacacgatcatggaaatatgccgtatgtttgatggtatttacaaagagcatctggatggagtgcgccctggcggagagaaagtttaccatgtcttcgacaatcaatttcctgtagctattaaacgattgcagtttgataaacaactctctatggaaaatgtgaggaagcttataacagaggctgatggataccagcctcacttgatagctccagaacaaggatatagacgccttatagaatcttgtcttattagtatcagaggtcctgctgaggcggctgttgacgcgaacttccgttgttgctgtgctgctgaatcagctgggcctat

SEQ ID NO: 13094 - DNA, 2604 bp, Zea Mays
gatcccgtctccgctttaccaaaacagctcctcgcccaatcattctctctgcctcgtcctcgcgccgcctctcatcttccgggagtcagcggcggcggaatatggcggggaaatccaagggtgggaagaacaaagggaaggcgcaagtcgtgggtcactccgcctcagctgagccagaggtgctggcgactgatggagccgaattggttaatccagataacggggaagtaagcgaacccggggaagtaagcgacccccctgccacggaggatggcgtggcagatgtagagaaaggagacggggatgctccggaggttgtgcagtctgcaaaaaagccagctgaaggagagcttcatctgtaccctgttcctgtcaggacacaatctggtgaaaagctcgagctgcagctaagcccaggagattctgttattgatgttaaacaattcctcttggatgctcctgaaacatgcttctacacatgctatgatttgatattgcatactgaagatgggtcagctcatcagttagaagactacaatgaaatatctgaaatagcagatataacttctggtggatgttcactggagatggttgctgcaatatatgatgagaggtctattaggtcacatctccgacgtgtgagggagttactatctctgtctactcttcatgtttccctatcgacatccttaactctgcagcaggagtctgcccagggaaaatctgcagattctggaaaaagccctattcaggagcttgatggtttaaattttatggaggatagtgctggtgctctcactaatttattggcatctacaccagcagagataaaatgtgttgaaagcatggttttttcttctttcaatcctccgccgacctatcggaggttacatggagatctcatctatattgatgttgctacattggaaggaaacaaatactgcattactggaagctccaaatctttttatgttaacagtagcaacaaaaatatatttgactcgaaacctacaaaacaaggactggaggccagcactctcgtaggcctactacagaagatcagtgccaaatttaagaaaggttttcgtgaagttttggatcgcagggcatcggctcatccatttgagaatgttcagtctttgcttccagtgacttcttggctaggagcgtatcctgtgcccgaacatagaagggatgcagccagggctgaagattctgttgtgttgtcatatggcactgagttaattggcatgcaaagagactggaatgaagaattgcagtcctgccgggagtttcctcatggcaatcctcaagaaaggatactgcggggcagagcgctctacaaagtaacatgtgattttgttgatgctgcagtaaaaggtgcagttggtgtcatcaatagatgcatacccccaataaatccaactgacccagaatgttttcatatgtatgttcacaacaatattttctttagttttgctgtcgactccgactatgaagacatttcaaaggaccacaagccagattgccaaaatgggtccagcagaagcaccaaggtttcctccccagatgtgataactaagccagatgcaaaccatggcaaatctgctgaggtagttgattcaaaatctgaagaggcacaactcgcagatagtgagcaggcgacatatgcttctgcaaacaatgacttaaaaggaactaaggcttatcaagaagctgatgtttctggccttcacaatcttgcgatggcaatagttgattacagaggtcacagggttgtagctcagagtataatacctggtattcttcaaggagacaagtccgattcccttctgtatggttctgttgataatggcaagaagatatcttggaacgaaacgttccattctaaggttgttgaggctgcaaagcagctccatttgaaggaacatgtggtattggatggttctggcaatcctataaaattagctgctacagtcgaatgcaagggtattgttgggagtgatgacagacattacattttggatctgatgagagtgactcctcgagattctaactacattggacaagagcaccgcttctgtgtgttgagacctgaacttatagcatcatttgttgaggttgaatccataaaacaatcgttgaagcaaaaggttccagatgctccagttgcaagtacttctgatgctaaggctacctctgttgaaggagatgacaagtctgaagaaagctctgttcatacacacgaggaaaatgacaactcaagctccgagattcttttcaatccgaatgtgtttacagagtacaagcttgctggcagtgcagaggaaatcgctgctgacgaagagttggtaaaaagggctggtacatatcttgtagatatagtgatcccaaagtttgttcaggatctttgttcccttgatatctcccctatggatggacagactttaacagatgcattgcatctccatgggataaatattaggtatctgggcaagattgcaggcatggtcaaacatttaccacacctatgggacttgttttctactgagataatagttagatctgcaaagcatgttatcaaggtacttggccacacttgaa

SEQ ID NO: 13095 - DNA, 883 bp, Zea Mays
ggccttcctgaaagagcttgaaggtgaattcctcaaggtgatccattgtacagaggagatgacaaagcaaaccttatgggatgccatgcacactgagcagcctgatttggaagctgtcaagattgcaggaccactgccaaggatatgcatattttctggtctaactggcgaggagatgatgatgttcatcaacgccttcccagaaaccgggctggaagcagctgcctttgctgcgcttgtccctaacagtgcagagaaggttctcggcgaagtgatcgaggaaataatgggagaccatgagatgctgacaggaaaggactccaaatgagaagaatttgaagcacggacatgcctatcaagaaaattgtcactttgcattctgatatatggcatctaaatctgattcaaattgccgcaacaggaagctgggtatggaaaaaactgttcaagatagtgttgcagaagaaacatcagtttaatttttcttctgataaatacgggtccttttccatctggtcacctccagaatttgagctcctacttactgtatgtcgtacatataatatagtttatagtgaccaacaagttgctcatgactggccagcttttggactttgggggctttctgtccgttgacttttttctattgatttttataatattttatttagcttttcagtacataacaatctagagaggcttctctcagcgtgttttatagcttttagtttatttgtttactcaaaagtcagttgtccagatttttaaacgccaggtcaacatcttatggcttctggctaccagaaactattgaaacaaagctgagataaatattttgagacattcccaatgatggtctcaaaatgttttttttctttcccta

SEQ ID NO: 13096 - DNA, 1079 bp, Zea Mays
gacaaatagctggagatgctctagtatattgaaaggaaattttgctccggatcgaagttgaaagagatgagtgggagtgggattttcgctgagaagagtgaaaatggtgactcagaggcttcaaatcctgataacaagacttccttgaggatgtaccagcaaactgtgactggaataagccagatttcatttagtgctgatggaagtgtttcaccgaagaagccgtcgtcaatacctgaggtggctaagcagcgagagcttagtggtaccctggaagatgctgatgctaaaatcaataagcagctttctgaagccaagaccaaggagcttagtgggagtgacatctttggtccgcctcctgagattcctgccaggccattggctgctcgtaacatggagctacaaggaaatgtcgatttttcacttccacagcgaagcgtccacacatcagttaaagtatcaaatcctgctggaggtccgagcaacatctcattcagtgaagagcccgtagtgaagacagcaaagaaaatccacaaccagaagttccaggagctgacaggtaacaacatcttcaaggaggacgtcccttcctcagccgagaagtctctgagctctgcgaagctgaaggagatgagtggcagtgacatcttcgccgatggaacgccagctccccgagaatacctcggcggcatccggaagccccctggtggcgagagcagcatcgcgctgatctgattgtcctggactgctttaattcggaccggctgtagctcccatcgccactaaagctcgcagagagtgcatttctcgacctctcgattctccatccgtgttgggatcataatttatgttgggtatcgttagtctaatataatgtagagtcagcagaatctgactcgtatcgtctgatacgctggtgtgtgatctcgcatcttttattgttgcgacattattatgttatatatttgtacacccgaaccgaaacttacgcaataattaaattttggactcattttcagggattatggcatcataggatgttttacttgtgctgttgtttgacgcaaaaggtccatact

SEQ ID NO: 13097 - DNA, 1173 bp, Zea Mays
aggactggtttacgcctttacggctcgcccccgtcttttcttctcgtgttctcccctccccgcgtgcgctccctttcgtggcacgactgggcgaccgccgctgtacgccagctgctcagatctcgtcgggccccttcgccggcgaccatcacctgttagtgaacgcagggagtccattggatgtctcaaagaggtctaggattgttgaaccaggcccgccctattttggggccatgggcagcaacactggtggtgccagtggtggcttctaccagcccttcaacagcagcaacttagctggtgcaggggctagcactggcatccaaaactttccaggtgtacggctgcgaggtctcccttttgattgcaatgacattgatatctgcaagttctttgtgggactggacatagtggactgcctcctggttaacaagaatggccgcttcactggtgaggcttttgtggtcttcccaacagctatgcaaacagaatttgctctgcatcgtaacaggcagaacatgggccggaggtatgttgaggtgttcagatgtaagaagcaggagtactacagtgcaatagccaacgaggtgagccagggtggttactttgagtcggagtgtcgccgctcctcacctcctccgaggccccctaagaagactgctgaagacaagggcagcatggagtacactgaggtgctgaagctccgtgggcttccctactctgcgacgactgaggacatcatcaagttcttcctggagtatgagctgacagaggagaatgtgcatattgcgatccgctcagatgggaaagctaccggtgaagcctttgttgagttcccaacagctgaagttgccaagacggcgatgtgcaaggataagatgactatcgggacgaggtatgtggagctgttcccgtctaccccagaggaggcgagcagggcgagaacccgaggcaggcattgaagaaacgaatggcttggctgaatgatctctggttgcatgtggctgcaatcgactgtagttttcacttcgcatgcttatctgtatcgcttttagattgtgttagttgtgtgtatttgacttcttatatgcgaactgaactgtaacaactttcctttgttggccggccgcacatgtacggcataatcatttatggattttgctacaaaaaaaa

SEQ ID NO: 13098 - DNA, 2330 bp, Zea Mays
agtcatattcttacttcatttaaggacaaatttgcgatatgtgggaaggatattatgctgacgctcattgctagacgctccaggcattatgctggcaccaggtatctaaagaggggtgtgaatgaggagggcagagtagcaaatgatgttgagactgagcaaattgtttatgaaaacatgcttggaccatggcaaataagctctgttgtgcagaacaggggttcaattccactattctggtcccaggagacatcaaagctgaatcttaagcctgatatcatattgcatgaaaaggacaaaaattatgaggctaccaggcttcattttgaaaatcttaggaagagatatggaaatcctatcatcatcttaaacttgattaagacacttgagaagagaccacgtgaaatcatactccgttgggaatttgacagagcaataaagattattaatagtggtctaccaggtgaagatcatttaagatttttacattgggatcttcataagaactctcaaagcaaaagtacaaatgcccttcaagtgcttttgaaagtggcatttgaagctttgaacatgacagaattcttttattgtcaagtttccccagatcaaagggcaaagggctcccctaatttaagccctacattgaaaattggttttggtcatcatgcgtgtgatgacaaaaattgtggcaatgcagattatgttgatgatcttgatgacatttcccaagaagatacctgtggtagttctgatcctggcaatggaattgcggaagataaatttgaggtcaatggatctgctcaaataaagcgtccaaaatttcaaaagggtgtcttacgtacaaactgtatagattgtttggatcgcacaaatgttgctcaatatgcctatggcctagctgctttaggacaccagttacatgcacttggttctgtagaatctccagaagttcatctagactctcctttgtctcgacatttgatgcatttttatgaacgcatgggtgacacacttgctttacagtatggtggttcggctgctcacaataagatattctctgcgaaaagagggcacttgaagtttgccattcaatctcaagagttctttaggacactgcaacggtactacagtaatgcatatatggatgcttacaaacaagctgcgataaacttatttttaggatacttccagccacaggtgggaaaacctgcactttgggagccagaatctggtgatgagcatgtacttgatgacgagacatgtaaattgatgaagagggcaagatcagatggcagcattcttaataaaagcaaactatcaatatccagtaatggcccaaatggaattttaaagttagcatttactggttcaaaaaatgaagggcagcgtccaaaccggagttctgatacagcctgtgacaatggcatgtcaaagtcaaggtatactccgacactgtctcacattaagcatataagctgtgaactagactattacaatggttctggtgattcaaatttcttggatcttgactggcttacagcttcagacaatgaaaggtcaaaagccataagcactcctgatgtgaatatttcaactgatagtggtgttcgtgatgtaatatctgggacaacggacgatcaagcttctgggatccacgcccaggggttttcaaaggatttcgtgcagtggctcaatcaaggagaggcgttttggtactgacatcgcaaggtgggcttaccatgtaaaaccaagccacacgatggttgcacttgcaacccaaacctggttccaaaagcatcataactctcaaagaccattgcaagcaaggagggcaccatcgacgtgcacgagatttgcttgtcaaccatcagcattctcctcgcggccaaatatgatgacggggcttagagtcgcacacactgttagcagacttgtctagggaagtgtaccattctgttcattgattggagcttgctcaccaggcgggtagatagcgcatcgctgttgttcttctttaaaaaaaaaggaaagaaagaaggtggtaggtagtagtatattcttttgaagatgtaccattgtccagacatcatcgtctccatctccattgtgtaaatatatatgtatgtcccaggtgctcccacctttcgcttcgccgttgtgagagttgaggtgggcaaaaaagcatcattttcccccctcggttgggggtctttcccttctggaatcgtgtacatgtgtcttctgtggcaggcaacaggaggcgagattgttgtgtacttcccatcgtactaaacccctctgttaccgatactgcccccttggaccgttcg

SEQ ID NO: 13099 - DNA, 473 bp, Zea Mays
attgcatcaattgtattcatagttgttaaggcggcaaggcgagtgcggatggcaaatatttgttatcaggtggtgaagatgatcttgtgcaagtatggagcatggatgatagaaagatagttgcatggggtgaagggcataattcatgggttagtgcagtttcttttgatccgtattggtccccaccaaattctgatgaaacggaagaaaatgtcatgtatcgctttgggtcaattggacaggatacccaactgcttctctgggatctggcattggaagagattgctgtccctctacgccatccgtctggtggctcaccgacattcagtagtggaagcccatctgcacagtgggataatgcgtgccctccagccggtgttctacagccttctccacggatgcgagatgtgccaaagctctcacctctcgttgcacaccgggtacatgtagatcccctatccggcctggaattc

SEQ ID NO: 13100 - DNA, 510 bp, Zea Mays
agctcttgcgagttcttcccaaaaggttcagtggtaaaccaggagttaaagccaacaaaatccattgaagacaatgctgagataaaggcatggcttgctttggggacgaaatcaaagaagaagggtggtggaaagaagaagaaaggcaagaaaggagatgcagcaggagatcccatggaggcgacaaacgatgctacaagccaagaataattctgatttttggaattactgcacccagcattttctctcttgtttcttcgctgcatctgatggtgttatattacattcagttgcgaaaaaatgaatacttttttctagtgtctaagaaacgaagcatcctgttgcacattatcgcatccaatggcacaaagataattatctacgaggcatgcctagtgttggttctctgttcttcgtgacttcacgcccttcacttctcgcagctgataccagactggaaattttagtgcttgcattgacaacgcatttcaaaggacactgtggcattaa

SEQ ID NO: 13101 - DNA, 1072 bp, Zea Mays
tacaagttgttgcatgggaagttcaatcagcttgtctacaactttccaatccgtattccagaaaggttttctttggttattcgttcattgttgacacaagaaggaatctgctttacactaaagcctgattttaagtttcttgaggttgcctatccatatgtagcaaagcgtctgttgacagatccaaaccctgctcttcgtgaacgcctgattcaggtgctattcaaggatggggcattccagtggaaacgactagaaaaccttatagttcttgccaaggagaatgtgtccaagatgagtagcaaccccgcactgaaaaagaatagtttgcaagctgtaagaaatcgacagttggagagcaaacttgatctcactgaaacaataaaagatggagcacggatgttccttatcgatgctggtatcaggagacaacttatactggctttcaccgaagactccagattgcacgtagaagagcttattgatgtatacagactggttgaagatcaaatagatatgccttcagttgccgtcgaggttcttcaagatttaccatctgttgcgcgtgatttcatgctttcctggagtgattccatcctgtcagatcgccagtactaacgatcttttacaactagaagagaaagcaagcagagtgaatagggccctgcatggttatggtatctcgatataatctatacaagaaaaatggctagacaagaattcctcctcgctgtatacagtttctttttcctttgatttttgtatagcaaaatatgcaatgcgcagttaaattttttcgttttgccttgatcttgtcgatttctcagcacaagccatttgtttagtatagcgaatgggatcttttatgtaaatgagctcgtgattggaatgtaatagaaatagatgtatacagctagcattcaaatcaaatatatgcgcaagcatcaaaggcgtctgaagtgtgtttatcaatggcacatgattgtaccgaggaaatagttacttcttcggaacaaaacatttgtttaccttttctccactattgcattttatcaatggcactgtttttttc

SEQ ID NO: 13102 - DNA, 3362 bp, Zea Mays
cgactacgagctgcttctcacgctagcactctgctaccggcacagcacactgtggaggagcacaagtgcctgaactcggagttgtggcatgcttgtgccggcccgcttgtttccttgcccgcggtgggtagccgagttgtgtacttccctcagggccacagcgagcaggtagcagcatcaacaaacaaggaaatagagtctcagatccccaactatcctaatctgccgccacagcttatatgccaacttcataatgtgacgatgcatgctgatgcagagacagatgaggtatatgcacagatgacactacaaccactcaacccgcaagaactgaaggacccatatttacctgcagaattaggttcggccaataaacagccaacaaactatttctgcaaaacattaacagcaagtgataccagtacccatggtgggttctccgttccccgtcgagcagctgagaaagtgtttcctccactggatttcacccagcaacccccatgccaggagttgatggcaaaagatcttcatggcaatgagtggaaattccgtcacatctttcgtggccagccaaagcggcatcttctaactacaggttggagtgtctttgtaagtgcaaagagactcgttgctggcgactctgtcctttttatctggaatgacaataaccagcttctgctgggaattcgtcgtgcaaatcggccacaaactgtcatgccatcttcagtcttatcaagcgatagcatgcatatcggtcttcttgctgcagctgctcatgctgcttcgacaaatagccgatttacaattttttacaacccaagggcaagcccttcagagtttgtcataccactcgtaaagtatgttaaggctgtgtatcatacccgcatatctgtggggatgcgattcaggatgctttttgagacagaagagtctagcgttaggagatacatggggacaattaccggaatctgtgatcttgattctgttcggtggccaaattcacactggcgttctgttaaggttggctgggatgagtcaactgctggtgagcgacaaccaagggtgtcactatgggagattgaacccctgacaactttcccaatgtatccatctccttttccgctcaggctcaagcgtccatggccaacaggcttgccttctctgcatggtgggaaggatgatgacctggctaactctctcatgtggcttcgagataccgcaaatcctggttttcagtcgttaaattttggtggacttggtatgagcccttggatgcagccaaggctggatgctaccttacttggtctgcaacctgacatgtatcaggcgatggccacagctgcttttcaggatgcaacaaagcaggcatcgcccacaatgctgcagttccagcagccccagaacatagctggccgggcttccccgcttctttcaagtcagattttgcagcaagcacatcatcaatttcagcagcaaccgtaccttcaaaacatctctgagagcacaatccaagcacagggtcagtctgagttcctcaagcagcagatccaacgcagccagtcattcaatgagcagaagccccagatgcaacaccagcaagaatcacagcagcagcagcaaccacagtgtctgccagtcccccaacatcagcaaatgcaacaacagaatatgaccaactaccagtctatatctaatgcattatcaccgttttctcagctgtcgccagtttctcagtcttcacctatggcgctgcagactatattaccgttctcgcaggcacagagcttcacagacacgaatgtaggttcattgtctccatccaatggtaacaccatgcaaaacacactgaggccgttctcatcagaagcagtttctcacctcagtatgccgaggcccactgcgatacctgtcgcagacccatggtcgtcgaagcgtgtcgcggtggagtctctgcttccttctcggcctcaggtttcatcccagatggaacaattggaccctgcaccagctagtatacctcatagctctgcgttggcaccacttcccggaagagggtgcttggttgaccaagatgtgaactctgatcctcaaaatcatctcttgttcggtgttagtatagactcgcagtcactgctaatgcaagggggcattcctggtctccaaaacgggaatgattcagctgctataccttattccacttccaatttcctcagcccttctcagaatgactttcctctggaccatacactaaattcttcaggctgcttagatgattctgggtacgtcccgccatgttcagataattctgacaaagtgaaccgaccaccagcgaccttcgtgaaggtttacaaatctggaacctacgggaggtcgcttgatatcactaggtttagcagctatcacgagctccgtagggaactggggcgcctatttggccttgagggccagttggaagacccattgagatcaggctggcagcttgtattcgtcgaccgtgaggaggacgtccttctcgtgggcgacgacccttggcaggaattcgtgagcacggtgtcctgcataaagatcctctccccgcaggaggtgcagcagatggggaagcagggcctggagctcctgagctcggcccccgcgcggaggctcggtagcagctgtgacgactacgtcagcaggcaggagtcgagaagcctgagcaccgggatcgcgtccgtcggttcggtcgagttgggatgagcagcaagatagcgcgcacgcagcagcagcagcagcaggttacgcatcctcagcctcagggtaggtaggggactgaagggttggtctgcgacttgatgacccacgagctcctcgttgcgcgcttcgttcgcctccatgcgatggatagaagttcagcgcagaccaagccttagctctgcgagctatgtaccatctaataattctgtccgtgtcgtaccatgtcaactcctaagtagaagaattgaagaaactaccagcagccgctgtctggtatacacgctgaaacattttttttcttgtatggagaaatactaatcatctggatgtagccaggcctatgctctctaatggttgatcgggtaatacagcccctcgcacacagcaaactcacaagagaaacttccagttgctacattaagtttgggcagtaataaaaggtccgtcaaaaattaacttttttttttctcggcagcaacaagaagtccatacaaaattaacttattttttagtggctaaacggaggaggctgaaaatattttttttgttttggcggtatgtactaagacgttgtatttagtcattgaaaatagattgattttcggcagtctctatcgcagcaagaaagaaag

SEQ ID NO: 13103 - DNA, 2306 bp, Zea Mays
ctgaaatctggtgcagggctggtgccaagggacttgctgccatctggccgggttgtggatgcaagtgcacgtgctcttagaatgatatatcaatcaagattagctccaaagtttgatgttaatagggggaaaaacatgaattttgttctttctcttttggacagtgagaatgagaatgtcacagagctggctgctgctattatatctcactcttgtaagagtagtgcagaacaattggcactatgcagtgctggagttccacaaaaacttgttagcctttttggaggttctgtgaatctacgggatgcttgtttaggttctgtcactgtagtcgttcagaataaccaagatgttgcttccagatttgtaacaacggttcatggaaaatgttttcgttcagtagttgggttaatacatgatcggaatccaagcacaagactacttgcttgccgatgcttgattgcacttgggcatgcttctcctggccattttcaggacaaacagattaagaccaagttgattatggttttacttgagctaatcgaagaacctggtcacatcggagatgaagctcccttggcattaaccaccatgattaaagatagcttcgaactgcagaaacaagctcttgcaacgaacgcagttgagaagctcagcaaccatctgctagcgaaaccattggagacaaggcaagcagtggccatattgcttgcgttatctgaactttgctcaaaacttgaagagtcaagatctcaaatgatgtcagatgaggtatcaaccttactccttgatgcattgaaacatgattgggctgatatccgcgttgcagcatgttcgtgtctgaagaatatctccaggtcaccaaaggtacttagtggaggtcgattatcctgcgatacagttattggtcctctagtccagcttttaaacgactcgtgtacttcggtccaggttgctgcccttggtgccatttgcaatattgccattaatttgacacccaggaaatcagttcttcttaactctggggtcgtctcacatcttgttcatttgtcaaagtccatggatccaattttgaggctaaaatctgtatgggctctcaggaatattatgtttcttcttagtcctaaggataaagacttcattgttaaggagttgaccttatctactctttcaagcctcatatgcgattctgaacattttgttcaagaacaaaccctggcacttgtgcgcaatcttgttgatggatatgtggactctgctaattttgtcattggtgaagatggaataattatgaatgctattgcaagacaactgaacaatgcgtctgccccgggagtattcgttcagggtatgtatgtgcttgcaaacattgcggctggaaacgaattgaacaaggaagctgtgatgaatgttcttctgcctcacagagcagatcgcatcaaaccattgtttgcggtgaactttctgcaaagcaaggataaacaattgcgagttgccacgctgtggtgccttctgaacttgatttacccaaaatgtgaagcctcatctggtagggctgtcagactgcaaaatgctggagtgatccaacaagtgaaaaacatgataaacgaccactgcttggattgcaagagcacgtatggtgcttcaacactgcgtgaacaatgcggatgattgtttcatgtgagcaaccagtatttcatcttggcaaccaaagtttatggaaccatattcagatcaggaaagaggaaaccagtgtgcttcagatctaatatattccctgaacagtggaacatgagcacctgcaggaagctttggctggtctctacaggtcttcaagagcacattttcgcaccatgataacctgacaaccggtatctgttgtgcatgttgtccattaccttgttgcgaccgtgctgtctggagaacttgagctgcctgctcgcccactgaaaggctctgggcgctagatccagaaatcccatttttcacagtgcctgccgaacctggtgcatatttttgcgatgttgactacttgagtatataattgagggactgctgttgctgttgtcggtgttgtacaaaaaattatatttctgatccaataaggcccgtttttcatgcactatgggttatacgttgtccatgaattcccatgtttcgctgaaaataaagaagacgcacgtttctatgcatgttctgagttggagatcaaagtttacgcctattatttcgtactgtttgcggttaactgttcttgggtccattgtgacgtcaagccaactacataaaaatttgtcgcttaaacg

SEQ ID NO: 13104 - DNA, 642 bp, Zea Mays
ctggcgttggactgccagtcaacacagggactgagctcgtcgttctgccctgccgccaagtgcggagacatgttcctcggcaacacatcctcctccacctcatcctgcgagagcacagcatgctcctacgccgggtacaccaacagcacatcgttcgccatcctcgccaatgtgaccaccaccaacgtgtgtaacgctgggatgactccgacggcgcagccggctcactcttcggcgcttcggttggagccggtgtggctgagatggacggagctggttgccttgtctctcttcacgctgtctttcttcgtctaggctatctgcggcaaaagactgaacgttgtcgccaagcgtctgtcgttagaatctggccctctgattcctagtttgatgttgtgagtaatatctgcagtgtttgcgcgactttgatctgtaactggttggatttgtaagggcaaactctagggtaacacttctgtgttagacggtagatcaggaaacatttgtacttcgtcaaacttttgcaaagataatttcttctgttatcaccatagcctttttcgtgttctagaatctggagtattgtttggctctagcattccaacgtatggattcaacatcattgcctgtaatttcagctcc

SEQ ID NO: 13105 - DNA, 1447 bp, Zea Mays
tataggcttgggctcaggtagaaatgcgtgcaggaaacaataccatggcaagaaagctctttgagaaagctgtccaggctagtcctaaaaaccgattttcatggcatgtatgggcactatttgaggcaaatgaaggtaacattgacagggcaaggaagttgcttaagattggacatgctgtaaatcctagggaccctgtaattctacagtcactcgcgctactggaatacaacttttcatctgcgaatgttgctcgtgtgttattcagaaaagcgtctcagattgatccaagacatcagccagtttggatagcttgggggtggatggaatggaaagaaagaaatgcaagaacagcaagagctctctatcaaagagctttgtcagtcaattcaacaaatgaatgtgctgctcgttgtcttcaggcttggggagtcctagaacagcgtgctggtaactacacggccgctagacgattgttgaggtcttcactgagtataaactcccaaagtgaggtgacatggatgacatgggcagcacttgaggaggaacagggggatccagttcgagctgaagaaattcggaacctttactttcagcagcgtactgaagttgtggatgatgcatcctgggtcataggcttcctcgacatcatcgaccctgccctagacagcgtgaagaggctactaaacctggatcagccttctagaccggcgaggcaagatgatgttaaaagcacaacagaaccgtgtcctcccactgccaagtcttcagaaacttctgcgggcaatgatgctcgtaacaacgggagcgaagcaatggggactctaacaagtgatttcgatttggatgctttcatcaagaagaggctggccctcgacccatcggagctggatgccgtgctcgagggctctgacccgaggggtgttgtttctcagaggaggaaacagcggctgcccaggaagccactccctcttctccctgtcccgtaaattttccagatcggtctgtctcatttccattccaccggtaaaatccataagggctagtttgtttgagactccatttttttccaagtgttaaaaataaaaatcccttgaaaaaaatgaggttatcaaactagccctaaatccctaactgtagcagcctgcaatacgtgaatatgtgtgaggactaaggagatgacgtcccctgccgctgccatagcaatcaccacacctgttaattgtcattccagccacgtgtatgtaattctgccaccatttgttagtaaagtctagctctgtacataaattagactctttttgtctacataatatcgccggactaagttatcgagaagtattttgacaatggtagtgccattacttcaacaccttagagcatccaagaaaatatgtaaaaggttcccaaaaccatttttgacggcgaaacaccatcttcattcact

SEQ ID NO: 13106 - DNA, 1320 bp, Zea Mays
ctccttttgaactccctctctcccccacctttagtgtttgagcaatatgtggactatgcattagaagtccccatgtattttgtgtaccgaaataaaaagtatattgactgcaccggaatgtcgtttcgggattttatgcaaggaaagcttccacaggctcctggggagttgcccactcttaacgattgggagaaccatctaacaacaatttttcctgaggttaggctaaagaggtaccttgagatgagaggtgctgatggtggcccatggaggagattgtgtgcgttgcctgcattttgggttgggctgctgtacgacgaggaatcgttacaaagcattttagacatgacttttgattggacaaaggaggaaagagagatgctaagacggaaggtaccatcgactggtttgaagacgccgtttcgtgatggatatgtaagagatttagctgaggaagttctaaaactggccaagaatggactggaaagaagagggtacaaggaggttggtttccttagagaggtcgacgaagtagtgagaacaggagtgacgcctgcggagaggctgctgaacctgtacgagaccaagtggcaacgcaacgtcgaccatgttttcgagcatttgttatactgattactgaggatgacgccgccgaacgacgttggactgagcttgtagatgtaccccgtaccctaatacagagtctcgtcttgattcattcaatgcctgagccggaagggctcagtttcaggcacacaggagcagagctttcggttggttgttgacggggggcaaccgctgcacagcccggtgctgtgcctacaaataacttcgcctggaactggaacggatcactcatcactgtgctttgctttgacttgatctgcctgtctctccagggagatggaacaaactactgtttgtaccggcccgttttgttttgcagctatgaaaatcgccgtattgaaaataagtccgtcttctgcacgatggaactgtttgtttttcctttttttttggattgttgggacttgggatgtttgttcggggttaacatggcaaaagtgatctcatcgacgataaataaatgaactgatggtttgatccggaatctgcgatatctgcatgttcctttgtagccggtctttatggtctgctacctctgctacgataccttagggtacatgattttccgtacgcatcgtctcttagctgcatttgttgcatttgtgatttaggaaactcagagttgtatcatgctgttttttattgtttcttgtacttagaaaactgttctactgtcttagggttgtatatgcc

SEQ ID NO: 13107 - DNA, 2802 bp, Zea Mays
ggcgaagccaagggggggccggatgggcctggcacccccaacgggtaaaggtttgcggcagcacggcatacgtggcgcagacggcatggatccagaacggcaccattgaggaaaacatcctgttcgggaagcccatgcaccgggagaggtacaaggaggtgatcagggtgtgctgcctggagaaggacctggagatgatggaattcggggaccaaacggagatcggggagcgcggcatcaaccttagtggcgggcagaagcagcgcatccagctcgcccgcgccgtctaccaggacttcaacatctacctcctcgacgatgtattcagcgcggtcgatgcgcatacgggcactgagatcttcaaggaatgtgttagaggtgcactcaagaacaagaccatagtactcgtgacacatcaagttgatttcttgcacaatgctgatatcatatatgtgatgaaggacggaatgatcgtgcaatccggcaagtacgatgagctcctccaggcaggcaccgacttcgcggcactggtcgcagcgcacgacagctcaatggagctcgtggagagcgcggcgccggcgagcgagcgcgagctgcccctctcccggcagccgtcaagcaagaacgcggcgtccaacggcgactcgtcctcgtcctccatcgtggcgcccaaggccgagaaggcgtcggcgcggctgatcaaggacgaagagcgcgcgagcgggcacgtcagcttcaccgtgtacaagcagtacatgacggaggcctgggggtggtgggggccgcttgtggtggtggctgtctccgtggtgtggcagtgctctctcatggccagcgactactggcttgccgaccagacctccgacgggaacgaaacctcgttccagccgtcgctgttcatcaacgtgtacgccatcatcgctgccgtctcggtggtgctcgtcgcggctcgctctttcattgtggcgttcattggcctccagacggcggaccggttcttcaagcagatcctcaacagcatcctgcacgcgcccatgtccttcttcgacaccacgccgtccggcaggatcctcagcagggcgtcgtcagatcagacgaacgtcgatctcttcctgccgttcttcgtctggatgagcgtatccatgtacatcaccgtgatcagtgtgctgatcgtcacgtgtcaggtggcgtggccgtccgtcattgccataatccctctggtgatactgaacatctggtaccggggctattacttgtcgacatcgagggagctgactcgcctcgagtcgattaccaaggctccagtgatccaccacttctccgagacggttcaaggtgtcatgaccatcaggtgcttcaggaaggaggaaaacttcttgcaggagaacctgaaccgggtgaactcaagcctgaggatggacttccacaacaatggtgccaacgagtggctcggtttccggctcgagctgattggaagctttgttctctgcttcacagccgtgctcatggtcacattgccgagcaacttcgtgaagccagagtatgttggtctgtcactatcatatggtctatctctcaaccagaggccacatggaggatcaaggactgcctaccagattctaattggccaacaaaaggcgacatcaatgtcattgatcttaagtttaggtataggcacaacactcctctagtgttgaagggcatcacaataagcatacatggaggagagaagattggagttgtcggcagaactggtagtgggaaatcaacactgatccaggcactgttcagaatagtggagccttctgaggggagaataatcatcgacggtgttgacatctgcactttaggactccatgaccttaggtcacggtttggtatcatacctcaggaacctgttctctttgaagggaccattaggagcaacattgatccgcttgagcagtattccgatgatgaaatctggcaggcattgggccgctgtcagttgaaagaagccgtagcttcaaaacccgaaaagcttgatgcttcagtcgtcgacaatggtgagaactggagtgttggacaacgtcaactgctatgcctgggccgggtgatgctaaagcacagcagaatactgttcatggacgaggccactgcttccgttgattcccagaccgatgctgtgattcagaagatcatccgggaagactttgcagcttgtaccattatcagcattgcgcacagaatacctacggtgatggactgcgacagggtcctggttatagatgcaggactagcaaaggagtttgaccggcctgcaaatctgatcgagaggccatctctgtttggagcattggttcaagagtacgcgaaccgttcgtccgacgtttagcatttcagggtggcataattttttgactcgagatttgggaggaaacaatgattggaaatttctcggtgtggtgaacgagcaatgctgcattcatgctccaaataaaactgcgagccctcaaaatttcgcgaaacgtaattgggtcatgtggaaggccagaggagaagccacgatcggatgaaggagacatcgagatgactaggatagtaagtagttatcgagatgtatttgagcggtttaagctgaaattttaagactgagctgaagacgatgtatgaatctatgtattgttcaactagaatattactgcgcatgcaaattttctgccgactagtgttaaaacaaacatacaacaaaccaatcaaaagtcagtatgcaaaaaattcaatcattggaacctacaagtggatgttaagcttatggcacat

SEQ ID NO: 13108 - DNA, 864 bp, Zea Mays
cgagcggcacgagtacaagcagcaggcgcgtctcagcctggaaaaaaggcccattaaaaggcccacttcaacgtggtggatatgcatatataactgcgaagtaaccctaaccgtcaatagcctccgcctctccttccagtgtccgccgtcgtgcgctcgctacccctctccctcgaggcctttgccggcgaagagcgcccagtcgcccaccaggatgaagtttgttgctgcctacctgcttgctgtcctcgctgggaactccagcccctctgccgaggacttgacagccattctggagtcagggagaagtttgcttcagtcccatgtggcggtggcggtgtggctgttgtggcagctgcccctgctgctggcggcgctcctgcagctgaggcgaagaaagaagagaaggtggaggagaaggaagaaagtgatgacgacatgggcttcagcctcttcgactaagcctgtgcaatagtcaagagtattgtttttgagtcgcggaagcagagggaagaaaaatcgtagtcatgtttggactttaactttgttttatgttggaaagtacttgaaagacttttcctgtggtaattctaggcgtaggttgctgtgctggttggggtttactggtgaaccagagtttttctatctcccactatgaatttgttacctcaagttacctggatgttcactattttgttggtacatgtcgattttgcctcgtgcatccgtgtacactgagtgagtatgcgcatgtgctacctgctgtcggtgttcgtgttcttggcatggatgtttgcatcgatgaaagtaaagagctgttgggagttgatgattcagatggcgttggctgccggctgaaatttt

SEQ ID NO: 13109 - DNA, 830 bp, Zea Mays
tgggatccaggtggctgcacacctttagcaaatgtaatgggccgtttccaatggttgacatgcccaagaaaggatctgtcaactgggtggctttattgtgatcctggtccaatgtttaagccagagcattactcattgggagagtcggtgccacattggttcccatggaaagatctagccattatgcctgtgcagtggcatgctttagccctaggtttatttgcgtcaataatagcaccattcggaggattttttgcgagtggcttcaagagggctttcaaaataaaggattttggtgacagcatacctgggcatggtggaattactgatagaatggattgccaaatggttatggcagtgtttgcatacatataccaccagtcattcattgcacctcagaacttctctgttgagataatcttggatcagattctaagaaacctgacctatgaggagcaaaaatacctatatgaacaacttggggaaatgttccatgagaggcaattagggcaaaactgagagttagcgtgcttatgaaatgcatgataatttcttgtgtatttaagcattctgctcattatgtagctatagtccttgtccaaacctttgtatagaatggtagaatggagagaatgattgggttttaggtgctttattcactcttcactgacgctgcttaattcactccccttgtcatgatttctgcactctttgtaaaaggggacctgggaagttttattgtttcttatcacttcgtggtgctgtcctcagatcatatattcgaggattcacagaatataagatgaagcagcagtgctagttcttatttg

SEQ ID NO: 13110 - DNA, 1577 bp, Zea Mays
aactggaagctccagctcttccagcacccacacctgtgaatggttcttttactgggggttctttggcagataaatttgggcggacaagaacattcatcctggatgcagtcccacttgctctaggtgcattcttgagtgcaacagctcaagatatccgcacaatgattattggccgattgcttgctggaattggtatcggggtctcatctgctcttgtacccctttacatatctgagatctcaccaactgaaattcgtggaacacttggtaccgttaatcaactttttatttgcattggaattcttgcagctttgttagctggattgcctctggcaggaaatcctgcctggtggaggacaatgtttggaattgctgtagttccatccattctgctggctgtaggaatggccttttcgcctgaaagccctcgttggctattccagcaaggaaaggttactcaagcagaattagctgtaaaaagactgtatggaaaagaaatggttaccgaaattatgtttgatctgagagctagtggccaaagttcttcggagtccgaagccggctggtttgatcttttcagcaagcgttactggaaagttgtgagtgtgggggcagcactgtttttgttccagcagcttgctggtataaacgctgttgtatattactctacatcggtgttccgtagtgcaggcattgcatctgatgttgctgctagtgctcttgttggagcagccaatgtttttggtactatggttgcatcttctctaatggacaaacaaggaaggaaaagccttctgataacaagcttttctggaatgggtgcttcaatgctactcctagcattgtccttcacctggaaagctctggcaccttattctggtactcttgctgttgttggcactgttctgtacgtgctgtcatttgctctaggagcgggccctgttccagcgctacttcttcctgaaatatttgcctcgagaataagggccaaggctgtcgcattatctctaggcatgcactgggtatctaactttttcattggcctgtacttcctgagtgtcgtgagcaagtttgggatcagcaacgtgtatctgggatttgcatcagtatgtgcccttgcagttctgtacatagctgggaatgtggtcgagaccaaggggagatcacttgaagagattgaaagggagctaagtgtagcagaatgatgtacttttgctagtcatgctgtggcgccgttttggttatcgagaatgcaaccaagcgctcaaccgagcatccttggacctggagactctttctagtttcatgtagttttagaaataagcgaacggcaagagtaccaatcttaggtgacttggtgtgggttgtgtctgaaataagtgaattggattgtagaatttcagaaataagtgaattggattgtagaatttcagaaaaagtaacaaaaaaaaatacaaaaggatgatccttttgcatgtactggttcttctatttcttatcatattcagcctgcagatctcgtcgattcctttccaaaaaggttattagttgttacacttacacatcatcatcatgac

SEQ ID NO: 13111 - DNA, 972 bp, Zea Mays
ccagccccagcctctcccggtctcccctcctctcctctcctctcctctcctcctcttcctctgcttctctccccgatctctatttcccatttccgggcggctcccgttctccacctcaattattgcccacccatccccgctccctcctctcctctcctcccgtcccacccatcacctcgcaccagcgccgggggaatggcggccgcgctgtggacgctgctagtggcggtggccctgtcggcggcgctggcctcgaaccgccccgtggcggcgacggcgacggcggcggcggaggcggcgaacgaggtgctccgcgcgcaccagctgccggggggcctgctgccggcggggatcacggcgttccggcacgacgccgccacgggggcgttcgaggcccggctggacgcgccctgcacggcgcgcttcgaggtcggcctccgctacaacgccaccgtctccggggtcatcagccccggccagatcgccgacatctccggcgtcgccgcgcaggacctcttcatgtggttccccgtccacgacatcaaggtcgacatcccctcctccggcgtcatctacttcaacgtcggcgtcgtcaagaagcacctcccgctcgccgtcttcgacgcgccgccggcctgcacgcccgacccgctcctgcagcggctggaggacgtgggcgagggcggattggccgtggtgggcgccgcggcgtcccggcgatgatgggtggaggagaacggaggagggttcgacggcgccggcgagccaggatcacgagcgcagttttgagaggagaacgggcgatcgccggccttcttcgatgcacatagatagcgtgggcatttccatctgttttcttttttctgcttcctactagtggctacactagtaaccaacctcgtctatcattgttcgtttcgtcaagctgttgtcatttcctgctgtcttccgttcatgtccaaaaaaaagaaa

SEQ ID NO: 13112 - DNA, 1200 bp, Zea Mays
agcctggagcctgctggttgcttgctgcctccctttggtagatggcactagcaggcaatggaactgcactcgtgctcttcctctccccagtgcctacgttcatccgcatctggaagaaagggtcggtggagcagtactcgccgatcccgtacgtggcgacgctgctgaactgcatgatgtgggtgctgtacgggctgccggcggtgcacccgcacagcatgctggtgatcaccatcaacggcaccggcatggcgatccagctgacctacgtggcgctcttcctcctctactcggtgggggctgcgcggcgcaaggtggtcctgctgctggccgccgaggtgggcttcgtcggcgccgtcgccgcgctggtgctcagcctggcgcacacgcacgagcgcaggtccatggtggtcggcatcctctgcgtcctcttcggcaccggcatgtacgccgccccgctctccgtcatgaaaatggtgatccagacaaagagcgtggagtacatgcccctgttcctgtcgctggcttccctcgtgaatggcatctgctggactgcttacgcgctcatccgcttcgacctctacattactatccccaacgggctgggcgtgctgttcgcggtggcgcagctggtgctgtacgccatctactacaagtccacccaggagatcatcgaggcgcgcaagcgcaaggccgaccagatcgccatgaccggggtggtcgtcgacggcggcaagaccaacaaccaagccggcgcgggccaatactgaccgacgatcaagtgacgatcgacaccaatatgctcaagcaagaagccagcggcaaatcaattatgtcgccgctgggttttatgtattttgtgattctatatgcacgctgcttgtccgtcccggccaatggaaaaaaaagggggaagaaaaaatgtctgtcggtatatgtgttctcgccgaataactctcgcgcatagctagctggtggggctgagtcactgccttcgctatatgtatacgtgcaaaaattagaggtggagggttgttttagctaatcccaccttaattccaaggcagagtgacctttttttttctccttctgtttcggctaggattttgctataattgagcaatttagcgcgacttgttattggtgttggtgtgtctcaatcaaatagtaaaatgttcattttactctttcaatcgcatc

SEQ ID NO: 13113 - DNA, 775 bp, Zea Mays
catgagaagagagaaagcaagaagtaactggaagttcagcaaatgtccaaaatcacaagaaaacacaaaagcacaaaattcagtgaaatttatgatggacttcgttaattgtcagcagtgcatgtttctattttagttcaactccatttatgttgttaatgagtggctctgaagtgttccttttccatatcttttctggcaaagacgcagttatcacagatggaaaatatttaatactacgactgctacagaggaaacaagatacctgtactgatggaatatgagtcgtgtattattccttgggaacttgaacttatcatatggagttgtaaattattttgtcatttcgacttatgttcacttcatcattgccttgtatgatcatgtaattcagagaccgcagagcaaaggtgggctggggcttagggcttatttggaaacaaagtattttaaaactatagttttggaataatatggttttaagatgttatgacataatcgtagtatattttacatgactcttaacaatacatttgtagacaaagtatcttaaactgtgatatttagtatacatgtgcaatgttagttataggcaaaaacttttggttggcgtgaagtttcaagtatcatggtatctacaaaaccatggtatttaaaacagtgttttttataatgtagtcaaacattttttggcaaaaatattatggtattatctaatactatgatttttcttaaaactttaaaaatactttgcttccaaacacctccttacatg

SEQ ID NO: 13114 - DNA, 98 bp, Zea Mays
ccatgtcatcactcggccgttatttccaaaacggccgacgcggcccaatttgactcagctgttgtttctaaaaacgctggcgttatctgacttcactc

SEQ ID NO: 13115 - DNA, 415 bp, Zea Mays
attgcatggtagttgaggttgacaacgatggctgaataaaaggggtagagctgagaatggtttgttgtagtgttggaagtgttgacgcgagccgtcaagcatcgatcaatagtaatagttgtaatagttgaaagctgcgtcgtgactacaagcatcctgttggtggaggcagtattttagatccatcatcacgcctggacagatgtgggtgtccttttgtattcctgtttccctggtttaggtgcaggtgctgtactaaaatgatgaaactcgcagttcgataaaagcagttgccaaagagtcgcagctggcaggattacttgtctacaagccagctatatggcatggtttggcagccaccgtatctgaataaaatcatagtacaaaatctctgaatatatatgtcatacgcata

SEQ ID NO: 13116 - DNA, 73 bp, Zea Mays
caccgtcgagttccgcgcgtcccgagcttctccaccgcgtcggctgctcctccctgcgtccatctcccatgga

SEQ ID NO: 13117 - DNA, 107 bp, Zea Mays
ctccatcccaacgtctccagtatcgcgctctctccccaaaaacctcgtcttcctccgctcgtctgcgttctcggccatcggtactctccaccggcgctccagagttc

SEQ ID NO: 13118 - DNA, 1348 bp, Zea Mays
gtccattccgttccgtaggatcccacgaggtgcggctcgtcatggacaagatccgcgcggctgccaccgccgcgccgccggcggcggtggacctgagcgatctcctgtccgggtacaccaacgacgtggtgtgccgcgcggtgctgggcgcgtcgcaccggaaccaaggccggaacaggctgttcagcgagctgacagagatcaacgtgtccctcctcggcgggttcaacctcgaggactacttccccccgaatatggccatggcggacgtgctcctccggctggtgtccgtcaaggcccggcggctcaaccagaggtggaacgacgtgttcgacgagctcatccaggaacacgtgcagagcaggccctccggcgagagcgaggagagcgaggcggacttcatacacgttctgctctccatacagcaagagtacggcctcactacggacaatctcaaggccatcttggtggtatagagacatcttacctgacgctagagtacggcatggcccgagctcatcaacaacaggcacgtcatggagaagctacagacggaggtgaggacgacgatgcgctcgccggacggcaagaagctggacatgctagcggaggaggacctcggcagcatgccctacctcaaggcgaccatcaaggagacgctgcgcctgcacccgccggcgccgttcctcctcccgcactactccaccgccgactccgagatcgacggctacttcgtcccagccgggacgcgcgtcctcgtcaacgcctgggcgctcgggagggaccgcacgacgtgggagaagccggaggagttcatgccggagcggttcgtgcaggaaccgggcgccgtggacgtccacatgaagggcaaggacctcaggttcatcccgttcggctccggccggaggatctgccccgggatgaacttcggattcgcgaccatggagatcatgctggccaatctcatgtaccattttgattgggaggttccgggctctgcagcaggggtgtccatggacgagtcctttgggctgacgcttcgccggaaggagaagcttctccttgttccaaggattgcttcctgataatcctacatctgtaaaacttgtgtcttgctagctgtaccgggaacaagattaaataatgcaaggaataaagtgactctgttcttcgtcagtaactatatattgtaggagtcctgatgatgaataatgggatgtcgtgatttgttgcaactagtattattggtgatatttctatgtaaaaagtggtgtagcgatgtatgtaaaatattatatttgtcagatctttttataccaataatatttactccatctgtcccaaaata

SEQ ID NO: 13119 - DNA, 76 bp, Zea Mays
gggaagaggtcaacgcaagcaaatgggcgggcgcgcgcgcgagcccatgcgttcagaaccccaagcatgtcgcgcc

SEQ ID NO: 13120 - DNA, 1187 bp, Zea Mays
tccccacccattagaccaccagccgttgcccgttggcttggcttttctcccctcgcaccggagaacgcggccgccgatcccctcccctcccctttcccgccgactgatcccaccaattctgcacccgcgcagttcctgattcgattggcaagcgcaattggccgctcctgaccagacgccggatagggctggatttgattggattggatccccaattgtgtttgccacgtccgtgcgttcgggcgggcgggggagttactttagggtttcggcgggtgcggtcgccgtgtaggcggtagggttttgccatggcggagaagggctgcctcaagcggctccagaaggagtaccacgccctctgcaaggagccgcctccgcagatcgtggctcgcccgctgcccaacgacatactggagtggcactatgtactggaaggaagtaaaggcacaccctttgaaggtggatattattatgggaagctcaaatttccaccggattatccttttaaacctccaagcatcagcatgacaacccctagcggcaggtttgcgccacataaaagaatatgcttgtcaatgagtgactttcatcctgaatcttggaatccaatgtggtctgttgcaagcattctcactgggcttctgtctttcatgatggacgatgcactgacaactggaagcatcaagacgtcagatgcagaaaagagacgtttagcaaaagcttcccttgcttacaattgtgagagcaaaaactgtccgcacttcaggaaacttttcccagagtatgttgagaagtacaatcaacagcaacaattggagaatactgccgcagagccggtgccacaggagaatcctgcacctgttccatcccttgctgtccagcaagctccagtcgtcgccaatagggcgcaaccactggctgaggtacgccgtgacaagaaccagaagaaggcggtgcccttctggatggtgctggtcatgttttcagtttttggtgccgtgatggcgttgcccctaatgcaactttgacaacaataaagaccatgaggacgtgtgataccggggcagtaattttgtatagttttccattggttcgtgagtgtaacaaagttgccccctagacttacctaccaccttggagtcatattgatgaacttgtgatggtaacatgtttttgcaaaaaaaaaa

SEQ ID NO: 13121 - DNA, 821 bp, Zea Mays
gaggttgaagaggtggttgacatttcaaattgggagaaaaaagaagtttgtggcaagaaacggaagttacaaagctttagagatgaggagtactacataagttcagtacctcaaaaccatcatttggaagctgggctgtcggtgagggacaatgaaggatttgttgaaaataggttggatgctgctgttcttgatttagttgatgatgaagcttctggtatgcaagcgcagaaaactcgatatcactggatgaaggtgatcagtcaagccatgtttggtagtgaagggcgacgtccagagagtaagaacaaggtgacacagtatggactcgatatgactgagcaacaatatcttgagcattcgattccatggatagctgccaatgatgctgcttggcgtgcgttatgtcattattgggcttcacctccacctatacctacatctccatctaccgaacatcagacccctccagctaccttgccgacgcatgaacaagaggacgggttagactttgtcgaaaccctcttcaatagtggaggtattgaccatcactcttcactgtaacccgatggtgatcggcgaccatgagcttccatgttattgcgttctgatacttgatacttttattatgactatgtatgagatattgtcttttattagtactggatgatgatatgtgtcttattatgactatggatgagacttttgtgatgtaattgatgagactatggatgagacttttgtgatgtaattgatgagactatggatttaaatattgttatgtgattgtgtgtgagatgttttatgtgaaaatatgttgt

SEQ ID NO: 13122 - DNA, 68 bp, Zea Mays
gtggggtcctaacattttgggggccctgggcggccgcccggctcgaccacccccaggtccggccctgc

SEQ ID NO: 13123 - DNA, 3574 bp, Zea Mays
ggaggacatggtaaaacacataacagaaacgttacttctctgcctcgtctccttcctcgctgccgtccttacctcttctccacgaaatctgccattgctgcttgtttctcttctgcagcctcgctaggcatctgcagcttcgctaggcatcgctaacatgccctcgatggccaccaccgcagcgcccgcggccgatctctcggcgcccgataagcagcaggactcggctcttccggagctcactacgaaattcatggtggacatgaaatgtgagggatgtgtaacagctgtgaaaaacaagctgcaaactcttgaaggaataaaaaacattgaggtggacttgtctaaccaagttgttagggttctgggatctcgtccagtgaagataatgttagatgtcctttatcaaacaggtcgagaagcacgactgattggacaagggaacccaaatgcgaaggacaaatcagaccctggcatcgccgcagcggtgattgcaagaagtgccggcgtaggagagaactacaaggaactctgcacttgtgatggtgtcaccatttgggaatcaagctaaacctgctagcagcaaattttccgtactatttgcttccatttcttgtacactcattaatgtagaaacaatcaaactggcaactgaacatttggaataagcatgaatacattgaagaataaaggcggttctcatgtggagctttgacagtatttttccgttggttagtgaacctgttctgccgctgccgctgccgctgcgacacaacggatctctggcttgattacccaggcccagaggttcctgctccattgcttgctctaaacgcacggtaaataaacgaagctcacatcggtggcagccatgtgaggacaagggggctccggacgatgtggacgccgtcgctccaagacagcgctccgaactccggtgtcttctgggcagccttggttgtcatcgtcaccttgtaggttagcttctggttcgaacttgtgaagtgcagggtgcttggttcgacgacaatgtctgcgcctttgaactctgtaaccttgacatggtaagtcgaagacggcgggccgacgttcgtcacggtgcgacgcaccgtcagcgcagcagatggctgctccgcgaagaccgcggagatggccggataattcaagtcacccggcgagctgaaggtgtgcttgcatgtcttgctcgagttcttggtgaaggacctgagctgcaacggcgtcaggttctccacgcagaggaactccaggtagtcgtcctggccgatgtcgtagaccaggccagggttgagggcacgcagcgggtgtatgtgcccagctccgtgatcgaacggcgtggacgccttgccggtggccgcgtccttcagcgaccggtacgtgttgtcgtggacgtacgcggtggtcatcagcgcggacttgatcttcgcggggctccagtccgggtggctggccttgatcagcgcagccacgccggcgacgtgcgggcacgacatggacgtccccgacaggatgttgaagccgacccgccggcggtcgctggacaagctcgacgggctggcgtcgccgctccatgccgccaagatgttcacgccgggcgcgatgacatccggcttgaggatctccagggtcaggaagtttggtccccgggacgagaacgcggctacgactggcgatgggcggatcccgagcttcgtcccgtcgaagctgagcgtggccgttggtttcggggcggttttgctgtacttcttggcggcaatgccttcagactgcccaacggccactgctggcaggaggtggctgtcggcgacaagctcctcgccgtttgccggtgtgttggcgagtatcatgcccgcggcaccggcgttcttgacaacctgacccttctgcacccgaggactaatgccgcggtcgcagatcacaatctttccagcgacctcgtggggctggagtgtcccctccaggcacagggacctggggtcagggatgctcgagttgccgcccatgtagactaacgggtactgctccttggacgaaagacctcgccggcctttgtagagcgaaaccccggtgaggtttgcgccattgccgagcgtcaccgtggccgggaagtcccggtccatggtgctcgcgcccaccgtggttatccacggcgacaggttggtgaggcttatggggtccgggccgccgttgccgcccgagcaggcgacgaacacgcccatctgcatggcaccgaacgacgcgatggccaggctgtcgcggaagtagggggacgagccgccgccgagcgagatggagagcacgtcgacgccgtccgccacggcgcggtcgacggccgccaggatgtcggagctgaagcagccccccgtccagcacaccttgtacgccgcgacgcgggcgcggggcgccatgccacgggcgacgccgctggcgtagccgaagaggctggcgtccggcacgggcgcgcccgcggcggtggccgcggtgtgcgtgccgtggccgtcctggtcccgcggagatttgagctcggccgtctcgttgatggggcccgacgaggcctcgtagccgttgtagaagatgcgcgcgccgatgatcttgcggttgcagctggctacggtgaagccgcggccggtctggcacaggcccttccacctggccgggacagggccgaggcccttgtcgctaaagctggggctctcgggccagatgccggtgtcgagcacgccgacgacgacgtcgtggtcggccaggccggcggaccatatgctgtcgctgatctccgggctgatgcccaggaagtccgggctcctggtggtgtgcagctgcaggaccgtctccgggagcacggccaccacgccgtccgcctcggccatccgctcggcctcgtcctcgtccagcttcgccgcgaagccgtggaacgccgtctcgtagttgtagacgatcctcgcggcgtaatggtcgtccgcgtctccttccagctgcacagagctcacggatttcacagtggatgcgtaccattcgtggtggaaatcgaacgagctcggcatctcagacgcggccatctgaacgatgtaagtcttgggagctgccccgcgagcagggaggcatgcttgcagagccacgagagctaggcacagcggcagagccttccatctgacgccgccagaacccatggaggacgagtctcgaagctgtgatggatggacagaggtggaggagccagctcagctgccgtgccttatgtatgctgctgctgctcgtacagcgtcctcgagtgagctccggtgtccggtgtgggaagcaggggagtggagattggagagtgaacagcaggcgccagacgggaaggtggtggttgccggtgtcctcatttattaagtttattcatcactcggctcagctgtgcggtgggactgtaaatggcgagagccgttgtttggtgcgctcatgccatgccgccattacttcttggagatattttaagtgggccattgacgcttgtgttcttctgcttctcctgcctgcaagctgcaaggttagattcgagcaaagggaaagg

SEQ ID NO: 13124 - DNA, 867 bp, Zea Mays
gctggattgttttgtttgttgagatgcataccatttaggtatagagctaacaatgatgaaacctctggtgacaaaactaagaaactcgtggaagttctcatgataaattcccaaagcggacctggtcttttgtttccaaagggaggatgggagaatgatgaaactgttgaagaggcagcagctcgagaagctatagaagaagctggagttcgaggtgatatagtgcattttctggggctctatgacttcaaaagcaagacgcatcaagatgcgtgctgccctgagggtatgtgcagagctgcagtgtttgcgctgcatgtaaaggaagagctggcctcatggcctgagcagagcacccgacagaggacctggctcacggtccctgaagctgcatcaagttgccgataccagtggatgcaagaggccttgctgacaggcttctctgactggcacgacaagtggagcagaggcggcggcggcacaaactgtgacccggcctaactgctgacaggcccatctgcagtcgtccaatttgttcatctcctctctttccctaggcccccaaccttgcagaatgcaataatacagtgtacttgtcttgatgctgggttggtcattgacatgttatcttagttgtagtgggacgaggtacatctcatcaagacgagaattctcacaacttttaagtgtcaattctcgtgccctattatttctcggtttcatccgctgtcgtcgcggtgctgcagcctgcaggcacgcgccgcacgcattttgtaactccgctcctgattctggagatgcatatgctatatgtatgaactggtataactttgaaatcaaaagttgccactgttgactcgagtcgcc

SEQ ID NO: 13125 - DNA, 974 bp, Zea Mays
cgacctctttttaagtttaccctgcctgcccgcctgcctgccctgtaccctcgccctggaagtcacgccttccgtatggactatgttccgacagtgtttgataacttcagtgccaacgttgtggttgatggtaatactgtcaacctcggcctctgggacactgcaggtcaagaggattacaacagactgagaccactgagctatcgtggagctgatgtttttcttctggctttctcactgatcagtaaggccagctatgagaatgtttcgaagaagtggatacctgaactgaagcattatgcacctggtgtgccaattattctcgtagggacaaagcttgatcttcgagacgacaagcagttctttgtggaccatcctggtgctgtccctatcactactgctcagggagaggagctaagaaagcaaataggcgctccatactacatcgaatgcagctcgaagacccaactaaacgtgaagggcgtcttcgatgcggcgataaaggttgtgctgcagccgcctaaggcgaagaagaagaaaaaggtgcagaggggggcgtgctccattttgtgatctaatcatcggtagatgaagaaacaagggcgaaggtgccatggctttatcatcgtcgcgtcttgcttcagtggaacagcatgaatggtccccaccccctctaggtttactggcggctcggctgcagcgagttctcatctctttgtcgaggcattgagcgatatgtttgtttcattttcctccttcctgccttgtgattatctggtgtgtgtgtgtgtgtgactgacgaagtcgcggcgattaggtaactcgcttagaaggtatttcccgtgtttgagcaaaagaaagtatccctgttatctctgttccataagttagacatgatgtaatcgtactaagtttatttttacttatttcacttgaatggaaaagtatgcttcccatttatatgctcgttgtca

SEQ ID NO: 13126 - DNA, 183 bp, Zea Mays
atagaaattgtttaattaactttttaaactaattctctaggttaacttgtttagcacaataattaacatgacatcacatcattcgctttagcaagtagaatctcatcagacattaaagattaccaccagaccataatctttaaatctaaagacctaaagcgtttctttcgcactgaattctta

SEQ ID NO: 13127 - DNA, 490 bp, Zea Mays
agatcatgggttcattcgacggatggtcacagggcgaggcgatgtccatggagtattcaggtgactacggaagattctctgcaactctgaagctaagacctggaaggtacgagatcaagtttttggttgatggggaatggagattgtcgcctgaatatcccactgctggagatggactgacgcagaacaacattcttgttgtggagtaatacaacttcctcatctaccatttcaatcatccaaacaatgccgaagtgcacctacatctacatgtcttcttccatctgtaatactatgcttactatgtggacatgtggttgcctcacagaaatcgaataaattagcctatcctggcatatgatcctttcgtatttaaatatatgacgaataaattaacctatcctgaacgtcatatacttaaaaatggagcgaataccagtgctagatcacaatgatttgttcttttctgtgccctagactagaccagatc

SEQ ID NO: 13128 - DNA, 1858 bp, Zea Mays
tctttttttctcacaacagaatatagatcaacaattcaagcatagccacaggtgtgaggtgtacactactcattcctcttgtttttggtagaaactaaacattatcgctggcgattagacaagcacatatctattcaattgttatggagcctgaataacaacagagtaattagcgacgctggatgtaacacagcacagcgcaaccaatttgttccttttgattgctcttcatcatacaagaggctgcagaggcaataccctggccgctcagtcgctggagcccgggccgggcgtcttggacccgattccgtacttctcctggagcctggtgatctcgtcctccttcttcttgatatccgacttcttggacatcttggcgggctggtagtagagcacgataaggtagcggttggcgacgttgaagccggagaggtggtcgacggcgttcttggcgtcgtagatgtcctcgtagacaacgtaagcggtcccgcgcgtgtccttggcgttgcccagacggatctgccggatcgcgccgtacttgccgaagatgtcgtacatctcctcgctcgagatgttgaacggcaggttccgcacgtagagcacccggttcacctccggcgggaggcgcgcattccccttcctcaggcccgccgccgccatcgctgccgcgccgagataacctagggtttggggattggggattggggattggggatttgggggtatgctttgcttgttgcgtatggccacctcttcctcttgcgcttcgggtggagccggcgcacggggtcgattagttgccgactccgggagagttcccaccgacatgtggcccttacttctcaagcggggcccatatgtcggcgtcgagtctcgaagcttcgttttggcgcaataaggcgacctgagtcctgaaccgcctcgagccgctctcggcttcgaatcccgacaacctccctccccaagctgcttagccgccggctgggcctcagacctgcgtcaagcttccggcggcagcccatcgagcaccacaatggcgtccggcggagcggccatctcggcggggcctacaccgccgtcggcgacggcgtcgtcggttgagtggcaccagcggccgccgaacccgaagaaccccgtggtgttcttcgacgtgaccatcgggtccatcgccgccggccgcatcaagatggagctcttcgccgacatcgcccccaagaccgcggagaacttccggcagttctgcactggggagcatagaaaaaatgctttgccacaaggttataagggctgccaattccatagagtgatcaaagatttcatgattcagggtggtgacttcttgaagaatgatggtactggatgcacatcaatctacggtaccaaatttgatgatgaaaattttatagcaaagcatacagggcctggactgctctcgatggcaaacagtggaattaactctaatggatctcagttctttataacatgtgcaaagtgtgactggcttgacaacaaacatgtggtatttgggagagtgcttggagacggtttgctcgtcgtgaggaagattgaaaatgttgcaactggagcgaataacaaaccaaagcttgcctgcgttataagtgagtgtggtgaaatgtagtttgatccctttgtgtggctaatcgtggattcttgacgctgctgatgtagaccctgtttggttgatggaagtacttaaacagtggaaacattgatggaaatgtattgtgtctaggcaacctgcagaataatagaccaaaaaaactaatattcttgtttggcttgggagttcggccttctgttgtgcggaacatgtttgatcctgttgtttctgattaga

SEQ ID NO: 13129 - DNA, 2546 bp, Zea Mays
gaacatccccacgcaaggcccaagcgcccaactatcatttctccctctctcccacctttccctccccaccaccacctacctacctctttattcgccgtcgcctaccacctccccctcctctccgtgcagacctccgctccgcaccaccaatccgtcgtaaccctagcccagcctggtctcggctggccccgctccgttcatgtgcggcaccaccgcctccccgtgttcgtagtagccgccgcggggaatttccctcccatgggttccgcatacgcccctgagaggacgccgatcgagggagaatgaggtgctgcatctgccgcgtatcctccgccgggtgccgggccatgggcgttgcgggacgggcgaacccgacgtcgtcgctgcgcagccgacgctgcctccgcatgcggccgtcgtacgccccgttctccgagcccttcactgaacgcccggcacccgccgccccgtcctccccttcatcccccgctgctgcgcctagggcgtaggagccgcgggcggaccgccgatatctccgtcgatctcgctggctcctctctctctctgcttcctctctctctccctctcgctcgtagagtcagttgattgtcggggctgatccggaatggaggtgtttggttgtggggatggggtggtcgatgctgaattcgcggaagtagatccaactgggcgatacatgcgctataatttgattttggggaggggagctttcaagactgtttacaaggcatttgatgaggtcgaaggtattgaagttgcatggaatcaaatcaacgtagatgaggtgatgcagtgtccagataatctagacaggctctacagagaagttcatcttttgaagtctctcaagcatggaaatgttatgaagttttattattcgtggattgatgaccagaataagactattaatgtcatcacagagctgttcacgtctggaagtctcaggctttaccgtcagaaacatccacatgttaacttgaaggcaataaagaattgggcaaggcagattcttcatgggttggattacctgcatagccaccaacctccaattatccatagagacttgaagtgtgataatatttttgttaacggaaaccatggggaagttaagattggagatcttggactagctacggtaatgcaaacacctagggctaggagtgttattggtactccagaattcatggcacctgaactttatgatgaaagttatgatgaactagttgatatatactcatttggaatgtgcttgttggagatctttactcttgaatatccatacagtgaatgtacaaatccagctcagatttttaaaaaagtatccacaggtgttaaacctgctgcattggctaagatttctgatcctcaagtaaagcagttcattgagaaatgtttagttcctgcttctgagaggtcgtctgccaaagaactcttgcaagacccatttctttgtcctgacaatgcacatgattctgctggcactaagtttacatctccagcacctaataaaacagtagatatggtgtctttgcatatggaagttgacacttttggatccagccctactaattcaggcaaggaaaatggttgtgttgctccacatacacctgtcctggagttcacaagaaccaacaaaaatacagagctaaagctgaagggtgagaaacttgataacaactctgtctcactggttttgcgaatagctgatttgtctggtcatgcaagaaatattcatttcctcttctacttggactctgatacagctttgtctgtagctgctgaaatggttgaacaattggagttagcagactgcgatgttaccttcattgctgattttattgatcttttgatagtgaatcttattccgggttggagacctgtaaatgatgcggcaacaaactcgtatacgcaatctgaaagtgaacttgcaatcacttcccataacaatctatcgaagttggtgcctgattatgcattaattgatggtatgatgcatccaaaagatgtgaatgtatcaactggttttcttgattctgtatcaagtgcaactaatataggaggatcaccatgctctgaaggttcggtcatttctgtacagcgtgctgagagtttcaaaagtgtgagtgactatgagcctgaggattatggtactatggactgtggtgggtacaaagagggaatcagtaaagaaaattgcagccatgttgtagatgatggatcgaggttaattttccatacagatcaagatcacttctcttggagttggccaatggccagcagtgcttcgatcatctactcctgataatcaggatgtgctgaatggggagcttgtcttgattgaacctcagtttggttgagatgaattgacaagggtgcgagaagaggctatggaaggagctcgaaataagtgggttgccagataaatgatgtttttgttcaaatctggcatttcatctgaacaatcataagctatgttcgatttatgttagaagtgtgctcatctccgatgcgattgcgcaaataag

SEQ ID NO: 13130 - DNA, 758 bp, Zea Mays
gcagatgaggccttagtaccaatatgaaagtctaagcagaacctaaatgcttcagacttcaagtatccccccagcccacagaggcataatgttttgagctcagagagatctagcaaccacaatttggtggagtcaacaatggagaagcgtagaacgagccctgctcctgcatacaataacaccaagcagaacaacagcaacaactattccagtatttcatcgtcagcaccagctagagcaatacgggagcaaaagaacactcttttggattctgagaagctagactcagctaggaagaggcttcaggaaaactaccaggaagcgcaaaacgcgaaaaagcagaggacgatacaagtgatggatatccacgacataccgaagccgaagaacaggaacaccttcgtgcgcaagagcggcagcagcgccggattcccggcaaagcaccggtgatctctgcctgaccaccatcggatctgtagcggactcagcgtatttatttctgtactagcaaaaagaaaaaaaagaaagaaattttaagaagcaaactcttgttttcccagtttgatttgtagccctgcagtccagctcactgatattatagggatatatatactgcctagtccatgaggctacgcttttgtacctctctttaagattggagaacagaaggaaagcaaattgtgttattattcaatgacattcacattcctgcctgataaagatatggccggtagatcatgcatatggctggattacgt

SEQ ID NO: 13131 - DNA, 409 bp, Zea Mays
ttcaagtgcattagttgcttgctcaacgttccaatggctgctgctcaatttttaagcaagaaatctggagtgcagtttgtttctcagacgaaaaagtgggtcataccaaccataactcggttgtaaggtgccaatattcgcaaggaaaggtgctttgccccccgcgcgcgcatactgttacgtctttattgtatgaatcgtgtttaaaagtgaatggcaacagtcctggtagactacataagtttgaatttgatggttttggtatggtgatctgtaaacccggtagtgcaatttttttgttcattttcctatagaaagcaaatgtcaaaattttgaccatggcagactcgggtatatgtgaatcttattgtcatgtaatatttgaatatttgccaggcatcttgttctt

SEQ ID NO: 13132 - DNA, 655 bp, Zea Mays
aatagcaacagcaactccctccagcccgctccacagcaactccctcccaagttctcaaccaccttctccttcggtccttccacaccaccccgatttacccacggcccacgtcttctccctctcatctccccgctcactcccgtccccatcccacgcgatggcctcccgccgacgtggcgcgcagttcgcgccctcccgcgttcccgtggcgccgtcgtggtgtgccaggcccagggcggccaggacactgcaatccaagttcctgatgtgagcaaatccacatggcaatcacttgtggtggagagcgagcttcccgtccttgttgagttctgggcttcatggtgcggaccgtgtaagatgatagaccccatcgttggcaagctctcaaaggagtacgaaggaaagctgaaatgttacaagctaaacaccgacgagaaccctgacatcgcaacccaattcggcatccggagcatccccaccatgatgatattcaagaacggtgagaagaaggactcggtgattggagccgtgccagaaagcaccctcgtcacctgcattgacaagtatgttggtgggaggtgaaatatcaatctgaggcaactagcatggccccatggaggaggatggctcctcgctagatgttggccgaccctcg

SEQ ID NO: 13133 - DNA, 739 bp, Zea Mays
aaaaaaacctccaataaaacagtactctatgttctgccaaattgcctggcctcgtattcacatgacctcttatccgcatccttggtgatcggtttccatggcaagttaagtcagcaatcctatcaaccctgacaatcatcatcatgaaaggtggaattgcacttaagcccttccttccacaacttcaaactacattcgtgaaatgtctacaggataacaataagtctgtccggacgagggctgcagctgctctcggaaagcttagtgctcttagcacacgggtggatcctttagttagcgatcttctgtccatgttgcagtcaggagatgaatctgtaaaagaaagtgtgctttctgcactcaaaggtgttatcaaacatgctggcaaaagtgtcagtgctccaataaggtcacggggatgtgctcttcttgaagatctgctgcaggctgaagctgatgatatccgcagttgtgctgcaaaagtgattggcacattgtctcagtacatggatgacagagagattccagatttggtgcaaatccttttggaagtgggcacctcatcggactggtgtaccaggcatggtgctttgttagcattatcatccatatcaatgcattctccatcaaaattatgtgatttggcatcctttccatctctggttgatcttctgaaagattctcttaaagacgacaagttccctgttcgtgaagttgctacaagaactctggaaggaga

SEQ ID NO: 13134 - DNA, 1957 bp, Zea Mays
tggttctgttaggactccacagggggctttgtgctacataattttgcgagtttgtggataagggtcttttaagtcttcatatgaaactatccttttgatatacagctgaaggacaataactatcatggatgctactgcaaattcagatgtgcaaagggctgaggaatttaaacttaaggcgaatgatgccttcaaggcaaacaagttctcgcaggctatagagctttacagtcaagccattgagctgaatagttcaaatgcagtttactgggcaaaccgtgcatttgcacacacaaaattagaggaatacggaagtgctgtgcaggatgctacaaaagccatcgaaattgattctagatattcaaaaggttattatagacgaggcgcagcttatcttgccatgggaaagttcaaggaagccctgaaggattttcagcaggttaaaaaaatctgcccaaatgatccagatgctacaagaaagttgaaagagtgcgagaaagctgtccaaaagatccgttttgaagaagcaatatctgctggggatgatgagaggcggtccgtggcagactctattgactaccatatcatagaagtagagccacattatgcgggaccgagaattgatggggaagaaataacgatagagtttgtcaaagcaatgttggatgaatttaagaagcagaaatgcatacataaaagatatgcttaccagattgtgctaaaaaccttggatttgctgcgatcgatgccttcccttgttgatgtggatgttccaaacggtggacattttacagtttgcggtgatgtgcatggccagtactttgatttgctcaacatatttgacctcaatggccttccatcagaagaaaatccttacctcttcaatggcgattttgtggaccgaggatctttctccgttgaagtcatactcaccctttttgctttcaagtgcctctacccaaaagctatgtaccttgcaagaggaaatcatgaaagcaagagcatgaacaaaatatatggctttgagggggaagtgaggtcaaagctgggtgagaagtttgttgaactttttgctgaagtcttttgttggttacctcttgcccatgtcatcaacaacaaggtctttgtggttcatggagggctatttagtgttgatggggttaagctttcagacattaggtccattgatcgtttttgtgaaccacctgaagaaggtctaatgtgtgaattactatggagtgaccctcagcctcagcttggaagaggtccaagtaaacgtggtgttgctctttcctttggcgcagatgtgactaagaagtttttacaggaaaataacctggatcttattgtccggtctcatgaagtaaaggatgaaggccatgaaattgaacatgatggaaagcttataacagtcttctctgcgcctaattactgtgaccagatgggcaacaagggtgcatttattcgcttcacagctccagaaatgaaaccagatattgttactttctcagctgtgccacatcctgatgtgaagccgatggcatatgcaaataacttcctcaggatgtttcaatgacggaatataacaacattgtttagcaatttttatcagatgagtctgttgtgtgtcagctcccaaatcacatttcttggctaggtttaagtatatgctcccttgtacaacaaatcaaatgatgcaagggattcaactgtcgatttacttggatggtacatccatttttgtgcacgagttgtgattcttgtaactatccgtaaagtcttagatcattagattttagtttacttgtaaaattgctaaatcgtcatttcctgtcttgcttatcagtgagttacacacgtttagtgcttttatcaaattacatgtgtttcagcggtacaattcctaatatctgagtaatccttccattttaacccacaatgttcttacatagtttgg

SEQ ID NO: 13135 - DNA, 1142 bp, Zea Mays
tcctaatccacgaaagctaggtgtagagttaatctaaagatccagcagtctgcaaggtggccaaagaaaacaacacggcaggagtgaagatctctgataggatgacttcagtgtccgaattaacacttgtgctggcttcaggtgcatcaatgttaccgcatccttcgaaggtacggacaggtggtgaagatgcatattttatagcttgtgatggctggtttggtgtagcagatggagttggtcagtggtcatttgaagggatcaatgccggactttatgccagagaactaatggatggctgcaaaaagatcgtggaagagacccaaggagctccagggatgagaaccgaggaagttcttgccaaggctgcagatgaagcacggtcccctggttcttccactgttttagttgctcactttgatggaaaggttcttcacgcatcaaacatcggagattctggattcctcgtgattaggaatggagaggtccataagaaatcaaacccaatgacttacggtttcaatttcccgttgcagattgagaagggtgacgaccctctaaaacttgtacagaaatacgccatctgtctacaagaaggcgacgtcgttgtaacagcgtcagacggtcttttcgacaacgtctacgaggaagaagtggcaggcatcgtctcgaaatcattagaagctgatctgaagcccacggaaatcgccgatttactggttgcccgagcgaaggaggtggggcggtgtgggtttggaaggagcccgttctcggactccgctctcgcggctgggtacctgggctactccggcggcaagctggatgatgtaacggttgttgtatcgattgttcggaaatctgaagtttaataaactagaaacgaactagcaaagttgagcgcacttcttttttttcttttcttttcttttttctcttcttgcaacagctgcactcgctggcaaaatgcccgtgaggcgtgagcatttcgcacatccctggcctacgcgctcaggcgcattgcgaaacgtgtattgtgtacacttgatacatactataaggttgtataagtaagcttcaaacgatcgctcgctccaccgcgcgccatcacaaaaggcaaaagcgacgagagcgtaccgtggcac

SEQ ID NO: 13136 - DNA, 1284 bp, Zea Mays
aaccgacccggcctagcggcggcggcccactccagtacgcgtacgccaccacgcgcacgccaccctccaacccaagcaatcaggcgccgcgcagaggtagtaaggcaaggaacgcggcgcgaccggaccacaccggcaccgcccgtctgaccgacgcaacccagccgtccagacgcgccgccgaccgtccttccaccaccacgcccgcgccgtcgcacgctccctagggttccgcagggccggggatcgccggagatggactggagcgcggtgacggcggaggacttggtggacgcgctgcgggaggtggactggtccatgccgccgcggcctgtcccggagttcttctcccgcttcaccgtcccacgctcctactccaagtggaccagccgcctcaagtgcaacctctactactacaggacaaactatttcatcttgatcatgttcatccttgggatgggcttcctttggaagccagttgctatagttgctgcttttatgactggacttagcatcgcatttctcaatgatagttttgcagtcactttcaatgagaaagtcacaaggaccgtaagacaattttcaccacatttagctgcaaagttgaggccacctataactcctgttcttcgcggtcgaccaagctctaagagatcaattcatatttgtgggcgacctcgctgggtgtttgtcctgttcttttctgcagtgagctgtatactctggttgacctcatgcagtcttctcacagtcctctgggcacttctcattgctctatttgcaactgtgctccatgcaagcttcagaacaccaaatctcaaagcacgtctgaatacattcagagaggaattccgggctgtttggcggaattatagtgagctttaagggtttcctttgtttctctcatgttcatgggtaatgaaggtgtctggtgccgttgtttgtgagctgtgctaggagatctagttgaaggtgaaacgccattgcacattacatggactacttgctctcttgggaggtgggattctggttgggttgactccgaatgcgatgctatgccagcacacgatccttcaagaacagtagttttctttcgtacttctccctaaccgagcattagagagaggacagcatgtaaaggatgtaaaaatgtacttgttctcgatcaaaaagtatgttgtttgttgaaattattactaatttgtattgcatcctcttttggatcatttgttaggtgactatcattttgcttcagcatttttgtcgagttaaaaaaaaaaaaaa

SEQ ID NO: 13137 - DNA, 912 bp, Zea Mays
gtatcatttaatgtacctgattacctgagttctacgaagaaggtaaagtgcgtaaggttctaaaaattgagccaacaccagatggcaatggtcgctttttcaacctcagtgtccagaatcggcttatcaacgttgatgagagcatttacatccctataaccaagggagagtttgctgtcattgtatcaactttcaattacatcataccgcacctcatgggctggagcacatttgtaagttcaatcaaacccgaggagtcacggccatacagcaggccgcagtccacgtctgagtacgaatggcgaaggtgatgtgttgatgaactacagcaaaatggctgagacccacactgaagggatgagattattggtattgtttggctgggtaatctcagatgtggttagttgatggatgcctttttggggtactccttttgtttcctttctagttcagcaggcaggtagcactacttgtatccagagtttcacggggcggttggggagggggcatattttgggcagcaaacctcagttctgacatggaatgacgcagtcacgcagcaggggcggttgtgaatctgctccgtaaggccgtgactccagtgatagcgggacgcagctgacagatgtttgggttgctggggaagggttggcctgaaattgttgcttgcatacacgagattattgtgtacatgtagtctgcgactctgcgttacccccttgatgaatgtccgccctgtggaactgtggtgtttttgctgatgattttgctgaattcaaaagcttaaaccattagaattagaaagagagatactcactcacgtgcaacccctagtacttgaactcaagacgacattgataccgtattacaaggtttcatgcagagaccaggtgaactaaaaagctgaagccg

SEQ ID NO: 13138 - DNA, 1795 bp, Zea Mays
cgggccagttatggtttctggagcgttttctctgttcttggcgaggtagctcaatagatctactgctctcgggggagttaatgcaaagctgagttgctgcacgttggctttcttcagagatggcttcagctggtgtagccccatctgggtacaaaaacagcagcagcactagcattggtgccgagaagttgcaagatcagatgaacgagctaaagattagagatgataaggaagttgaagcaaccataattaatgggaaagggactgaaactgggcacataattgtcaccactactggtggcaagaatggtcaaccaaaacagacagtgagctacatggctgagcgcattgtaggtcaaggttcttttgggatcgtcttccaggctaagtgtttggagacgggtgagactgttgccataaagaaggttcttcaggataagcgttacaagaaccgcgagttgcagaccatgcgccttcttgaccaccctaatgttgttgctttgaagcattgcttcttttcaactaccgagaaggatgagctttatctgaacttggtccttgagtatgtgccggagacagttcatcgagttgtgaagcatcacaacaagatgaaccaacgcatgccacttatttatgtgaagctgtatatgtaccagatatgtagggcattggcttacattcatggcactattggtgtctgccacagagatattaagccacaaaaccttctggtgaacccacacacccaccagcttaaactatgtgactttggcagtgcaaaagttctggtcaagggggaaccaaacatatcgtacatctgctcccgatactatagggctccagagctcatatttggtgccactgagtataccacagcgattgacatttggtctgctggatgtgttcttgctgagcttatgctagggcagcctttgtttccgggtgaaagtggtgtggaccaacttgttgaaatcatcaaggtcctcggtacgccaacaagggaagaaattaaatgcatgaacccaaattacacagagtttaagttcccacaaatcaaagcacacccatggcacaaggtattccacaaaaggatgccgccagaagctgttgatctggtctctcggctactccagtactccccaaatctgagatgcactgctatggaggcacttgttcacccattctttgatgagcttcgagatcctaatactcgccttccaaatggtcgctttttgccaccactattcaatttcaagcctcacgaacttaaaggagtcccatcagacattgtcgcgaaattgattccagaacatgcaaagaagcaatgctcctatgttggattgtgaaatgaccgcgccttgagactggaacctgtggttgcaattgtgaatttcccctgggatgtttgacgatctgaggcatgcgagcctgttgttgaagatgcaaggttacgtacttgtacgacaatgtgacctgtgtagctgagtagtctatgtcgcagtgacatgtaacggcaccccccttcctactaactgacgcttactcgagattgccatagttgatcttgtaatttgttatagagcagtatgaatgtatttatggtagcttgaatctatgtatggattcacttcgtttttccatgtttccttgtctccagacccagattgctaccgtattgtttcagaattcctagctacctgttgcctattgagtattgactaccagcttgcacttgtctgttattgcactggctgtggaatcagctgttgatttttgccacaatattttagttcag

SEQ ID NO: 13139 - DNA, 1863 bp, Zea Mays
cggcgcggcgcgacgcgagttgcccgggcgccccggccttgtgcttctgcattggaccgcgatccaaatccagggaggatccgaacaggacaacagcacacttgggacgcgaggaggaggagttggtgagcgaactcgggatcagtgggtgaccgcagagttcttgcttcttcctcttggaggaggagggctgcagcctgcaggggccggagagagcaggaggaggcggagacatgggtagcttcgctaagctggcgaggagggcggtggagacggacgctccggtcatggtgaagatacaagaactgctccgaggggccaaggatgtgatgtcgcttgcgcagggagttgtttactggcaacctcccgagtcagctatggataagatcgaaaagatcatcagggaaccaatagtcagtaaatatggttctgatgatgggcttcctgagcttcgagaagcacttctcgaaaagctaagcagagagaataagcttaccaaatcatcagtcatggtcactgctggtgcaaatcaggcttttgtgaacttggtcctcactctctgtgatgctggtgattccgttgtcatgtttgcaccgtattatttcaatgcctacatgtcattccagatgacaggtgttactgacatattagttggtggctgcgatcccaagacacttcatcctgatgttgattggttggagaaggttctgaaagaaaatgagcctatccctaaacttgtcactgttgtgaatccggggaacccctctggagcttttattccaaggcctatgcttgagaggatttcagatctgtgcaaaaatgctggtgcatggcttgtggttgacaatacctatgagtactttatgtatgatggaatggagcactactgcttagaagatgctcatattgtcaacctcttctcgttctcaaaggcttatggaatgatggggtggcgtgtaggatacattgcatttccaaatgaagctgatggcttccacgatcagctcctcaaggtgcaagacaacataccgatctgcgcctccatcatcgggcagcgcctggcgctctactcgctggaggccggccccgagtggatcaaagaacgggtgaaagacctggtgaaaaaccgggcgctgctggtggaggcgctgtccccgctcggcgaggacaacgtcaagggcggggagggcgccatctacctctgggcaaagctaccggacagctgctcggacgacttcgaggctgtcaggtggctcgcgaacaagcacggcgtcgccgtgatccccgggagcgccagcggaggacccgggtacatccgcgtctccttcggagggctcaaggaagaagacaccaggctggctgctgagaggctcaggcgcggcctgcaggagctggtgaccgatggaatggtacagtgacggctccatgggtgtaagtaaaagctccaattttccaacggtgtaattccgccgtgattaattcgggagaagaaaaggaacttgttttcaagaatgcactgcgttgctcggacgagagacgggacggaataaaatgcgtctggtctgcagagtcacctatgttatgaatcatatgtagtgcatatgtcatgagtgacagagtgagtaattgtttctgttcgacttccagttctacatattactgatcgatggcagcaactgtacacagtcaaaggtataaccgtataagcaagaaccgtgagctgttcttgacgtgcagagcttgcctgttagcaaatatttctgtccagataacgacagcatctgccttcagaaccagcgtcacattctgtaatggcatggatgagtgtctccaagaaagataaatctactatatctacatgag

SEQ ID NO: 13140 - DNA, 1438 bp, Zea Mays
aaccagcgcagccctcaattcctcactctttttttatcccctcctctgccattccctccctctcccctcaacccagcgcccccctcccgccgccactagggtttctcctccccgcccacccccaaaccatccccgaagcttccagtgcgtcgcgccgcaaccatgagcgacggtaaggactccctcgacctctccgccctcggcgccgccatccccaactcggccgagctcagcgcggaagacaaggctaaccttgtggcgtcgatcaagaacacgctcgagggattggcatcgcggcataccgacgtgctcgagaacctcgagcccaaggtcaggaagcgcgttgagaagctcagggagatccagggcgaacacgatgaacttgaggcgaagtttttcgaagagagagctgctctagaagctaagtatcagaagttgtatgaaccactttactcaaagcgttatgaaattgtcaatggtgtggtcgagattgagggtatcacaaaagaaagtgcagctgaaaccccagaggagcaaaaaagtggagatgagacctctgctgagcaaaaagaagaaaaaggtgtaccagctttctggcttaatgcaatgaagaatcatgaaattttagctgaggagatccaggagagggatgaggaagctctcaagtacctcaaggacatcaagtggtacaggatcagcgagccgaagggttttaagcttgaatttcactttggtacgaatatgttcttcaagaattcggtgcttacaaaaacatatcacatgatcgatgaggatgaaccaattctggagaaagccattggtactgaaattgaatggtaccctgggaagtgcttgacacaaaaagtgctaaaaaagaagccacggaaggggtcaaagaacacgaaacctatcacaaaaaccgaagattgtgagagcttcttcaacttcttcagtccacctcaagtccctgatgacgacgaggaaattgatgaggacacagctgaacagttgcagaaccaaatggagcaagattatgatattggatctaccatagaaacaaaattatcccacatgctgtctcgtggttcactggagaggctgctcaagatgaggactttgaagttatggatggcgaggacgacgacgatgaagacgacgatgatgaagacgacgaggatgaagatgacgatgattatgatacaaagaagaccaagggaactgctggaggggaagggcagcagggtgaacgacctgcagagtgcaagcaacagtgaggtgtgatgtcattaagttggttttgtggggccgttgggtgggggttcttgttggttttattttatggaactggcggggggatttttctgggacatgttacatgtgggtctgtattgggtttcagatgttatatttttttttttttttttggacagagtaatac

SEQ ID NO: 13141 - DNA, 1267 bp, Zea Mays
agacgttcttgtttattggttgctagatgtttgacaacctgtatggttgccgccactcgctccctgatggtctgatgagggccactgacgttatgatcgccggaaaggttgccgtggtctgcggatacggtgatgtcggcaagggttgtgctgctgccctcaagcaggctggtgcccgtgtcattgtgaccgagatcgaccccatctgtgccctccaggctctgatggagggtcttcaggtccttcccttggaggacgttgtctctgaagctgacatcttcgtgaccaccactggcaacaaggatatcatcatggttgaccacatgaggaagatgaagaacaatgccattgtctgcaacattggccactttgacaatgaaattgatatgctcggccttgagacctaccctggcgtcaagcgcatcaccatcaagccccagactgaccgctgggtgttccccgagaccaacactggcatcattgtccttgctgagggtcgcctgatgaaccttgggtgtgctactggccatcctagctttgtcatgtcctgctcattcactaaccaggtcattgcccaacttgaactgtggaaggagaagagctctggcaagtatgagaagaaggtgtatgtgctccccaagcaccttgatgagaaggttgctgctctccacttgggcaagcttggtgccaagctgaccaagctcaccaagtctcaggccgactacatcagcgtgccgatcgagggtccctacaagcctgcccactaccggtactaggcacacggcttgcagctcactcgggccgttgtgtgctatgaagttcgctacactggcctgtcagttatcttttgcatgcatatgcattatcatatacgcagtcgcgtagcaggttttcttatggttatcgcttgagctgaggggggagggaaggagctgtttgcttttgctgaagaataatggtgtagtcggctggggtgaggcgatgtgcgttgccagatacagttttgtcttgttgactctacttatctgattatcatttgtaagcgatttgctcaagttatttgtcgtttatgaataacttgctttcctcaagagcatacttaaagacggatcctgatttgcgttgattttggttgcttgagtaccgagtttgactgttcgagttgcgttcaccaagttcgcggagatgctatttttttacttgtttgggaactctatttttacaagtgatttctatttttccaagacatttttttagaaaataaaaa

SEQ ID NO: 13142 - DNA, 76 bp, Zea Mays
ccccataggtcgagtttttttataataggcacacacattttttccttattttcttttttctctcttgaaagcgccg

SEQ ID NO: 13143 - DNA, 991 bp, Zea Mays
agtagataatttctctgctctttcgcttagggtgcgtgcatcaacaggtcaagctcgaggattgtcactcaagtctcaagatttgactgccttatttctggctgttaggctgtattgtagttttgttatggagtatgacatccatacaattctagatacagctacacttgcagctactctttttgttatttacatgattcggttcaaactgaggtcgacatatatgctggataaagacaactttgccttgtactatgtggtattgccctgtgctgtgctagcgctacttgttcatccttcaacatcgcacaacattgtgaacagaatctgctgggccttctgtgtttatttggaagcagtttcagtgttgccccagttgcgcttgatgcaaaataccaagattgtggagccgttcacagctcattatgtgtttgcgctgggtgttgcaaggtttcttagctgtgcacactgggtccttcaggttttggacacccgaggcggattgttgactgcgctgggctacggtctgtggccttcaatggttctcctctccgaaatcgtccagacattcatccttgcagatttctgctactactatgtgaagagtgttttcggcgggcaactggtgctgcggcttccgtccggggtggtctgaaaaactgcagcgagaaagaaaagcatactgttcgtcccttctgtgttagatcatacaaagcgacagtcattgtgctcctagcgcccaaacttttgcactcgtaaagtggattagcagagggccgttaattttttttttcagttgtaaactgtttacgtgaatgctgtaccgataccgtgataccgtctgactttttcatccatgctagagttgaagcaggtagcatccacatcgagttgtcgcattttcagactagagatcagattctccgatgccagtgactgtttatctttcattctagtttttcttgtgtcgtcgaaatagacgaaatgtgag

SEQ ID NO: 13144 - DNA, 697 bp, Zea Mays
ataaaaggcatgtaaatttggacttgaggtgcacttccagtcggcgtggcaggccaagccatggtctgcggtgcctgggtggtgggtccgccactgccagagatagtgagatgtagttcctcatttcataacttttatatttgtatgtcaggaaattgtggagaagcaagctcctggattgatgaaggaagctgagcggtttctaattctcagcaatattgataggctgtggaaagagcatctgcaggcactaaagtttgtccaacaagctgttggtttaaggggttatgcccaacgagatccccttattgagtataaacttgagggatataatcttttcttagacatgatggctcaaatcaggaggaatgttatttattctgtatatcagttcaaaccagtagtgaagaaccaagaaggggaagcatcccaaaaggtgtcaaaaaagaaactggacaaaggagctaacaaacttggtgctgcccaagctgcgtcatgatcttcctgtgagaaacgttgctggtgcttttagttgcagtggctgcagtctccacgtgtacaaagatggtctatactcgataccgtatgagaaatgtacttcatgcatgtttttgcaggattagcatgaacaggcacgcagaattccgaatgtactagtagaagatatttgctggtagcagtgccaactgactagaat

SEQ ID NO: 13145 - DNA, 903 bp, Zea Mays
tggagatgtctgcgccttgccgcgagctacctcaagtgtgggaaaggcaaggtgtggcttgacccaaatgaagttagtgagatctccatggcaaactcccgccagaatatccggaagttggttaaggatgggtttatcatcaagaagcctcataagatccactctagatcccgtgcaagaagggcacatgacgccaagcaaaagggacgccactcaggatatggtaagcgtaggggtaccagggaggctaggctacccaccaaggttctgtggatgaggaggatgcgtgtgctgaggcgccttctccgcaagtatcgtgaggccaagaagattgacaagcacatgtatcatgacatgtacatgaaggtcaaaggtaacgccttcaagaacaagagggtgcttatggagagtatccacaagtccaaggctgagaaggccagagagaagacactttctgaccagtttgaggccaagcgcgccaagagcaaggcgagccgtgagaggaagatcgctaggagggaggagaggttggcccagggtccacgagaaataacaccacctgtctcatccacagctccagctactggggcaccgaagaaagcaaagaagtgaagtattgaaataaagctgtagctttctagtccagtactgcactttcttttataagctctagtcaaattttggagcgcctgaactgttttgctgttatataacttagtgtattgataaattcgactatcacatctggattattctgctggataatgtccgtgtctttgatgtttgtgttaaattcctattctggatgagcacctggccctaactttactccctccctggtttcctttatgagaggagagactcatttggttaggctctggaactcatgacgactgtagtcgc

SEQ ID NO: 13146 - DNA, 2302 bp, Zea Mays
tccacccaccccactccccctctccgtggtttgtccgctcgcatccttccctcccttccgccctttcctcccacttgctcgccgaacccagagccccgcccacctcttttcggttttttctcgccggcgtttgtgccaggatcgggctttgggctccgtgcatcgacgcgccgccgcctcctgatcgcaaagggtgtttcccccaggctttcgtgctccggaagtggcgagattcgccgagaaaggtcagatccggtggcctggttcgagcaacagtgtgttggcgtatcgatctgcattggatcgtcgggcgattcgtgtgacggagacgacgtcctctgtggtggctccggtttgctcctcagctctagatctggaaggactgggtgatctgctgcctcaagcagcttgaggtgcattggaaagtgaccatctttcccagacatcggcacaacgtaactggacatggaggctcttgtggttttcccggagcagcacagccaccaccatcaccgccaccctggtacccgcagcaagtcatcgggtccatacttttcatcaccgcctaactctcgtggcttccgtggaatgaactgccggtctttccactctggtcgttgcgtcggtgctattccattcccagcacctcctgctcgcacctactcatccccagagcccaagacacccaagcagcaaccacgccatggtggcaagcgaagccggccaatttccataagcctctccacatcccctccctcccattctgagctctgggcaggtccagcattctccaactctccaccacctagttcgcttcccatccccaaattctcgctccgccagaagcgcagcatctctctcgagctgccaccggttgaacgccctgatgatgtggtggtcaggctgcattctaaatcagcaccttcatccccagttgagggatatgggtatgacttcttcaatgacgatgcaatcgctagtgcgatagcaacggagaatctgaggaggattctccagctggatatcgcagatcattgaataatgggaggatggaagggtggttcttgtgtacataggttatctttcactgacagctttctacttgcattggttgtgtatagggtaatggtgatagatacttggtggttgtaagatatggtcaggatcatgggagaggtgtaggttgtaggtgaagcatcttcagaagcttagacggttgaaggtgatagtgccctgttaggtgttattaaggtggggtctgggtcgaggatggggttgcacggcagttggtagtattcacctatatgcttccttcatctcttaggtgtaggatttaaacctttttaaaaacagcatcatttgcatccacagtacctgttctgagctggcggtgggcactctgacatagcagtaacatacgtcctaaccccaaaccagatgtcaaatatttgtagggtaccatgcatcttacatacccttgcatacttatttccttctgtcctctagccaactgtctctaactatcctcgcttcctggtgctctgcaaagaacaccattatctcctcagcagctcttctgttttttttggtaaggaagaagctgcgtggaagatggaagaaattctgctctctccgtcttgttcgaaactaactttcctatcccgcccctttgttgcatatctggcatataccatagtccatatccgtcgcatatctccaggcttttatgttcatctagcgctcctgcattgcatctagtgcccttagtcagttagcatgctcattcgttcccacttcaagttcacgaaccagtttgagggttctgattttcttaaaagcgtcgaaagagagtctggattctggatcccttcgtgcaggcaaaccctgatgaggttgctctgtaatgacataacgcttaagctagctcgtgccggtgttacacgcttctgtagccctgcgcagttttagcactagcagtgaagcagcagtactgctggatctagattagtagtcatcggaaatgccgaggtttggtcagttatcttgtgctctggtgttaaatcagcagttgcattgtgtcgttgttacttcagtaacgtgatataacggtcctatgtcgtgaaactagctcatggtgttagaactagaaaccatgttgcccagagctactatgttgatgttgcacctgctgagcctgtcatggctgtcactccttgaggattattttggttattagttcgtcggcggagttgcggagtttcgtctctgcgtttgagataagacccttgatgagtagctagac

SEQ ID NO: 13147 - DNA, 97 bp, Zea Mays
cagcaggggagaaaattgaagagtttgaagcccacgtggcgagcaaaggaagactgtgaggtgcatcggacgaccttcagtagttcttggagagata

SEQ ID NO: 13148 - DNA, 2250 bp, Zea Mays
cctcacccacatactctcccctggttgggcctgtgctgtgtggccgctctccctccacccaacccaaccaagaaacagaggcccccgctcaagctccgagagacagagaactccatggccgccatggacctcctctccggcaagctcatacgctccctgcgtctccattcctcactcctcccctctgctccttcctcctcccgcgccttcgaggtctccgcctcccgcaccgtcagggaagagttcttcagcgccttcgaggaggagatggaggtcaagcggcggctcgagcaggtgcaggcggcgctcgagggcgccactgaagacatggacctcatgggccggctcctcgatgagctcgacctgctgcagcgccgctcccaggacgtggacctcgatatggtggacgtcaaggtgcagaagctcatgccagagctcgggttcatgcctgaggacgccgaccgcctcgtcgcctccttcagcggtgggtggaaaatgaggatgtctctaggcaagatacttcttcaggaccctgatttgcttttgcttgatgagcctacgaatcatgtcgatttggataccattgagtggctggagatgtatctcaagacgcaggatgtgccgatggtcattatatctcatgacagggcgttccttgatcagttgtgcacaaagatagtggaaactgaatttggtgtgtccaagacatacaagggtaactattcagagtacattctagcaaaggcggtagcagtggaggcacagtatgctgcgtgggagaagcaacagaaggaaattgaacagacaaaggagctgataaacagacttggtgctggagttaatgcagggcgtgcttccagcgagcagaagaaattggagaagcttgaaaaagaagggttgattgagaaacctttccaaaggaagcagctaaagatcagattccctgagcgtggaagaagtgggagaactgtgttgacgataaacaatcttcaattcggatttgagaataagactttgttcaacaatgctaatctgatagtagagagaggtgaaaagatagctattattgggcccaatggttgtgggaagagcacactgcttaaacttatgttggggatggagaagccacaaggtggtgaggtgcttcttggggagcataatgtgttgccgaactattttgagcagaatcaggcagaagctcttgatttagagaagaccgtgttagacactgtagcagaagctgcggaagattggatacttgatgatatcaaaggtctccttggccgttgcaacttcagggatgacatgctggatagaaaagttcagtttttaagtggtggagagaaggcaaggcttgcattttgcaagttcatggtgactccatctactctactcatcttggatgaaccgacaaaccatcttgatatcccatcaaaagaaatgcttgaggaggcaatatcagaatatactggcaccgtcataacagtttctcatgaccggtacttcataaaacaaattgtcaacagagtcatcgaagtgaaagatcagactatccaagactatcaaggagattacaattactaccttgagaggaaccttgaagcccgagaaagggaacttgcccgcgaggaagagctcgaggagagagcccccaaagtaaaagccaagtccaagatgtcgaaggcagagaaagccgtcaggaagaagcagaagatgcaggccttccagcagagcaagcagaaatccaagtcgcttaagaactcgaagcggtggaactgagattttttcgtcgttcgtagaggcggcgttggcgttcgtcacaatgcagaatgccatctgagacaccttgcaatgcagataccagtgtttgctactctgcctgctgtgccgtatgctataatagtcgccatatcagcagaagcactgcaaatacatcatcagaaagtagccctagtagcaatgaatgtagaagatcgtgaaaaaaaaaatactgtaactataagcaggaagcgttatgtgaccttgtacataatacatgcactttcggatggaggaacggcttattttttggatgaacggaataatggaatcaaatcgcacagcatttcagaattattatgcccttcaactccaggacatagcatgtcacagttacagaacgttcccaggacaattttttcatccaatttgacagcgtgcaccagtttaaataaacccaagtcaaaacaatgcaaggaaccaagattttct

SEQ ID NO: 13149 - DNA, 1716 bp, Zea Mays
cgtaggcgtaggctgctgatgcgcggacgcgaaccagcccgagcgcccgtctctgattcccttttcttccctttaaaaacacgcaagaacctacccggtgacgctaccaaacgggcggggccgcaccgaccgaacctaaccgagagcacgagcatacccgtcccgactccgactgcagagcatcagccgaggagaaaagtcgggagaaacgcgcgtgacgtctgcccgcgtcgtatgcgccgcgctgccgtcgccgcgacgacgacgacgaccaggatggcagccgaggagatgagacgggcctccgcctcaacggccacggcggagatgccggcgtcgccggcgccggcgcaagcggggtcgaggtgggcgcgggtgtggccgcgcgcgctccggtggatccccacctccacggaccgcatcatcgccgccgagaagcgactcctcacgatagtcaaaactggatatgtccaggaacgagtcaacattggctctgctccacctgggtcaaaagtaagatggtttaggtcagcaagtgatgaaccaaggttcattaatactgtaacatttgatagcaaggagaatgcccccaccctggttatggtccatggctatggagcttcacaggggttcttctttcgaaactttgatgcccttgcaagccgttttagggtgattgccattgatcagcttggctggggtggttcaagcagacctgacttcacatgtaaaagtaccgaagaaactgaggcatggttcatagattctttcgaggagtggcgcaaggccaagaacctcagtaattttatattgcttggtcactcttttggaggatatgttgctgcaaaatatgcgctaaagcaccctgaacacgttcaacagttgattttggttggtcctgctggcttctcatcagaaacagagcatagctctgagtggttaaccaagtttcgagcaacatggaaaggcatgctaatgaatcgtctttgggagtccaattttactccccaaagggttattaggggattgggtccttggggtccaggtctagtacagagatataccagtgccaggtttggtacaagttctactggtgaattactaacagatgaagaatcggcattgatgacagattatatgtaccatacgttagctgccaaagctagtggagagctgtgcttgaaatatatattttccttcggggcatttgcaaggaaacctcttctgcagtgcgcgtccgattggaaagtgccgactactttcatatatgggcagcaagattggatgaactaccaaggcgctcagcaagcacggaaggacatgaaagttccttgtgaaataatcagggtgccgcagggtggacattttgtgttcatagacaacccttcagggttccactcggctgtcttctatgcgtgccgtaatcttctatcagtaaatggagaggagggattcacatttcctgatggcctaatatctgcgtgaagtggcatgttcaacaagcttgctcaacaacagtttacataaagcaaagatatacgattgtggaaatcattgcccatttccaccaatttgcttgtatacggattatgctgtgtatatattacataacaaatgtattagtatcatttaatgcacgatttgtgaaagggcctgagtttgtatttagcgaattttaggttggtttttttccctttttcttctttcaaaaaacaa

SEQ ID NO: 13150 - DNA, 853 bp, Zea Mays
ctagttgatctcttagttgtccgtgtactgtaggatggcaatggccacatcagcatcgtaccctccacctcctccattttaccgattgtacaaaaattttgagcaagatccctcatctgcaccagaacctccaccaccaattgacgaaccattcaaagccttgggtgttgattacacaggagatgttgtgattccaagcttggagagtcataatgtccgtcagctttatccaaagggtcccaatattgacttcaagaaggagcttaggaccctcaacagagagcttcaattgcatattttggagctggcagatatattagttgagagaccatctcaatatgctcgtagggtagaagatattacgctcatattcaagaacttacatcatcttctcaattccttacgacctcatcaggcaagggccacattgattcacatgcttgagagccaaattcggcaccgcaaggaagcaattgaagatataaagcagaggagggaggaagcgcaaaaggtgcttggggaatcactgcttatcttggatggaagtcaaactaactaggctgacgccgtcaaggtagttggttcaagaccgattcttctatgagttagtgtgttagtagaatagaagacaagatgtgtctggattgttgtggtatcatctgttgtggcttgtggtatttccagctttgataactgaattttcttacttctatggtctatgttagcaaagttggattactttcttacttccattggtactcaactgcatcatgggttactttcttgtggaagtgtatattgtgagattgatgcctcgtggccagcttaattgaaaggttgttatatgctaata

SEQ ID NO: 13151 - DNA, 1398 bp, Zea Mays
caaaaatctcctctctctcgcttcatttcttttttctttccatcgaattcctcgtcaccaacacgcacgcggcctctgcctccgcgtctccatcctgaggctccgaatcgatctcccttccccaccaaaccggagcacttcggaggccggacccggcgagaagcgaccgaccgcagccagctcacgtctccctcttcatccaccatgctgagggtcgcgggcaggcgcctctcgtccgctctcgcctggcgccccgccgccgccgcctcaggctcccggggccctctcgccggtacactacccggccgcgacgacgacgacacacgcgactgcagggcgcgtttcgccatcgaatctcccttcttcgccgctgccagagagactcttgctccaagaaaccaggatgtgggcttatctgagctcccagcaactgtggcagctgtgaagaatccaagtggaaaaatcgtgtatgatgagtataaccatgagcgctacccacctggagaccccagcaagcgtgcatttgcctactttgtgctgagtggtgggaggttcatttacgcatctttgctgcgacttctcgtcttaaaatttgtcctaagcatgtcagcaagtaaggatgttctcgcgcttgcctcacttgaggttgacctctcaagcattgagcctggaaccacggtgacggtgaagtggcgtggcaagccggtcttcataaggcggaggacagaggatgatatcaagttggccaacagtgttgacgtcgcatccctccgccacccagagcaagatgcagagcgcgtcaagaaccccgaatggctggtcgtcattggggtctgcactcacctgggctgcatcccgctccctaatgcaggagactttggtggctggttctgcccgtgccacggctcgcactacgacatttctggtaggatccgcaagggcccggcacccttcaacctggaagtgccgacatacagcttcttggaagagaacaagcttctcatcggctgagattgctgttagtgttgttcgtgtcatcgtgtggccctgtcgtttttgtttgatcaacaacttcaccttttctcttgcctgggttagggcatacctttgtgggctgtttctgagtgcagtgttgttgctagcacctgacactaatgaataacctgatgctacataaaggatactgttaattgttgtcaaatttggttctgtttttttttcctgacagcaatgaacaatcttctgctactgaaagtatactgttaattgttttcaagtttgcttgtgttttttccctgatctcaagagggattgattatgtaacacatttttaactgctacggtccatttttatctcgtcggttagtaggaatgtaatcggatattgatgaatattac

SEQ ID NO: 13152 - DNA, 2455 bp, Zea Mays
tcgtcgtgatctacctgatccaaaattgggggtcatacacagtcttacatagcttaaaagaaagctatgaagaagcacttcggagaaacgatgttaaagctattgtcgttacagggaaaggagggaaattttctggaggatttgatattagttcctttggtggtgttcaaggaggccaaacaatgcaaccaaaggttggctacatagcaatagatattctcacagatactgtagaagctgcgacaaagccatcagtggcagcaattgatggtcttgctcttggtgggggtttagaagttgccatggcatgccatgcacggattgcaactccaacagctcaattaggtcttccagaacttcagttaggaattattccaggatttggaggaacacagcgactcccacgactggttggtctgacaaaatctttggaaatgatgctggtaagctctgatgcttctttccttcctcttttcagcttcaggattctgttatcgggcattatcttcttttaaaacatgtatcatttttccagttatctaagccaatcaagggcggtgaggcacaccaactgggtctggttgatgccttagtttctcctaatgatttggtgaatactgctcgtcaatgggctttggatatatatgaatgtaggaggccctggatcaaaagcctttataagactgacaagctagaacctcttggggaggctagggaaattctgaagtttgcaagagctcaagctcaaaagcaggcagctaatcttcatcacccacttgtttgtattgatgtcattgaagaaggtatagttgcaggaccacgggctggactctggaaggaagcaacttctttccaggaactgcttttctcagatacttgtaaaagcttagttcatgtgttcttttctcagcgggcaacgtctaagattccaggtgctacagacttggggttgatgcctaggaaaataactaaagttgccattctaggtggtgggcttatgggttcaggaattgcaactgcgatggtattaagtaactatcctgtgctacttaaagaagtaaatgagaagttcctaactgctggaatcaacagaatccaagccaatttgcagagtcgagtaaagaaaggaaaaatgaccgaggagcgatatgagaaggctatgtctctcgttactggtgtccttgattatgaacgtttcaaagatgtagacctcgttatagaggcagttattgagaatgtgaagttgaagcagcaaatattttctgacttagagaagtactgtccttcacattgcatccttgctactaacacatctacaattgatcttaatctgattggggagaaaacaaaggctcaagatcgtattgctggtgcacacttctttagtcctgcgcatgtgatgccacttctggaaatagttcgtactcagcacacttcaccacaagttgttgttgacttgctggatgttgggaagaagattaaaaagacaccaatagtcgtcgggaactgtactggctttgcagttaataggatgttctttccatacactcaatcagcactcttttatgttgatcttggtatggatgtttataagattgatcgtgcttgtaccaaatttggaatgcctatgggtcctttcagactggcagatctggttggttttggtgtggctgtggccactggtatgcaataccttgaaaatttcccagagagggtctacaaatcaatgctacttcctctgatgatggagggcaatagggcaggtgaagccacccaaaaaggattttacaagtatgagggcaagaggaaagcgactcctgatcctgaaattatgaaatatattgaaaaatctaggagcatggcaggagttacaccagatcctgagctgatgaagctaagtgagaaagacatagtcgagatggtgtttttcccggtgataaatgaagcctgccgagtccttgatgagggtatcgccgtcaaggcttctgacctagacatcgcttcaatctttggcatggggttcccaccttataggggaggtgtcatgcactgggcagattccatcggcgcaaagtacatccatggaaagttggaggagtggacaaagcggtatgggggcttcttcaagccctgctcttacctcgctgaaagagctgcaaaagggattcctctgagtgcaccaacaaagaaagttcaggctcggctataagatgatttccttgtggatggaggagacaataatggattccggtgaagcatttggaatgcgtagagctgtaggctaccactatcacatgcatgtaacgcaatatactactgtgaaaataaagtgcactgcacggcggtttttttatatataaatacaaggatttttttcttgtcacctgtaaaaatttaaacagattttttgtggaatctcatgagaactgaggcaccgctccaaattctaaacaaa

SEQ ID NO: 13153 - DNA, 941 bp, Zea Mays
ttgcgctgccaaccatttttctgccagcagctcttagctcaagtaatctggacaagtttctcatctccattgggaagcaaccagcatatgtggacttggaggctgcaccagctgtgggtaaggataatcctcctgatctagcacatttggttccaactggtgtgccaaattcttcagaacaaccagttgagaacacggcacctactaatgttcttaaagagacagaagtgaaggctaaacccaaagttcagagcaagggtgcagaaacatcgagcaaagtagataaacctactaccgataccagtgttgacaaatttgtaaatgatgtgttcgagatcatctccccattgttcttgtctgaggcattgaagaaattggacattaagaaggaagatctttctttgatcttagaaggcctcaggggacgggcagatccagatttgaagagtatagcgatgactctgaagaatgcatcatatacctcagggtttcacgctggttacaaaaccatgcagaatcgtggtctaaacggctgacccacttaggtcccagtctctcaattgcatggtttgatacaagaaacaggaatctgattttacatatttgtatgctgttgaatgaagtcaacatattatgtttgatgctctcgttctatctatgacgtatgctctttttttgtgtatgtgtggatttgcctttttctctctctgagagatcaatgggaaattttcaccataccgtgcagtgttccatagaatatgtatttacaagattctgctactcgctctaccaacatcagagtttcagtgtatcagatacatcacatagaaatgtcttcggcgcgttccagaaattactgttaacatggtatatcacccaaacagtcgttttacgtgccctttaacgatgtgtaattcactcgcctttacagtgggcgtatt

SEQ ID NO: 13154 - DNA, 1371 bp, Zea Mays
cgcattgcggttcagagaactcttcttttgttctcaaacacctgagtgcttttctaaataaaaaaagaagaagaagaggaggaagagcttgagatgtttgcagcaaatccgagagctccaactgcttcggtgtcatcagggcagcctgggacgtcctggatgagaggggggccacagacaaagggctcctggacctcagcaaactcttcagagcctgcaagactgtgaagtacgcttattcaatccggaactggctgtggacagcattcacctacactgccatggtggactacccgaccccagccaacttcctggagaacctgcctgcctacccagtcaaggagatgtgcaagaccatcgacgcgttccccgcgggcgcagacgtcctggagaaggcgttcgcggcggcgagcctgtactacaactacacgggagaccaggcctgcaacaagatagaggacggagacgacccgcacggcctcgatggctggcaatggcaggcctgcacagagatgatcatgcccatgacgatctccaacgagagcatgttcccgccgtccgccttcagctacgacgacaggtccgacgagtgtttccagagctggggggttcggccgaggccgcactggatcaccactgagtacggtggatataaaatcgataaggtgctcaagaggttcggcagcaacatcatcttctccaacggaatgcgagacccatggagccgtggcggggtgctcaagaacatctcgtccagcatcatcgcccttgttacagagaaaggtgcccatcatttagacttgaggtcttcaacgaagggtgatccagactggctcatagaacagaggaggcaagaggttgagatcattcagggatggattgatcagtatcatcaggacatggcggaaacatcttcctgaagacagggcaagtcagtattcttcttcttacacatggtggaaacagggcgtgtatcatcaggacatggcggaaacatcttcatgaaaacaggacaccttcctgttacggtcatgtttggatccatggaaaaaaataaaggacaaaaaatcaataatttacacactaaacatcagaaattgctgaatcttacacaaagcaggcccctttgtgaattagtaaggggtggtgcaggtgctgggacttcaatccgcgccagagcagtgatcgactgatctcgcaggcctctggccagcggaccaaggcagtcttgagtcttgactcagtttctgttttttttaactgtattgtttcttcttttgttctcggcaaggaacagtcttgacatttttctctgttttatgcatgtagattagggctgggtatccatatttcgagaaaataatagtaatt

SEQ ID NO: 13155 - DNA, 1130 bp, Zea Mays
aagcttcacaactgttgcagatatctggtcatcagtacagaacttgaagtgtagattgtgatgtcggtgccgatgtataacaaacagaactcattgggcaccccccctccccacaagacaaatcccttttctgattctgaagggccatcaagggcacagtctgtcccagtacgacgcaccaatcaatctgtgcaagagttggaagattatgctataaccaaagcaagagaaaccacacacaaagtaaatgattgtgtcagggctgctgaagccatcagggaagatgctacacaaaccatgctaactttacaccgtcaaggtgagcagatcatgcggtctcatcaagtagcagctgacattgagcaggaccttacagtgagtgagaagcttctgggaagtctgggtgggctattttccaagtcatggagaccaaagagaaatcatcagataaaaggaccagtctcaggaaataactattctgcgacaacagctaacgacacggaacagagggggaagctaggaattgccccagcacgtcaagaatatcccagtcatgtacaaaccacacctgtatctgcaatggaaaaagttcaggctgagagaacaaagcaggatgatgcactttccgacctgtgtagcacattgggacaactcaaggaaatggcagtggatatgggcacagaaattgacaggcaaaacaaagctctggttcctttaagcgacgacgtcgatgaactgaatttcagactgaaaggtgcgaatcagcgcggacgccggttgctaggcaagtgatatggaacctgaattcgggcagtttggagaccgtcgcctcgactgcaggattttaagaaccttgttgtttacatgttttagagcaaactagaaacataggcgctgccgcgcccttcagggtgaatcagcccgtgttctttggagtgaatcaggccacacttgttgtattagtgagagaatgatgatctattttgtgtcattatggatttcatagattattttccctgaactgcatttgtttcaataacataggagggaactttctttgaatggcattaaggcgaatttttaaggtgtgtccattattccattataaagggacaaaatctatttcgtac

SEQ ID NO: 13156 - DNA, 785 bp, Zea Mays
gtttctacggttgaaagagctgcatctgacaagcaatctgaacctcaatctagacagcataaaccttcaaacttccctccaactacccagcttaacttgaaaaacagtgcaacagagaatcctaatgttgtaaatcaggttgatacaatgaaatcagttacaggtggttttggttcacagttacctcgtgtacctaaggaacctgctctcctagatgagagatctctattggcttgtattgtacgtgcagttcctgctggacctgagggtggaatcaggattagctcaactctgccaaataggcttgggaaaatgttggctcctcttcactggcatgattataagaagcaatatgggaagcttgatgattttgtggctagtcgtccagagctgtttgtgattgagggagacttcattcaccttcgtgaaggagcacagcagatcatttctgctactacagctgctgcaaaaatagctgctgctacagcatcttctgccccttactcatccttactgccttctgttgctgttactcctgtggcacaaagcactcggcaaaagaggggccctgcagttgattccagatcatcaaatgcaattctttctggaaatggcttcacagatcaatttaacatcattcagggggttagtgacgtacctgtttcaggcaaagtaagaaacaccctagataatggcttcttaggtgaagttcgaactgggcagccatctgtgctcacagctgctgcgaatggagcaagacatgacaaaggtacaaataatgtcat

SEQ ID NO: 13157 - DNA, 1822 bp, Zea Mays
gcagtccactcagaccgatgggcgatggcgaggaagggggaaggaaaatatcaaaaggaatctcccaagtccaaacagaccccatcgcccgccgcacgtcacgacatgcccttctccctgctagtgctgccaccgctcccgctgaaaaagattattagtttttcatttctatttttaataattgaacctcttctgccggttcttctccctccttgagtactacttcctggcaatttatcttctccaacaaggtccgacatcaacaagtgattgctcgcggccccgcaagcgagagagaacttttcaacccaaacaaacagtccaatccaattcctagggcaatccggtgaacgtgtgcgtgtgtatatacatacacacggccgccgccgccgcaggcctcgctcctaccgccaccggactcccctttcgcgtccgcttctcttgttgttgctgtgctctcctgttaccgggacccggaggaaggcaggaaggaaggaaggaaggaaggcggggatggcggaggagacggtgcgggagctgcgcgcgagcttcgcggcggggcagacgcgcccggccgagtggcgggcggcgcagctcaaggggctcatccggatgatcgacgagaaggaagccgagatcagcgccgcgctccacgaggacctcgccaagccgcatatggagtccttcctccacgagatatcacttacaaagtcgtcgtgcaagtttgcgctcaaggggctcaagaactggatgaagcccgagaaggtacctgcggccataactacattcccgtcctccgcccaaatcgtgccggagcccctcggcgtcgtgctcatcatctcagcctggaactaccctttcagtaatggaactgtaggacgtatagtgatggcagcagccgcaaagcatctgaccccggtagctctggagcttggtgggaaatcccctgttatcgtggattcaaatgttgatctccatgttgctgctaagaggattgttgttggcaaatggggatgcaacaacggccaagcatgcattgctccagattacatcataacgacaaaatcatttgcaccggagctggtggcctctttcaaaagagttttggaaaggttctatggggaggatcctctggaatcagcagacttgtctcgtattgtgaattcgaagcagttcaaaagattgacaaatttgatagaagaaaaaagagttgctgacaagattgtgtacggcggcaaggctgatgagaagcaactaaaaatttctcctacactattgttagatgttcctgaagattcagaaattatgacaggcgaaatatttgggcccttgcttcctattgtgacggtcgaaaagattgaggaaagcttcgacttgatcaatgccaagcctaagccactagccgcctaccttttcaccaagaataggaagctgcaagaggagtttgtggcaagcgtccctgcaggagggatgcttgtaaacgacactgcgctacatctcaccaacccgtacatgcccttcggcggcgtcggcgacagcgggatggggtgctaccacggcaagttcggcttcgactgcttcagccacaagaagggagtcctgatccgcggctttggcggggaggcgaacgccaggtacccgccctacacgacggagaagcagaagatcctgaggggcctcatcaacggcagcttcatcgccctcatccttgccctcctgggcttccccagggagaagcgttagatgctccggcctcttgtcggtttcgtatgtcatgccgctgaaagaggaattgaaggcggcagtggaacttcagttgcca

SEQ ID NO: 13158 - DNA, 99 bp, Zea Mays
tctccaagcttcgagggatcgaagatcaagcgttggcggccaagtgatcaagctctctgagttctagaaggttgaagaccctgagcatctgtttggtga

SEQ ID NO: 13159 - DNA, 1700 bp, Zea Mays
atgattcaatgtcaacctgctaactatttactcaccgtttattttaacagcttcagtggacccgaaggcccctttgatgtggatgtttttgactctagtgtagattacataaagttaatgaagacaatttttgacttcgaagcaataaaaaagctgctgacctccccaaagtttacattctgttatgatgcactccatggtgttgcgggagcttatgccaaacacatctttgtggaagagcttggtgctgatgaaagctcactgttgaattgtgtcccgaaagtaatgagttcttctattgtcacaaatatctacttataatgtggctaggtattaattcatcacttatatttttgcaggaggactttggaggtggtcatccggatcctaaccttacctatgcaaaagagttggttgaacgcatgggtcttggaaagtcatcctcaaatgttgagcctcctgaatttggtgctgcagctgatggagatgctgaccgcaacatgattcttggtaaaagattctttgtgacaccgtcggactctgttgccattatcgcagccaatgctgttcaatcaattccttactttgcttctggcctgaagggagttgccaggagcatgccaacatctgctgcccttgatgttgttgcaaagaatttgaaccttaagttctttgaggtgcctactggatggaagttttttgggaatttgatggatgctggaatgtgctcaatctgtggtgaagaaagctttggcactgggtctgaccacattcgtgagaaggatggcatctgggctgtgcttgcatggctttcaattattgctttcaagaataaggacaaccttggaggagataagcttgtcactgttgaagatattgtccgtcagcactgggccacatatggtcgccattactacacacgctatgactatgagaatgttgatgcaggggctgctaaggagcttatggcaaacctagtaagcatgcagtcatcactttctgatgttaacaagttggtcaaggagatccggtctgatgtttctgaagtagttgcagctgacgagtttgagtacaaggatcctgttgatggctctgtgtccaagcaccagggcatccgatacctctttggagatggttcacgactggtgttccgcctctctggaaccggttctgttggtgccaccatccgtgtctacatcgagcagtacgagagggactcctctaagaccggcagggattcacaggacgcccttgctccgctggttgatgttgcgctcaagctctccaagatgcaagagtacactggacgctctgcccccaccgtcatcacataaattttgaagagtgttttagaatgagttgaggcgcttacacaaactttcattccggcctcttgttccatagtttttcttgcatgttacatctcaccgatgaataaaatgtatgtatcagacttgtctcgtttttttgcccatccaagcagcaaattagccgctggcacagcatgcggtaataatcttgtcacagtgctgtaattgggagcgtttttcttgttagaagtgtttctggtttgtttgagcatttgcggatcgatttttctttctgaagagtatataaacattttactcacctgtatacactgtcgcagtgtcactaatgttctgatggctgtttagactatgtccaataagcgtttttcg

SEQ ID NO: 13160 - DNA, 1155 bp, Zea Mays
ctgctacttctggtatcgccagcatgggtaggggaaggattgagatcaagaggatcgagaacaacacgagccggcaggtcaccttctgcaagcgccgcaatgggctcctcaagaaggcgtatgagctctccgtcctctgcgacgctgaggtggccctcatcgtcttctctagccgtggtcgcctctacgagtatgccaacaacagtgtcaaggctactattgagaggtacaagaaggcacacaccgttggctcttcctctgggccaccgctcctagagcacaatgcccagcaattctaccagcaagaatcagcaaaactgcgcaaccagatccagatgctgcaaaacactaacaggcacttggttggtgattccgtgggaaacctgtcactcaaggagctgaagcagctggagagccgccttgagaaaggcatctctaagatcagggccaggaagagtgagctgctggctgcggagatcagttacatggccaaaagggagactgagcttcagaatgaccacatgaccctcaggaccaagattgaggagggagagcaacagctgcagcaggtgaccgtggcacggtcagttgcagcagcagcagcagctgccaccaacttggagctgaacccattcttagagatggataccaaatgcttcttcactggcggccccttcgcaacgctggacatgaagtgctttctccccggcagcttgcagcagatgctggaggcacagcagcgccagatgctcgccaccgagctgaacctcggctaccaactggcgccgcctggttctgacgctgccgacaataaccctcatcatcagttctaaactggatgcatgcacgagaagcttttcaagcgaactgtgaacgatggaagctggctgttgcctctagatgttcttggcttccatgacctagcttattatggtgtgtattgttgttgccttttgtgtgtgattctccttgctactctactgatggagaactaaacctaatcgattggacataatgatcaaatgctacagatcctgtgatgctgtgatcaggttaaggcaaaacatgtatactgattgcttaaatgggtttacgagtgacgacaatgctatttgttgcttctattactgctcaactctctcttgcttccggttt

SEQ ID NO: 13161 - DNA, 1968 bp, Zea Mays
ccacgaagtagcgttggctgttgcaaaagcaaccgtttcaagtttcctccctagtgcacccaggaaatcgccagcacctcccctgttccctctctgtctctggctctctctcctctccgcccctttttatcgcccgatctcacacattttggaaagaggagagagagggagagattagaggggagcgccctgcccaagcaaagagaaaccgcggcgcgagaagagggaggaagggcagacgggcgagcaggatgagagagatcatcagcatccacatcggccaggccgggatccaggtcggcaacgcctgctgggagctctactgcctcgagcacggcatcgagcccgatggcaccatgcccagtgatacctcggttggcgtcgcacatgatgccttcaacacgttcttcagcgagaccggttctggcaagcatgtgccgagggccatcttcgtcgaccttgaacccactgtcattgatgaggttcgcactggctcgtaccgccaactcttccacccagagcagctcatctcgggcaaggaagacgcagctaacaactttgcccgtggccactacactgttgggaaggagattgtcgatctatgcctggaccgtgtgcgcaagcttgcagacaactgcactgggctgcagggattcttggtgttcaatgctgttggtggtgggactggctctggacttgggtcacttttattggagcgcctttcagttgattatggcaagaaatccaagcttggtttcaccatttatccttccccacaggtgtcaacagctgttgtagagccatacaacagtgtcctctccacccactccttgcttgagcacactgatgttgcagtcctcctggacaacgaggctatctatgacatatgcaggaggtcccttgacatcgaaaggccaacctacaccaacttgaacaggtttgatggtgctatcaatgtggatgtcaccgagttccagaccaaccttgttccatacccacgtatacatttcatgctttcctcatatgcccctgtaatctctgctgagaaggcttaccatgagcagctctctgttcctgaaatcaccaatgccgtctttgagccctcaagcatgatggccaagtgtgacccaaggcatgggaagtacatggcttgctgcttgatgtaccgtggtgatgttgttcccaaggatgtcaatgctgcagtcgcaaccatcaagaccaagagaactgtccagtttgtggactggtgccccaccggattcaagtgtggcatcaactaccagccaccgtctgttgtccctggaggcgacctggcaaaggtccagcgtgccgtgtgtatgatcagcaacaacactgccgttgctgaggtgttctcgcgcatcgatcacaagttcgaccttatgtacgccaagcgggcgttcgttcactggtacgtcggtgagggtatggaagagggtgagttctccgaggcccgtgaggacttggctgctcttgagaaggactatgaggaagtcggcgcagagggtgcagatgacgagggtgacgagggcgatgactattgagtagccggttaataattagttcgctggtgcttaatggttgagttattttgagtatactctgtatgggtccactccattgcgtgctgctgctgtgtgtttccattttgtattttgtgataaattgttcgtagccccctattggccatgattgttgttcatatcatcctgttttgatttgcaatgctattcatcgaagttcgatgtagtatatttcattctgttgcaagtgctgtgtgcttaatagtcaataccattgtagtgttctgaattatagatcaactatttatcatttttccatttacaaggacaagctaaacttatgaagaaagtatttatgaacaaagtatttattgatgaaagcttaactaaactactaattatatttaatcattattattattattat

SEQ ID NO: 13162 - DNA, 945 bp, Zea Mays
cccaatttcgataacatacttggtcagcttgcagatgtatggtcatgtggagttactctttttgtcatgcttgtgggagcctacccgtttgaagatcaggatgatcctaaaaatattagaaagaccattcagcgaattgcagcaattcaatataatatcccagacaacattcgcatatctgatgattgcagacaactcatttcacgtatctttgtcagcaatccattaaggagaatcaccatgagggaaataaaaagccatccatggttcctaaagaacttgccgagggagctcacagaggcggtgcagttatcctacttcaggagggacaacagtgtctctgcattttcagaccaaacaaccgaagaaatcatgaagattgtcaaggaggcaagaaccttgccaaaatcgtcgagatcaggctatggttacagtgaagaatgctcagatgaggaggaaaaggaagtggagagcgaacccaaagaggaggaagaagaagctgagtgtgataagacagttagggaggttcgcgagagcggggagctggatatgacctcactgcacatctaaatgctgcctgtgaggctgtgacgtgtctgtagataattggctttattgtctgctgaatttggtagaacttatgcaattctggcgtcagatatagtggtctatataagccttttccatcctgtaatatatttgttttgttgaactgtatgtgtggtactccgtatatgggtttgttctaagggagcaaggctttgtacaggcacacctgattgtgtttttggataggaagttttaccgtctgtttgcacactgcagcaaacattttggagtttgtaagccatatgttgcggcatatccagtaaaaatggatgaaacgctgcaaattccgtcaaaatggcttgtataactttgcaaagattgaagataaaagatttt

SEQ ID NO: 13163 - DNA, 1047 bp, Zea Mays
ctatttagcgccttttgctagaccacgatctcaaggttaggtcgtccaagcctgtagtgaagaatcagatggaattcgacctttcacaatgcctcttatgaagcttgcttgcactgcattggagagagttcctttgacacgcagaaaagtgattgacaatttgatgaagaaatttcatcaagatttggtattttgccgctcacctgctgatagtgaactgaccattggagttcatcaaaagcagaaggagaaaatcgatccgattctggagtgggtagacactgaatttgggttcaaacccgttgtctacacaagcttctttggggggaagcaagacgagggccttgctaaagctgtagaaactgttctgaagaaagcaactgactgtgagttggcatccattgatgctatggctgcagcagcccattccttggtgatccctcttgcaatatttagagaaaggttgggtattgaggaggccattgagttgatcaggcttgaagaagaccaccaggttgatcgatggggcttggtggaaggaggtcatgacgttgatatcgcggatcttaaagtgcagatgtcctcggctgttgtatttcttggactttcacggggactgtgaatgtttcttacctatatggctagttgtttatttccaagcttgtatgaatctgagaccaagagttgtagagaataattgccgcggaaggtcgatagcaaaccaagtatctgtactgtattcagcaatcagcagttctgatgttcgattttggattgagtccagaaaatgctgttgaggtttgaactagggagcccagcattcctctggctttgtactgttgtgagagtaagaacatatctaggaactagtattgcagtggcagtcactgagtcgatatatctacttctgcacctttcagctccagcagcacaagttgcatgatcgtattgaccggtcatttttagccatgctcaatttgctgtaacaaatagtgctgctaggtaccagtccatattggtcctaaaattaaattaaaaaaacacaaa

SEQ ID NO: 13164 - DNA, 2662 bp, Zea Mays
gttattttttctgatctgcttctgggtggggtagatatgacgatgctgccgttgtgaaggtctatgagacattaactggtgtaaaagttgaagggaaggctccgatgctcagtaaagaagatgttcttcagtctcttccatctgaatggccagaagatccaattgataatcttgtacctattgcatctcatagtagcaaaaagtttcttgtagttttagatgatgatccaactgggactcaaacagttcatgatatagaagttttaactgaatggcctgttgaagcccttgttgaacagttcctcaagctaccaacttgcttttttattttgacaaactctcgttccatgactgctgataaggccatgctgctagtacaaactatctgtaaaaatcttaaagctgcggcagagaaggtccctggtgttagttatacaatagtcttgagaggaagctgacgctgctgtctccgtattaggtgagatggatgcttggataatctgtccattttttcttcaaggtgggagatacactattaacgacatccactacgtcgcagactctgatagattaattcctgctggtgaaaccgaatttgccaaggatgcagtttttggctataaatcttccaatctcagacagtgggttgaagagaagaccaaaggacgggttttggagaaccaagtttcaacaatttccataactctcttgcgtaaacaaggaccaactgctgtttgtgagcatctctgtagcttggagaagggctctgtgtgcatcgtcaatgctgctagtgacagggacatggctgtctttgcttctggaatgatccaggctgaattgaaaggaaagcgatttctctgccgcacagctgcaagttttgtgagcgcaaggattgggatcaagccaaagccacctatctgtccaaatgaccttggcttaaaaagagctttaactggaggcctcataattgttggttcatatgtgccaaaaactacaaagcaggttgatgagttgcgatcacagttcgggcaatctcttcgagtcatagaggtgtctgtcgagatggtttcaatgaaatcaatggaggacagagaccaagaaatcagacgaattgttgaactagggaatgcttatatacaatccagaaaagacactctaattctcaccagccgccaactcattactggaaaaactcctgaagaaagcttagaaattaattataaagtgagttcagcactagtggagattgtgagaaggattgatagtaaacctcattatatcattgcaaagggaggaatcacttcatctgatattgctacaaaggcgctggaagctaaacgtgccaaagtcatgggacaagcattagctggtgtacccttgtggcagcttggtcctgagagtagatttcctggggtcccttacattgtttttcctggtaatgttggtgataacagtgctcttgctaaagtggtgaaaagttgggcttccccatctagaagttctacaaaagaaattcttcttaatgcggagaagggcggttatgctgttggtgctttcaatgtgtataaccttgagggaattgaagctgttgttgcagcagcagaggctgaaaagagtcctgctattcttcagattcatccgagtgctctaaagcaaggtggagtcccactggtagcatgttgcattgctgctgcagaacaatccagtgtgcctatcagtgtccactatgaccacggcatttccaagtcagacttgcttcaagctcttgaagcgggatttgattcagtcatggtggatggttctcatctaactttaggggataacatcttatacacaaagagcatatcttccttggctcatgcaaaaggtttacttgtggaagctgagttgggtaggctctcaggctctgaagatggcatgaccgttgaagaatatgaagcaagatttactgatgttgcccaggctgaggaatttattgatgagacaagcattgatgctctagcagtttgcattggaaatgttcatggaaaatatccacctagtggaccaaaccttaaattcgacttgctaaaggaccttcgtgcattaacattaaagaaaggagttagcttggtcctccatggagcatctggtctatctcatgagctcgtaaaggagtgcatagacttgggcgtgagaaaattcaatgtgaacaccgaggttcggaacagctacctggcgtccctcagaaagccagaaaaggacttgattcaggtgatggcgtctgctaaagaggcaatgaaagctgttgtagcagagaagctgcgcctgtttggatcgtgtgggaaagcctgagcgaagtacttgcgttgcgccggcaacatgcagtacaagaccgactgcatcatcgggttcgtgatgctgctgctactgtgcagttgcttacagttacagctcattgcgttgaacagctgaagtggttattgtactttgcagtgtagcgcaactaaggctaattcataaatcgtaataatgtatgtatgctgccccgctgtaaaaatgctccgtcgttaataaatgccatcgcgcttgctgtgcctttgtttacatttttattcgcctctcgagtgttctaacatgcaatctcagttgtcctatttagccctagtttgaaaactcaaat

SEQ ID NO: 13165 - DNA, 918 bp, Zea Mays
ctaggctgctaaagtgacgataaggaatcacgtaaaggaaacccaggcataaagaccgtccatttgaaatggggaaggaatttcgggaaaaaaaagtaaggaaaggcacactggtctggaaatcagtagcctgttggctgctgttgctattaatcagttgggagagagggagatggccaggaggaacatcggagtcgcagtggacttctcgtcgtgcagcaaagcggctttgcggtgggcgtcgacgaaccttgccaggaacggcgacaggctcatactcatccacgtgaacagctcctgccagaacgagcggggcgccgttcatctctgggagcagagtggttccccattgatccctctggccgagttttcagacgtcgccaggacatacggtgtgtcaccggacaaggagacgatcgagatcctcactcgagcggcaaatcatagagggatcgaagtctttgcaaaggtgttgtacggcgacccagcaaagaagctctacgaagcagccgacctggtcccgcttagctgcatggtcgtcgggagcagaggactaagcacgctcaagagggctctgatggggagcgtgagcacgtatattgtgaaccacgcggcctgccccgtgacggttgtgaaggagatggtgtagcgtgttgaacaccgctgtttacaagcctcaccctagccagattgaataagcgtgcttgataagcactgatcagggggatcttgctacttatacgacattttgtgcttgagatttgggtaactaggaccgggcagaacatgtctacgtgttgggctcatggcactgacatctgaacatatgccattatgccctaagcctgttgtaatcgcaaaatacttttgcttataaaatcagttaagaaaatatatggctccgagttttttttaatt

SEQ ID NO: 13166 - DNA, 114 bp, Zea Mays
ccgtgcctataaataggtgaacagtacccccgtactgttcacgctgattgggcattcgcttttgtgtcacgcttgtactttcatctccttcaagttgaaggtacatttgtaatt

SEQ ID NO: 13167 - DNA, 1654 bp, Zea Mays
aatagcaccaattcaagcaaccccccgtctcgtcctccttcctctcaagagtcgagacccaggcagccaggcttccagttccagccccacctcgcctctaccctcctcaaaccctacaccacgccccccggcccccagcccccggccttcgcccaacccgatagcgtagcgccggcgcagaaccggaccctgccgtgcggttgtccaccccgctcggcgccgcccgccgccgccgccgcctttgatgtctcctacctgcgacctcggcttcctctgcccccggtcgcagaagagctcccaagaggtcccccgagccaccgcttccggcgcccagcgattggcttccccaccgcagccgagatgagcagcggcggcgagaagatgttgttgtttgggtcctttacggaggacgagactaagttgttacagggtcagcccctcaaaagtccaactaaaagtgtcagcaaagaatgtgaacggacggagatccagtttggcaccctgaacttgtcagtgctgaatttagagaaaatatctacttcaagtgttgttcttcctgcaaaatcagcaaaaggggaaaccagtgccatcacgaaggagaatgcatgcaataatgaaaagaaagctgcagggtcaagcctttcaaacggtggaccagttctggctaatggatgccctcctgttaatgttcctgctaacaatggtttatttgagaatgtgaagacagaggctgttgtcccaccagttatacctgtcaaaatcatcagcaatccaacaccgcaaatgacgttggagacgcataaggatggcaccaaacccactgaaagcagaaagttaaataaggaaagggaaattactgaaaatggtagtccaattgtcgataaacacattgttgctgctccagcagaagaggcagtcacaagcctaaataagaaagcctctcagaacatgcccttgcttccacatggtttgaggaacacaggaaatatttgctttctgaatgcaactttgcaggcattgctttcatgctcgccttttgtctaccttttacaggatttgaggaaccgcaggatacctaaggttggctacccaactctgagtgcatttgttgagttgatatctcaattggatgtgcctgatgagtcagttatcaagaaaaatgagaaggttattactgttgccgcaaaaccacttaatcctgccatgtttgatgctgttctcagaaactttacaccagatgtgccggctggaataactgctcggcctaggcaggaagatgctcaagagtttttaagttttgccatggatagaatgcatgatgaactgctgaaacttaatggagatggtttgaattcaaaggaggggatggttgtttcatccgctgatgatgatgcttgggagacagttggacgaaagaacaaatctgcaatagttagaactcagagttttgtcccctctgagcttagtgctatttttggagggcagctacagagcgttgtgaaagctgcaggtaacaaagcatcagctactgttcagcccttcctactgctccatcttgatatattcccagatgctgttcagacgcttaatgatgcacttcgtctgttctctactcctgaatctttggaaggatacagaacagctgcgggaaagg

SEQ ID NO: 13168 - DNA, 97 bp, Zea Mays
gtcctctacaactttggtattatcatcataatgagattcgacatttagaaatgtcaaacaatactaaacgtaaattctgtccagatttggacagaat

SEQ ID NO: 13169 - DNA, 1360 bp, Zea Mays
gtaagacaacaaaattggaggtcaatgcatcagatgtcattattttggagggcattttagtgttccatgaccagagagttcgcaatctgatggacatgaaaatttttgtagacacagatgctgacattaggcttgctcgacgaatcagacgtgatacagttgaaagaggaagagatatcagctccgtgcttgaccaatatgggaggtttgtgaagccagcgttcgatgattttgttttgccttcaaagaagtatgctgacgtgatcattcctcgaggtggtgataaccatgtagcagttgatctgattgttcaacatatccgtacaaaacttggtcagcatgacttgtgcaaaatctatccaaatgttcatgttgttcaatcaacttttcagatccgaggaatgcatactcttatccgtgatagggacatcaccacacctgactttgtattttattcagatcgattgatccgtttggtagtggagcatggtcttggacatttgccatttacagaaaagcaggttattaccccaacaggatctgtttatatgggagttgacttttgtaagaagctctgtggagtctctattgtgcgaagtggtgagagtatggagaacgcattgcgtgcttgttgtaaaggaataaaaattgggaaaattctaattcatcgtgttggagacaatggacaacagcttgtttatcacaaactgcccatggatattgctgaacgacatgttctacttttggatccggtgcttggtacaggcaactcagtagcccaagcaattgaccttcttataagaaaaggtgttcctgaggatcggatcatttttctcaatctcatctcggctcctgaagggattcagtgtatctgcaagcgatttccttcgctgaagattgttacatctgaaatcgattatggtctgaacgaggaattcagggtgatcccaggactgggagaatatggcgaccgctacttcggcacagacaattgatggatcataccactctatggctgtgtgaagatctcacttggtccctggatagggatggtatcttgcaagtaatatttaatatggaggcgtaattgtgtttaatagtcggcatgccttagtaacatgtagaaccttctgcataaagcttgaccaaggacagcgggatgctagagaaggacctgtgaacggagaacgtggtgtgtgttttgtcttgtacgggtgcagaaacattgatgttttcaaataagtgtgtttgatccaaatactttacggtgaagtcatgagattaaatctgcaaagcactttaactctgttgttctattgggtttttaattccaacctacatcaacttgctcaggataaaa

SEQ ID NO: 13170 - DNA, 1269 bp, Zea Mays
ccagtctgtgaagttgctttctacaatggctgcaattcggttggaggaggatggtgataacattgagaacactctttcccttgctcttgttgacacttcaagacatgggactacagataggagtatccaattgtccgatccactagcctccagctcatgggaaagggttgctgaggagaagactttaattacccctgtgcagtgcaaaaatttgtggaggcaattcaaagctgaaactgaatatacagtcactcaagccatagctgctcaggaagcaaataagaggaacaacaactggctcccacctccatgggcacttgctgcaatggctatccttggattcaacgagtttatgacattactgaggaatccgctttacctgtttgccatatttgtgatttatcttgttggaaaagccctttgggtgcaatcagaaattggcagggaattccaacatggatttcttcctgccatcctttcactgtcgacgaaatttgttcccactgtaatgaacatcctgaagagattagctgacgcgggtcaagaacctgcagcagcccccgagaggcaaagagagatggagctccaaccaaaatccaccaggaacggttccttatacagcaatgtgacatcggcagggtcatctagcgtaaccacttcggagattggacctgaatattcaagcccggttgtgcaatgattttgctgatctttagctttttggctggaaacatactctagcagttgagaaaaacagggtgcctcaagaacgtacgaagattttggtgccttgcagtttttgtaagcttgcccttcccagactgattcaaggtggcactgcccctcgttgttattcaaggaattttggggctggcggggttgtttgtaagagcattgtaaaataacttgtttcattttttggtttctgtaacatgaatacatgacatgtgatagttgtatataagatctgtggactgggggcgtatcagcgcattctacacagctaagggttgcatagttgcgagaactgaagcatgtaaatgtctttaaactgccatctgattgagatgcagtagtactgctgttctggaataagacatgtctgcttttggggaaaatgattcaaaaaatgtttcgtttgaactcagcgtctgctgaaaatgaatttggttcccgacccctgttctggttggccgaaattcacaagtttggtgttctttttgtgtactgtccgtacaataatacagtccaggcaaaggacaccagacg

SEQ ID NO: 13171 - DNA, 1546 bp, Zea Mays
caaaatggaaggaaggagagagaaaaaccatattacctggtgataaattttctgacgttgttgggagcccctattatgttgcccctgaggtgcttcaaaaatgttatggcccagaatctgatgtatggagtgctggagtgattttgtacattttgctatgtggtgtacccccattttgggcagagagtgaagcagggatcttcaggcagattttgcgaggcaaacttgatttggaatctgaaccatggccaagtatctctgatagtgctaaggatttagtccgtaagatgcttatccgcgatcctacaaagaggttcactgctcatgaggttttatgtcatccatggattgttgatgatgctgtcgcacctgataagcctattgattctgctgttttgtcaaggctgaaaaacttttctgcaatgaacaagctcaagaagatggcattgagggtgattgctgaaagtctatctgaggaggagattgggggtttgaaggagttgttcaaaatgatcgatactgacaacagcgggacgataacttatgatgaactgaaggatggtctgaaaagggttggctcggacctgatggaacctgaaatccaggctttaatggatgcagctgatatcgacaacagcggaaccattgactatggagagttcttggcggctacgttgcacatgaataaactggagagggaggaaagcttggtgtcggcgtttgcgttcttcgataaggacgggagtggcttcataacgatcgacgagctctcacaagcatgcgaacagttcggtctttctgatgtccatctcgaggatatgatcaaagatgtggaccaaaacaatgacggtcagattgattatagtgagtttgccgcgatgatgagaaagggcaatgctggcggagcaggacggcggaccatgaggaacagcttgcatgtgaatcttggcgagctcctgaagcccaccgagacctagttttttttaaccagaggatcctgcttcccagatgcgccccatctgaaacttaccgtgtgcctcatccgctttcacagatcgattagttgatctctagtagcagcgccaaaagcagtttaagattttctcagtggtactagtagtgaggggaaaatagcatcctgtggtgccagtgagagattttaggcgctgaagacgacgtgctatgctactccggagtcctgttgtcttcttcttcttcttgttgttgttgatttcaggtttgtactattactgatctttgttgtaaaatgcgctgttgtcccatgaggtaggcacctaggtctcctccatttgaattatatcaaacggatttgtaaacacgttctcatgcatgaaaccatttcttaatgatgatttattgtgtgcttttttccccccgacactgatgtggaaaggcgtttcggatgcgaatcatgtgtatggtttgcagtacttttcgtgtggtggaggaacatgcattgacaggggttcagaatctacgtaccatgtacagagcgtttgtccagacatggtcaaaccagtgatgt

SEQ ID NO: 13172 - DNA, 1179 bp, Zea Mays
gtttcctttgtgcgcaagtgcaatcatttcttggcacctcccattcaatgcaagtgagagcctgggcatgccgcacctgagtccgttcatgaagccgctgggctccaacttctccaacggcgtcaacttcgccattgcagggtccacggccatgccgggagtaaccaccttctcgctggacgtgcaggtggatcagttcgtcttcttcaaggagagatgcctcgactccatcgagagaggtgagagtgccccgattgttgagaaggcgttcccagatgctatatacaccatggacatcgggcacaacgatataaacggtgttctccacttgccctatcatacaatgctcgaaaatctccccccagtaattgctgaaatcaagaaagccatcgagaggttgcacgagaatggagccaggaagttctggatacatggaacgggagcattagggtgcatgcctcagaagctttctatgccgagggatgacgacagcgacctcgatgagcatggatgcatcgcaagcattaataatgtctgcaagaagttcaattccttgctgagtgaagccttggacgagctgcgtttgacactgaaaagttcgactatcgtctttgtggatatgttcgctatcaagtatgatcttgttgccaaccacacgaaatatgggattgagaagccattgatgacatgttgtggtcatggaggccccccttacaactatgaccccaaggagagctgcatgacttcggacaaatacctgtgcaagcttggcgaaaagttcataagctgggacggggttcacttcactgatgctgcaaatggcattgtggcttccaaagtactcagtggtgagtacaacattcccagggtcaagctggccagcctcgtccccgttccaaaatctgacgattaatggtgatgcagcaccttaattggcctttagtttggcctatcaaggatgatgaagatgaaactactaacaaaactgacaccaccgaagtttaattattttgaggttcttacgttacatccattgtagaagaagactttccttttgtttacttctctttttgtacaatcggcgcatatgtatatcctagggttaatatatggcgatgcaggtgtctgtaccatgtataattttctttttgaattttgggtctgttggtacgatttagg

SEQ ID NO: 13173 - DNA, 687 bp, Zea Mays
agacaacattactttagttattatcgtatatactgctacccgagataggataacctgcagtcgcccccaaatttccccgaaccaaatcactcccaccgtgtccacagcaaccagcacacatttccctttggcggatcgaaggaaggaaggaggagatgggtggcggcatggaggtgcacaaaaaccggtggatcgaagagtggaacgccggccgcgagaacctcgagttcaatttccgctggacccgccgcagcctcgccgtcgtcggcctcttcggcctcgctgtccccatcctcgtctacaagggcatcgtccgcgaattccatatgcaggacgaggatgcaggccggccatacaggaagttcctgtaagcggcgtccagggctgcaggagacgtcgatccctcgaccggggctgcgaggaggggagtttccattcagtttgtgtcggtattgttttagtctgaatctgatggagcagtttggaatgctgaactattgtgcctgatccaaatgaataaggtgtaatgactcgtcttttcaattactgaaactgaacatgtttgaatttatctggtcacttgtatggtaaaatagcagcgttgtcaattgtcatatactgtttatgacttcattcgagcgccgtggaggaatattggatattcatggaggattggagtttgcaaaa

SEQ ID NO: 13174 - DNA, 63 bp, Zea Mays
aattttatctgctcgtcacacggtgtcgagttcccacaccatcatcgtctctgtcgcaagctt

SEQ ID NO: 13175 - DNA, 730 bp, Zea Mays
ttcccatatcattgtccacccttcatttctagagaatatgtgccagatagaatgccaacatgccaaggttgtagttggcagtttcattgctgaagctaaaaagccaaaagaagagcaacccaaacgtgagccaacatcggtgccaccgcacacagctgtctttggggcggcctcgactgccagccccccatcggatggcacatcaagtgagcactccgatgatcccgggagccccatgggaccaaacggcagtgcattcaccagcgcggggcttcccctgcactccacatatgctgcagttggttggtcactatcagaggaccaaagccgttatgatccagatctaaagatgatgaccgactgatgggtgccgtttcgcagcttccttgttagcagttgacttagctgagtaggctcaataactaaggaatcctgagagtggtaaaaccttcaggaaggagtagatcacgagtaataattagtaccagtgcatgcctttgtcttgttatatcgtagttagcagtttgtatttgtatggtttcactgtcagaaagtctatgcagcattccttctggtttccatctgtatccacgtagtgcaacaattctcatccatggattggtattgctcaccccacatcatcgtatgcttgtattgcaattctcctcttgggttcacaaaaaagccaatttgcctttgtattagatagactacattaaaccgggtgcaa

SEQ ID NO: 13176 - DNA, 1599 bp, Zea Mays
gtagaccatttaggatggtgacacggtcttaaatgtgacacttgacctgcaatttttctaaaagagagtgatatcaagtgggcttctcgctgggacacctacttgttaatgatagatgatcaaattcactggttttctattgtgaactctctcatgatcgtactcttcttatctgggatggtggcaatgattatgctccgcaccctgtatagagatatctctaggtacaatcagcttgaaactgaagaagaaacccaagaggagacaggatggaagcttgttcatggagacgtattccgccctcctgcaaactctgacttactctgtgtctgtgttgggactggtgttcagttcttcggtatgctgctagtaaccatgatctttgctgttctgggtttcctttcaccatcaaaccggggaggactgatgactgccatgctgctcacttgggtcttgatggggttgtttgctggatatgcttcttcacgcctgtataagatgttgaaaggatcagaatggaagagcatcaccctgaggaccgccttcctgtttcctgggattgctttcggtattttcttcgtccttaatgctctaatatggggggagaagtcgtctggcgctgttcctttcaccacaatgtttgccttggtcctcctctggtttggtatctcggttcctcttgtatttgtcgggagctatctgggcttcaagcaacctgccattgaggctccggtgaagacgaacaagatcccgagacaggtccccgagcaagcttggtacatgaaccctgccttcaccattctgattggtggcatacttccgttcggagcagtcttcatcgagctcttcttcatcctgacgtcgatctggcttcatcagttctactacatctttggcttcctgttcctggtgttcattatcctcatcgtcacctgtgcggagatcacaatcgtgctgtgctatttccaactgtgcagtgaggactacctgtggtggtggaggtcctttctgacttcaggatcatcagcaatctacctcttcctgtatgccgggttctacttcttcactaagctgcagatcactaaggtggtgtcgggcatgctgtactttggctacatgcttcttgcctcgttcgctttctgtgtgctcaccggtacgatcggcttctacgcctgcttctgcttcacaagattgatttattcttctgtgaagatcgactaggcatgttccatgggcctgcagcgagtatgcccattgcgtttttttcatgaattttcagtgcagctgtacttttggtgttagcttataaaccatttatgctcactgtggttcagagttgtacaaggataggacactactgctagctttatatggggtaattttaacttgtgctgttgagaactgctgcatacgttcaatccatagtctcgttatcgtctgccacccctttcctgcttcagctgcatgatgatgtccatacgtgcttggctttcatcaagaaaatgttagcttcatctccacagaatatttcggggactccggcggcactcatcctcaccaggcgaataccgtacttgatcagtttatgcaaaatattcg

SEQ ID NO: 13177 - DNA, 232 bp, Zea Mays
ggtagcacgaccttacttgaacaggatctgttctataggattgtaccgttgcatccttgacaaataaaggaggcaagcactaaaacctggttgatgagacatgacctgtgggccagagcgtgaataacggccaggatcgggctcagatgcttgtgtccggtgctgtagaggatcgttcctcgctagggtgtctaccctggctgggggtggctcatgggttgtctgacaggtt

SEQ ID NO: 13178 - DNA, 1278 bp, Zea Mays
cgtccctacattggagggctccaaggatgcggcacaaaaggctcgcctccctcccgaccaccaaacaatctccaagaatagcgggggggacggctataaatcggaaaatctgcccctcaagtttgccaactttaggataggccgtgcaaatccatttcttgccttgccggcacagctctgcatagctcctcccaagctttaggattaggatttggatttggatttggatttggatcgggtgtgtttcctgcgtaaccatgagcgagatcatgaagctaaagcgtgggatcagcaccaaaccaggagaccacctcgtccaaaatggccaacaacatccatgtcacgaatgggaggagcaacagcgctactggccctcgccgcgggcgccgccggcgagcccgacggagtcgcccaggaccccaggcgggagccagaagaaggcggttctgggcaaggtgaagagcaaggccaagaaatggatgcacatgctgcatcacaagaagaaacccgcgccaccggaggagatgatgtggacccccagggccgggcctggacccagcgcggcacaagacagcatgcccagcagggaggagcgacacgccgccgagcaccgtggcactggcactggcacccccaggaaaccgcagcaacacgcgccttcctgttcctcgagcgatccagagcgggcgtccgaggtgttcctggaagcgtcaccgaggcagaactcgccggtcccgagccccaccgcgcacaggcagcagcagcagccgcagccgtacttcaaggtcagcagcaggttcgagtcggagatgaaggaggccaacgagatgctgatggagtccaagaagctccgcgtcaacacgaccaagcccagacggtgctcgagatggtcgccaggatccaggaggcggtggcgctcgttgacggacggcggcacgtggtagagaggctcgtgtcgctcggcaggtacctggtgatgaagctggagcctgggcaggacgacacgttgctctcggaagcgatcactgacgccgtcctcgacctgttcgacgcgtggagcgagagcgtcgagaggcctttggtgcgacgggcgaaggagatctcttcttggttcctgcaggaaggaagagaagacacacctcctcctgttccgccgtctacgcgtccttgtgcggccgaagctcataggatgaaaaggtgaatccagaacttttctcgttggtacacttcaattcgagcttctgaaatggactgcacgtgaagagaaaaaaaagaagt

SEQ ID NO: 13179 - DNA, 68 bp, Zea Mays
cttactaaagtggatccttaaaatccagttttatttgtcaagttacgtacaattacctacaactagag

SEQ ID NO: 13180 - DNA, 1594 bp, Zea Mays
cccgcatcccctatccccgaggaagcttccagaccgcccgcgcccgccgctatatatccctctcctgcgcgcggttctcagcttcgacaacaccgcgcgcgcaatacacgggacacacacgcagatccgagctaaccaccatcgacgagcgccagccgccagcagccgagccggagcgaccttttcttttttcttttacacagcgggacggagaaaggagtcaatcagccaaagccacccaccgcttttacccaccgatcggcgttgccgccgctagcattgtcggcttcagctccatccaaatccaccgccagcaagcaagcaagcaagccggcgccatgggtctgccgatgaggagggagagggacgcggaggcggagctgaacctgccgccggggttccggttccaccccaccgacgacgagctggtggagcactacctgtgccgcaaggcggcggggcagcgcctccccgtgcccatcatcgccgaggtggacctgtacaggttcgacccctgggacctgccggagcgcgcgctcttcggggcccgcgagtggtacttcttcacgcccagggaccgcaagtaccccaacggctcccgccccaaccgcgccgccggcaacgggtactggaaggccaccggcgccgacaagcccgtcgcgccgcgcggccgcacgctcgggatcaagaaggcgctcgtcttctacgccggcaaggcgccgcgcggggtcaagacggactggatcatgcacgagtacaggctcgccgacgccggccgcgccgccgccgccaagaaggggtcgcttaggttggatgactgggtgctgtgccggctgtacaacaagaagaacgagtgggagaagatgcagctggggaagaccgccgtcgccggcgtcggcgccaccaaggaggaggcgatggacatggccacctcgcacacgcactcccactcccaatcacactcgcactcgtggggcgagacgcgcacgccagagtcggagatcgtggacaacgacccgttcccggagctggactcgttcccggcgttccaggacccggcgatgatgatgacggtgcccaaggaggagcaggtggacggctgcagcgccaagagcggcaacctgttcgtggacctcagctacgacgacatccagggcatgtacagcggcctcgacatgctgccgccgcccggggaggacttctactcctcgctcttcgcgtctcccagggtcaaggggaaccagcccgccggagccgccgggttgggacagttctgagctgaggcgaggatggagccatggatcaggagatgaagacggttgcgaactctgtaaatacagcataggagtcgaacctgaccctgacccttgttggggttacaaggttttccgagtgtcggtgtagcgtacatggagccggcggcgcggccgggccggctcattctttagtttcacttccaaagcagacgggtagatatatgtgtagctgttcacttaaactctcttcgacagaacaaccgacgaaattttgctcttgtttataaaaaaaaaaatggcacttgaatgcaaaaacaaaggctccaacatttccagta

SEQ ID NO: 13181 - DNA, 1375 bp, Zea Mays
cgcgtctgcagctttcattattaggtacacgtcaatgcttgaagagttgaagaagaatccggagagccatggaggaccaccagattgcatacttctttgtaggcttcgtgagctagtactcagagagctgggatttagggatatcttcaagaaggtcaaggatgaggagaatgccaaggctatgtcactttttgagggagttattaagcggaatgacgaaattgaggatgacggcaaaagaattgagaacttggtccgtggaattttagctggaaacatttttgatctaggatctgcacagcttgcagaagtttttgctaaagatggcatgtcatttttggcaagttgccagaatcttgtatctcgaccatgggttattgatgaccttgatgcttttaagagtaaatggaccaagaaatcatgggaaaaggcagttatttttgttgataactctggtgctgatattatcttgggtatattaccatttgcgagggagttgctccgacgtggcacaaaggtgatacttgctgctaatgatatgccttcgatcaacgatgtcacgtatccagagcttgttgagattataaacaagctcaaggatgcagatggaaagctatcaaatgtggacgcatctggcctccttgttgccaactctggcaacgatctgcctgtaattgatttgtctagtgtatcaccagagcttgcctttatggcaaatgatgctgacctggtggtgctcgaaggcatgggaagagcaattgaaactaacctatatgcgcagatgaaatgtgactcgatcaagattggaatggttaagcatcctgaggtcgcccaatttttaggaggaagactttatgattgcgtcttcaagttcaatgaggcctgaactacgagatacatttgataacacaataccggccgcactagtggtggcttagttctccccaagatcagcttgttaggtgttgcactgaacataattttgttagtatcagcaataatttcaatcaaaataagctacgtatatgtggtggtttatggaagtgtcaggaagggtggttatgaggctgttggattttgtacgaaatctgatgcaccagttcccatttaacgcatcggtagccaagccacgcccgtctgaacttgagctcatgtccgtttgtgcttatggtccgtaataattggttagctaccactggcttgtaaacatcacacttagacgctctggtggcccctttgtgatggtattcataaaagtgtttgtcccgaaactaaaggggtgcgggtgattatggggtgggaaatgtctatggcaatcgaaggaagaaaactctccaaactagaggaaaaaataatcattgatcttaccacatgt

SEQ ID NO: 13182 - DNA, 138 bp, Zea Mays
caagacgatgtcgtcagtcggatcaacctgaagacgaatagactgagcaagtatcagaacaaaagccgatcgccaagtggacatcatctaacaaacactaacatagtgtttattctaggcaagccccggtgtatgcaa

SEQ ID NO: 13183 - DNA, 1891 bp, Zea Mays
caagtcccaaccaaaagacacacggatgccagctctctagctaccttgtgcccaaagtgccaaacggccccttaagtcttaaccacctgctttatcatctcccgtacgcgctctccctcggtctctccctccctccctccctctcgctcgtggccacgactgggcgactgcctccgccgcatttcgctaggcgccacacggcccttggccggcgacgagcacccacagaaaaaagtgttgctcctacgactagttctttttatgtgtaaccttcaatgaaggattctcaggatattcagagcacgacagagttgcagtcaccagtgcaaggtactaatgaagtgcaaagtcagcaaccaaactcaatggccgctgatgctcctgctggaaattcgggttccttgtctgtagctagtaatgacaataagaaggtgtctcgcgaagatattgaacttgtaagctttctagctatctagtggcatcccttctagggtagacccagtgcctgaggctcccacatgagtggtgtctggggaagggataaaccgaggcaggcttttcccttgcaaatgcggagaggctgcttcgaacccgcaacctggttcagaatttgatagagcgttgtctacagctctacatgaacaaaggagaagttgttagaactctttctactcgtgctagaatagaacctggcttcactactttagtatggcagaaacttgaagaagaaaactccgagttctttagggcttactatatacggttgaagttgaaaaggcagatcatcttgttcaatcatttattgcaacaccagtacaatttgatgaaatatccagcacctccgaatattccattggctccaatacaaaatggaattcatcatatgccagttagcaatttaccaatggggtatccagtacttcagcagcctatcatgcctgctcccggccagcctcacatggatccaatggcctgcggtctgtccagtggtcatgtggttaatggaatacctgcaccaggtggttatcatcccatgcgcatgaactccggaaatgacatggttttggacaatggagcgcctgaagcaccacatgctggtgctaccggtagtgctatgtcatctgagatggctgtgagtccctcgtcggcggcttcaagcaaccatgctccttttacgccgtcagatataccaggcatgaccatggatgtatcggccctagactcggcatttgggtgtgatgtggggaatcctgaatctctgcaattgggaccagatgggtcgtcaagagactctattagatccttagggcagctctggaatttcagcctctctgatctaacagcggatttgacgagtttgggagcagatctggacgtgctggagaactacactggcacccctttcctgccatcggattcggacattttgcttgattccccagaccaagatgatatagtcgagtattttgctgacgccatcaacgggtctccgtcagacgaagagaaaccgtagtttttccggggttgcatggcatgcattcaggttcatcatcaggcagggctgtcatctcatctcatgtagtgtaaagcagccaatctaactgtgtattcggctcgcgcgcggtgatccggtaatcgggcctctgccactaaaaagaattttgtagcggttaattgaaatcctaattctttggaataagtagctgggactggaatgtccagagagtagcggtcgttgttggcttagggattgctgctggtggatgcaaacctcacagctagctggtgactctgaaaccacaggaactccttttctttttctttttacttgtatctgtatttgctgctacataagtaaacagaagtggggtgtacctagttttctggtttt

SEQ ID NO: 13184 - DNA, 139 bp, Zea Mays
cgcaagataatgttgatggattaacccgaagatagatggacgaagcaagtatcggaacaaaggctgatcgtcaagtggtcgccacctaacaaacactaacctagtgttatccaggcaagcctcggtgcatgcaacccct

SEQ ID NO: 13185 - DNA, 93 bp, Zea Mays
agaaaccaaaaaattgtcatgcaagacaatgtgcaaaggaaagatgattgagttttgccatcacgatcttttcaacttaagactatatcctat

SEQ ID NO: 13186 - DNA, 2082 bp, Zea Mays
gggaggggggcacaggcacacgcatatccaggcttgccatatttataccaccacctcacctccctcacgcgcccgagacacacctcggccgttcttatccccagaagcttccgatcgtctcccacacccgaccgcctgccaaacccgacacactcgtcgcggcgcggcgcttctctcctctcctcttcatgcgccatcgccgccgcctccacctctgcgacgcccacagataggcaggaggaggagggggcgatgccttcgatctcctgccacaatctcctcgacctcgccgcggccgacgacgtgcccctgccgtcgcccacgccgctccgcctcccgcgcgtcgtgcagggcgtgcaggacgaggccagggccatcagcgcccgggtcaatgcgcgcttcggcacccccgggtacacgccgatcgtgctcatcgacgccccggtgacgccgcaggagaaggctgcctactacgcggctgccgagtgctgcgtcgtcagcgccgtccgcgacgggctcaaccggatcccctacatctacacggtgtgccggcaggagagcaccgcgctcggagacgactcgcccaagcggagcgtcatcgtgctctcggagttcgtcggttgctccccgtccctgagcggcgcgatccgcgtcaacccgtggagcgtggagtccgtggcggaggccatgaacgccgcgctgcggatgccggaggccgagcagcggctgcggcacgagaagcactacaagtacgtgagcacccacgacgtcgcctactgggcgcggtccttcgactcggacctgcagcgcgcctgcaaggaccatttctcgcgccggcattgggggatcggcttcggcatgagtttcaaggtggtggcccttggcccgaatttccggcgcctctccgtggagcacattgtcccgtcgtatcggaggacggataaccggctgattctcctggactacgacggcaccgtgatgccggagaactccatcgacaggacgccgagcagtgaggtcatttctgtgttgaatcgtctgtgcgaggaccccaagaacagagtgttcatcgtaagcggacgggggaaggacgagctgagcaggtggttcgccccctgcgagaagctgggcatcgccgcggagcacggttacctcacaaggtggagcagggacgcgccatgggatacctccgggttggccgccgacttcgactggaagaagaccgcggagccggtgatgcagctgtacacggaggcaacagatggctcctacatcgagcacaaggagagcgccatcgtgtggcaccaccacgaggcggatccggacttcggttcctgccaggccaaggaactgctcgaccatctcgagaacgtgctggccaacgagcccgtggtggtgaagagaggccagcacatcgtcgaggttaacccccagggcatcagcaaaggcgtggtagtggacagcctcctgtcgtcgatggtgaggacggggaagccgccggacttcgtgctgtgcatcggcgacgaccggtcggacgaggacatgttcgagagcatcgtgtgcccggcctccaacagcggcgtgaagctgccggccagcagcgaggtgttcgcgtgcacggtgggcaagaagccgagcatggccaggtactacctggacgacacggtggacgtggtcaagatgctggacggcctggccagcgcgccgtcgcagcagcggtccaggccggcggtgcagctgcgggtctcgttcgaaggctcgctctgagggggaagaggagaacacacagcgctagtagcagcagtaaacagcaaacatcgagcaaggataaccagtggtgatgaacacaacgagattcagcagacggcgtggtgtaggattgattagctgcagtttacaggatcgacaatttttttttgctttcttctacattgctacccccaaatctttcgtgcctgtatatgcccgcatggtaatatgcaaagaataacgtttcgaccaccaaccaaaccaccattgtacatgtagttgacgatgacgacgagatcagaaaaggagaagtggggaaaatgattctttcac

SEQ ID NO: 13187 - DNA, 1829 bp, Zea Mays
agattgggctggtccggccactccgacacccttatataaagtcccgaaccctagaggccagcaccttcctccccaactcgccgtctgccttctgcgcctccatttcggcctctgtcccttgcaattcaatctcacctccaaccatgggtaaagagaagtcccacatcaacattgtggttattggccatgtcgactctggcaagtcgaccaccacaggacaccttatctacaagcttggaggcattgacaagcgtgtgatcgagaggttcgagaaggaggctgctgaaatgaacaagcggtccttcaagtacgcgtgggtgctcgacaagctcaaggctgagcgtgagagaggtatcaccattgatatcgctctgtggaagtttgagaccaccaagtactactgcacggtcattgatgcccctggacaccgtgacttcatcaagaactactgcacggtcattgatgcccctggacaccgtgacttcatcaagaacatgatcactggtacctcccaggctgactgtgctgtccttatcattgactccaccactggtggttttgaggctggtatctccaaggatggccagacccgtgaacatgctctccttgcgttcacccttggagtgaagcagatgatttgctgctgcaacaagatggatgcaaccactccgaaatactccaaggcacgttatgatgagattgtgaaggaagtctcatcctacctcaagaaagttgggtacaaccctgataagattgcctttgttcccatttctggttttgagggcgacaacatgattgagaggtccaccaaccttgactggtacaaaggcccaaccctgcttgaggctcttgaccagatcaccgagcccaagaggccttcggacaagcccctgcgtctgcccctccaggatgtgtacaagattggtggtattggaactgtaccggttggtcgtgtggagactggtgtcatcaagcctggtatggtagtcacctttggtccaactggcctgactactgaggtgaagtctgttgagatgcaccacgaggcgcttcaggaggctcttccgggcgacaatgttggcttcaacgtgaagaacgttgctgtcaaggatctcaagcgtgggttcgtggcctccaactccaaggatgaccctgccaaggaggctgccagcttcacctcccaggtcatcatcatgaaccaccctgggcagattggcaacggctatgccccagtgctggactgccacacctcccacatcgccgtcaagtttgctgagctcattaccaagatcgacaggcgatctggcaaggagctcgagaaggagcccaagttcctgaagaacggtgatgctggtatggtgaagatgattcccaccaagcctatggtggtggagacattctccgcgtatcctcccctgggtaggtttgccgtccgcgacatgaggcagacggttgctgttggagtcatcaagagtgtggagaagaaggacccaaccggcgccaaggtgaccaaggcggccgccaagaagaaatgatgcgatcccgtgtctgcttttgcagtgcctggataacttgccactaaagttgtgtatgcggttgttgctgttattgcgtggactgtttgctgcggtgtctcctgtttgtttgggtagcgcagcgtcggcctcttcaggtgtctgttgtctgttgtctttactatcagtaatgctcctgagacttgtatttctccttttggcgccgctaaatggaattttcgaacaatgattttcgtgttattattttacaaccttttcgaacaatatttacacgtctgatgtgttttgctgaga

SEQ ID NO: 13188 - DNA, 2933 bp, Zea Mays
ccaccgtccatacatgccttattgccttttgcacattcaagaccgctctagtccctgctctacagctctagtcgattacagaaatttggacaaagcagaaggttcaggtcgtaagatcgcctagtccctgctcttcctggtcagtggccgttaccactgccccctctcctctcctctcgctcgtgcagaggaggagacagactccccccgtcgccgccctcgcgcctcctccgcccgcagctcaagccgagcgtcaccccgtcggctaccttccattctcgccgcacttctcccactgggcacctcgcgccctcgtgacggtataaatagcccctagtcactcctcggcgctcctcaaacccaccaaaccctagcccacttagcggcggcggcgctagaggtggaacgagaccttggcggaggtagcgagggtagcgctgctcgctcgctcgttgggtttccatcccctactgcctagagcgagctctacgcgacgatgagcagccttgtcgagcggctgcgcgtgcggtcggagaggcggccgcggtacgcgctcgacgagtccgacgacgacctcccgctgcgcgttggggccggaaaggggaaggatcaacagaacgacgcgcccgccgagcggatcgagcgcgaggacgcgaaagaagaagcttgccagcgctgtggaaaaagtgataatctagtctcttgttcaacatgtacatacaaatttcacagaaaatgcttggttccttgcttaaacatcacatctgataaatggagctgcccagaatgtgtaagtccattaacagagatggagaggattctagatattgaagtgctggaagcacctcgtgaagattctagttccacagagcctcgatcaaagaagatggagcgatatcttatcaagtggaaaggattatcatacattcactgctcttgggtttcagaaaaagaatattcagaagccgcgaatatacaccctcgtctgaggactaggttgaataacttcagaaggcaaaaggaagccatgaaaatagaagcagaaagatctggtgaggacatcgttgcaattagaccggagtggacaactgttgacaggatccttgctagcagaaaaaacttagttggcgatcgggaatactatgttaaatggaatgaacttacatatgaggaatgtacatgggaaaatgagtctgacatcacggtgttccaacctgagattgaacgcttcaatgagatccagttcaggcgtaagaaatctggtgacaagggcaaggccactcgggagccacgccaattcaaggagagccctacgtttctttctggtggcacactacatccctatcagcttgaagggttaaactttttgcgatattcgtggtttcataacaaacgcgtaatccttggtgatgagatgggtcttgggaaaacgatacaaagtattgcttttcttgcctcactctttgaagacaagtttggtccgcatctggtcgttgctcccctctcaaccctgcggaattgggagcgtgaatttgcaacttgggcacctcaaatgaatgttgtaatgtattttggagctgctgcttctcgtgacattattaggaagtacgagttttactacccaaaagagaaactgaagaagctgaagaaaaagaaatcttctccatctaatgaagataagaagcagtcaaggataagatttgatgtcttattgacgtcttatgagatgatcaacatggactcgtctattctaaaaaatatagaatgggagtgcttggttgtggatgaggggcatcggttgaaaaacaaagattccaagttgtttggtcaacttaaagattataataccaaacatcgtgttctattaacggggaccccagtccagaataatcttgatgagcttttcatgcttatgcacttccttgagggtgaaagttttgggagtataactgatctccaagaagagttcaaggatataaaccaagacaagcaaattgagaagcttcatggaatgctgaagccacatcttcttcgaagattcaagaaggatgttatgaaagaacttcctccaaaaaaggaattgattctacgagttgaattgacaagaaaacagaaggagtactataaggcaattctcaccaagaattatgaagtgttagcccgtcgtaatggtggacatacatctctaataaacgttgtaatggagttgcgcaaactctgttgccatggattcatgattgatgaacctgatcttgaacctgccaatccagaagaaggtttaaggaggcttctagattcatcaggtaagatgcagctgctggacaagatgatggtgaaactgaaagagcagggtcatagagttctaatttattcacagttccagcacatgttggacttgctggaggactatttaagttacaggaaatggacttatgaacgcatcgatggcaagataagtggcgctgataggcagatacggatagatcgcttcaacgctaagaattcaactaggttttgctttcttctttctactagagctggtggtctgggaataaacttggcaactgcagatactgtaatcatctatgacagtgattggaacccacatgcggatttgcaagctatggcaagagctcatcgcttaggacagactagtaaggtgatgatatacaggcttgttagccgaggtacaattgaggagcgaatgatgcagcttacaaaaaagaagattttattggagcacttagttgttggtcgactcaccaaagctaataatgtcaatcaggaggagttggatgatattatacgctatggatcaaaggagctttttgaagacgagaatgatgaatctcgccaaattcattatgacgaagctgcaattgagagtgctctatgttagaggagacaacgtaatatatctgactggactcaca

SEQ ID NO: 13189 - DNA, 85 bp, Zea Mays
atttcaaataaaccaagccgccttgactggacccggcagcggtctccttcggcatctcccagtcattcacaagaggccacactct

SEQ ID NO: 13190 - DNA, 1183 bp, Zea Mays
gtctcggggattcgtcgtggcgtgcaccggcgtctgcccccacccgcgcctagccgcgaaggtgcgcgtttagacgaggagctgcggcggccaagaccaatcgaccatggctacccgtatccagtttgagaacaactgtgaaattggtgttttctccaagctgacaaatgcttactgtctggtagcgattggagggtcagagaacttctacagtgcctttgaggctgagcttgcagatgccatccctgtggtcaagacctctattggtggcactagaataataggccgactttgtgttggaaacaagaatggacttctattgccacatactacaaccgaccaagagcttcagcatctgaggaattgcttgcctgatcaagtggtggttcagcgcattgatgagaggttatctgcccttggcaattgcatagcctgcaatgaccatgttgcacttacgcaccctgaccttgacaaggagactgaggagttcattgcagatgtgcttggggtcgaggtgtttaggcagactattgctggaaatatccttgtggggagttactgcgccttctctaacaggggtggtttggttcatccccatacatccgttgaagaccttgacgagctctccacgctcctccaagttcctcttgtcgcaggaactgtgaacagaggaagcgaggtcattgctgcaggcatgacagtgaacgactggactgccttttgtggctcggacacgacagccaccgagctctcagtcatcgaaagcgtcttcaagctgagagaagggcagcccactgcgattgtggaggacatgaggaagtctctgatagacagttacgtgtaactggggggccagcagatgtgggtcagagtttgcctttgctaaaagatgtattgcaagctatagtcgaattatcagtagcacaacataaccctctgatatgttcgtggtttatccgtggtttctgaattgtagacttctgcgttgaagctcgtgctactgtttgttttccattgtttgttcacaccaacagctatatgcagatacatggcttctcagtgttacgccggcagatgaataagcttggggaaaaaaaggatgttatcttgaaattgtagttatctatggcgcaggggacattggtatagcaaatgcttctcaaaagtctccatgtctccatgg

SEQ ID NO: 13191 - DNA, 1452 bp, Zea Mays
ctcctctttcgatagctggcgaaggcgcggcgcgcagggccagtagcaaccctcccatggcctacgctgcgcctcccatggcgtcgtccctcaccgcctcccacccccctctttccccgtcccacctcataacccatccgcatcgctgccctgcgcgccccaaccccaccaccggcctcctccgcctcaccccgtctcgccgccgcggtcgtccccccgtggccgtccgcctcgcaatatctgcctcgtccacctcagccccgcccccgtcggcggatcggtcggaggccgcgtcgtcgctggagagatacctctcggcgacggtgacgggagcggtgatgggaacgggggcggccccaccagcttcggccccgccgcgcgccccgccggcgatgaaggggggacggaagcagtatagcgcgttgggggctgtcacgctcgagaaggccaagctcgatctctcccagcgccgcaagaatatcatgcccgagctggcgacaggtggtggtggtggagatattggaaaaaggatcggtcatggtgggggtgatggtggtgatgatgatggtgacgatgatgactactttgatgattttgatgagggagaggaagaaggtgggcttttcaggaggcgaattgttgtacaagagctattcaatagggagttcgtagaagctgtgttgcaagaatggtacaagacgatgagtgatttgcctaccggtcttcgccaagcttgtgagatgggtttggtgagttctgcacagatggtacgttacttgtcaatatttgcaagacctacaaacgctaggtccttctcaagagctcttccaggctggctttccagaggtcttgttggaaggacacttgcagatccatcattcccacataaaatgtctttggagtttatagctaccattgcgtcatctatttggtgtgaaatgaatattcgcaaagagaggtttaaacaagaatgggatttggtgattgttaatgctttgactgcagcttgttgcaacttgatggttcttggacttttagcaccatgccgttcatatgcgagtacatctcgatttgacttccaaaatgcaattgagaaacttccgaacaacatatttgagaagagctatcctttgagagagtttgatctagcaaaacgaatcagtgcattcttttataaagctgctgagcttagtctggtcgggtttgtagctggctctgtgcaagggggtatgtcaatagtcttgtccgcaagaaaagaaaggaggttatcggtgactattccctctatcagcaccaatgctcttggttatggagctttcctaggactctatgctaacttgcgttatcaattgctatgtggagtagaccaatatatggtcaagcgcttcgatgttttgggtgtggcaatcttcttcagcacagcagcaaggaaaggtgcacatcattatacta

SEQ ID NO: 13192 - DNA, 723 bp, Zea Mays
ggtatgaaggtgactgatatccaggtgcgtgttgtccgccgggacaacggtgcaaaggttgacatccctgtgaccaatttggttgaagaggttaaagtgttactggatgagattcaaaaaaatctgttcaaaacagcccaagaaaagagagatgcctgtgttcatgtcgtgaacacttgggatgaattcacaactgctctgaataacaaaaagttgatcttggctccatggtgtgatgaggaggaaattgagaaaaatgtaaaaactcggacaaaaggggaacttggagctgcaaaaacattgtgtactccatttgagcagccagaacttccagaaggtaccctgtgctttgcatctggaaagccagcgaagaagtggtcgttctggggccgcagctactgattgcctgtgctgggattatttccggattcagttctagtgagttatgtagctttgaagtgtcggatacaaatccaaaaatccatttacattgcgttttacatcgacttgcagttctcatgtcatcactgctgacaaaagccatcgatttcctgtggaccatgctattcgagtttgaatgttgcaaggatgagaatacgtacattcttttactggcgtgcagtgttataattagaaaaaaacgcttcatatttgattgcaacacataattctgactggaatttaactggatctctttatctcttattaaagtagaatttgtta

SEQ ID NO: 13193 - DNA, 905 bp, Zea Mays
gtgtgcaccactttgtgagccatagctttttatttttgtttttaggttctggaagaagcttgcctaggtcttgcacctcacacatggacaaaacctcgtgctttttcccccagaatgtgttgccaaccatccgaaccccaacttttgttttgaacactgcctatgacgtgtggcagcttcaacaaagtgtggcccctagaacagctgatccccaaggtctttggtcaaagtgtaggacgaaccatgccttctgtaatagcaaccagctccagtttttgcaagggttcaggaaccagatgcttgatgccgtgaggggtttctctgcatcaaggcaaaatggtctgttcatcaactcatgttttgctcattgccagagcgagagacaggatacttggtacgcgaacaactcgccacgtcttggtaacaagaaaatcgctgacgctgttggggactggttcttcgagagggggaacgccaagtacacagactgcccatacccttgcgatggcacttgccatcaccttgtgttcaggggagaccactaagatcattcttcagcaccaacaaattcatcagatggtacaaggatcaaaccccaatgggtacagaatggaaaacaggatatagatacagataaggtgcaagtggtcggcttgcccatgtttgttcatcagtgagtcatatgattgatagtgcgaggacctcacccgcgaacgcgcggaggaggcctctgcattagattcacataccgtcatgatatcgattattttcattggaaaagcgtccatgattacgtaccagaacaattgagttacatactcatttcgtgtactgtattaataacactagaacgttacatattcatttgtcctgaagatcgtactacttggcatgagtactcactt

SEQ ID NO: 13194 - DNA, 106 bp, Zea Mays
acctggttgagagtcactgaacttgagatgacctgataagattgatgaaattcaactggttctcacggactacgatttgtaactctagcttctcctggcctgttac

SEQ ID NO: 13195 - DNA, 681 bp, Zea Mays
atagcagtttacgctttctgtgtataagcactaagctatacaacgcgacgagcttcaacgagtacgtgctggaggggagcgcgccggtgctcccggagacgcagcggctgttcaagaagctcgtctcgctgggcatcaagccggtgttcctgacgggccgcaccgaggaccagagggccatcaccgtcaccaacctccgccgccaggggtactccggctggatgacgctgctgctcaagcccgtcggcctcaaggccaccgccatcgcctacaagtccggcgagcgccagaagctccaggacgccgggtacgtcatcgtcggcaacatcggcgaccagtggagcgacatcctcggcgcgccggagggcgcgcgcaccttcaagctgcctgaccccctctactacattggctaagcagcgatgccaacggcgcggcgcggctctccatcagcccatccatcaacccgtcacccggctccagtgcctgtgctcaactactctttgtttgttacccctcacttcttatcatcattaattcctaaggttaattccctgagctgagtggaaataaggccgactcggtggagagctgtcgacttctcaataaataattgctcatgaaaaccacgatggtttatgttattcaaagtcttatatatatataatggattagtaccgggaa

SEQ ID NO: 13196 - DNA, 948 bp, Zea Mays
caagaatacacggtacacaccactggttgtctgcttgcttctccccgtctctgttctccgccagaccaaacctgaccaaccccacccactggaccggcccgcgcccgcttggtccagcgccggccctgcctgcagccagccaccgttgtccgttccctcccgcgatccactcctctcgagctctaggggacggaaggaatccggcgggggtggggtgcgagcagggggagggagaagagcagccgcccgccccgcgagggggcaacagctgcccaagaacctgaccggaagagttgtgggagcggcggcggaaagatggggcaggccctgcgcaggctcttcgactccttcttctccaccagggagatgagggttgtgatgcttggtctggatgcagctggtaaaacaacaatactgtacaggcttcacatgggagaggttctttcaacagtccctacagtcggttttaatgtcgagaaggttcagtataagaatgtggcattcactgtgtgggatgtgggtgggcaagaaaaactcaggtcactgtggaagatgtacctgagtaattctgatgcactgatctatgtcgttgattctctggacagagaaaggatcagagacgcgaggcaagagttccagaccattatcaaggaccctttgatggcaaacagcataatcttggtatttgcaaacaaacaggacctgagaggcacgatgagcacggacgaggtcagcgaagggctggggctgcacgacctcaggaacaggatctggcacatacaggggacctgcgcgctccgcggcgagggcctctacgacgggctcgactggcttgcgtccaccctgaagcagctgcaagaatcgggccacgcgacttcggtcgctggcccttccatctgatccagcgcaagtgagctcagtgcctcagccaactgacagcaagcccac

SEQ ID NO: 13197 - DNA, 826 bp, Zea Mays
cgacagtgtgcagcagcaagggcgaggtccagcagtagcagggctctttgaggcaacaactgatgccttcttggtagaagagatagcaaggtctaaaggaagggttgcactcacaacaaatgtggtcatgggtggtactgtgatggacgatgcaagtgatgaatggcttgctctggatcagaaggtaaattcctaccccacagatagaggttttacagcaattggcattggaggtgatgattttgtccagtcgatggtagttgctgttgaatctgttcttcaagaatccattcccaagggccgagtatctcagaaactatcttcaggaggaaaatatgtttctgtaaaaattgggccaattcgtgttgtttcaagtgagcaggtccaagctgtatatcgtgccatgagaagagataacagaatgaaatacttcttatgaagtgcaattgcatgtcctgcacgttccctggtccattccatcatgtaaacaaaaggagtccaacagtacattttcgccacattttgctggactggactggactggacccccgatgaattgcaaaaggaaaatgggaagacttttatgtgccattcatgccctgatggaagcttctcaaataacctgctacaggcaatttggtgggatcggttatgttatgtagtgcttgtgtagtacagtgggcgtatatagctactatatatgctaaagttgtattttagtgtctcatattagatgcattttaatattttataaaccatatgaaactagcggtataagtgttcctaatttatcatgtttgtttgcttgcaggattatataatccag

SEQ ID NO: 13198 - DNA, 921 bp, Zea Mays
agaggcagaggcgcaggatacgcgggggaaaaaaaaggaggctcactgtacaccgagctcacgcagggcgtagcaaatcaggtaggcgaaatcggagcagaggccagggacgcgccagcgcgagcgataaggcacactgacatggccgccacggcgtactccaccgcgctccccggcggggcgcgcctccccgctgccggagccgccgcaccgccctctgccctcctcctcccgcggcgtaataaactgtctccgctccctctccggctccaagatgcgccgaggctgtcgttgctccgggtgaaggcctcctccgacgactcctcggccgcgagcggggacgagctcatcgccgacttgaaagccaagtgggacgccgtcgagaacaagagcactgtcctcacctacgccggcggcgctgtcgtcgctctctggctgacgtccgtcatcgtcggcgccatcaactccgtgcctctgctccccaagatcatggagcttgtcggcctcggctacaccggatggttcgtctaccgctaccttctcttcaaggaaagagctcgccgacgacatcgagtcgctcaagaaaaaaattgctgggacagagtaaaacatgttgttctcgtgaaactttttttggacgattctttcgggaacacgttgcctcttgtctagactccagatcagtgctacatgtctttgcacttttttttttgttgcataccttatgtcctcgtctctctggagagctttgtacgacgatggagaacaacagtgtacgatcgaactggacgccatcctcggggattgttttcttaaaatgaaatagggtatgtatccgggttttcttttcatcacttcattttgcaatccgtatgtctgtcaggacctggcacccagttcgtaatccttgacttgccatcg

SEQ ID NO: 13199 - DNA, 951 bp, Zea Mays
cctgaaatttgatctgattttgggtgggcgcagttgcggagatgcagaggctgggggatttcaggctccctcccttcttcaactacccgccttacttcactttacagcctgtgcgtgagacgcgggaaaagcaagtgcagttatggaaggatctgatacttgattactgtagaagtcaaaagatacatacaatatctctagaagaagatttccccttgttctccaatgcaaagattgagagatctcttagctacgaagcaaaggaagtgttcctcgcagctctcgtcagtgaaggtcgtgcagaatggatggacaaaggtcacaagaagtgcctaattctttggctaaggatacaggattgggcaaatttcatattgaactttgtaaaggataacgggttggaagtaatgactatcgaagaaatacgctctggaattgatacacgtggaactgaactcgagggaattgatcgtggtgttctcatgcgggctctgcggcagttggagcaaaagggaaaggcagctatcttcaaaggcacctctgctgatgacgaaggcgtaaagttttcggtgtaattcttttgcgatccttaaactggcagactaataatctcgttcagccggtgcccttgaacatggcatgagacacccatagcctcgatcattcagtgccctttgaaaatggcatgacacatccttgtaaaaagcagtagggctgatcacattcttcccgagtagtatcctcttcagtgctgcggtaaaatttcccaactcatcttttgttgtagtgaaaaatcggccaagcctgattaaacattgtggagtggttggtaagaagaagttgaactggtcatgcctcttacgctgattgattttccgatatctaagcaaaggtgttcatgaaatgtacgcgggattaattctgggtttattcgaaatgggcgtaagtttc

SEQ ID NO: 13200 - DNA, 3050 bp, Zea Mays
gacaaagctaaaataacctacaattccgaacggaggaacttggcaggcgtgcagaatctatggtgttgcccttggaattcttgcagcaattcaaggcatcagattttctctgatcctcaagagtatgaggcatggcggagtaggaatctgaagcttcttgaggctggtctacttgttcatccactcgttccattgaacaaatcagacagttctgtgcaacggttgcggcaaattatacggggtgcatatgataggccacttgaaactgggaaaaactctgagtcaatgcagggtctacgtacttgtgtcatgtcccttgctggaagatctcatgatggtacttctgatggatgccactgggcagatggcttcccattgaatctccatctgtaccaaacgttggtagaagcttgctttgataatgatgagggcactgtggttgatgagatcgatgaggtgatggagctcttgaagaaaacctgggttattcttggaattaatgagttgctccacaatctttgctttacttgggcattgttcaaccattttgttatgtctggtcaagtagatatcgagctactttctgcagcagagaaccagttagctgaagtggctaaggatgcgaaaaccacaaaagatccaaattactgtaaagtattgagctcaacattaagctcaataatgggctggacagagaaaagacttctggcatatcatgaaaccttcaatacaagtaatattgagtctatgcaaggcattgtctccattggagtgtcagctgcaagggttcttgttgaagatatatcccatgaataccgccgtagaagaaaagaagagactgatgtagctcgaagcagggtagagacatacataaggtcttcactacggacagcttttgctcaaagaatggaagaagcagattcaaaacgatcatcaagaaaccctactccagttctttctatccttgcgaaggacattagtgacctagctacgaaggagaaaaaattgtacagtccaatactgaagacatggcatcctcttgcttctggtgttgctgttgcaacccttcattcttgttatggaaatgagctgaagcagtttgtagctgggcttacagagctgacccctgatacagttgaagtacttaaatcagcagacaaattagagaaggaccttgttaatatagctgtagaagattctgtggatagtgatgatggaggcaagtcactaatcagagagatgccgccatatgaagctgaaaatgcaattgctaatctggtgaaagtgtggataaaagaaagagtagacagactaaagggatgggttgaccggaatttgaagcaagagacctggaatccaggtgccaacagggataattttgctccctcttccgtggagatgcttcgagttattggtgaaacgttggatgcatttttccaattgcctataccaatgcatccggctcttcttcctgatctgacagttgggctcgacagaagcctacagctttatgttgctaaagcaaaatctggctgcggagcacgaaattcttttatgccccaactacccccactaacgcgatgcgaggttggctccaagttattattcaagaaaaaggagaagccacaaaatctgcaggttcgtgtatcacaaaatggagcatcaaacggaaatgatcccttgggccttcctcaactctgtgtgcgcctgaatactcttcagtacatccgtggtgagtttgagaatctagagaagaaaattaaaacgagcttacgaaatgttgagtcagctcaggcagatatcactgatggattgaacatcaagtttgagctttgccaggcagcctgtcaagaaggcattcagcagatttgtgagacgactgcatataaggtgatgttttatgacttgggacatgtcctctgggacaccctttatgttggtgatactgcatcaaacagggttgaggtactgttgagggaacttgaccctgtccttgagacggtatctagtatggtgcacaacaaagtgcggaaccgtgctattactgcactgatgaaagcaacttttgatggtttcttgctggtgcttcttgctggtgggcctttgcgtactttcacccgtcaagactctcagataatagaagatgacttcagggccctcagagatctgtacttagcagatggggatggtttgccagaggaattagttgacaaggcatcctcccaggtcaagaatgtcctgcccctctttcgagcagactctgaaagtctcattgagcgattcaaacgcatgatggttgaatcgaatcggcctgcgtccaagaacaggttaccattgcctccaacaacagggcattggagtccaaatgagcctaacacagtcctgcgagttctgtgctaccggaatgatgagacagctacaaagttcctcaagaaaacttacaacctaccgaagaagatttgacttgtgggatagatcacaaaccatatgtacatgttcctgtcactacaaaaaggtttctctatgcctgtcacattctctggctgaggaccccgaggaaataccccctgtaaagtttccacatcaaaggtttcaagtgatcatcagcaagaaggtttattctgtggtgctgtagagatgtgactgggtgttttcggtggttcgtgtcattgataggttttgcggtgaagggtggatttacttacagctcgatttgttcattatattatatgtttgcctaatccagttcttttgctgaccttgcgctcgtgtaatttggttcattctagtctgcaacagctaaatccagcgtgtgaataagttgtgtactcgcgtgacactgtccggtgcttttgctgtgacaatatgcggggagcatttgtatattttactgcatcgtgcactccatctctctccatatcctcgttggatccgttcttcagtcaatcgatcctgttcaaagtgagaataatacgtggtcgagatgatgaaatgagtgattgttaacacatggttgagattagggatgaaagtggtaatctgaactgtta

SEQ ID NO: 13201 - DNA, 565 bp, Zea Mays
ttagatctctggactggttgttcatgatgcaggtgcctactgcatgagcatggcttccacctacaacctgaagttgaggccaccggaatactgggtggaagcggacggttcgatcgttaagatcaggcatggagagaagcttgatgactacatgaagttctttgatggtcttcctgcttagatgtttattatctgcgactgctacggacgatgttttcttggggataattggattttctttgtcaagctcatttttgctttcttgtggttatgtaatgttactggatactggatagctagttggtgcatcctcaacttccttttcatttctgttagtttcgtcaccaagttcgtcctcaattgctatttggttgtaacccagctgtaggatgcctggctagcctgtaaccgcctgagcgtgatttggttgggaactgacggtttcacctggtgagacatgcctgcgaaccaaatctgtcccctgggctgccgtatgtgtgataccaaaatctgttgtagccttgtaggtttactattgctgcatatagtataatgatgtctttgt

SEQ ID NO: 13202 - DNA, 977 bp, Zea Mays
tgaaccaaaggtcttaggtttgacacagtctatctgcaaaagtgtaataacccagatctgggtgctattgctaggagggcttggattgggtgctttgttagatgtgtgggcaggacatgattttcctattgtgttttatcttgctgtgggtggctccttactttcttacatatattcagcaccacctctcaagctcaagcagaatggatggattgggaacttcgctctgggtgcgagttacatcagcttgccctggtgggctggccaggcgttatttggaactcttacaccagatatcattgtcttgactactttgtacagcatagctgggctagggattgctattgtaaatgatttcaagagtattgaaggggataggactctggggcttcagtcacttcctgttgcttttgggatggaaactgcaaaatggatttgtgttggagcaattgatatcactcaattatctgttgcaggttacctattgagcaccgttccagtacttcctgaaggaccctgtgaagtatgatgtcaaatatcagcgcacaaccattcttcgtactgggcctactggtgacagcactggcaaccagccattaatgaaggcaaacttaaacagaacgagcaaccgttctgataccgaagaggcacgtctggtgaccattaataagctagctgcttgtgtgcagggtaggaagagaacgtctttttacttgtagaacacagatcgattttgtaagggttatgtggtgggaggaaaagttagcaatagcactggatgttgttgtagtaggatctgtagttgcacggtaagatcgttacttcgccattgttagcggttgaactggcaatgctttgaacaaacagttttgtgtatcggccgtattgttgtatgatcaaccctggaagattgtacaacctccgttctgagtatttgcacctcgttctcgagtatttgtatttttcgtctgttagca

SEQ ID NO: 13203 - DNA, 79 bp, Zea Mays
gtggtcgtgttcatcgaattcgccaacgctttgttgctgattcgactgtcgtcgcttcgcgtgttgtcgagcccgtcgt

SEQ ID NO: 13204 - DNA, 1173 bp, Zea Mays
ctcactgctaatgtcaaatgatctccacatgggtgacacttgctgatcagtcagtgtatgaagcgcaagttgttggatttgaccaggacaaggatgttgctgttttgggtatcaaagcaccaaagaataaactaagacctatacctgttggtgtgtcagcagacctactggttggtcagaaagtgtatgccattggaaacccatttggccttgaccacactcttacaacaggtgttatcagtggcttgcgtcgagaaatcagttcagccgccacaggacgtcctatacaagatgtgatacagaccgacgctgctatcaaccctggtaacagcggtggtccactccttgatagttctggaaacttgataggtgtaaacactgctatatactcgccctcaggagcatcatctggtgttgggttttccattccagttgacacagtcgggggcattgtggaccaactcataaaatttggcagggtgacaagacctattctgggaataaaatttgccccagatcaatccgtagagcagcttgggttgagtggagtgcttgtcttggatgctcctccaaacggaccagctggcaaagcgggtctgcaagcaaccaaacgagatccctatggccggcttatcctgggcgatataattacctctgtgaatggtacaaaggtgacaaacggaagcgacttgtataggatactggaccagtgcaaagttggagacacggtgaccgtggaggtcttgcgtggcgaccacaaagagaagatccctgtggtcctggaaccgaaggctgacgaatcctagtactagtaaacccagcttcttcttctgtaccatagcatcagtttctcgctttggtgcagaggcgcaaacacacaaggcgtcttagcattttcgccctccacggggttcattcgctgtacataattcatgcatgtagatgttgttaccatctcttgtctggtggaaaaggggtatccagactccattccaggttgccgtaatgccgtcgtgtattattaatacgatgctcatcagatgaccatccaggccggtcaagggacctgcaggccgacgattgaactcgctgatgtcacagatcaccaaacccgttttttgacgaaaaaaaaagattaattgtgtacgtaccactctgcttttacgaaattgg

SEQ ID NO: 13205 - DNA, 914 bp, Zea Mays
ttataaaacctagctcctcaagctccagacgcagtcgaccgccgcagaccgggagtagtcgacgcgccgtcactgaatcctcagatcacggctagccgtaatcacgccactctgctgactcccggcgagccatgggcaaggagaagactcacatcaacattgtggtcattggacatgtcgactctggcaagtcgaccaccactggccacctgatctacaagctcggcggtattgacaagcgtgtgattgagaggttcgagaaagaggccgcggagatgaacaagcggtcattcaagtatgcctgggtgcttgacaagctcaaggccgagcgtgagagaggtatcacaattgatattgctttgtggaagttcgagaccaccaagtactactgcactgtcattgatgcccctggacaccgtgacttcatcaagaatatgattactggcacttcccaagctgactgcgctgttcttatcattgactccactactggtggttttgaggctgccgcaaagaagaaatgatgtgtctggctggttctgtgtttgcttgagggatacctagtggaaacgtaaaatatctcgtcttgttcacgtcattgtctgaactatgctcgcaacgtttgcctggtcgatttagaactgttattttcgttaaaaccagagtgttatttaagacttatccgaacatctggtgagccatatatggttactagttttgttactacccttgttggtgttgtgtgcttctttagcaaatgtgctgtttctaaattgctcattatttgctcgtccatacctgtctgctgcgatcaaatttctcttgcgcttaaatcttttaaacaaaaaagctgccaaatcgcatatcaaggatttagaaattatgattcttccgaaatgtttttttgataaata

SEQ ID NO: 13206 - DNA, 2672 bp, Zea Mays
agacgataatttcagatggtcatgcgtgcttacgagttttatgtccgtccggcaaggctccagcagtcgttgctaagggcgggttctccggactatttcccgattccagtgactatgcttatcagtttgttggcatatctagttcccctgacaccaccgtgtggtgtgatgttcggctgacgaaggatggtgctggtatctgcctaccgagcataaacatggataactgcacaataatagccagtgttttcccacaagggaagaagacctacaaggttaatggtgtatctacagcgggctggttctccgtagactatacaagcactgttctgctgcaaaacgtatctttgaagcaatcggtcctatctcgtacccctgcatatgatggtttgttccaaataaatcctgttgaaaatattttcaccttatataaggcacctgctgtttggttaaatgtccagcacgacagtttctacagccagtttaagcttagcatgagaagctatatcctgtccttatcgaaacaattcattgtcgattacatctcatcgcctgaagtgaacttcctcaccagtatatctggaagagttagcaagaagacaaagcttgtgttccgatttctcgacgaacgctctattgagccatcaacaaaccagacatatggctcaatgctgaaaaatctgacatttgtcaagacttttgcctctggaatacttgttcccaaaagctatatctggcctgttacaccagataattacctgctgccttatacttcagtggttgatgatgctcacaaagcaggactagaaatctatgctgctgattttgcaaatgacttaaccatcagctataactacagctttgatccattagcggaatatcttttcttcattgataacggtgccttctctgttgatggtgtattgactgatttcccgattactccttcagaggcagttggttgctttagtaacctgaacaccagcaagattgatcatgctaaacctctagttatctcgcataatggtgctagtggtgactacccagactgcactgaccaagcttatgaaaaggcagttgccgatggtgcggatgtcattgactgtcctgttcaagtgactaaagatggcatactgatatgcatgagctctgttgacctaatggatgttactactgttgcaaaatcacaatttgcttcgcaagtaactaccatcaacagtctgaaggctgggtctggagtcttcaccttcaaccttacttgggatgatatttctaagaacctaaagcccatgatatcgaacccaatgagcacctataatctgtacagaaatcctagaaacaagaacgcaggaaacttcatgagattgtcagactttttgacctttgcaaacggaaaggatttgtcaggaatcatgataactgttgagcatgctgcattcatggcagaggagcttgggtttggtgtggtagatgcagtgatcaaagcacttgatgactctggttatagcaaacagactgcccagaatgttatgattcagtcaaccaacagctcagttctggtgaagttcaagcaggaaaccaagtacaaccttgtctacatgatcgaagaaagtgtccgagatgccgcaccttcctcccttgcggacattaagaagtttgctgatgctgtttctgttggcaccacatctgttttcccggaaacccattactatttgacaaaccagaccaataagcttgttccgacccttaagtctgccggcctccaagtttacgtttacgtgctcatgaatgagtttgcttcccagccaaatgacttcttcgcagacgccacttcacagatcaatgcttatgtgcaaagtgctaaggtggatggtgtcatcactgatttccctgggactgctcacagatacaaactgaactcctgcacgagcatgggaaagaacatgccactattcatgcagcctccgcaaccaggtggcctcctttcaaccattctcccagatgcacagccaccagcagcagcgccaatgccgctcttgacggacgctgacgtcgcagaaccagcccttcctccggtcagcaacaccaccacggctgcatcgccttcgcatgccgccctcagaatgcgaacccatgtcttgagcatcgccacattgctgatgctatgtgcttccctcctcatctgaagatagtcctgctcaacatcatacgcggcgtggcgcattagagctgaggattttcacattgagctgctaatagcaattctttccaccacctttatgtagctatttttttcttgttctgtccggtgttttggaggatggatggatgttcagcttgatacctcaaaggtggcacttgagcgtgctgccagctgtctctaggtacattttggtacatacgtgtggtgatacattgtccatgtcaccgtttctactgccaacctgcctgtggagggcaaaatattccctacaaacatacagtttagggtctgtcttggatacacctcaatcctgtcagggtgttctatgatttggtaagaggctgtctccaatagatctacatatagttatgcaaaatactattttgtattgtagattattgtttacagagtgaagtttggaatagaaaacacgataatagataagaagggtaagggtacgctattgaag

SEQ ID NO: 13207 - DNA, 1635 bp, Zea Mays
cccccccccccccccccccccccccccctgcgcagcacctgcacttcctcctcctcctcctccatggctgcaccttgcgacctgatccgccatgccctgcgtgtcctttcgaaaacggctgtcgacactgcccctctcgctcgctttccactcgattccagcaggcgtgcgtgcgtgcgtggcccaagtacccaacgcaccaccaggtggggcctctgctccaccccactccactttcactagcaccaacaccaacagcctcgccgccagcagcagccacgcgacacgacgcgacgcgagacgcggagcggtacaaaaggtggactgggtgggtgtggctggttccgtggttcaactcctaccactaccacagcaccagcgacggaccgggcaggcagagaaaaagcagaccagacgagacctctcgcgttccgtcctcctccctgcccctgctgccgttccccttcttcctcagttctcccgcccgctgctgccctccgtccgcgtccagatcccgccaccaaccgatccggcgccctccagcatggcgggggcgggggcgaaggcggcgggagccctggctctggcgctcgtgctcgcgctcgcgggggccaactcggagggcgacgcgctctcggcgctgcgccggagcctcagggaccccggcggcgttctgcagagctgggaccccacgctcgtcaacccctgcacctggttccacgtcacctgcgaccgcgacaaccgcgtcacccgcctagatcttggtaatttgaacttatctggtcatctggtgcctgagcttgggaaactggagcatcttcagtatctggaactttataagaataacattcaaggaacaatcccttctgagcttggcaatttgaagaatctaataagcttcgacttgtacaagaacaacatttcggggacaatacctcctgcccttggaaagttgaagtcccttgtattcttgcgtctcaatggcaatcatttgactgggcccatcccaagggaactcgctggaatatctagtctcaaagttgttgatgtttcaagtaatgatttgtgcgggacgattcccacgtctggaccatttgagcatattcctctgagcaactttgagaagaacccgcgcttggaaggtccagagctacaaggcctggccatatacgacaccaactgctagagggcaccacgaagaaaagaactgctagaaagtaacgagcgaacaaggttaccagaaattgggcgatatagatttactaggtctggatctgtaatcctccctgcatagctcttattcgtaactcgctgtcggcacgaaagttggtgtgtgttttagcagaatgctttctgtccgtgaaagtaaacttgaaactgcttattacgactgaaatgatattgtcgttcccccctgcgcccctgccatgagttttgggttcctttgtgttttgtacactgaacttgtcggaagtacggttcagtgaactagtttatccctgctgtggcaaatttatggaaggtggccgtgatatcgatcgactaaaccatggcacaaaagaagcaacaggcaatgatgtcctgtctggtggcgtctgcattaaggtttggcacgcgtggctgcacttatgtacg

SEQ ID NO: 13208 - DNA, 2490 bp, Zea Mays
aacacaagtacaagcaaatatcacgaggacaaatcatatcatgtttacaatgggaacagacttcaaataccaatacgcagagagttggttcagaaatatggacaagctaattcactatgtgaacaaggatggccgtatcaacgctctttattccacaccttcgatttataccgatgcaaaatatgctgcaaatgagcagtggcctctcaagaccaatgatttcttcccatatgcagacaacccaaatgcctattggacgggttactttacaagcagacctgccttaaaacgatatgtccgcatgatgagtgggtattacctggcagctagacagctggagttctttaaagggagatatagctcaggtctctcaacggatagtctaggtgatgctctagctcttgcacagcaccatgatgctgttacaggaacagagaaacaacatgttgcaaatgattatgcaaagagattgtcaattggatatacacaagcccaggagctcgtttcaacttctcttgcttgcttgacagagtctggctcaaaatcacgttgtgcatccccagtgacaaaattttcacaatgtcttctgctaaatgttacatattgccctccttctgagatggacttaacgaaaggaaaaagcttggttgttcttgtatacaactcgcttgggtggaaacgagaagacgtcattcgtataccagttttcagtgattcgattgtcgttcatgattctgaaggacgagaaattgaatcacaacttctgcctatagctacagcctcgttgaacataagagaaaaacatgtcaaggcttacctgggcacaacgccaggtgcaaagcccaagttttggcttgcttttcctgtgtctgttccacctcttggtttcaatacttattttgtctcaaacttgaagaaatcagcacatatttcttcgaagtccactcagtactcacctcaaggaagtgaaagtagtaatctacaagttggtcaaggcaacttgaaacttcaatataatgaagctggaaaattatccctgtactccgatagtaagactatggttcaagcaaactttgagcagaaatacaagtattatattggacaggatggaaatggaagtgatcctcaggcttctggagcatacatattccgccctaatggcacagttccaatcagtactgatgggcaggtttctctcacagttctgcgtgggcccatattggatgaagtgcaccagcagataaattcatggatttttcagattaccaggctttacaaggagaaggactttttggaaactgaatttatagttgggcccataccagtagatgatggaaatggaaaagaagtagcaactgaaattgttacaaacatggttacaaacaaaacattctacactgattccagtggacgtgatttcatcaaaaggataagagattatcgatcggagtggaagattgaagtgcaccagcctattgctggaaactattatcctgttaatcttggcatctatgtggaggatggcagcaaagagctgtctgtactggtagacaggtcaattggaggttccagtataaaggatggacaaatagagctaatgctacacaggaggctactccatgatgatgggaaaggcgtcgccgaggcgctaaatgaaacagtctgtctcgataagcaatgtgaaggactcattatacaaggaaaatactatgtcaaaatagacccacaaggagaaggagctcggtggcgtcggacatttggccaggaaatatactcccctctccttcttgctttcacagagcaggatggaggcaactgggcgaattcacatgttgcaaaattctctgcgatggattcaacttacagcttgcctgataatgttgcaatgcttacccttcaggagcttgaagatggaagtgttctccttcggtttgctcatctatatgaggccggggaggacaaggatctttcgtctttagcgagtatcgacctcaagagagtgttcccggagaagaagattggcaaggtcatcgagacaagcttatcggcaaaccaagaacgcgcagccatggagaagaagcgtttgaaatggaaggcgcaaggttctgcggctgacgagaaggtggttcggggtggccctgtggatccttcgaagctcgtcgttgagctggggccaatggagatccgcacattcatcgtcagctttgatcacatcagtgacaagcaacagctataatcgtctccgactagacgactatgtctggatgaagttgtcttgcggcttccaaataaaaaaaataatgtggcctgctgtgtacctgtggttcaacccatgatatggcctgctgtgggtcagcacggttctaaagctaaggacgttttataaggcaaattttgctttagggtgtcactcctctcctcacgttgcaaaaatacagaaaaaaccagcgaaaacatgattgcaaacagatatacaacaaaataaatgaa

SEQ ID NO: 13209 - DNA, 991 bp, Zea Mays
ggaaagcacctcaggatctaatttgatcttgttgcaagctttgtgggagagatggaacaattgtgatgattcctggtcaggggacaccacttactattgagcagagccagaaagaggagaagacttgtttgatggtgtttgactgcagaggctatgaacctgttgagttttcctttggcactggctggaaggctgaatctgtgcatgggactccttttgaaattgactgctctgaaggtgaattttctgagtatgatgagaagggagaatgccccgttgagctaggcaagctgcagtcaacattcaaagtggtgaagaagcatgagaggggtgggaagactagatttgtctagatcgagtgacttggaatctgacagatattggagttggcggtgtataaatggtagatttgggctgaaggtcatgcgtgatccgacctcctttttcttctatctgttgattctgtggatgccgtgaaccatgcgaagctttcggtgatagtgtccacaggagcattaccctgtaccgaaactcatctttataacttaccaccaatgctcgaacatgttgctggttgctggtatttttagcactgttctctctggctaatgggtctgaagacatctcaaggggatatgtggtgcaatctgagttctttaaagggcatcgtcacttgtggatgttgattgtggggcaaccttggcttgctataatttttagataccgtttagttgactagcattagcacgctcaaatgcacgcttgtgtgtgtacccggtgctatcgccgtgacaaaggctctcgtcaactttgtgctttgttttagcgcacgcatggagatccaagaatatcttggccaaagctgcatgtttcttttcatttgttccgcaaaattctcttccgtacttatgatcaatgctggctgtcagttgtcacaaccttgtttgagcatttacattgatttatcgaacggaatacatgaagtgataat

SEQ ID NO: 13210 - DNA, 3066 bp, Zea Mays
gccagggaagtctgctactgcctccagtcccagatccacccgtctgttccgccccgccgcgcgcaccatggatcccccgcggcggcggctacccgccgcgctcgtcgtcttcctcctgctcctcgccgcggcctctcccgtcgcgcgcgcgtggaagaaggacgagtttcgcaactgcaaccagacgcccttctgcaagcgcgctcggacccgcgccccgcactcgctcgacgcgccgctctccctcgccgccagctccctggccatctcccccgacggctctatctccgctgagctctcccacccgtcccgcccgcggcccctcgtgctccgcctctctgcgctgcccccgcacgcgctgcggctccagatcgatgaggactactccaccgccacgccgccgcaccgccggtttcacgtccccgatgtcctcctcccggacctcgaggcccgcacgctccacctccccgagcccaagactgccgctggcgtatccaccgttgcgctctcctccgaccttgacgtcgtcgttagacacgatccgttcgagcttgccgtccgccgtgctgggtcgggcgatcccgtgctctccttcaactcccacggcctcttcgacttcgagccgatgcgggagtccaagccggaggacgacacgtgggaggagcacttccggagtcacaccgacaagcgcccccgcggcccgcagtccatcaccttcgacctctccttctatggcgcggacttcgtctacggtctcccggagcacgggtccacctcgctcgccctccgccccacccgcggcccgggggttgaggagtccgagccctaccgcctcttcaaccttgatgtcttcgagtacctccacgaatcgcccttcggtctgtatggctcgatccccttcatgattgggcatggcggccgggcgtcgtctggcttcttctggctcaacgcagcggagatgcagattgacgtgcttgcaccaggttgggatggggtcactgaccatgagaacgggcggatcgacacactgtggatggctgaggctggtgtcatcgatgcattcttctttgttggttctgagcctaaggatgtgatcaagcagtacataagtgtcacgggcacaccttcaatgccacaacagtttgctactgcgtatcaccaatgccggtggaactaccgggatgaggcagatgttgacggtgtagatgctggttttgatgagcatgatattccatatgatgtgctctggctcgacattgagcatacggatggcaagcggtactttacatgggatcattctgctttccccaatccagaggagatgcagcgaaagatagcagataaggggaggaagatggtcaccattgtggatccccacatcaagcgtgacagttcattccacctccacaaggaggcaacagacaaggggtactatgtgaaagatgcgaatgggaatgactttgatgggtggtgctggcctggatcatcatcctatcctgacatgttgaatcctgagatacgtgagtggtgggctgacaagttctcctatgaaaattacaagggatcaactccaacactgtacatttggaatgatatgaatgagccatctgtcttcaatggccccgaggtcaccatgcccagggatgcaatgcattatggagatgttgaacaccgagaattgcataatgcatatgggtactactttcatatggctaccgcagatggacttctcaagcgaggcgaggggaaagatagaccctttgttttgtcaagggccttctttgctggaagtcaacggtatggtgcagtttggacaggcgacaactccgcagactgggatcacttgaaatcttctatcccaatggtcttaactcttggtcttactggcttgcctttctctggcgcggatattggtggattctttggaaacccagaaccagacctattggtgcgttggtaccaagtaggagcattttatcctttctttaggggtcatgctcatcatgacaccaagagacgtgagccatggttatttggagagcgaagaactgccatcataagggaggcgatacatatgcggtattcattgttgccctacttctacacgctgttcagagaggctagtgtaaatggcattcctgtcatgcgtcctttatggttagaatttcctgacgataaagaaacttataacaatggcgaggcatttatggtggggcccagccttttagctcaaggaatatacgaagagggccagaaatcagtgtcggtctaccttcctgggaaggagtcatggtatgacttgagaaatggatctccatacaagggaagcgcgacacacaagctacaggttttagaagatagcattcccagcttccaaagggctggtacaattgtgccaagaaaggacagattcagacgcagttctactcagatggtgaatgatccatacactctggtgatagcactcaatagctcaggtgctggagaaggcgaactttatgtggatgacgggaaaagttatgagtaccagcaaggggcattcatccatcgccgatttgtctttgcagacaataagctaacttcattcaatattgggcctgacgatttgggcaagaaatttagaagtgattgcgtgattgaaagaattataatcctcggtttacgatccggagtgaagaaggctattattgagcctggaaatcaagaactagaaattgaatcagggccaattagtttaaggagtggttccagcccagtcgcgccaacaatccggaggcccaatgtttgcattgcagacagttggactataaggatagcataaaaggtaggccattcacatctggatcctgatgtctgatgtcttcttttgtctgctgtcaggttgcaaaattaggccagcctttagaagtttagttgtggccttgaaatatttgcatgtaactggtacttaagctgttccaactgccaattttgacataaatacttatatacattgctgatgtatattgtagctttgatacatgagcattttatcttgcaaaaatgatatacatgcttgcatattgc

SEQ ID NO: 13211 - DNA, 829 bp, Zea Mays
atcaggctatatccaaacaaccccttaatattagcagaacgggcaatacttgaatctctcaggaaggaacaaattgtacaaggggatgttgatgatatgatggctcaaaggttaggggctgttttcatgcctcatggtcttggccacttacttggtattgacacccatgatccaggaggctaccctgagggattggagaggcccaaggatccaggactgaactccttgcggaccacaagagaactgaaagaaggaatggttatcacagtggagccaggctgctatttcattgatgctttgctaactaaaacaagggatgatccaatttcctcaaagttcttcaactggcaagaggttgaaaagtataaaagctttggtggcgttcgcattgaaagtgatgtgtatgtgacggctcaaggatgccggaacctcacaaactgcccgagagagacctgggagatcgaggctgtaatggctggcgcaccatggcctctgccggcttcaagttctatggtggtagcagcagagaatagcaatgacatatctaaagcgtcgtaattttctctatgctcaatccatatcccgagttgaaacaaattcgacctggattcttatattcaataaatagtgaggctgaggcgcaaaacattgttggattgatggctggaaaacatttcatacgctcacttaatttgtaagctttctgttatgtgtttgagatcgatggggaaacgtttagctattcaaatgtcttgtttttgtggagagtttcaaatgccttagaattaactcatcctggaccggaagaagattggacaaaaagatgttt

SEQ ID NO: 13212 - DNA, 1617 bp, Zea Mays
gccagctcctaaatcggagagaaccaatgaaagcaaactgaattttcctccacacagagaagaagaaaagaaaagagaaggaacaatgaagcataccaaaacccaatcagaatcagggtgggtaggcggaggaaggaaggggaaaggcgacgagctggtgacgacgaggagcaactagcgtcgcgaagccgccgtgccccaggcgaagtcacaggccgccgcagcggcgccggcgcccacccgatccgccgccgccgccgacctcgtgctcacgcctccggtcggaaggagggtgtgtcaaacccatggagcagcctgccgctcccgatcggagcgattttcccgccggggagtgcgaatggcgggaggagctgcggcagcagcagtctcaggtggacgcgctgcgggagcggctcgtggaggcgaaggtcgggttgcggtgctccgagggcgattcccggaaggagctagaacacctgtgccgcagggtgaagaccatcgccacgctgctggcgtacctcaagtccaaggcgaggatcatggcgataccgcacctcgcgcacacctcctgcgggatcaggcagcaggatggcgtcgggtacgtcgaccggcacggggtgccgctggcggactggcctaagggcgccgaccctgcgccctgcgggggagcttccgttgacgggacggtggcggagggtggtgctcgtcctgagcatggcgatgccgttggaggggatgtggatgtggacgacattctcaaatccatccgcgtcgtgacggatgtgatggagtcgcttgtgaagagggtgattgtggccgagtccgaagctgctaacgagaaagaaaaggtgaggatggggttggaagagatcaggaggaagacgttgcaggttgagactatgtccgccaaagtcgaggagatggagaagtttgccgttggcacgaacgggatgttgaatgagatgaggcaaagggttgaggatatggtgctggagaccactcggcagagacagcgcgctgctgaaaatgaggtggagcttagtcgggtaaagcatgatttcgagtcgctgagaacttatgttagcactctggttagtgttagagaaactcttctctcatcagaaaagcaatttgagacaatggagaaactctttgacagactagtagccaagactaaccagcttgagagtgagaaagctcagaaagaagctgaagtccacaaagtgatggaggagaatgtgaggctacgcgcaatgcttgacaagaaggaggcgcagctccaggcgatgagtgagcagtgcaagtttatggcgctgaatcacgacaactagcaggcgatgggcctgagggcggggcctccgttctcgaatatttgccgccccctagttcatttttgaactaaatgcgacaaataaaaaagaacggaggtagtaccttacaaattccagttgtattgctgattgttggtgatagagaaagaagaaagaaagaaagaagagatgccgtgggatacatctcatgccgaggcctgagttccaggggctgtaattcttggtgcaaacaatcgtttctttagaacaaaattactcttcttttatagtataagaacagttccgt

SEQ ID NO: 13213 - DNA, 1485 bp, Zea Mays
ttggacatgacatggagacagcatgttactggagggaagctccgggaaattactgaggaagctaaggccttttcaattggaaacaaggctttagctgctctctttgttcacacgccagctggtgaattacagcgccaaattcgtgcatggcttgctgaaaactttgagtttctatctgtaactggtgcggatgctgctggaggagccgcaggacagcttgaactgctgtcaaccgctattatggatggctggatggctggtcttggtacagcgcagccccctaccactgatgctttaggccagcttttatcagaatacacaaagcgtgtttacacatctcaactacaacacttgaaggacatagctggcacattggcaacggaggaggctgatgatcctgcacatgtcagtaaactccgctctgctctggagtctgtggatcacaaaaggagaaagatcatgcaacaaatgcgaactgacactgccttgttaacaaaagaagaaggtggctcaccaattcgcaatcctcttactgctgcggaggatgcacgattagcatctctcatatctctagataacatcttgaagcaagtcaaggaagtaattagacaaagctctacaggacctatgagaaaatcaaagaggaaagctttgctagagttattggatgacctcttgacacagatgccctctcttcttgatatagatcatccatgtgctcagaagcagatcatggaggcacggaaagttgtcgagtcactgcaagaagaccctgatgatcctgccccacagtctaatgcattgggagagggcgaggtttcacagtggaatgtactgcagttcaacacgggaacgactgcgcctttcatcataaagtgcggagcaaattccagtggtgaactggtgattaaggctgatctgcgagtccaggagcctaaaggtggcgaggtgatccgtgttgttccaagaccaacagttcttgcggacttgagttttgaggaaataaaaggtgtgtttgagcaattgccagaggcagttagcttgcttgccttggcacgaacagcagatggtacaagggccaggtattcaagattgtacagaaccttagccagcaaagtgacggccttgaaagagactgttgcagagatggagagaggtggtgttttcaaagatgtacgataaatgctgtgttattgtagagttatttatgatattgatgttgtatatggatgccatttgtcggcatcccttgtaactgtatttgtttttactatgtggaaacctatgttgtaacactattctttggcaagagatgagccttgcctgccccaacccgtaatactatggttgtgcaaggcattaatgtaaattgtagctgcagctgataaatgtctgcagtgctgcaagtctgaactttccaggttatggaactattcaatgtttatttgtattaagcttttaagatgttaaaattgtgctagtttt

SEQ ID NO: 13214 - DNA, 325 bp, Zea Mays
ggacgcccgatctagcaactagcaagcgccgcatccctcgcctcttcccgacttcccccctcgattcgatccgagctcacttctagggttcttggccccgctccaccgtcgcccatggcagacgatgccaaccgagcggccttcatggagctgcagtcccggatgatagataccaccgcgaagatcaagcagttacaaacccaaatgcgttctaaagaaggggaaaagaagcgtgcctaccttactttggaggaacttcgccagttgccagatgataccaacacctacaagactgtcggcaatatccctaaacagcagtcatcca

SEQ ID NO: 13215 - DNA, 2955 bp, Zea Mays
ctatcgattttgtcggactcggcttcttcatggattcatggagaaatttatttacatgaagataggaggattcgtatcagcgtgatatggataggcagactgccagccacaatagtagtgaatcattatgttcttctggaatacagtatggtctaaatcgtggacctggaactattggaggcctgcactctagcaatagtttacgaagcttggatgaaattccgaacaatgatctgccatcaaatacatttgcttctcttttagggtcatctctttctaggagtgcatctccagatcctgagcttgtgaggagggcccctagtccatcccttcctccaatcggtgtgaaagttggcaacactgataagatgaatggtggttcctcttctttccgtcgtagttcatccgcaatcggtggatctgatgatctggtggctgccttatctgggatgaacttatcatctagggcaatgagtgggcaaactatggaccagtctcagctctatcaggatgttgataacgtccagaagtttctttttgatcgacagggtgaccaaccaaatggcaatcagcagcactacatgaggcgtcctgagcatggacaatctaagttatctgatggatattctgccaatttggccaattcatccacgatgagaaaccagattaattctggcagtttcacatcttttgacagtttgtctcttggatctggctttccttcccctaggattggttctagatcccctggagggactgtatcttctcgacaaaatttagctggtatgtctaacatgctaaactataatggaattggaagtccaactgcgtcaccttctcttcagacttctattgatccagcgtatatccagtaccttgctcaaattgcagctacctgggatgatcctctaatggacaggagccatctgggaagttcttacatggacttacttggtacacagaaagctaaccttggccctttacttcagtcacaaaagcaatatggttactgtggcaatcttggatttaaccttggtggttatgctggaagtccattgacaagtcctgttcttccctcttcacctattgcaccaggcagtccacttaggcatggtgaccgcaacatgcgctttccaccaggcatgagaaacttcggtaattcctttggttcatggaattcaggcatgagtggaaagatggatgctaatttgatgccctctctcctggaggaattcaagagcaacaaaagtaaatcatatgagctctccgaaatagctggccatgttgttgagtttagtgctgatcaatatggaagccggttcatacaacagaagctagaaacagccagtactgaagaaaaggacatggttttttcagaaattatgcctcaagctctcacattaatgactgatgtatttggaaattatgttgtccaaaagttttttgagcatggaagcactgcccagataaaggaattggctggtcagcttattggacgtgtccttgctcttagtcttcagatgtatgggtgccgggttatacagaaggctatagaagttgttgatttggatctgcagactaaaatggttgcggagctggagggtcatgtcatgcgctgtgtacgtgatcaaaatgggaaccatgttatacagaaatgcatagagtgcattcctcagcatgctatcgagttcattgtctcgacattctatggccaagttgtaatgttatccactcatccatatggttgccgagttattcagagggttctagagcattgtgatgatcctaagacacagcaaataatgatggatgagattctccagtctgtttgcttgctagctcaggaccagtatggcaactatgtggttcagcatgttctggaacatggcaagccccatgagagatcagccattattgagaagctaattggccaagttgtgcaaatgagccagcaaaagtttgcctctaatgtcattgagaagtgcttagcctttggaaatcctgtagaacgtcaggttctgatcggtgagatgcttggatccactagcgaaagcgaacctcttgaggtaatgatgaaagaccagttcgcaaactatgtggtgcagaaggtgctagaaacttgtgacgatcagcagagggagatgatcttaacaaggataaagacacacttgaacacactcaagaagtacacatacgggaagcacatagtagcgcgtgtagagaagcttgttgctgctggagagaagcgccttgggcttcaaccagcatgcaccgccgcctgaagggcaaactctctaagttgtacagctaacagttgctaggtttgcctcatgtttttttctctactaaaaaccttatatgaaggccccttttggcctcgccaggaaaaaaaataaatactgtatgtttgcggggaagagtgtacattaattctgtagcagaaagaccccctacccatgtggcggaatcaagggaggagtgatgcgtgtgagtccgatcgatctgaaggctgctgtaaagaggaagatggaaggggaaggagtgagaagcatgtcagttactctgctgctgtacaaattaaacttagctcttagagtgaggagaaagtaagctgttagctgtctgcctaaaggaaagaaaggaaaaaaaaaagaagctggaggccattggcaccctgtttcatgtgttggtatagctgctgtggctctcctgttgtctgtctggcctttgttgtaacataaagctgaggcgcactagcctgccttcgttttcacagttaagctgaagttattagtatcagctttcctgaactgcttggtatgtaatgtgactctgtttcttccttgtactaatgcttgtctcatgtaatccaggcccctaatgtctgaatgttttaatctcatttttcacctctgataaacgttgtttttttgtttggttttgttgctgctgagg

SEQ ID NO: 13216 - DNA, 3040 bp, Zea Mays
ggggggtgactgggtgagggagtcccagcagcggtgactgttgcggtgttgccgcatccacgccctagtcgaccacgccgcccccagcagcccgctgctgccgcggctcgcgcccccaggagcccccgccgtcgcggctcgcgcctcgtatccgtaacagctacaccgcgccgcctacccccgcttcctgctggctgcatcgtcctcaggtcttccgaaggcgagctccaatccccaaccactattcacaagatgactacaaaacttgagcaatcttctgcggagcatcgcccagcaaaattcgcagcaccatcgtctttgacccccaagatctcaatgtttggggcaaaagctggattcatcatacctaagaacaagctggccggctcactcgtaatccggagcaccagtgacaagaatgaaacaccaactgcatccaacgaagatagcagcaggcatgttcacagaaagacaaagtgggggcctgaccttgctttggaccctgtcgtgtgcaaaggaagggctttggcctaccagactcgagtggagcaaatttccaagcagctgaagtctggagctttggacacgtccgaaattgatggttcagtgtctgctggaaatgaattgaattctattggtcctgacatcttgaaagagaacgagctgggaaatgttgaactattggaacttgaaagacgagagcttatcggtgaaatactccgtttgaatccgggatataagacacctgagaactacaaaccagtacttagggagacaaaaatccctgttccggcagaagcacacccaggaaataatattattggagttcttctaggatctgagagcaatacccagaagagactacatgaagaaactggtgctgtcattcgagtgtatgggactaagaaaatcaatggagagaagagtgagattcgtcatcaagacataaatgaaacacaagatgcttatgaagacctatacatcaatgtatcggctgactcttatgataaagtagatgctgcagttgtgttgattgagctgcttcttgctcctgtttccgtaaagtcgacagctacttcaacagctgctactgtttcttcagcagatacatccaaggatgcagtttcagctaatgtgcaactggagcagaataccacgtcacagccagatctacttcattaccaatcacacaacgcaccttggctgcccacaccccagaccaatgctccatcaattccttccacggggcctgttttgagtacattacctaacaatccatcgcagccacaaccgcctgctggttctttcagtatgcctccatatactggtcaacctcctcacatgaatagcatgccagcaaatccatttcctgttcctgggcctcagcaaccagtaccaagcaatcaacaacatccacctcaatttcgagctaactcctcgattgggccttttttcggtcaaccacctggtattgtaagccaacaaatgccaccatcttcctcaatgccaccgccagttagaccccttcaaataccccatgcctctggtggctggccccctttctctcctgttacatcacaatctcataggcctctgcaagctccaccgacttttatggcagtgagacctcctatttccgtctctcctcttggtgcaactccaccgcaaggtcccattgcattgacaccaccaaatatgcccaccatgtaccgcggccagcatccaccagtaccaaatttcactggttcagcgccattggtttccaggcctcctggtggtggggctcagtcttttcctacagctgcgcctcaaggcccttcctcagtagcatttcccggtggaccatcgctgcggccaccttaccctccggcgcctgatcaagcgagggggccacctccagctttctctccagttggatcaactcctggcatggtgcctccacctattgcatcttccggcctgcctgccccgcgtcctgcgaacacgagctgcatccagacacaagtagtagcccctttgagacctccgctcccagccgcgggcgattttactttccggcctgccataccaccggcgcatgctccagagttcgcagcaccaggcagtcaaatgggagcaatacatggcagaactcaccaccctggaccattctcctcccatcctggtgaccagaagaaccccagccaaggtttccaagggccgtttgatggcagcaggcccatgtacacgacgaatcaggctcggatgcacgctccacctcctccacacttccacggagccttccccaggaacgcatctcctcttgagttcccagcggggttccggggagcctggccgtccgtgcaggcacctccgatgccggcaccgtcacatccatcgtctttcccgccgtttcagttgaggccaccgccaccgccgcagcaggatatgtctggcgcaggcggcaccaggtggcccggtggcaatcaaatctacaacccttttgcaccaacggctgcggcggcggctcagagagcggaggctgaccctgagtacgaggatctcatggcatcagttggcatgaagtagcgaagactgctggctggcccctgatctgtctgtggcacaaacacagaggcttcttcctattgcttgccaagatgtgcgggttactaatctcctccaatgtatctctagatggtactgaattccgttccatcatagacaggtgccatgcttgaacgaaaaacaaaaataaaaaataaactagtggaccttgtttgagacatgctgttgggtgccgaggttgtgtttgtgcctatctcgaaatctcatgcatgtgttgctcccggcgtcagctgatgttgtttattttatggagaggaatttgtgagcctgttctgagaaagaagaacatctgttggcattatcacgtgtgtgtatatatacatgaaggatggggtggaatatggtaggtatgcggtatgatgtcaggatgtctccagcagatcgtgtatatacggttgtgtaaaacactttcacgaagtttgaaataggggag

SEQ ID NO: 13217 - DNA, 2133 bp, Zea Mays
ttcttatccgctgctggggtgtgggtgcgcctcgtcgtcggcgacctttctcacacccagcggagacgacccattccgattggcggagggagctctcgtccaatgggtcgcgggctcgcggcgccatgggattcacgcatcccgccgccgggcgtgcgtggggcaaaatcagctcagctaattgggtaaagcgaccgctttttccggtgtgttgtgtgtgcgtggcttggctttggctttggctcgagtccgttccatcacagcaacttgccacttgctgccagtaaacaacacaaaggcgttcaccaccggctggagatgccctgccaatagcgaggagagcccctactgggtttggttcatacccgtgttatccactacagaatcccagctcgatcggcacgagccgactggtcgctacacttgccgacttgcgtagggaggagtcctcttccagttgtcttgccctgccacagcccacaggagattcactgggctgtttgcgatggcagagttagccacggcaacgtacaaaaccagctcttgctaaggggaaaaatcacaaaattattgttgcgtctcccttttactactgtttgctgctgctgtggtggtctggataattgggcatctaaacgaaggcttgtgttcctcgctggcacaaccgagaactcatcgtcatccaatctgcagcaccaaaccttacccaggaccaggagtaggagagagagagatggaggaataaagcagggggggcacgcagcgcacggagggagagccggagggagatcaaaaggaaggaggcaaagctttgcttctgagagagggagagccggagagcgaagagaagcaggccaacccacccccacccctgcactgcacacacaatccccccatggcctctgctccagctgctgctatataagcgcgacccggacggctctgcttccccagtagtcctctcctctcctcccatccatgcttcggtccacgcacccacccagccccaccagcggcagctccgcggcgccggcgtccagctccgacgccgcggcgatggtcgggggcggcgcggcggcgggcagcggcggcgcaccgagcggcgccaagctgctgcagatcctcaacgtgcgggtcgtgggcagcggcgaccgcgtggtggtgctgtcccacgggttcggcacggaccagtcggcgtggagccgcgtgctcccctacctcacccgcgaccaccgcgtggtgctctacgacctcgtctgcgccggcagcgtcaacccggagcacttcgacttccgccgctacgacacgctcgactcgtacgtcgacgacctcctcgccatcctcgacgcgctccgcatcgcgcgctgcgccttcgtcggccactccgtctccgccatgatcggcatcctcgcctccatccgccgccccgagctcttcgccaagctcgtactcatcggcgcgtcgcccaggttcctgaacgaccacgactaccacggcgggttcgagctgccggagatccagcaggtgttcgacgcgatggcggccaactactcggcgtgggcgaccgggtacgccccgctggcggtgggcgcggacgtgccggcggcggtgcaggagttcagccgcaccctgttcaacatgcggccggacatctccctccacgtgtgccgcaccgtgttcaacaccgacctccgcggcgtgctgggcatggtgcggtccccctgcgtggtggtgcagaccacccgcgacgtctccgtcccggcctccgtcgccgcctacctcaaggcccacctcggcggccgcaccgccgtcgagttcctccagaccgagggccacctcccgcacctcagcgcccccggcctcctcgcgcaggtgctccgccgcgcgctcgcccggtactagcggagcgcctgccacctacggtcctggtggtcatcggtattttttaccgcctcgatttaccccgtgccgagaccggggacggggatcagataatgtggcgacccgcgccgtttgctgtgcgcgccatgactgtagactgtagtacgagtgtacgacttgttctggacttctggtacccgatttttttactgctttttaatggagagccgagcagtagcactggtaaaaata

SEQ ID NO: 13218 - DNA, 673 bp, Zea Mays
taatattggaacttggaatttctgattgggtgcatggatgatctttcatcagagcagaacaagttccaatattataaccgcaatctctcaagacaacagtcacagcagcaggcatggcttcaaaagagaaggcaggagaacatggcgaggaaagcagctggtgaggagccactaccagaagaagatccatccaatcctatatttaagcctattcctgagccctcacgattggagggctatctagtaactaatcagatctccagttactgcaaccatatcaacggggttgctggtcagaatttcgacaggctatacctgatgaaggccttgcatgaggattagaagactgggctgtgatgaatgctgttagaattagcttgtgatactgctcaaaatcgtaattttgtgatgtacctttacatggggcgtgcctgtcctctacttaatgtttccatggaccagatggttagctcgtgatacttaatgtacttgcatatgtatgcgttgccgtataaaccaattttctccattagtatttttgtgacgctcagtttgaagtccatagtgtagcttgttttcgttctcgatttgggctgttgtcaaatggtaggtactgttggagttatctatctcgtcttatcagtttaaaggttttaggtttaacaggtagtgc

SEQ ID NO: 13219 - DNA, 1309 bp, Zea Mays
ccgcattgggcgcgattcattcccctcgtgggctcccagttcagtaaaccctacgccctgcggcacacacccatctcgccgcgccgccgcgtaaaccccacccgagcccatctcgccctcgcgcctccccgccctcgcgcaggcgcaacaatggcggccgcctcgaggggcctgctcgcgcgcctccgtgtcctctcactctccggcggcgggagcccgtggctccgcttcccgccttcccggctcttctccgcggaggccttcgtctcccattccgatgacgacgacgctgggggcgagggaggaggcgggggccggatcatcgaggcacggtccggggtgatgggccccacctcgcggcgcaccggcgtcatcggcgtcaagtgcgggatgtcggcgatgtgggacaagtggggcgccaaggtgcccatcaccgtcctctgggtcgacgacaacgttgttacccaggtcaagaccgccgagaaggagggtttcttcgccctacagcttggagcaggtcaaaagaaggaaaaacacctaacaaagcctgaagttggccactttagagcacagggagtgcctctgaaaagaaagctaagggaatttcctgtcactgaggatgcgcttcttcctgttggcacaagcatcacagttcgtcactttgttcctggacaatttgttgatgtcactggaatcacgaaggggaaaggttttgcaggtgtaatgaaaagatatggttttggtgggatgcctgcatcacatggaacatctttggcgcatcgcagtggtggctctactggtcaaagagatgctcctggaagggttttcaaaaacagaaaaatgcctggacgcatgggtggtgtgcaacgcacagtgaagaatgtatgggtctatcaaatagacccagccaggaacttactgtatctgaagggccaggttcctggtcctcaaggtagctttattttcgttaaggattctatatataagaaacctgacacggctttgctcccatttcctacatacttcacgcgtgaaggtgagcctgaagacttggagcccctgattgctgatcttggtgatgttgacccattcatggcagccgattaagacaatgcacaaagttggttaattcctttttgtgttctaagcactccttgagctcgtccattccacgagattgtcaaactctcgatggatgtgagcagttcctgaatcacaagctttatccggttactggccagcctgatcaatgttgttccatgtacattacctggttatcttctctactatccatttgttacatatgtgg

SEQ ID NO: 13220 - DNA, 2109 bp, Zea Mays
aaagcgaccttcctcctctccctccagctccagttcgtctctctcctctcctcgcctaaggtttcgcctcctgtgatcccgtctcgccgtcgtcgccatgggggacaactacgacgacgaaggcgagccaatcgtggacctcgacgaacgggagccctctcctgagccacagccctacgaagatctcgatgacgacctcggcgacggcggcgattggacccgcagccgctccccgacccccgtccacggcgacgacggtgaggcggggtcctccgccaagccccggaagcgcctcctcaagaagggcggcggtggcggcatgcccggcgacgacgggctcgatgactttgggttggaggacgaggacgcggaccccgcggctgaggcgaggaagaggaaggggtcctcggcgctgagggacctcgcgaggggcggggcgggcaaagagaagaaggagaagaaaaggcggagggaggacgacgggaggggaagtgatagtgggatggtgagggacaggcggggagcaggagggaaggactcaggcggtagggaggaccaggatgatggggagagggagatccaggagctctgggataccattgcgggtggtgactcagaggatgaccaagaaggtgttagaaccatagatgatgataatttcattgatgacaccggggttgatccagctgatcgttatggcagtgataatgagcggcattcacctgggcattatgcacaggctgaggagggtgaggaggatgatgaaattgagagactcttcaagggtggtaagaagaagaagaatgatcgccctcgtgcagatattggtcttatagtggaacaattcattgctgagttcgaggtagcagctgaagaagatgcaaatttgaatcggcaatcaaagccagccattaacaaacttatgaagcttcctctgctcatagaggttctctccaagaagaatcttcaacaggaatttcttgaccatggagttctcactcttctaaaaaactggcttgagccattacctgatggaagcatgccaaacatgaatactcgatctgctgtactgaaattattagctgattttccaattgacttggaacaatatgaccgaagagagcagcttaagaaaagtggcctgggaaaggtcattatgtttttgtccaaatctgatgaggagaccactgcaaataggaaattggctaaggagcttgttgataaatggagtcgaccaatattcaacaagagcacgagatttgaagacatgaggagatatgatgatgaaaaagcaccttacaggcggccacaaatgaagaaaccatcaagtagctctggaatggaatccagagatgatgatgttgatgctgacttttcacaacgcaagtctgggcaaagtagttcaaggcagcatgcttctaggccagaagcctcgcctttggactttgtcattcgtccacagtccaaaattgaccctgagcagatacgagctcgtgctaagcaggctgtccaagaccagcgtcggctgaagatgaacaagaaattgcagcagctgaaagcgcccaagaagaaaaaccttcaggcgtcaaagctcagcgtggaaggccgtggcatgatcaagtacctgtagatcacccactgtggcatccgcagtcagcagtgtcctgcacatgatacagcgcctgcagggattgctgaattggtatgaagcatcctaccaccattccatggcaaacagctcggcatcagtaattgcttggatcttttatccaagtatttttcttgcctgcaacatccgtgcttcagaaaccagttgagttggctacactatcattgcagaggcatatactacgagcttgcataaacatggcgctttcctaccagagtggtgcctttatattgtataaatatttgtcatgtttatgagttacaattagctagggttgaagttcgattgtttgtacttgaaagaaagtcatcacttgtgaaaaatcgaaacatagtgcgacaaatgattggttgtgcttaccaaactgtaactcaattgtgataaattacaattcttcagcagtcctcatcttgctgctttattgtaagatagtgtgctca

SEQ ID NO: 13221 - DNA, 137 bp, Zea Mays
ctggaagtaagaacttttatccctctacaaaagtctccatagttggaagagccaattcggccatttactagatgaaacccaccagtgaacagacccactcatttttgtcgggtaaacaggaacagccacagtaaaac

SEQ ID NO: 13222 - DNA, 184 bp, Zea Mays
attgctgtttgtgaaatttatactcatctcttgtatgtcactgaataacatatacaagatattttttgtgtgtatgatatatgggtacataagagattagtctaattgtctcttgatattgctgctactccgtcgactgaagtactgctggtggtggctgctgcatcgcactagccagcagcag

SEQ ID NO: 13223 - DNA, 122 bp, Zea Mays
tgtggcagaacctcccaagttattgggcccacatgcacctacccttgtctcaaagatctcagacggctatgcatgtgcaccagataacttaacacgatccgtccgagtgtcctaaggacccc

SEQ ID NO: 13224 - DNA, 76 bp, Zea Mays
ggttgggtgaccggaagtggggccagctcgtcggtgagtcttgggagggaaagcgtgttggcgtgacggtgacggt

SEQ ID NO: 13225 - DNA, 1357 bp, Zea Mays
tgtttatcttcgtcttttgaaaggatgtcaccgagccgcttcttgtggaagttgaccaaatctatcaccttgcttgccctgcttcaccaatcttctacaagcacaaccctgttaagaccatcaagacaaatgttattggtaccctgaacatgctaggacttgcaaagagagttggagctaggattttgttgacatcaacctctgaagtttatggtgatccacttgagcatcctcaaactgaggcctactggggcaatgttaacccgattggtgttaggagttgttatgatgagggtaagcgtgtagcagagacgctgatgttcgactatcacaggcagcatggcattgaaatccggattgccaggattttcaacacctatgggcctaggatgaacattgatgatggccgtgttgttagcaacttcattgctcaggctgtgcgcggtgagcccctgactgtccagaggccaggaacacagactaggagtttctgctatgttgccgatatggttgatggtcttattaagctgatgaatggaaacaagactggaccgattaacttggggaacccaggtgaattcaccatgctggaacttgctgagaatgtgaaggagttgatcaacccagatgtgacagtgacgatgaccgagaacactcctgatgatccccgccagaggaagccggacatcacaaaggcgaaggaagttctgggatgggagcccaagatcgtcctgcgggacggcttggtgctcatggaggatgatttccgggagcgcctgaccgtgcccaagaaaaccaaggcctaaattgccctgcagttggggaagaatatccacacggggaagcatactcatagtcgggctcgtcattatttgtggccacatttcattacggaatttgagttccaataaacttaatattcctttgtcgttcaccttgaaggattgtattattagaattttcatacagggctggccattcgagtctctgcctacgcagatcttgtggtacttgtgtttgtagccaatgtgtgagtaaaagtcgattatagcaatgttgatgccattttgggcttattgttcgctcctttttgctgcttgagctgagacaagtctcgatccaatgagagcggtactgactgtgtggaggcgccatttcccatttggtatcgatcggtctggtcctaataatggcctgtcgacctgctgaccgatcgggcgttggatggttggtaccagcatgaaccgttaccagtcagatttaaccacgtggattgttcatacatgtgtcacgttagctgtctgtttccaaaccatttgaagtctaaaagattcaaagaaaataaaaaaactaaaaa

SEQ ID NO: 13226 - DNA, 2028 bp, Zea Mays
taaaaatttgacatcatgagaagccttttctcgttgctatagactatagttctgcaagcaggattctctgcaccaactcctatccaagctcagtcatggccaattgctatgaagggtagggatatagtagctgtggcaaagacaggttcaggaaaaacactgggctatctcctcccagggtttattcttctgaagcgcctgcatcataattcaagggaaggtccaacagtattagttttgtccccaaccagggaattggcaacacaaattcaagatgaagcaatcaagtttggcagatcttcaagaatatcttctacttgcttatatggaggtgctccaaaaggtcctcagctaagggagttggagcgtggtgccgatgttgttgttgcaactcctgggagattgaacgacattttggaaatgaataaagtgagcctgcgccaagtatcatatcttgtccttgatgaagctgaccgtatgcttgatatgggatttgagccacaaataagaaaaattgtgaaacaaataccacctagacggcaaactcttatgtacactgccacatggccaaaagaggttagaaaaatagcgtcggatttactgaataacccagttcaagttaacattggaaacactgatcagctggttgcaaataaatcaattactcagcatgtggaagttatcccacatatggagaaatcaagacgacttgatcagatcttgcgttcacaagatcctggatcaaaaatcataatattttgctccaccaagaggatgtgtgatcagttggctagaaacctatcacggcagtatggtgcttctgctattcatggtgataaatcacaggctgagagggattctgtgttgaatgacttccgaagcggcaggtgtccagtactcgtagccactgatgtggccgctcgaggcttggacataaaggacatcaggatcgtggttaattatgatttcccaactggtgtggaggactatgtccatcgaattgggagaacaggtagggctggcgcaacaggatctgcctacacattctttggtgaccaggattcaaagtacgcttcagaacttgtgaagattttggagggtgcaaaccagtctgtgccaccacaattaaaagaaatggcccttcgtggaggatatggtggaagatcacgtcgatgggcatcttctgatgactcttatggtagtcagggatatggtgctaaaagatcaactgatagtttcaagaacagcagcttcggcaaccaggccgggggtggttcaagctttcactcgagcttccataacagctctagtggcaatcagttcggtgatactacaagctttcatgccagctatggtaacagcagccagaacaatcagacgggtgacaatccgagcttcccacccagctccagcaacaatcagtccggggatggtctcagttttcatgaaaggttctatggatcacgcggaagggacgagagcagatcaaacaatgatggattccgtgctaggagcagaagtcctggcaagcctgtggaagtttccaactggtgattgcatccactaggtgcaatccaatttttgcgatggtgacgaaaccaagtaaaagatggtacctcgacaagttatattttcctcttatcctgcttaaatctaaggatgtcctggaacatcactaacttaggatatgggtgatggtctgatcccaatggacaatggtctcctactttcttgatttgacgcctgagagacgcctgattccataccatatgcctgtggttgtagtttgtaaaatgttaaaaacttgactttgctagtatatttcctaatgctataacccaatcctgggtaaacagacgcatggggatgaattttggacggaaccatggacatttgatgtatgtgtttaatgttgtgtacaatctatgtcgaattctgttgtaagtgccgtccgcatcgttttatatctttgtgcccgttattacaggtcttaaagaatcatgctgcccgtatgtgactcttctcatg

SEQ ID NO: 13227 - DNA, 1710 bp, Zea Mays
ctgagacgaggactcctttcccttctgtcatctgagactcggaagcctcggccgccgccgttaccacctccttgcgccatggcggagaagtcgccggcagccgacgtggaagccggtctccttgcccacctcaactcagcgggagaggtccccgactcacgctctttcgcttcctccctcggcgtctcccacctcgaacttgagggcgtcatcaagagcctctcagctttccgcatcgtcgacagcacagacatcatcaaggagacatgggtgctcaccgaggaggccaagggctacgccgccaagggctcccccgaggcacagctcgtcgccgcaatttcaccggagggtgcctctaaggacgcactcaaggcaatattgggagatgctttcgatgttggcatgaaggcagccgcgaggaacaagtggataggtttcgagaaggggaataaggacttagtccttaggaaggttgagagcgtaaaggatgagctgcaagagcagcttagaagactagagaatggggaggttgtttctgataaagtgatcgatgatttgaagagaaggaaacttattacgaaagagaaatcaatttggtactctctaaagaaggggtctgagtttgttgtaaagagaaaaacgttggctactgatgtgacaacagaacaccttaggagtggtgactggaaggaccttgaattcaaagactataattatggagctcaaggtcaacctatagccaaaggttatgttcagcctttgatggaggttcgtgaggcaatcgagaacatctttattatgatgggattcactgagatgccaaccaacaatttcgtcgaaagcagcttctggaatttcgatgcactgtttcagcctcaacagcatcctgctcgggattcacatgatacatttttcctgaaagctccagcaactacaaaacagttgcctgacgactatcttgagaaagtaaagcaagttcatcagtctggcggttatggctccaaaggatatggttatgattggaaacgggatgaagcggagaagaatcttctccgtactcatacaactgctgtttccacgagaatgttatacaagcttgctcaggagaaaccttttactccaaagaggtattactccattgatcgtgttttccgcaatgaagctgttgaccggactcatcttgctgaattccaccagatagagggacttatctgtgattatggtttgacacttggtgatctgattggtgtattggaggatttcttctcaagtctaggcatgtccaagctgcgtttcaagcctgcctacaatccatatactgaacccagcatggaaattttcagttaccatgatggtttgaagaaatgggtggaagttggtaattcaggcatgttcaggccagagatgttgcttcccatgggactgccagaaggtgttaatgttattgcatggggtctttcacttgaaaggccaacgatgatcctttatggtatcgacaacataagggacctgtttggaccaaaggttgatttcaacctcatcaagagcaacccactatgccgattgggactgtagtgactagtgaggtcctgaaatccctactaattctaaagctctggctaagctatggaatcagggggtcagcaatgacttttctactttattttgaatgaagtcagataaacaacagtggcttagaagaaaatccac

SEQ ID NO: 13228 - DNA, 1754 bp, Zea Mays
atagccttcccattggaaagcgaacgctcacagctcacagctcacgcacccatccacctccaaagtccaaaagcggaacccacgcctgccgcaacggcgaaaccgtcggaaccctagatctctctcgcccgcgctccgaaaccccagatccgccatgcaccagcctagagctcgctacccacccggctatggctccggcggtggaggcggagccggacgtggcggtggaggcggaaatggaggaggtggcggaaaccacaactactacggccgaaacccgcagcaacaccactaccaccagcagcagcagtcgcagcactctcataggaactcttcgtaccagcaacagtggctgcggcgagaccaggcccccgccgttgcgggggcagcgtccggaaacgctgtggccaagacggcgtctcagcttgacgccgtaggctcgagctcccaagactggaaggctcaactaaatataccagctccagatacacgctacaggacagaggatgtcactgcaacaaaaggcaatgagtttgaagattatttcttgaaacgtgaactgcttatgggaatctacgaaaagggatttgaaagaccatctcctattcaagaagaaagcattcctattgcgctgactggaagtgatattcttgcaagggcaaaaaatggcactggaaagactgctgccttttgcattccggcacttgaaaaaattgatcctgaaaaaaatgctattcaagttgttatactagtaccaacaagggaactggctctgcaaacttcgcaagtctgtaaagagctcgggaagtaccttaacattcaagttatggttagcactggaggaactagcttgaaggatgacatcatgcgtttataccaacctgttcatttacttgttgggactcctggccgaatacttgatcttaccaggaagggcatttgtgtgttgaaagactgttcaatgcttgtcatggatgaggcagacaagctattagctccagagttccagccttctgtggaggcacttattcatttccttccacctagtcggcagctgttgatgttttcagcaacctttcctgtaactgtcaaggaattcaaagataaatatctgcctagaccttatgtgattaatctaatggatgaactgaccctgaaaggaatcacacaatattatgcttttgtcgaagaaaggcaaaaagttcattgcctgaatacacttttctcaaagcttcaaattaatcaatccattatattctgcaactctgttaatagagttgagctactggctaagaaaataactgaactcggttattcatgcttctacattcatgctaagatgttgcaagaccacagaaaccgagtgtttcatgattttcgtaatggtgcttgcagaaaccttgtgtgcacagatctgtttaccagaggaattgatatccaggctgttaatgtggtcattaattttgacttccctaagacatctgagacatacttacacagggttggccgttctgggagatatggacaccttggtttggcagtgaacttgatcacttatgaagaccgtttcaacttatataggattgagcaagaacttggaacggaaattaagacaatacccccacagattgacctgtccatatactgccaatgatatgtgacagtttcaatgagcatcggacacattttatttattttgagaacatctgtacatagcaacccatcaagacagaaactccggcgccttatattac

SEQ ID NO: 13229 - DNA, 3322 bp, Zea Mays
ggttagagctacatattcttttgaatgtagatcgcatagtaagttctctggtatttatgcggctggcgatgctgttggtgccccagcgcgtcaaagggctccggttccaaaatggttgaaatgctccactggtgcatcttttggctttggtggtaaacttgtttctttccatccggtggcacccacccaaggtgcacaagcatctacatctgaggtgcatgtgcacaatttggtgattgagcaaagtctggtgagccgatcagctgagtttgaagatgctattctgaatggcgacaaaagttcgctgcgtgctctgtgtgaaaaaaaatcacaagaatctttgtatgtacatctcctttagtagaactactgacatttgcatgaagactaactttatgcgatgcctgcttgatcagatctgatgaggagagagaaacatggggcttcttgatgattatgtttgaggacggggattttgtaaggacaaaattgcttgctcatcttggcttcgaaccacctcaggcaccacctgcaagttcacctgatgaattgagccaaacattggcagatacacttaatcttgatcacgccacaataaccgattatgcagatgcccaatttcttactgataacggggatgattttttcaacaatcctcaaccttcagaggctagtttggctgaagatttagtttctacaaatggtcaacagacagagcaggaaatgtctggagatgttgtgccgtcagatccatcaattgacaaaagtattcagcatgcattggtggttggagactacaaaggggcggttaaccagtgtctttctgctaatcgtatagctgatgctttggttatagcccatgccggtggttctgctctctgggaaagcacaagaaatcattatcttaaaaacagtatctcaccttacttaaaggttgtctccgctatggtgggcaatgatttaatgagttttgtaagtacctggccactaagttcatggaaggaaactcttgctctgctttgcacgtttgcacagaaagaggagtggcatgttttgtgtgacacgcttgcgtctagacttctaaatatcggagatacactagctgcaaccctctgttatatttgtgctggaaatattgataaagctgttgaaatatggtcccgcaccttgaaatctgaagatggtgggaagatttatgttgatcttctccaggatttgatggaaaaaaccattactctcgcccttgctacgggccacaagagatttagctcatcactgtctaagcttgttgagaactacgctgaattgctggctagtcaaggtcttcttaaaactgcaatggagtatttaaaactgttgggatcagatgaacattcaaatgagctggcaattttgagagatcgaattgcatgttctatggaagagaatgataatgctaggagttatgtttctgaaagcaccgccactccttccctttatggcacaaatcaatcttatacagccccagaccattctcagaatgtttaccagcaggtacctcagccatacaatgtaccaagtaatacatattcagaagcttacccacaacaacctactggcgcctatggatacaacaacacatatcaacctcaacaaccaacccatatgtttgttccacctagcgcccctgccagctctcagcaacagccaggcccttcacctgtaccagtgcctcagcaaacagtgaaggcatttactcctgcgaacccagctggtctaaaaaatccgggacaatatcagcaacctaataccctaggttcccagctttacacgggcactgcaaatcaacagtatccttctggaccatctgcttcttatccaagcggacctccaacaacatttcatcagcctgtatcacctgttcaataccagcctgttgctccaccagtatcttcttttggtccgagcgctcctgtaccagcaacagtccctaaccagatgtttccccattctgctgctgctaactcaacttcaaggttcatgccatcgaacaatcaaagctttgctccgaggccaggtctaagtcccgcacagccctcaagtccaacacaggtgcaggcacagccagctcctcctgcaccgcccccgactgtgcagacagctgatacgacaaaagtgtctgctgagttgagacctgttattggtacactaactagactattcgatgagacgtccaaagctctgggaggatcacaagctactcaagcaaaaaagcgtgaaattgaggacaattcaaggaaaataggggcattgttttcaaaactaaatagtgatgacatatctccaaacgttgcatcaaaactcaggcagttgtgcagtgcaattgatgctagcgattttgccactgcgatgcacctccaggtactcttaacaacaagtgactgggacgagtgcaacttctggctcgcggcattgaagcggatgatcaagacaaggcagaatttcagaatgtaaaccttgtggcctttttctgcagccagttctgtacacaccttttttctgctgcttgccagaaatgatagctgtagcagttcagagagtttgcctgcacaggggtgttatcatgctgctttgttctcggcccttgattctgcctaagcgctttggtacctcagtgctgttatacattttgataatagttttttgttttcgacatctgctataaggtgacctgcggctgggttgttcgttatgaatgttaattgtaagaggacacttagtctgttatagctggtggatcacctgtttcaattcttcctcttagatttcgtcagtttggacattccaagaactctagatggttaatacaagtgacagtggcttgttttttttttttttggtaatgccaacagaaatcaataaacttctggaatcctgaggtctgtgtttcttgctggacttcccagtcccggttttgctcttcgtgtatagctgctctgatctttatcgttgtataaatgtaagtccgcggcggttttactgatatggatggttattcagttccgcggcaggtgcagcttgccgaactggcgaatcgaatcgtgcgtgtttgagtctggtaatcatctcagcagccattgaccactcccaccccacatcgcagccgttgactttcagcggcgggagtagatgaccgttaaaacttgcgaatccggccgggttcgggaatgattgcgaatgtgctccggtcagcttccgacagtacgaggcacttctcttctcggccgccacgcgtccaccactgcccgtttctccacggccggcctcggcgtggcgtgcgcgc

SEQ ID NO: 13230 - DNA, 1216 bp, Zea Mays
cctcgtcgtgcttggtcgaccgtagacttgcagtccccgtcgtcctcgctatactgtagttgcgctgacttgaccacccattggccacagcagctgaaccaagttcaggcagtttcgtgcccttttcttctccaccagctcaaagctgaacgcggcatccttcctttcctcccctcttctgcccccatttcgttcctttcacaccggggaccggcgagcagagccgcgcacagcagaacgcggaagcaagaggaggcgatcgactactcgaccagccctctccgtgtctccgatggcggctcgcgtcctcgcggccctcgcccttgccctcgccctcgccctcgtcgccgtacccgctcccacgcgggcgtccaacgacgagggggacgcgctctacgcgctgcggcagcggctgtcggaccccaacggcgtgctgcagagctgggatcccacgctcgtcaccccctgcacctggttccacatctcctgcgaccaggtcggccgcgtcgtccgcctggacttgggcaactccaacgtctccggctccatcggccctgagctcggccgccttgtcaacctcaaggagctgtacaggaacaaccttgacggcgagatccccaaggaattgggcaacctcaagaacctgatcagcttggatctgtatgccaacaagctcacgggaggaatccccaagtcactctccaagctcgactcactcagattcatgcgcttgaacaacaacaagcttacaggatcaattccaagggagtttgccaagctctccaacctgaaagtcatcgatttgtctaacaatgatctctgtggaactatccctgttgatgggcctttctcaacctttcctctccgaagctttgagaacaacagcaggctcaacggtccagagctacaaggattggttccttatgattttggatgttagatgccgatcaacaatgtaccaccttccccagttgaaagggggaaagacaagatagtattatcaatagaaacctagcttcaagaatgtcgtgactatatatatgtatgatattaagactagatttgataagggtggcatagcaagtcctgatattctgtgtgcattcagaatagctgcttttatgcccttgtgttgatattttgcaaaccaaaacaaactgttctgaaacgagggcacatattgttcatgaataaatttgagcctccaatacataca

SEQ ID NO: 13231 - DNA, 3421 bp, Zea Mays
gtttctgcactgttacgattcgcctagtactcctctccttcaccttgatgtgcctcggaatctgatattctatttttttcagaagctaggtagtactacctcgaaggggaaaatcgtttcttttttttcactattattttctttttgggagtgaggtctctccccctgtgggctgtgggctgtgggctgtcactgacctcttcccttctgtgtccgccaatttatctggtgccctgagctctcttgtgtgtgatctgtgaatcactgaatccttctcgccaacagcccaacacatggaaaagagagctgcagaagcagacgcctaaaacatggccgcagtatgctcctcattcacctgccgcgtctagtatttcggaaatattttgtatttattaaagcaggagagggaggcaagcagcagccgaggccgagctatctctctatttccccctcgcccagctcagatccgaagcctgaaggaaatcgcgccaacaggccctagccccagatgcgcgccgccgcttgctgcctgcgctgctgctactccttctaggggtcttgcggcgatgctgggcgtcgagcccgagagcggaggcgccgcgtcctcctccgccgcagagaattttgacgctggccagtacgccttcttcgggaaggagccactcgaggggttcgagctcgggggtttggaggaagccggcagtgatggcaatggcggtggattcagcgggccagatgaggggctgtaccggctaaactcggttggagacgagattgacgatcagagtaacttgtctgacattgatgatcttgcaagcaccttcgctaagttgaaccgaagcattagtggaatccggaatcctggtgttattggggacaggagatccatttcaagaggaagttctttaactcttgactggcctgaggatgtggagttttcaaactgggtagatcaagatgtatttgaaaatgaggaattccaggaaagtaaaagatggtggtcatccaattcttcagtgcagcaaggggattccaactccagaccactaagtcgaacatcttcctaccctcagcagccactgcagcaccggtcaagtgaacctatcgttttaccaaagacttcttcatttacctcatttccaccacctgttgctggtggtggtagagccccttaccctgctcaaggccttacacgtcatgggagcattccatcaattggcgctgggctccaaatgggttctccgagcatgtcactttctgcttctccatatcatatggtcggaccatctcatgggctgccatacacgggaggcatgccttatggtgctcttaacctgcctgtaaacaatccagtgcagaatgattggtcgaatcatgttaaccctttcactggggagcatcttaatctactgcccaatttattgcacaaacaattatcacttcctaatagcccaatgtcgtcactcctattttctcagcatcagcagagattggcacaggtccaatcatcccatcagaattacctcaatataatgccacacgtcctatatccccatcactccgcagagattacaagcaggtttggttctgttggcagttcccattcatcaagagacaagagatcaaggtcggggaagggaaaacataacattcgattctctcaactaccatctgatactggtagccagaatggtgacagcggaggtataaagtttagatccaagtacatgtcatctgaagagatcgaatcaatcttaagaatgcagcattctgcaagccacagcagcgatccttatattgttgattactatcatcaagcttgtatggcaaaaaggggtgccacttctaagcaaaagaccaatttctccccaacatcaatgaaagatgtaccatccaagtctcgatccagcagtgatcagcacacatatcttcaggttgatgctcttggaagagtatctttttcttccatacggaggcctcggtctcttcttgaagtcgaccatccttcatctgctgatggctctcatgatcagaagtccactgtgaggcccctggagaaagaaccaatgcttgcagcaagagtcactgttgaagacgccctttgccttgttcttgaggttgatgacactgaccgtctgttgcagtctagccagtcacaggacaacattttcgaactgaaacgaagacggcaagtcctcctggaaggtctagctgcatcattgcagtttgttgatcctctcggacccagcaaatctggtcattcatctgggtcagccctgaaggacgatgttatttttctgcgcattgtttctctgcccaaaggacgtaagtttttagcacgttaccttcggcttcttgtccctggcagcgagttgacccggatagtatgcatggctatttttcgccatttgaggttcttgtttgggggtttgccatcagactctagtgcagcagaaactacagttgctcttgcgaagactgtttcatcttgtgtgcatcacatggaacttggtgctcttagtgcctgccttgctgctgttgtttgttcgtctgaacagccacctctgcgccctcttggtagctctgctggtgatggggcttctcttgttattaaatcagtactggaccgagcaactgagttactgactgatcgccatgctgcagccagctacactgtgccaaaccgtgctctctggcaggcatcatttgatgctttctttgggcttctaacaaaatactgtgtcagtaagtttgaaagtatccaacagatgtttgtcacacagacaccgagctcaggaatcggacctgaggcttccaaagctactagtaaggagatgcctgttgagctacttcgtgcaagccttcctcatacaaacgagcagcagcgccagcggcttcttgattttgctcagagatccatgccagtaacaggtttcaatccctcaggtgctagaggtgggcacatcacttcagaatctgttcctggatgatgtaactgaaggagacacacaagggcaaagagtcaatgcttttaaacattgatgagatggtcttcagctgataattgttgtatctgaagacatgcatgccccattataagttgtgagcgagcttggagaagttccgattgctcaggaaagtagccttcacttcaggttgtgacgtaagtttaggtttcagagtaatcgaatagaccagtgaaatgttccttatgtgggtcatttaatatagtacccacctgatgatatcataatactggaacaggaaatgtaccccttcacatttctactagagtcgatgttcttcgtaggccattgtggactggtttgcacatttactgggcatgtatttgtttatattctgacatactgttattgagctactcctgtcctgggtcgggctcttggcttctaaaaaacaa

SEQ ID NO: 13232 - DNA, 2189 bp, Zea Mays
gatagtctttgaagaagaggctggttcctggaagggaagaatgagtgccgtagtacagatgcgaggatcaatccctctcttttggtcacaagaggcatctcgacttagtcctaagcctgatatttttgtgcagagatatgatcccacatatgaagcaacaaaattacattttgatgatctcgcccggcgatatggacatcctatcataatacttaatttgataaagactgttgaaaaaaggccacgtgaaatgatgctcaggcgtgaatattgtagagctgttgaatatcttaatcaaaatgtcccagaggagaagaagttgagattcatccactgggattttcataaatttgctaaaagcaaatctgcaaatgtactgggtgttttaggaaaagttgcgggtgaagcactggacctcactgggttttactacagcggaaagccaaaagtccagaaaaaaaggttaattcagcttagtcgaactagcactgcaagggatggctcccttgatataagggccagttctggagatctttcaaggctcagggatggctcccttgatataagggccagttctggagatctttcaaggctctctagtaatgctgaggcacttagttctacaggctttcaagatatgagaaatcaggctaacaaacaagagtttcttggtgatactccctgttaccaaactggagtgctccgtacaaattgcatagattgcctggatcgcacaaatgttgctcagtatgcatatggccttgctgctttggggaggcaacttcatgcaatgggactgacagatgttttaaaaatccaccctgatagcagcattgcttctgctttgatggaaatgtaccagagcatgggtgatgcacttgctcatcagtatggaggatctgcggcacataacacggttttccctgagaggcaagggaaatggaaggctactactcagtctcgggagttcctgaaatcaattaaacggtattacagtaatgcctacactgatggtgagaagcaggatgctataaatctatttctggggtattttcaaccacaagaaggaaaaccagctctttgggagctggatactgattactatcttcatgtgacgacagctggggatgatcttatgtctgatagctaccacttgagttctgcacctggaaataatgtgttcgtggggtctggagctgcattgaaccctgggaccatattgagccctgtcccagcatgcaaagaggatttctcacggaagaagcttacttcgttcgacaaacttatagaaagaacatgtagttctataaggaatgtaaggcttcattgtgacgctgatctaaagccaagtggaggtgttggaacttctggaatggcaccagatgcagctgagatacagcttaaaagccccaactggttgtttggtcaaaggaagcatacggagacaatttcaaccgcaagagttgccccggttgaaaacgtgaacgaggggaacagagacgagtcaaatgtgtctctttgtggggaactaatttggctatcctcctcagttgaatcatgcgaggaggacattttcagaaggtaccttgcattcacgacagcggatgtagagaatggctggtatggcggaacactgctatatgaccgagatgaaaacagcggggcttacaggcactattctgagctctgccagggagctgtcatggatccctttgagcatgaccctgagaaagagcggcactacgcggaggcccttagcgtggatctcggcgatgcacgggtggaggccgaaatgcaggccgcgctggatgactaccaggtcatagggtcggacctgagcatcatcccttcgtgcggagcactcgcagaggacccgagccagctgacgaggtggatcattggagatgagaggctgcttgtgggtgctgctgcgcagtagaccggtggggttctgtcttctactcttctgtggaaggttgtacagagcaacagattgccattcaccgacccagcctttgtgttttatagatacttccctgaaacaattactccatgtatttagcagcaggtgttttatagacacttccctgaaacaattactccaacacgtgcatgcaatttattgttgtgcagcaggtggtattgctgctgggattagctttggcaataatagttgattgttgtgcagc

SEQ ID NO: 13233 - DNA, 1266 bp, Zea Mays
aagccgtggccagagccaaacgagcagattctccgcgccgcgtggcacgaggcggctgcgcccgctatcccctcgcggataagccggccccgctccggcgagatcccttaaactgccgtgcaccgcgcaccacagatcccccacgccacagcttgcgcccgcaatggcactcgtctccgcctcctcgtcctccaccaccgccgtcacggcgctccccaggaatgggcagcgggcgtcgtcctccttcctcggcggcaagacgctgctgagacaggccgaggcggcccggccgtcgttcgccgtgcgcgccgcggcggaccccaacaggccgatctggttccccggcagcacccctccgccgtggctcgacggcagccttcccggcgacttcggctttgatccctggggcctcggatctgacccggagagcctgcggtggaacgtgcaggcggagctggtgcactgccggtgggcgatgctcggcgcggcgggcatcttcatcccggagtttctgaccaagatcggcgtcctcaacacacccttctggtacaccgccggcgagcagcagtacttcaccgacaccaccaccctcttcatcaccgaccccatcttccccagcaacaagctcaccggcaccgacgtcgggtaccctggtggcctctggtttgacccgctcggctggggcagcggctcgccggagaagatcaaggagctgcgcaccaaggagatcaagaacggacgcctcgccatgctcgccgtcatgggcgcctggttccaggccgagtacaccggcaccggccccatcgacaacctcttcgcccacctcgccgaccctggccacgccaccatcttccaggccttcacccccaaatgaggagttgaacttattattagcattttgaggagtgctaccacacatgcatcgtcaggttgatggccgatatatatgaaacttcacattttttttggtggggaaggactgctgagtagactgtcaatgatggaatgctcgtggtgcgagtgcgatgcatggtgtacttgtactatgttgtaaccagtgtaaaaaggggatactcgttagatgttatgccatgttctctgaatcaacggcttgatgatttgtgcaacgcttacaatcgttttgggtgataaagggcagtcctaggctcccagcctgaaaatcatttagcgcaaaatcatttaggggttgttcgtttatgccaatccatagaccttgttcagttatctcaggatttcgaaagggtt

SEQ ID NO: 13234 - DNA, 790 bp, Zea Mays
gccgtgtataaaagggccctcacttcggacaggtcactgctctaactccaacctacccagcctcggccagccacctccccgtcgctctcacgctcttcgtgcccgccgcctcccctcttcccctccacctcactcctcccgtctgacgcacatggcatccatcgccggatcttccgctctctccttcgccatgcctgtcaaggcaatcaactcaaattctctagccttctccccggtgaggaagggtaacacattcctccgcctgcaaccagtgcctatgagatctgtttcctgcgctgccaagaaggatacggtggacaaggtttgtgaaattgtgaagaagcagcttgctcttcctgaccacactgaagtttgtggtgaatcgaaattctctgaacttggtgcggattcgctggacacggttgagattgtgatgggccttgaggagcacttcgacattagcgtggaggagtccagcgcgcagacaattgccaccgttgaagacgccgctgacctcattgacaagcttgttgctgtgaaggcataggccgcatctcttctatcattgtcttaccactctaggtttctatggtctgaagacttgtgattttctccgcactgctgttgctattcccgtgtcgtaataatacgagatgttttaagcggctgaacacacggtggtgtaatctgttactggtaaggtgcattgttgtatgaattgtttctcacccagaagaaccagaccatcggggattctagcatcatatataagaaatgaaataaaaaaata

SEQ ID NO: 13235 - DNA, 1396 bp, Zea Mays
cgagactcgggaagaatccattgcgtgttccaaatccgctggcgtagcgtagaacacagcatctccggtagcgtcaccgtaggcctcgcaagtaaactgacctgccttctccgctttcccctccgtctccgtcgggagtcgagacaaagggagccagagttagtcccggcgccgtgtcgcgagcggaaggagaaggactgaaggaggcgacgatgcaggtgaagcagaaggtctacgagttctacaaaggcacggtggagcgggtcacggccccgcgcaccgtctccgcgttcctcgagaagggcgtcctctccgtccccgagttcattctcgccggcgacaacctcgtcgccaagtgccccacctggtcctgggaagcgggcgatccaagcaagaggaagccgtatctccccgccaataagcagttcctcgtcacccgtaatgcaggagcagaggtggttctcgatgaggatggcgaaggctggcttgcaacacatggagtgcaagcatcaaagacagaagaggaggaagacattccctctatggacaccttggacatagggagatctgatggaataaagtctatcccctcttactttagcggtggcaaggatgaagaggaggaagatatacctgacatggatacttatgaagacacaggggataatttggctgctgctgaaccatcatactttatcgcagaagaaccagaagatgacaacattcttcataccagaacatatgatgttagcataacgtatgacaagtactaccaaactccacgtgtctggctaactggatatgacgagtcaagaatgccattaatgcctgaacttgtgtttgaagacatcagccaagaccacgcacgaaaaacggtgactattgaggaccatcctcacttattggctgggaagcatgcatcagtgcacccatgcaaacatgcagctgtgatgaaaaagatcatcgacgttccaatgtcggggggagtggaaccagaagttgacaagtaccttttcatatttttgaaattcatagcgacagtcataccgactattgagtacgattatacaatggacgtcgaccttggcagtacaagctgattattggttggcttgaagcttgtcacttgtctcgggaaaaggaagcaccctaccagaaggcgcaggaagaaggctgaattgcgtgtttgtggttgaacatttgtgcatatgtgcttgttccttggatcggtttgcatttgtgaacaaactctgaaaagctcaaaggcaagacccatcttgtacattctgtgacgctgtcagcttgtgaatccattcgttaatataaatctcaacaacccgttcggcgtgcgtgggaactactggtgcaataataatgcatccgatcagggcaggaa

SEQ ID NO: 13236 - DNA, 159 bp, Zea Mays
gctaggttgtctctttcctgctcatggattcagcaggtagttcaaaaggttcacctatttgggaatctccgggtctatgcttattttcaactccctgaagcatttcgtcacttgctacgcccttccttgtctctgggtgcctaggtatccaccgcaagc

SEQ ID NO: 13237 - DNA, 364 bp, Zea Mays
aaaaccgaatccaaataatcgccaccgctctccgcaccgaatcgaagaaagcggcgatggcagcggagaagccggctccggtgcgcgtgctgtactgcggcgtctgcggcctcccggccgagtactgcgagttcggccccgacttccagcgctgcaagccctggctgcgggcgcacgcgcccggcgtctaccccgacgacctcgtcgccggtccctcctcgtccggcggtgcgggtggcgacagggacgtcgacaaggtcggggagcgcctccagggcgtcgggatctccgacggctccagcagcgccgcaggggatgcttccgcgtctaagcccgaagaggtcaaacgcctgcctggtggtaa

SEQ ID NO: 13238 - DNA, 838 bp, Zea Mays
cacttgcctcatctccgccatagctggtgttgatggcacagaaaattgcaaaggaaaagggttattctgatgtcctctacttggacgctgttcacaagaagtaccttgaagaagtttcttcatgcaatgtttttgttgtcaaggacaatgttatttctaccccagcaataaaaggaacaatattacctggtatcacaaggaaaagtataattgacgttgctttgagtaaaggcttccaggttgaggagcggcttgtttcagtggatgaactgcttgatgctgatgaggtattctgcacaggaactgctgttgtggtgtctcctgttgggagcattacatatcaagggaaaagagtggaatacggccaccaaggtgttggcgttgtgtcccagcagctgtacacttcactgacgagtcttcagatgggtcaaaccgaggattggatgggctggactgtgcaactgaattagttggccgtggttcgtggatcattcccaacagatgatgggttcgcaagatccaaatctggaggatcacaaccatgtgtacctcttcggttacagttttgtagtgtcttatgcgatggcgtcctgctgtatatttcttagacggtatttaaaccataaaacagtattcgtctgtacgactgtacccttcagttctgtagcatctgccggagacgagtactagttttgttattttctttcttttacaaaccaagaacagttctatagttttattgtagacactggaccatcatatgatctcaatgggtagctttttcctttttatatttaaaaataaacagaattttaattttataaattttatattttaa

SEQ ID NO: 13239 - DNA, 954 bp, Zea Mays
cccagatcttcgtcctgtccttctccggcaacgaacaggcagagttacttgacccagcagttaagggaacactcaatgttctcggttcatgcaagaaagcttctattaaaaaggtggttgtaacatcatctatggctgctgtagcctacaacaggaggccaaggactcctgaggtcacagttgacgagacatggttttctgatccacaaatttgtgaaacaaatcagcaatggtatattttgtccaagacgctggcagaggaggctgcttggaagttctcaagggataatggacttgaaatcgttactataaacccagcgatggttattggtcccctgctgcagcctacactaaataccagtgctgaagcaatcctgaagttaatcaatgggtcatcgtctacatatcccaatttttgctttggatgggttaatgtcaaggatgttgccctggcccatatccttgcatacgaggttccctcatcaaatggaaggtactgcatggtggaaagagttgttcactactcagaactggtgaacattatccgcaacatgtatcctacccttcctcttccggacaagtgtgcagatgacaagccgtttgtcccaccctaccaagtatcaaaggagaagataaaaagcataggcatcgagttgattccactggagacgagcgtcaaggagaccatcgaaagcttgaaagagaaggggttcgctagtttttgactcgagcaagctgtgaaacataagtgttactgtactacgtgatgttgcattgtatacatgcatcggacttcgcagttcccaagctattttggtagctttggtctgtaagattacctaaaataaactgagccacgttgccacgctgtagcttttggacatgttatgctttgatcggattgagacacgtgatatatgatcgttgcttacaaatgtggtacgctctatctcc

SEQ ID NO: 13240 - DNA, 93 bp, Zea Mays
ctcagggtcttcaacctcgtggaactcgaatagctagattacttggtcgccgaagcttggccatcgattcctcgaagctcggaaatggatcgc

SEQ ID NO: 13241 - DNA, 1440 bp, Zea Mays
ggtaatggcaatcaattttttaggcaagatcttggtcgctggaagggtcacttaagttgaagaacttgtttggctatggtgacatctgggatgcatcaggatcctttggttgggaccaaacaacagaggttggtgttggagtctgcctaccgaggtttaaatcaataccaacaccattgatggctcgggcatctttgtcatcacaagattggctgaagttttcatcatacaaggagcgcctacttggcctttcatttggtttgctgtcaacaaggaaccatgacttgtcatacaaccttgcgtggcgtaccttaactgatccatcacgtgtctcatcaaaggccataaggaggcagttagggcataaccttctttctgcattgaagtacacatacaagattgataagagggattcacatcttaggccaacgaaaggatatgcgtttcagtcaacttctcaagttggtggtctatggaatagcaaaggattgagatatttccggcaggagttcgatgtacgtggtgctgtgcctttgggattttatagtgctgctctcaacgttggtgtaggagcgggtgtcattttaccgcttgcagggggattcatgaattcgacttcatcagtgccagagaggttttatcttggaggtaattcttctccagtgtgcagcttgggcggaccgtcatctctgctgggtttcagattaaggggagttggcccaacagaggcgcggaggcatgtccttaataactcggagagtggctcggctgaccctggaagggattacttgggaggtgatctggccgtgtctgccttcgctgacctttcttttgatctgcccctcaagatattcagagacgctggaatccatggccacgcattccttactgctggaaaccttgcgaaactgtcggagggtgagtacaagaacttttcggcttctgaatttcggcaaacgttccggagctctgctggcgttgggattattttgcctaccaaacttttccgggtagaggtgaactattgccgcatcctaaagcaagctgagcatgacagcgcgaagactggaatccagttcagcttttcctcgcccatgtaggaacttgccatggcagccgaaacagctgcactttcctctgtagacttgcatttcttcccgttcttttcatgctgaagcaattgaagaggttatttacgtgctcccttttcttgtgacgcttgttcattgacacgaggagctgctccttttttttggtgtcttcaggagatgggtttattatttgctgtttttgacctcacgagggatttgtcctcgcacaactcaaataccgatgctgtggctacacaatggtggatagaataatattttggcccataatgttgtataattcataccacatcagctttccgtgtcattcgctcgtttattcgcgtgtgtt

SEQ ID NO: 13242 - DNA, 1386 bp, Zea Mays
cggcgagatgcggatttgtgcgtttggagtttgggaggaagtgttccacctgccaccaattctcgtctctcacctctatcacatgaaccggctgatttctacaatgtggacattcctctcgactcatcaaaggatctgaagaaaaaggagaaagaactccaggctatggaggctgagctaaacaaaagagaacgggaattgaaaaggaaggaagaggcggcatcccgagctggcgttgtgatagaagagaaaaactggcctccctttttccccctcatccaccacgacatttccaatgaaatacctatccatctacaaaggatgcagtaccttgcattctcatcattcttgggattgatagcgtgtctcttttggaatgtcatagcaactacaacagcatggattaaaggggaaggtgttatgatctggctgcttgccattatctacttcatatctggtgcgcctggggcttatgtgttatggtatcgacctctttataatgcaatgagaactgagagcgctttgaagtttgggtggtttttcctattttacatgattcatataatattctgtgtgtgggcagctgtggctcctccattccctttcaaaggaaaatctttggctgggattttaccagcaattgatgtcataagcaagaatgctattgtcgggatattttacttcgttggatttggcttgttctgccttgaatcacttctgagcatcggtgtcattcagcaagtctacatgtatttccgtggaagtggaaaagctgcagagatgaaacgtgaggcagcacgtagtgctctaagttcagccttctgatgaacatagggcggtctgattagagcagtagatggataagggaagggaacgagatgtgccaattaagccacgcggtcttgtacatcactgcagtacgtggatttggatcgctgaaagcgtacagctgatcgtctttttgctcttctgtaaaatatgaacaatcatcatatggtccggatgcgtcagggtgttggtttcatttcttgccatggtttagatgtggttgatagggaaaacggtgaagtatttttttggagcagcgaatataatgtatcttcatcgtacttttacatgtgagtgtaatagcttatttcttgtggtaggaatacagctttgctgtgttttcgggaatgacatttgttgtgtaaggttattcacaatggctatttcataacactctttccaatactgccacattatcaagagtgtcatgaaactaagaataaaaaaatgtctcttaatacaaaatttcacttcactatttcataaattagcatactaattaaatgctgtaactaaatagccaataaaaatcagtaaaacatgtgaagataaaacaaa

SEQ ID NO: 13243 - DNA, 1563 bp, Zea Mays
ttccctaactgccatgtcgcgatgtgtgttgtaagaggctgtggcggatgctaacaaagcaattgagcttgatcctatgatgcataaagcttactaccggaaaggtgctgcatgcattaagcttgaagaataccaaactgcaaaggctgctcttgagttgggttcttcttatgcatcaggcgattcaaggtttgctcgtctattgaaggaatgtgatgagcgcatcgctgaggaatctagccaggcaccagtaaagaatgttgaggctactgtggctgctactattgaggacaaggaggatttcacaaatatggagaatacaccaccagtgatagaacccccaagcaaaccaaaatacaggcatgactactacaacagtgccacagaagtggtactgacaatatttgctaagggtgttcctgctgatagtgtagtcattgattttggtgaacagatgttgagtgtatccattgaagttcctggtgaagaaccataccattttcagccccgtctgttttctaagattatccctgagaaatgcaaatatcaagtcttatccaccaaggtcgaaatacgccttgcaaaagctgagcaggtgacatggacaaccctggattatagtggaagaccaaagactgttccccagaagataagcacgccagctgaaacagccccaagaccttcatacccatcttcaaaggcgaaaaaagactgggataaactggaagctgaagtcaaaaaggaggagaaggaagaaaaacttgatggtgatgctgcattgaacaaattcttccgtgacatctacaaggatgctgatgaagatatgcggagggccatgatgaagtcattcgtggaatcaaatggcactgttctctcaaccaattggaaagatgttggagcaaagaaggtagaagggagcccccctgatggtatggagctcaagaagtgggaatactaaagtttggactgcccatcttttgtaaatccaggtcttggaaactatgacctaattccgtccacccatagtgccatgagcttgcttggttaagtctctgcttttgtaagctttctgtatgacagtctagcgtgtgtctgagtgctacttgccgtagcttttgatggacataggtatgctattatgtggtatcgaccgggaaccatctgtggtatcaaagacagcaaactataatgtatggaatgcctattctttttggtctaagatgtttttcttgtcagcgtagtgtgatcttcacaactgaataatagaaactatgcagggacctatgttacagtggtccaccgttggcacagttgcatttgcgtctctttggtggatgaattgaatttatgggaaaattgatttctacctggcatttatgcatcggcgttttacttggtttcaggtttcaggtatgttgcctggttcatgcgctcaatacagccaggtggcacctgaattataggagtacatgtacaaaactcaatgcgcaccgacttctcggagattacgcaagcacgatatacaacggaaattcatcagcccgttagttttcggggtcctgt

SEQ ID NO: 13244 - DNA, 1101 bp, Zea Mays
gtgggctaatgttaaaaaagctgctctgtctctgcaaggatgctttatcatgttgctcaacctaacattgttgctagagctgaatccgaggaagatgctgctgcagctgaggttgttgaaggggctgatctaggtattgtgggtgatgatacacaggtttccagtgatggacctttaagtcctgctcctggtgtagagacagtagttgtcttcccaaaaaatgctggcaaaattgtactagcaggtgaagaaactgaattactagttggtctgcaaaatgacggtgaatcaattttgaatgttgttgctgttcattcaactctccatcttccttttgaccacaatatgtatggccagaaccttactgttcagaatttcttcaattcatcagttcctgtttctgtgcaagcaaccttcccctacaagttcgttgtgagcaagttcttgcagcctggagcatatgatctggttggttacatagtgtatgagatcgaccagcacccttaccagaatgtattctacaatggcactatcgaggttgttgaggctggaggcttactcagtgttgagtctgtgttcctcatcacccttggatttgcacttcttggtctgtttggattgtgggcatatggccaggttcagcagctctcgaagaaaacaaagaaggcacccaaggtggagctcggaactggaacaactgatgccaacatcgatgagtggctggagggcacttcgtttgtgcagagaagcaaatccaagaagaagcagacctgaggctctccaggctagttaaatccttttgaggatctagaatgagacatttgagggtagcccttcacaagtgacttttgcagaaagatagatgcgtaaggaggtgctgaaaaccgtaaacatcttcgttgacattttcgaccttgtgtactttacatggaacaaaattttgttaaaagaaagtatatgctgttgccgctgtggtttctgatcttattcgctgcctttgtcatttttcctgtcatggtcaccccaggattttttctttgtttcggtagtttagccgaagccggttggcaaaatgaaattgttaatgaaattgttttgttc

SEQ ID NO: 13245 - DNA, 751 bp, Zea Mays
tttcttatagcataggaccaaagactgtagaataagcaatggatcgatcttgcacgagttacaggcgtgcaaagaactaacaaagagctgccttctcctgaggtttcgagcgcatctgaaatgccactgctagaatgtggcacggcagaggtacagaatgcggacgacagcagtaaccagtcaaatgacttgacataagttatcgcgcagtggccatacaaaacacagagcagcttccttccatggcacaccgtatactagacaaaccgtacatgcatataaatgggactgtcttcttagagccaggctgtgaagcttagccatcgcgtcatgtggagagacgaatctgaaatcctgaagagtaaagcttttgaagactttcgacttgttatgatcacagccatttttacacaccatcatggggtgaataccgtttgtacattcatagaggagacggccgaagaattctttggagcacgtacagcattttacacgtgaaatttgttcagaaaacattactggagattgtcacatggcaaaaaggatcaggatcgttgcttgtgaattgtgatgcaccttgtatgcaatgcacttgaatccagagtgcacgtgtgattttattgtctgaacgaaccgtgcgacggcctgatgtttcctgtggtattgctgtggtgtgatcaaactagtccctatgtttccagtattccacgtttgcctttccaacgctggtgagtcagtgagtggtgaacca

SEQ ID NO: 13246 - DNA, 456 bp, Zea Mays
atatcatgaattgctagtgattcagctggaagaacaaagaagcagctgatgatccaagtagcagagctagttcccaagcatcacggaaggacaaagaagcaggagccagcgcccaatcccggtggcagttcaaagaacacaaaaggcgggaaaaagaaaaagtgatgcagtatcattgtgttgttttttattctgttcgtcatcatacactaagcttctgtgaaaaagaaaaagtcttggacgttgttgttatgttgccattatgccatttttcatgtataagaacttactaagaatcttccattgactcggtaaaatgcaacataaaaaaatggcttcgctagattaaagggccctttgacaaaggttcgccttctctggctattttgtaattcgtctgacaaaacaggttcttttccctatgtttcgtaagttagattttcttacgtagtgtgt

SEQ ID NO: 13247 - DNA, 85 bp, Zea Mays
gcgagattgcgtcccttggtagacgaggccttgacctgaactgtgcccatcagtctttgcggtttgtgctgagggtggttaccag

SEQ ID NO: 13248 - DNA, 906 bp, Zea Mays
cacaataactatcaacctgtatgaactaaaaatacgacaaactcttgatcaaagattggttgctgcacagcaagaaattgcagcagccgagaaagaaaagcttgaaaaggaggttgctgctcagacactactcaatgaacaggaaaatatgatgaattctattgttgaagaatcgagaaaactgcagaaagaagctgaggagaacctgaagttgaaggaattcctggttgagcggagccaaattgttgatatgctgcaaggcgagatgactgggatctgtgaggatgtttcgttgctcaagcgagtggtggatgagcgcctatcattgagcaagttgcagccctcagctatgtcaagcctctcttcttcactgcattcttctcatcacaagagctggacttcctctgataggaccaccgaagccaatgggtctctagataagcacacccttgctgaacctgcaagcccagcgcgcaaagatctgaatggcgacgagtgcactgtgcaggtgtcagatggcaacgacactggtaaaggcgttttgaagcgtgtggattccaaggacggcgatggatgggagctttgctgaaggtgttcaggaatagcgcggttgcgagtggatgctgaagcatagaaattactataaactagtaataatggtgaataaacgtttactagtgcgttgctaatctagtcgtaatgtgggaactgtgtcgtggaactgactcactagctcaccgcagtagtatgtgggatgggtccaactgcagcttgacgtggtatatataaatgtgaagaattcagctgcccctgctcctgtctaaattttatgttgtttttaattttgttctaagttaatattctttgacttttactacgttttctaaaaaaacagtaacgcctata

SEQ ID NO: 13249 - DNA, 1076 bp, Zea Mays
ctctccgcttgtccctttcagtgatgctcgagtcatgtgggacaacaaaactggacgttccaggggttatggttttgtctccttccgtaatcaacaggaagctgaaactgctataactgaaatgactggaaaatggcttggaagcagacaaataaggtgcaattgggcaacaaagaccaattcagaagagaaaccagaaactgacaatcataatgcagttgtactaacaaatggtagctccaccaattcagcaacagatgcaagccaggatgcaggaagtaaagagaacccagagaacaatcctgattgtactactgtatatgttggcaaccttggacatgaggttaatcgggatgagcttcaccgccacttctataacttgggggtcggggcaatcgaggaaatccgtgttcaacaggataaggggtttggatttgtgagatatagcacccatggggaagcagcattagctattcagatggccaatggattggtagtccgtgggaaatcaattaagtgctcatggggaaacaagccaactccacctggcaccacctccaagcccctaccccctccagttgcttcataccagcctgctgtagcaatgtcaggtgtcccacaaggtttcacagcagccgaacttcttgcttaccagaggcagcttgccttaagccaggctgcagcagggcagattgctggccagcatggtctcgcgggtcaggtttctgcaggtcttcttgctgctgctggttctcaggccctctacgatggctacccgaaccagtcatcagcccagcagcttatgtactacaactagagttcaagaggacggcgttggccatcgtcgccctgttttttattttgtggttcatgtactatttgtgtgagagttcttgatctcttgtcgccgcggaattgtgttactatcttattactgtaccattgaccatttttcttgtgagattcatttgagtagtcactttaacagagtaagagatgtattctatgtgacttcgcgattgattaatgtaatgctcccctgtgcatagaagtatggaagaaaaaaaatacagaaa

SEQ ID NO: 13250 - DNA, 1156 bp, Zea Mays
ttcacaagcaaaaatcgtccagtgttttttttttcgttctttgccgtttctgcacacaagtactagtcgtctcctagtcctctcctctgtactagtcgtcgagtctgcttccattctgttcaagttagcgccgctaatccgctccctattcaccatccaatccaatcggcttcccccaggcacccatggcgacggcggtggaggttcccgtggaggcgccggtgaggacagtgaaggtcaccaatgtctctcttagtgcaactgtgcaagacattaaggagttcttttccttttcaggagatattgatcatgtggagatgcagagtggtgatgagtggtcccaagttgcatatgtcactttcaaagatgcacaaggcgcagaaacagcacttcttctttcgggtgccacaatagttgatctttctgtcatcattgcacctgctccagagtatcagccacctcctactgcctctgctccaccaatgagtggaaccagagttccagttggtggtggagacaacaacgttgttcacaaagccgaggacgttgtgagcactatgcttgccaagggtttcgtgctaggcaaagacgcggttggcaaggccaaagcattcgatgagaagcatggcttcacatccacagccggtgctacagtggcctcaattgacaagaagattgggctgactgataagatcacgacaggcacttccttggttagcgggaaggtgaaggagatggaccagaagttccaggtctccgacaagaccaagtctgcactcgctgccgccgagcagaaggtgagcagtgccgggtctgccatcatgaagaacaggtacgtcttcaccggcgcgtcatgggtcaccagcgcgttcaacaaggtcgccaagaccgccacggacgtcgggacgatgaccaaggagaagatggccgccgaggagcatcacaagggctctggcccgtcttctggcggccactcgtacacgcccatccgatgattcatgcattggcttgctgttacgtgcctcactcaaacggtgttgtactgcatattggtggatgtaaaacatggtcttttagtcccaactcttattatgttgtggttagctagagttgaaacctaatagaaaccacaagttaagattcaaaaaaaaaaaaa

SEQ ID NO: 13251 - DNA, 155 bp, Zea Mays
gtacttattacatagcggaagtcttacaaaataaagctaaatatagatcgaactaaaatccatccttggcgccagaaagtcaactgggagacgccacctagatcgaatcgaactcctcgatgtgtggctccacttgaaccacctgttcttctcct

SEQ ID NO: 13252 - DNA, 109 bp, Zea Mays
cgaaccgcggatccccgtggccagccgcggtcatcgcttcaatcaccgcgcgaggttacgagtcacctgaagatcatcatggtacctagaatctcaagtcccaggcaag

SEQ ID NO: 13253 - DNA, 2383 bp, Zea Mays
acagctagctgcttctgatggcctggtcatggcaacgcatagtgtgattccgctgcagtctgaacctgcacttgataataatccctccaagagtgcaaacgctagggaccagattctttctggtacggagaatgtgactacaggcaatgcacgcggcggcagctccttgaaatcgcaaaaaggcccgccagagaaggctagctctgtcggaaaacctggagaacaaccttttccctaccatcaaaatgtgtatgcaccacagccacaaccactctatcctggaggctacatgaacccttcaggacaatgggaggaatatccccattatgtgagtatggaggggctccattccgtatctcccggaatctacaatgacaaccagtccctcatgctatctcctggatatgcaaacaatccccaaatgatgtatggagcatattctcctgtttccaccgttggggatggccaacaatacctccctatgcattttcccttctcaagtccttactatcaaccaccagcttctcctagcatgggatattcaagctctgcgactggaatatcccaaggagaccctatgctgcagcaagagtacttccttcctgatggtcttctatattcacccacacaagggtatcatcaaccattcagctcattcgacagagcaccaacacaactaaataatgctcctgggttgtttggtcaagggaatctaccactggcttctggaatgcaccatggatcgatgtatggtcctggatcctacaagggacgccagcaaggtagcaaatttggtggcagtactacaagttggagttctgctggccgcagatttggtactatcgacttgagtggcaatcaacaaaggggcagcatgccatttggtagtcacaatggctctctggagttcatgaatgagcaaaaccgtggaccacgcgctacaaaaccgaagatacaaggcacagagaacacctcaggagatgagagaagcgagaaaattgttcctctgattgatagcgaactgtacaatcgctctgattttataactgagtacaaggatgccaaattctttgtaataaagtcctacaccgaggaccatgtacataggagcattaagtataaagtttgggccagcacagccagcgggaacaggaagctggattctgcttaccatgcagccaaagagaaagaagagcattgccctattttcttgtttttctcagttaatgggagtggccaattctgtggcgtggctgagatgattggacctgtcgatttcgacagaagtgttgattactggcagcaggataagtggagtggccagttccctgtgaagtggcacataattaaagatgtaccgaacaaccttctgcggcacatcattcttgagaacaatgacagtaaacctgtcacaaatagcagggacacacaggaggtgaagctggaacagggcctccagatgctaacaatcttcaagaaccatgaggctgagacaacgatcgtggaagatttcgacttctatgagcagcgggagaaagccttgcaggagaacagacgtcaacagcagcctcccaccacctatcctcagaagctggtggataccaacgctcaaggtcctgtggccgatatatcagatgcatttgccaaggccgtccagttgaaggatactgcgaacagcgggacgaccccgaaagctgagggtgcctcagctgaaaatggatccgctgccacagccaaggttgaagggagtgcaaacctgaacacaggccctgtggagtagagtccgtttcccttctttctgctaatttggagcagcagatgaattgcatgctgcaatgtgaatgccggaaaagtggaaagtgcaggttgatcgtgttaaatatggtcgtggctgcgtcagttgtacaacatcataggctttgttttatctccatttatgttatataagttcaatatcatagttccaaaattattgttcccagttctcttctttcctgctttattttgcttccgacttccgtggtcctcgtgtcgcaccatgaatgatcgttccattttagcgggtttataggcataagaagctgcagaattatgctgcgatgaagttgcattttctgcagttgaatgtgatactgtcgagtcttgcactgtctgtaatttcagagatcctctagtgtatcttcgtcttgttactctcagcatgtacaatctgcagtagttctcttggtcacattgctccaaatccctaacacttgcacattacaaatgaaatgtagaactctctaataccttcaggtaaagccgttgttgcagcagcaaacctaaaatcacctgcaactgttacacatgttaaagaaacgttcaatagtaatcatgacctgct

SEQ ID NO: 13254 - DNA, 3711 bp, Zea Mays
cttcgtccccggcctctcgccttcctccacccccctctcctctctctcgctggctcgtggccaacccacccacccacctccgctccgccccgcttccatcgatccattccgcgatcggccttacacgtctaacagtacatgagtttctaactggtgcgagcccaagtaaagttctgtaattagtcacattcctgcacaatgtcgactgcgaaagtggtgcttgagcctgcatttcaaggagctggccataaaccagggacagagatatggaggatcgaggatttcaagccagtcgctttgccaaaatcagactatggcaaattctactgtggagattcttatatagttctgcagacgacatgtaaaggaggtgcttttatttttgacatccatttctggatcggaaaagattccagccaggatgaagctggaactgcggcgatcaagacagttgagcttgacagcatgctcgggggccgtgcggtgcagcacagggagccacagtgctacgagtctgataaattcctctcgtattttaaaccgtgcatcatacccatggagggcggctttgcttctgggttcaaaaagccagaagtggacaagtttgaaacacgtctatatatctgcaaagggaagagagctatcagagttaaagaggttccattttctcgttcatcgttgaaccatgatgatgtctttatcttggatactgagaacaaaatatatcaattcaacggtgcaaactccaacatccaagaaagagccaaagccttggaagtgatccagcatttaaaggaggaataccatgacggagtgtgcgctgttgcaatcgtcgatgatgggaaactgcaagcagaatcagattcaggagaattctgggtcctttttggaggttttgcgccaatagggaaaaaagcaataagtgatgatgatgttgttcttgaaactacatcaccaaagcttttcagtatcagtaacggccaactgaagttagaagacgctgtccttacaaaatcaattttggagaacaccaagtgctttttacttgactgcggggctgagctattcgtgtgggttggtcgggtaacacaggtagaggacaggaaagctgccagtgcagcagttgagaaatacattattaaagaaaatagaccaaagacaacaagaataactcaagtgatccaaggttacgagaatcatacgttcaagtctaagtttgagtcatggcctgtaagtaacacgtcagggagtgccagcacggaggaaggccgagggaaagttacagcactcttgaagcagaaaggtgttgatgtcaaaggaatctcaaaaactagtgtgccagtaaatgacgaagttcctcctttgctggatggcggtggaaagcttgaggtttggtgtattgatggcagtgccaagactgctcttccaaaggaagaacttggaaaattctacagcggagactgctatgttgttctctacacttatcattctgctgaaaaaaaagaagagttctatctagcttattggattgggaaaaatagtgtacaggaagatcaagaggcggcttttcaaatagctaatacaacttttaattctttgaaaggaagacctgtccagggtcgtatttatcaaggaaaagagccaccacaatttgtggctattttccagccaatggttattcttaagggtggtactagctctggttataagaaatttgtagaagagaagggtctgaaagatgaaacgtattgttctgatggcactgctctcattcaaatttctggaacagcggttcataacaataaaacgcttcaagttgatgcggtcgcaacatccttgagttccacagattgttttgttttgcaagctaaaaactcgatgtttatatggaatgggaatgcaagttcttttgaacaacaacagtgggctgctaaagttgctgaatttctgaagataggattagatttgggtcaactagagaccggtgttgctgtcaagcattgcaaggagggcactgagagctctattttctggtcttctattggtggaaagcagagttatacaaatagaaatgctgcacctgatgttgttattagagagcctcatttgtataccttctctctgaggaatgggaagctggagatgatctgttgaccgaagacatgatgatacttgatacacactgtgaggtttttgtttggatgggtcagtgtgtggagacaaaagaaaaacagaaagcatttgacattggccagaaatacgtacaacatgccgtggcctttgaaggtatttctcctgatgtgcctctctataaagtcaatgaagggaatgaaccttgcttcttcaggacatacttctcctgggatagcgcacgatccgtgggtggcaataagggctcaggtgatggtgggccaactcaaagggcatcagccttggccgctctttcatctgcattgaatccatcgtcgcaaggaaaacagtcagatgagaagcccacaagctcagatgacagcgagcatactcaacgagcttcagcaatggctgccttgtcctctgcccttaatccatcgacaaaacctagcagcacacagacacaatctcattcaggtcaagggtctcaaagagccgctgctgttgcagcactgtccaatgttttgactgcagagggatctcatagcccccgccacagtaggtcgtccccaacagcagatgcagacaagactgaattagttcctacttctccccatcaattagaaacagggactgcagaagatgtccgaacagagcctgatgtctcacaggaacaaacagctaaagaaaatggaggccagacaacctttagctatgaacgattgatatcaaagtccactgaccctgttagtgggataaacaacaagcgcagagagacatatttggtggacagtgaattcgagaccgtatttggcatgactaaggaggagttctacgagcagccaaggtggaagcaagagttgcagaaaaagaaagccgatcttttctgagacaaggctggcttcgaactaataaaagcccttacgtcgcacaggattgtccagcattctcatcatgctcgttccgcgtatgatgatcgatcaccagcagctttatccgtgagttgtataggctactcttttatctgcacatggtttgggagcattatatatatatcccccttgcccgtccattattctgaggtcgttcttgatgttgacctttcacgtgttttctttttttattgtattataaaaaatcaaactggtgtaaatggcattactagtgagatttttgtaagtaatggtgcatgggcaccaaggtgtatgcaacatatttttgttgtaagacttcagcttctattgttctggtggtgttctattgaccactggtctaatcatctttactggcttaggtaatggccaacatatcatggaccatgcaaaacactgtttcacattatagattactttatttataaaataaagtttgaaataaaagacgtagataagtaagctgctggagatagcattaccgctgagcactgcagctgtgctcaatgatgatatggttggtttgacaccctactagtcttcttgatggtgtggctgcggctctggaaggagaggaacaggctattttcaaagtatgaatctgtatggtgatgataaaaatttccaattagcctttcataaaaaagaa

SEQ ID NO: 13255 - DNA, 3095 bp, Zea Mays
gtcaaatgtgcactcggattatctgggctctagtttcgtccctggaggggaaatcaattgaagttagacaggcagctggtctactactgaaaaacaatctgcgaacgactttcatctctatgcaaccttcgtcccagcattatgttaagtctgagctgttaccatgtataggggcaaccaatagggctattagatccacagttggaacagtgatcagtgtacttttccaaattgtacgagtcgctggatggattgagttgtttcaggcactccataagtgtttggagagtaatgacctggatcacatggaaggtgctatggatgcgatatacaagatctgtgaggatgtccctgaagagctcgatgttgatgttcctggtttgtctgaacgaccgatcaatgtgtttatgccaaaaatactgcagttcttccagtcaccacatgcaagtttgagaaaactatcgttgggttgtataaatcagtacatagtagtgatgccatcggcactctacatgtctatggatcagtatattcagggattattcaaccttgcaaaggacccttcagcagatgttcggaaactggtttgttcagcctgggttcagctcattgaagttcgcccatctattttggagtcacatcttaaaaatgttactgaattgattctgcaagctaataaagatccagatgatgaagtcgctctggaagcttgcgagttctggtctgcatactgtgatgtgagcatgcctcctgaaggtttacgggagttcttgccacgcttaatcccgactttgttgtcgaacatggtatatgctgatgatgatgagtcccttgatgatgctgaggaagatgaatcctttccggacagggaccaggatttgaagccccgctttcatgcctctcgattgcatggatcacaaactggagatgatgatgatgatgatgatgctgtaaatgtctggaacctgcggaagtgtagtgctgctgggttggatgttctctctaatgtgtttggtgacagcatccttccaactttaatgccattgattgagcaaaacttggctcgaacagatgacaattcttggaaggagagggaaactgctgttttgtgtctaggcgctatagcagaggggtgcattggtggtctatacccacaccttcctcagattgttgccttcctaatcccacttcttgatgataaatttcctcttatacggagtattacgtgttggacgctctctcgatatagcaaattcattgttcagagccttgatcatccaaatggacgtgaacaatttgataagattctcatgggattgctaagaaggatattggatactaacaaaagagtgcaagaggctgcttgttcagcgtttgcaactcttgaagaggaagcttctgaagaattagtaccccacttggaagtaattttgcagcacctcatgtgtgcctatggaaaataccagagacgaaatcttcggatactctatgatgcccttggtaccctggctgatgctgttggagcagaattaaatcaggcaaaatatctagatatatttatgccgcctttgatcacgaagtggcagcaactttccaattctgacaaagatctatttccactccttgaatgctttacatctattgcacaggcattgggaccaggatttgctcagtttgcggaaccagtgtttcaaaggtgcatcaatcttatccaatcgcaacagttggcaaagattgatcctactgcagctggtgcggtgtatgatagagaattcattgtttgttcgttggacctactgtctggacttgcagaaggtcttggcgctggtattgaaagtcttgttgcacagagcagtttgagagatctgcttttgcaatgctgcatggatgaagcagctgatgttcgacaaagtgcccttgcccttcttggagacctttctagggtttgcccaatacatttgcatccacgtcttcaagaatttcttactgttgcagcaaagcaactgaaccctcagtctgtgaaggatgcggtatcagtagctaacaatgcctgttgggctattggagaattagcaatcaagattggcaaagaaatagcacctgtggtgatcaccgttgtttcgtgcttgattaccatcctaaaatccccagagggtttgaacaagtcacttgttgaaaatagtgcgatcactcttgggaggcttagctgggtctgtccagacatcgtggcccctcatatggagcatttcatgcaagcatggtgcagtgccttgtgcacgatcagagatgattttgagaaagaggacgcgtttcatggactgtgtgcaatggtggcagcaaaccctacaggagccgctggttcattagcttacatctgccaggcctgtgcaagttggactgagataaaaagcgaaggtcttcacaatgaggtgtgccagattctgaatggctacaagcagctgcttggaaacaacggtgggtgggaacaatgcatggccgccctgaaaccagacgttgtgcagaaattagctagatacggagtatgatgagaagcaagctcgtgtggtttattcacctcatacaccgaccatcatctttatggcggagacaagagaggagcagaaaggggtgggggtcgtcgagagtgtctctgctgctgatgcatcatctttacatgtgtggcacttgagagtcgattcggttcgttggtacgccattgtccgttcgttcattgttatactggttggtgcacagcatttccagagcgagagtaggatgtcttggtaaaccccccatgtgtattggttggttgggccagtggacttggttttggtttttttgtcattcctactggcaaacacaacaaggccaccaccctcttgctcgccccaccccggcaacattgagaaaacagaaaggttttgtagcgtgtaattctctctcttttcttggtttcttattattattaggtgtaggattgttttcgagtcttgtttggcaggaagggtttgtacgagaaatcaattgattgctcactcaccacaaaataataaaaaagatcgatcgatggggcttgtatctcctgcgactcttcc

SEQ ID NO: 13256 - DNA, 3911 bp, Zea Mays
gtagcacgtgagcatagcttcagctggccactaaaccctcgtcttccccttccaagcgaatcccattccctacctttcgccgccgcctacgcaccatcgctcgaaaccctagccccattccccgtctcgctcggaatcccagctacctccagcgccgccgcgactgcaggataggaggccatggacgacgtgtgcgaggggaaggacttctccttcccggagcaggaggagggggtgatcgagctgtgggcgaagctcgacgccttccacgagcagctccggcgcacggagggcggcgaggagttcgtattctacgacggtccccccttcgccacgggcctgccccattacggccacatactcgccggtaccatcaaggacgtggtcacccggcaccagtcgatgcgaggccgccacgtctcgcgacggttcggatgggactgtcacggactccccgtcgagttcgagatcgataaggcgctcggcatcaccaaccggcagcaggtgttcgacctcggcatcggcaagtacaacgagacgtgccgcagcatcgtcaccaagtacgtctccgagtgggaggccatggttacacgcacggggaggtggattgacttcaagaacgactacaaaaccatggacctcaacttcatggagagcgtctggtgggtgtttgcccagctatgggagaaggacctcgtctataggggtttcaaggtcatgccttacagcacaggatgcaaaactgcactgtcaaactttgaggcagcactggactataggactgttcctgacccagcggtgatggtatccttccctattgttggcgatgcggacaatgcagctcttgttgcatggactacaacaccctggacacttccaagtaacctagcgctgtgtgtcaatgccaatcttacatatgcaaaggttaaagacaaatcaaatggagcagtatatgttattgcagaatccaggcttgggcagttaccagttaaggccaaagcttcaggaaagaagcaggcaccttcaaagggaagcaatattgaagctgttcaggatggtttggacaaggaatcatatgagctgttgtcaaagattcctggggtatccttggttggcttaaaatatactcctctatttgactttttcattgaacttcaagggactgcctttagagtgattgcggataactatgtcacggatgatagtggaacgggtgttgttcattgtgctcctgcttttggtgaagacgaccatcgtgtttgccttgctgctgggatatttgagactgctggacttgttgttgctgttgatgacgacggatgttttattgaaaaaatatctgattttaaagggcgatatgtcaaagaagccgacaaggatatcatcaatgctgttaaggataaaggaagactcattagtaaagggagtattgagcactcttatccattttgttggcgatcgggcactcctcttatttatcgggctgttccaagctggtttgtcaaggttgagaagattaaagaccagttgctggaatgtaacaaggagacttactgggtgcctgactatgttaaggaaaaaagatttcacaactggcttgaaggtgctcgtgattgggctgttagcagaagtagattctggggtactccacttccactgtggataagtcaagatggtgaagaaattgttgttatggattctatagagaagcttgaaaaattatctggagtcaaggtcactgatcttcaccgacactatgttgatgatattacaattccctctaagagaggacctgagtttggggtgctcaaacgtgttgatgatgttttcgactgctggttcgagagtgggtcaatgccatatgcctacattcactatccatttgagaatcgggaactatttgaaaagaactttcctggcaattttgtggcagagggtttagatcaaacccgtggatggttctatactctgatggttctctcaacagcactgtttgggaagcctgcatttaagaatcttatatgcaatgggcttgtcttggctgaggatggtaagaaaatgagcaagagtaaaaagaactatcctccacccaaggatctcattgatgagtttggagcggatgctctgcgactatatttggtaaactccccagttgtacgtgcagagtctctacgattcaaacgtactggtgtctttgctgttgtgaaagatgtcttcctcccatggtataacgcatatagattttttgtccaaaatgcaaagagactggaagttgagggtcttgcctcattttctccgatggaacaagtggtacttctgaagtcatccaatgtgttggatcactggataaactctgcaactgaaagtctagttagctttgttcaccaggagatggatgcatatcggctttacacggttgtgccgtatttggtaaaatacattgactatcttactaacatatatgtgcgtttgaaccgcaaacggttcaaagggcgtactggagaagaagactgcagaatttctctttcaacactctaccatgttcttgtaacaacttgcgtggtgatggctccatttacaccattctttactgaagttctttatcaaaatttgcggaaggtgtcaagtaattctgaggagagcatccacttttgcaagttcccttccacaactggcgagagagatgagcgtgttgagcaaagtgtaaagaggatggtgaccataattgatcttgcacgtaatattcgtgagcggcataacaaagctctcaaaacaccactcaaggaaatggtggttgtgcatccagacaatgacttccttgaagacatcactggcaaactaaaggagtatgtcatggaggaaatcaatgttaagaatgtcactccatgtaatgaccccttgatgtatgcttctctgcgagccgagcctaatttcagcgtgctaggaaaaagacttggaaaagacatgggaaaagtatcaaatgtggtgaagaagatgactcaggagcagatcttagcatttgaaaaaagtggagaggtttcattcttcggccattgcttgaagctagatgatatcaaggttgtccgacaattcaagcgtcctgaaaatgtgtcagagaaggagattgatgctgcaggagatggtgatgttttagtcattttggatctacgaaccgaccagtcattgtttgaagctggagtggctcgagaggttgtgaacaggatccagaaattacgaaagactgctcagcttgaacctgctgatccagttgatgtgtattacgaatctgtgggcaatgacaaaaacactctggaagagatattgaagtcacaggatcagtatattagagacgcacttggctcaccaatcgttccaaaggaaatggcaccaacagatgtcgtagtacttggcgaggaatcgcacaacgtacatgacatgtcatttgtcatatgcatcgcaaggtccaccccgattatttcaccagatcttctttctcatgcctcaggcaacagcaatcatgtcgaggcgttgagagtatatcttctgtcaaaatctctatccagattgaagaaccagttccaaagtggaaatggcgtgattacggtcgactgcatcgaaggttatccactaatcaggttacagctaggaaagcatgtttttctaagtgcaggggatttttatctggctagtcgatcctaatttttgtgtgcagcatcccaattttgactgattcacccatcattttgccgcaatcggcttaaacagcttggttccatttatgcattcagattcacttgttaaaggtgaaaaatcccaatttatgatataccatgtgatcaggcacctatggttcttgctcaagctttaacaccgcaaaaccagtggaggaaaatacacattttcgacattac

SEQ ID NO: 13257 - DNA, 1982 bp, Zea Mays
aaccgaaagtggcatccgaaagatcaatttattttgcactccgctgttatatcgacgtgcaccaccgtcttgccgtcgctcatttcctcctcgctcggctgcttgcctagggtttcacctgctaccgccccacctccagccgtcgcttcagatcccgccgctgccggcgctcgatcctacttcgttgctcctagctgatcccgctgagctcggatttgggcccttcctccccgccggaacagcgtccggacgcgcgggggcagatctgggttttggtggcccgcttggtgtatgagaaggcctccagagcttggaagtaatggaggtggagccggcgaggagggacgcggcagcgctggacccggagctgctgcagctggcggagctcgcgccgggcgcgcttcgtgagaactccatagctgatgcgctgtattcgcagtggctcgtgctacccgagacgaccaagctggtgaagtctttgattgatgatgcaaagactggtgctgtgcttaatgttgctggaagctctgctagcacaaatgctgcttcaagtagttctctaccttcgatgtttcctgctggtagtgctccaccactttctcctaggagcacgtctggttcccctcgtgttatgagacgaggatctggagctggaccatcatccttgggctctccattaaaattagttagtgaaccagtaagagaagttatacctcagttttacttcaagaatgggcgtcctcccacaaaagatttgaaggagcagtgcttatcaagaacagatcacctattttttggtggtgggggacttcaagttcaagaattcagatcggtcacgaaggacatatgtaaacttccttcattcttgtctagtgtccttttcaagaaaatcgatgttgaatgcactagaactgtctcaagggatgcatttgttgagtactggattaacgacaataaggttacaatggatatggctagtcaaatatttgaaatattaagaaagccaggttacacatatctcacccaggatgacttcaagcctgtcctgaaagaactactggcaacacaccctggcttagagtttttacaagggacccccgagtttcaggagagatatgcggagactgtaatatacagaatcttttactccataaatagatctgggaatggtcatctgactctgagagagctcaaacgtggaaatttaattgctgcacttcagcagttagatgaggaagaagatatcaacaaagtgttgagatatttctcatatgaacacttttatgtgatctactgcaaattctgggagctggatgcagaccacgattttttgattgataaggaaaatctcatcaaatatgggaaccattcgttgacctatagaatagttgatagaattttcgcacagatcccaaggaaattcacaagcatgacagaaggaaagatgggttatgaagactttgtttactttatattatcagaggaagacaaatcatctgagcctagtcttgaatattggtttaagtgcatcgatcttgatggtaatggtattttaactttcaatgaaatgcaatttttctacgaggagcaattgcaccgaatggagtgcatggcacaagagcctgtgctttttctggacatattatgccagatgattgatatgattggaccagagaatgagagctatttaactctacgggacttaaaacggtgtaaactctcaggaaacatattcaatattcttttcaatctcaacaagttcatggcatttgaaactcgtgatccattcctcattcgccaggaacgtgaaaatccaactctaactgagtgggaccggtttgcacatagagaatatattagattgtccatggaagaagatggtgaggatgcttcaaatggaagtggtgatgtgtgggacgaatcacttgaggctccattctgaatggcgcttcaagaccagaaatagcatggagttttggggg

SEQ ID NO: 13258 - DNA, 1704 bp, Zea Mays
gacggtcagctgtccagcagcgatgattttgcactttttgggaaatgaaggaccaaggacatcagatccaagcaggtacattcgctacatatacaaccgtgtgatattggaaaatgccactgttcgtgctagtgctgtcagcacgctggcaaagtttggtgccctggttgatacgctcaagcctcagatctttgttctcttgcaacgatgcctgtttgatactgaagatgaggttcgtgatcgtgctacactctatctccaaacccttagcggtgaagttgccattggtaatgatgagaaggatgtgaaagacttcctatttggatcttttgatgtgccattagccaacctggaagcaagcctaagaacttatgaaccttcagaggagccatttgacatatctttggtgtcaagagaagtcaggtcgctaccacctaaagagaaggcagcccctggcaagaggccacctgctggtgctgccgccgccgccgcccctgtttcaactgttgatgcttatcagaaaatgctttcgttcattcccgagttctctgggtttggaaggctcttcaagtcctctgaacccatggagctgacagaggcagaaactgaatatgctgttagtgtggttaaacacatttatgacggctacattgtattgcagtacaattgtgcaaacactatagaagaacaactgctagaagatgtcactgtttgcgttgatgcctcagatgctgaggagttttcagagatttgttcaaagcctcttgcaagcttgccgtataattcacctgggcaagtttttgttgcttttgaaaagccagagcgtgtacctgttgttgggaagtttttaaatttgttgaagtttacagttaaagaggttgacacaactacgggggaagctgatgaggatggtgtggaggatgaataccagttagaggactttgaaattgtttcagctgattatatgctgagggttgttgtctccaacttcaggaacgcctgggaaaatatggacccagatagtgagcgtgtcgatgagtatggactcggggttagagaaagtttggctgaggctgtcaatgctgtcattaatatccttggaatgcagccgtgtgagggcactgaggttgtaccgaaaaatgcaagatcgcacacctgccttctatctggtgtatttattggcaacatgaaggtcctagttaggttgtcatttggactgagcgggcccaacgaagtggcaatgaaattagctgtgagatcagatgaccctgaagtcagtgataagattcatgagattgtcgccagcggataaagtgcaagacatacaaatcttctgccaaaagtgtagagcgggtagatagcctttatacttcgatgcttacagccttgtctcttcgtggacatctcagattatcagttagcatattctataaatttttttgctgtacaaataacatcaggtattatctgatgtttattcaagtactgatttcatggaatattgggaattggaatgtactgtagcctccgtggtttccttttgatttgtgctgaactgtatcccacctttcttgagaggaaaactcgtggaatctatctaccttatttccgatccgttacgataccttattttcgacccgaccttatttttgacccgttacgataccttatttccgtcccgttacgaccggccgaaatagaatg

SEQ ID NO: 13259 - DNA, 750 bp, Zea Mays
tgggtttgtcgggatgttcgtggaaacctgccagcgccttcgtctgatgaaaggttcagaggccgtgaacttggcaccaagagccgcccgatgaggcacactccgttgggcgttggcacgcacgcacgcactggcgtcttgaaggaaagggggaactctgctggtcttgatgaggatcttcacgtgagataggaacgtgtgtacagttgtcgccttatggtattgagttgaggaaacttggaagttccattacttgtctgtagtctctactttatatagatgcgaagaagcttgagatacacattgcctacaatgtcttttgatgaataagaccagacagcaccgaaccgaactcgtcctccacacggttgctttgccatctcggtggttttgtggtggtggtggtggtcgtgcttcctataggtgtgaggctgatggcgtggctgccatttatacaatctttaatcgtgttttgttgagctttattatatggttttgtttgagagttcatggctctgcatcctgttcctacgggatgctggtcagcttttcccctagcaagtacattctggtttgcttcgtctcctcgtcgtgcctgtttgtttcgtcgtaacactggctgacatgcgtaacaaagcttgatgttccactcccgttcatgcgcagtaggatgtttcaatggttatagttgggctgaaactagttggtgacgatctaggatttaatttatgcaagaatttaaagaagcct

SEQ ID NO: 13260 - DNA, 1812 bp, Zea Mays
gcccaaaactgaacccacaacccgaaaccagcaggcaacaaagcaaccagaggcagagcgttcttcttccccgacggcccgggccgacggctcgactccactagtcgctggaaccctctgcaacaaagccgcctccacctgaccacctcccttgagctcttccccttcctcgtgggttgtgcgagccctctaccggcgcgcagtacaggggctgattgggtgatcaaacccgcaagatttgggtttgtgatttaggagcaggaggcggtggcaatatggaatataaggcgagatctactggaacttcaggaacttcgtctaaaagtttccgtgatctgtacaatatgaagtactcgagctacttaaacgacgaaccaatgccggatgctacatcggaaaaggagcagggaaatgagtatttcaaacagaagaagttcactgatgctattgaatgctactccagaagtattgggctgtctcctacagcagtcacatttgcaaatagagctatggcatatcttaaactaagaagattcaaggaggcagaggacgattgcactgaagctctgaatctggatgatcgctatattaaagcatactcacgccgaattactgcacgaaaagaacttgggaagcttaaggaggcaatggatgatgctgaatttgctatcagtcttgatccaaacaattcagagctaaggaagcagtattctgagataaaagctttgcacatggagaaaatggctaaaaaggttccagtgccagctaaacgtgcagtttctggaattgataaaactgcagatgtcacttctcacccaccgactatctcccagaaggacactattatggaagttgatctgcctgttagagatgcaatgaagatcaaagagagtgcaagcgtcaagtctaacggaggacctggagtaatcatcaatggcaataacgtgcagcagctccaaggtcgagatgccaaccagaagactgggccagaagtttcagtccaagatcttgcagctcgtgctgcttcacggtatatggccggcactgtgaaaagcattaagacacccaaaacagcttatgactttgaggtttcttggagagctctttctgatgacactgcccagcaaatacagttactaaagtcgattccaccagcaagcctaccagagattttcaagaacgcactttctgcaccttttcttattgacatcgtgaagtgtgcagcctcaattttccgggatgcggaggcattagctgtcagtattttggataatttggctcgagttccacgcttcgacttgataatcatgtgcctttcatccatgcacaaatttgaactgaggaagatatgggatcaagtattccttgctgaaaaagcgctggctgatgatcagatggaagctctgaggcagctgcgaggcagatacattccgggaggatggcaggatagcatgctcacttcgagttaaatcaatcaatcaaatgacgacgatgtaaagcaggattgttacaaaaaccttttgctggcttcgcaactgatgtctctgcatccatctgttctagaatcaggagtgcctgtcgattgttaagcccactggtctggatgtagcgaacggttgaagcatccagtgtaggaacatgtgtcgactgcaaatggttgagatttgttctgttgtgcttgccgctactgtaacctcgctttgttgtgcgccggattcctgacgctggcacatcgtacgcttgtcggcgacaactttatggaacacacacattttgatgatttaaagaattctctataaaatgtcttctaat

SEQ ID NO: 13261 - DNA, 278 bp, Zea Mays
atataaggcccagcccaccgatcctcctcttctgtcttctcccctgcgtcaaagacgacgcaagcccttgcctctccctactccaaaccctcgccgactcagatccagcttcctcgcaccgccgtcgccatgccgttcactccaggcccctactctggcgtcagcaccctcgcccttgtggcgagggcgtcggcctttggcgtcggtgtcgtctacgggagcatcaagctctcaatcctaaagaacttgaacagggagcacggagtcctcaggcagaa

SEQ ID NO: 13262 - DNA, 990 bp, Zea Mays
gttgcctgttgccgcttcaaattttgaaaatttaaaagcttggagttgcatttgctagattgttctttcctgctgaagccaaggtcgccatgcaaatcgcacaagcagacaccacagaagaattcggcggtatagttgcagttgcagcaagcacttctggtaaactgagggaggtggaccttaatgagacgccagtgacacaaaacaaaaggctccgttcaagggtagatgcactgatgaaaacagtggagctgggccgtcggtacttcccgaactgctcgcaggtgctggacaagttcctggaggacgatctgccggaaggtctggaccagttctacctccagaggggcacagccgatgagcagaaggtgaagaggatgcgcttctgcgagctgaaagaggacgtgctgaaggcgtttagcaaggacaaggcggagggcagcgtgttctcgggcctgtcctcgtcgtcgtcgtgctcgccgccccagaagtatgcccagaggtgatcaaggcaccagtttttgccgtatagtttgttatcatggtcttcgagacttggacccggacagcatatagggacatgtacacctgtgtatgtatagtgcttacaattggcgtaagtagaactatatgtatggaacataaggaaacatggcaggaacaccgtgcaaaaagatgaaaagatggccgaagtgctctatgcgagtgcccacctgattcgatggccctattcaacggcgccctgtcagcatgctgcatgcccactgagaccttcggttgcatagggataggaggagatttctgttcaattttggctagcaagtgatataggggtgtttaggactgtttcactttatgaaaatcaacttagctcataaacacttttaacttcaataacttaggtcctgtttggagtggctgtatttttctagtcccaagaaaataatgtggtatctgagaataccatggtctagaaaccaaaatgtgttt

SEQ ID NO: 13263 - DNA, 170 bp, Zea Mays
ttcttgcccacatcatattgtaaaattatcaaaaaggcaagttttcaaaacatccttctcggttctcaaggtgtgtaattatcatgtgatagtttatcacttattctgaatttacaacacatattacactttcagacttcatcatatacaggaaaggcactacgtcaact

SEQ ID NO: 13264 - DNA, 346 bp, Zea Mays
  misc_feature (345)..(346): n is a, c, g, or t
acattattcctccataattcctgtaatccaaagaagcacttatttcccaacctgtttgtgcaaacgtgtgctttaggttagcgtttcccaggacgctttcagtcatctgttcgtctgctcaacgaatttgcagtcctcggtgacaactgggcaagttaagaacgttaagaatctcagaatgccacaacagaaatttcctgatgaaacggttcgttcaataaagcaatttctcaagtatctttttttaacaaaaatagctgtatatttttcctccctaggagtcccaaaactttctgatacacagtatgagaaataaaattgagctctgaattcaagcattgatcnn

SEQ ID NO: 13265 - DNA, 490 bp, Zea Mays
ttgccatcttttgaaggacatgcttggcacagtggtaataacccagatctgggtgctattgctaggagggcttggattgggtgctttgttagatgtgtgggcaggacatgattttcctattgtgttttatcttgctgtgggtggctccttactttcttacatatattcagcaccacctctcaagctcaagcagaatggatggattgggaacttcgctctgggtgcgagttacatcagcttgccctggtgggctggccaggcgttatttggaactcttacaccagatatcattgtcttgactactttgtacagcatagctgggctagggattgctattgtaaatgatttcaagagtattgaaggggataggactctggggcttcagtcacttcctgttgcttttgggatggaaactgcaaaatggatttgtgttggagcaattgatatcactcaattatctgttgcagggcttcttactcctgctagtgta

SEQ ID NO: 13266 - DNA, 1150 bp, Zea Mays
aggtgaagacaaagttcttgggaaattcattggaaatctatccagttggaaggttaattgttagaattgtatttctttcttggagatctgtatggcttaaaaatattttattggaataaaatggaaacctttttgaaggctgaattgggaccagttattctaatccctgctgtaatataatttccatgtcacaggactagagtgacacttaaaaaatctggtgtcgtgttggatttggtgccaccactaacaaaggttaacaacctgatatttgggcgtacttgggttgattctcctggagagatggttatgacaaacctgacaaccggagacaaagctgtgttatatttccagccatgtggctggttcggggctggccggtatgaggtagatgggtatgtgtacagtgcagcggaagaacccaaaataatgattacagggaaatggaacaagtcactgagctgccaaccatgtgaccaagaaggcgaccctcttccaggcacggagctgaaggagatctggagagtcgcccctgccccacagaacgacgggtatcagtacacacactttgcgcacaaaataaacagcttcagcacggcacctaagaagctgttggcatctgattcccggctgaggcccgatagatatgccctcgagaagggcgacatgtccaagtctggctcagaaaagagcaggctggaggagcagcagagagccgagaaaaggactcgagaggccaagggcgagcagttcactccgcgatggttcaacgtgacggatgcggtcgcctccacgccgtggggtgacctggaaatttgtgagtacagcggcagatacacggagcaccgggctgccatagacagctccaacagcaccgacgacgacgacgagatagacgtcacttcggtcgagttcgacccatggcagtatggtggtagctcgtcatctccccaatgattctccgcgtccggaagctgccgtgcctgtgctccttgtgtaaaaaaaaaatgcttccaggcggcctggccttcgctggtttgttgtggcaccagcggtttccgtgcccttgtagtagtattatgacctgccccctctttctcttattaacgctacagatttattcaggaagtggtgtgttttgataaaaaaa

SEQ ID NO: 13267 - DNA, 888 bp, Zea Mays
aacttcaacgagtcccattttggcaaggcttcggagtaccaaactggcgaattgcgacgttggcggaattgtaatggcaataattccttcctccttcgttccccatttctcctctttctaggtttctacccctcatcggtcctcgctccacggccatggtgaggatgaagcaggtaaagatctcggtaaagaaggacgtggattcgtacacaatccgcggcactaacaaggtcgtccatgtgggcgactgcgtgctgatgcgggcgtcggactcggacaagcagccgtatgtggcgcgggtggagaagatggaggccgacggacgcggcagcgtgcgggtgcaggtgcgctggtactaccgccctgaggaatccaagggcggtcgccggcagttccacggcgccaaggagcttttcctttccgatcatttcgacctacagagcgcccacaccatcgaggggaaatgtgttgtccactctttcaagaactacaccaagcttgataatgtcgggcctgaggacttcttctcccgatttgagtacaaggcggccaccggttcgttcacccctgaccgcgtggcagtgtattgcaaatgtgagatgccatacaacccggatgacctcatggtgcagtgcgaagcttgcaaggactggttccatccatcttgcatggctatgaccattgaacaggccaaaaaactagatcactttgtttgctcagactgtttgaaagaaaatggttcaaagagactttcaaatgtatatgccacttcatcaaattcttagcccaaggatgaatcaataaggcagacgaggtgaaaactgagtgccaacatccaggggagatgtgctgcttctgtggcgaatcagcccttgcactggcgagagc

SEQ ID NO: 13268 - DNA, 90 bp, Zea Mays
cttcgagggattttagcttcggcgtcattctttttaatcatcgacttcgacttcgtcatcctacatgaattaagttgttgtaagtcaaaa

SEQ ID NO: 13269 - DNA, 1152 bp, Zea Mays
tgagtaaatactcgcgtgttagtaaaaagactcttggattacaaggtggaggagaacaaattgctataatcagagcatctggaagtataacacggactcgtagcccattgagtgctcctagttcaggcattgtcgctgagcagttaattgagaagatacgaactgttagagaatcagaaaagtacaaagctgttatcctacgtatagacagccctggtggtgatgctcttgcttctgatctttgcttcgatgtctgatgttgctgcaagtgggggctactacatggcaatggctgcaccagtaattgttgctgagaaactgactctcacagggtcaattggagttgttacagggaagttctgccttcaaaagttatatgagaggattgatttcaataaagaaattatatccaagggtcgatatgctgagcttaatgttaatgatcaacgacctttaagaccagacgaggcagagctttttgaaaagtcagcacaaaatgcttatgcattgtttcgtgataaagcagccatgtcgcgatcaatgagtgttgatcagatggagagtgttgctcaaggtcgagtgtggagcggccatgatgcgttttcaagagggttggttgattcagtaggtggactctcacaagctcttgctattgcaaaacagaaagctaatatacccaaggataagaagatccagctagttgaagtttcaaagccctctccatcattaccggagatcttatccggcattggaggttcgttgcttggagttgacagggcagtgaagggagtgctccaggacatgacctccctaagtggagtccaagctaggatggatggaattctgtttgaaagtttaggagacatgtcaggagaaaaccagttattgttgcttgtaaaagatatcatgaactattttgattaattctagcattcaggtccttatgttccaaacatttgtatttagagatgaggggaaattcataatgtcactacacatctatcttgcacagaaacaggtagcttgtgatttgtgtagttaatttagcattgtatatgccattttattcttttgcactgatgactaaaaatatcatgattgatatactgggcaaaagtaaaaggaactccaccttttcttatgcatgatatt

SEQ ID NO: 13270 - DNA, 430 bp, Zea Mays
actctataacctaaggcgaggaactgatgaaaatttagacctcaagctgactgtatggctggtgaggagtaaccgcctccgtgaagcatggacccctgcatatgttggtgtttctgaagcaatttgtttggttcatggctttggcgtctcggcgctgcgccagggatgcacgttttgaatcaggcgctttgctggaacttttgggtgcacacaagttgagactgctgctgctgctgtgtgtgtgttttgagattaagacaatgctgctgtgttttttctttgagattaagacaatgctgttgcgtgtgttcttctcgttttctgtaatgttcgtaaatagtctcttcgtcgccgtgttgtctgactgctacattgtcaatatttcaaaacatacgtctctgaatcaaatgtctggattggttctgcctac

SEQ ID NO: 13271 - DNA, 275 bp, Zea Mays
ccgttaactcgccttatcatcttaataactatgttattggtttctatgtgcgctttgaagatgatagtgtggaagcagccaaggtggtgaaacagtggaatgtgaaaatcatatctataagcaaaaataaaaggcatcaagacagaacagctgctcttgaagtatgggagcgcttggaggaatttatgcgggcacggacataattgatgtgcagtcattaacacatcatatttctgtcaaatctgatgaaacatttcccatcattcaacacttct

SEQ ID NO: 13272 - DNA, 1191 bp, Zea Mays
attcctagaggttgtcttacccctagcaggcctggaaaagatctttggatttctactctcatcctgacacaaatcattccacgaattatcaacccaatgaaaacactctcgctctgtacaatcctgataacacacaagaagcgcctgttgatccatacgattcagatatgactcaaagcctccaggaggctttgcaccggtcaactatggacataagtggtgcagagtatagagggaaggaggtgccactttttgtgctcccgacaaggtatctcctcaagctggacaccacgatgacctcgtactgtgatatgcaacgagtcctgtttgaagaggagcaatcagcatataatcaagctatgcaacaaaatatttgtgatgggaaaattcaccctcttacatccattcactgtacgtctacatacaactcctctctatgcaaactaatggagtattgtttgagtccagctgttattacgcttcaggaccgcctgaaggaaaatgaacttcggctatctatgttaaaagaggagtgtaagcaactggaggctgatacccaaggcatgagaaatggttctcctcgtcgcctcatgaatcacggagctggtggcagcggttcacctatggctcagagcaggcatcctttctccagccaagggagccctagaagcccgagcggcggcagccggaggagggcttgatgatgatcttgctccgcctgatgcgttgatgaactgtccgttgtggcttaaccagatgcttcctgaaaacccagatatttgacggacgaagtgcccccagacaacagacactgtacctgtacatacccattgccgttcagcgctgtgctattgtggaactccaacggtctcattgtgctttttttttgtagtattgggggggttccttatcctgttgccggagctgtgccattatcctttccatggttcatggttggcatgagcttttatagcctgtacactgtagactctgtactagaggttttccagaaaggctgaactgccgctgctgggatgtgttgttccgggcatattcaaagatgaaggctttctttgcttttgtaattgaaaaaaaaacccgacttcggtagcaatacattttcttgaaatgctataactctaagctacagccacagtgccacaccttgcctggatagtgccatagctgttt

SEQ ID NO: 13273 - DNA, 669 bp, Zea Mays
acatgtcgagctatgtgacgacgacgaattcattgttttagcatgtgatggcatttgggactgcatgtcaagccagcagttggttgatttcatccgtgaacatataaacacagaggaaagcctttctgcagtatgtgaaggagtgcttgatagatgcctggctccatcgaccatgggtggcgagggatgcgataacatgacgatgatcttggtgcagttcaagaagccatttgctcaggtaaaggatgccagtgatgcggaacaactaactggagatgcgggatgctctgagacccatggggccgaggagaatgactctgacaagcagatatagcgaagacaggactcttttggagtcttggtacatggcctgacgctgaacctgggtaaaacaggagtacgatgttgcaatgtacataccaaccatgcgctgagttggcgtgaaggatatattcattgttccactgttgtctttaaccaaacgtgctgttttcttccggttgtgatttttggtgacctgatcatctgacaatatctaattatacatttgggaggaaatgatgttacaatagttattgtgggtgtttgtttgggattataatttgttcagattatataatctaacttattttaaattaaactgttagttcaaaataagttagattatat

SEQ ID NO: 13274 - DNA, 85 bp, Zea Mays
tgagagcgagtgcaccgcagagacgatgagcaggcgcgcgagcgtcgacgcgagccgagggtaagcacgagcaccaggaccaggc

SEQ ID NO: 13275 - DNA, 616 bp, Zea Mays
tgccctcaccggagacttgcttggcctgctcctccaccgacgtgtgctagcaagacccgctgctgctgctctccaaacgtgcgagtgtgcggggcctgcgcgcaccccggccgtctccttccacgcgagggcaaggcagccaagtccctggaggagaagctcaaatcttccgggataccatatgaagttcacatataccctggatgttcgcatgccttcatgaacacttcgcctgaggcactcaagaggaagaaggggatgggtctgactgatgagaaccaggaagccgtcgacctggcctggtctcgcttctcttcttggatgggccggttcctcggatctgcttgattatgtgccgcgtgatgatgtggagtcaggtcccatgaataaaatagaataaaataaaatgttcagattcaggaaccatgcaaatggactgggctgtacggttctctggatttgcttgtccttctgtttatagttatctacctcagtgtggtttccttattttctgtggatggatgcatattgtggaatagccgtcgatggcttctgacagtaagcagcgacaaggcaactaactgctggccagagttcaccctatcgttttgaattc

SEQ ID NO: 13276 - DNA, 213 bp, Zea Mays
taccttgcgagcttccatatccttccaaatattgcctgcagccccaagaacgacaacgactgtaagttgaaataagaatatggcaccagtaagcttatcaatcattgcatccatagcagttagcttgggttctgggacacccctactcattcccaacttagtttcattgcctgaaagtggagattatcaataatcaatctcctggtaaagctg

SEQ ID NO: 13277 - DNA, 1645 bp, Zea Mays
cattgctcatacttttggacgcagcccaaccattgtggttgcttgcttccttcctgtctgcataacaaagccgccgccattatgatctccacatatgatgcttagcatttgtcgctcgcagctgtattgctcctctagctgcatccttgtactagagcatggcgaagctcgcatctattgctcgcagtatgcttagattcccaaacggaagcatgaggcttgttatggtaacggttattggagcagtccttggctttttcattgggatttcattcccttcggtcagcataacaaagcttcactttccagatagctttatttcgtacattgaagacaaagacgctggactcacgacccaagctatactcaatcatgcttggacttctgccagaaacgcaaggggaaatggtaccgaaccgacttcaaacagtaccttaaagatttatgtcccaacgaaccccaagggtgcagaggggctagcaccaggtatcgttgtatcagagtctgacttccatttgcgcaggttatggggagacccaagtgaggacctgcctttcaaaccaaagtaccttgttacctttactgttggagttgagcagaaagcaaatataaacagagctgtgaagaagttttctgacaattttgctattctgttattccactatgatggccgggtgagtgagtgggatgaatttgagtggtcccagcgagctatccatattagtgtcaggaaacaaactaaatggtggtatgccaagagattcctgcatcctgatattgtggcagcttatgagtacatattcatttgggatgaggaccttggggttgaacattttaatgcagaggagtacatcaaacttgttaagaagcataacttggacatctctcaacctggattagagcctgatcgggggttaacatggcagatgaccaaaagaagaggtgacagtgaggttcacaaggacacagaggagaggcctggctggtgctctgaccctcatcttccaccgtgtgctgcttttgttgaaataatggctccagtcttctcaagagatgcatggagatgtgtgtggcatatgattcagaacgacttggttcatggttggggcttggattttgcgctcaggaaatgtgtggagcctgctcatgaaaagattggagttgtcgattcgcagtggatcgttcaccaagtggttccttctctggggaaccaggggcagtcagaaaacggaagggcgcggtgcaggaaggaatggggcatgttccagaccaggatggcggaggcggagaaggcgtattacaagatgatgggcatcacccctccaaactccacgcgtgtctagccgcgcctctcttcttggttttccatccccgccaccctgacctttgtggtggcgggtgagctgatgatactatactatagcactacttgattatagggagttagagatggtgggtgtagctgcttttgatggagaggtccttctgtaagtaaatgcgaggcgaaactgtgatgagaaaacatgtacacgaggatgattacctgatgatgatgatgatgatctatctattataaaaaacatatataccgttaccgagcattgcgattgttctgcagcgcttttgtagcttgatccgaaaccca

SEQ ID NO: 13278 - DNA, 3139 bp, Zea Mays
cgtcgccgtttcggtctccggaaaggaaagcaaaagagaaggagggggcgagagaagaaactgatttttggcgaggccaagccgggggtgggattaccgggagcacgctgactgggatcacggcggatggcggcggcggataggcagttggtagttgccgtcgaggggaccgcggcgctggggccctactggtccaccattgtggcggagtacgtcgagaagatcgtgaggagcttttgtgcaagtgaactgccaggccagaagcttgtgggtactccgcctgaacttgcattagttgtttttcatacccatggaccttacagtgcttttgatgtgcagcgaagtggatggacaaaagatgtcgatgctttcctatcatggttatctggaatattgttcagtggtggaggattcagtgaagcttctacttgtgaaggtcttgctgaagcattgaagatacttcaaggcaatcctaatacaacccaaggtcatcaaaaccatgaagcacaaaagcattgcatacttgtcgctgcaagtaatccttatcctctgccaacacctgtatactgtcttcctactcaaagtactgatcacaaagagaacattgagacatcaaaagaaccttcaattgctgatgctgagaccgttgcaaagtcatttgctcagtgctctgtctcattgtcagtgatatctccaaaacagcttccaacattaaaggcaatatacaatgcgggcaagcgaaatcttcgggctgctgatccatcagtcgaccatgcgaaaaatccacacttccttgttttgctctctgagaatttcatggaggcacggactgctcttagtcgccctttacatggaaacttggctccaaatcaaaccataacgaagatggacacggcacctgcagtgactatgccaggaccaacatcaaatggcaactcctcagtgaatgcaatggcaggccgtcaaccaattgttggaggtatttctaccacatctgttaaagtggagccaacaaccatgccaccgatagtttctgcacctgctttctcgcatgtaacgcctatttcaaatgtggcttcacaaggaatatcagcactgcaaacctcatcaccttctcttatttcacaagaagcaaatatgggaaatgataatgtacaagaacacaagcctataataaacccagttcaacaaccgattcggcctggtggtcatggcagcctcctcaacaatctgtcacaggttcggttgatgaactcaacttctttaggaggaggagctacctcgatgggactgcctaacatgggagcaacaccaatacaagtccacatgtcaaacatgatatcaagcggcatgacatcaacaccctctgtcatctcctctatgtctggacctggacaacctattagtactcaacagatggtacagagcacagctcttggttcgtttggctcaaacactcctactgttacaggcaattcaactattgctgtatcatcctctttgactaacaaccaaagcagcatgggcatgggtcaatctgtgcaatctgtggcacagggaggcttggtgtctggttcacaattaggacaaggtggaattgttgcaaaccaaaatgtgatgagcacccttggacctacagctatctcttcaacgcctgcgatgatgccgacacctgggatggtcccacagacaggagtcaattccttaggtgtgaataacaattctgctatgaatatgcctattacgcagcagcatgccaatgcccaacagccgccaccaaagtacgtcaaaatttgggagggaactttatctggccaaaggcaaggacagcctgtaataatttgtaaactcgaaggttataggagtggaacagcgtctgaaacacttgcagcggactggccagaaacaatgcagattgttcgcctcatagcccaggagcatatgaacaacaaacaatatgttggcaaggcagactttctagtttttcggactttaaatcaccatgggtttcttgtacaactacaagagaagaagctgtgtgctgtgatacagttaccatcgcaaactctgttgctgtcgatggctgacaaagcaggtcgtttgattggcatgctcttccctggggacatggtggtgttcaaaccgcaggcctcaactcagcagacaccaatgcagcaacagcagctacagcaatttcaacagcagcagcagcagctgcaacaacacatgcatatgcagccgcaaggcctcccacttcagcaatcacagatgcaactccagcaacagcagccgcagatgcaaccgatgcagcagcagcaaccttcgcagatgcagcagcagatgcaatcgatgcagcagcagatgcagccaatgcagcagcaaatgcagcatcaacagcaacagatgcagcatcaacagcaacagatgcagcaaatgcagcagcagcagcagcaacaacaacaacaacaacaacagatacagcctcagcagcaacagatgcagcaaatgcagcagcagcagcagcaacagatgcagcctcaacagcaacagatgcagcaaatgcagcagcagcagcaacagatgcagcctcaacagcaacagatgcagcaaatgcagcagcagcagcaacagatgcagcctcaacagcagcagcaaccccagatggtgggtacaggaatggggcagcagttcatgcaggggcacaatcgggcagtgcagatgatgcaagggaagattacgccacaggggccgggcagcatgcctgggggaggcttcctaccttaagcaccttttatcagcaggcatcagatgaattgagggtttacactgacccaagtgttgagatgtcaacttcatttgacagggttagggaatagtcactcggggagtgttgctaaaacttaatctgaaaacttaagcatccctgtcaccgataggtaaatgccagatgtccatgcataggtgcatactttatgatatggtggtgtactcgtaatcttgagtgactttatggcattgttgtactagccgtaaactattaggtataacagaattattatttaaactacagtaaaataagtgacctgtgttgtttagggtttaaatggtacgttaaataggtagttgaatcatttaagca

SEQ ID NO: 13279 - DNA, 66 bp, Zea Mays
atacattattaatctgatttgcttgggccattgaggggtgccaggcccactccggcccccctggtg

SEQ ID NO: 13280 - DNA, 734 bp, Zea Mays
cacactgacggagccgtctcccgtctgctacttttatgtacgtgacgagtgaccactgaccagcaacagaaaccgaaagagcctccaaaacctcgcaacaaccccgtgacacccacacccatccgccctgcccctcctcgcgctccccaccaaccccgacgagcggcgatgaccggcacggtgtccaagctggcgggcgccccggcctgcggcgccaccgctccggccggcgtccctccgcgccgccgcaatcgccttcgccccctccccgcgccgggtgggaggcgttggccaagaaaggtgccaagaaacagaggttgttgtgggcatccacccggtgtcaagaacccagcttatcccgacactctttacatcgacagtctcattggacctgacacggtcaacacgatgcccgaccaagctttgcacgcattcatagaccacggcactgtctcgaggacagttgatgcgaatgtgtccgaggcggaaggtgtatacagcgccttggagaagcttggcattgactggggcgaggtcggaaagcagcttgagctggaaggtgtggactccttcaagaagagctttgacagcctactcgtgagcctacaggagaagggcaacagcctcaagacggcaactgtgtaaaactgagaagattgggcttgcctggccgtcattgtgtgaccaacgttcatggcttgtacaagggatcggacgtaaacggttggaaaaca

SEQ ID NO: 13281 - DNA, 1564 bp, Zea Mays
caaaaggatgctatagaactttccacaagggattgacatttaccagggataaatgcgtttgatcaaacaccaccagaagaatggtttcaaatgaatgctgttcttcgtgtaagcctggggaacttcttgttctttgcaatattttctctcgtgatgattggtgtgaaagaccagaatgaccggcgagatgcctggcaccatggtggctggattgcaaagattgctgtatgggctgttctcattgttcttatgttctgtgtgccgaacattgtcattactatttacgaggtactttcgaagtttggatctggcttctttcttctagtacaggttgtgatgcttttagacttcacaaataattggaatgactcatgggttgagaaagaagagcggaaatgggaaatagctttgctggtagtgactgtggtttgctatctttctacattggccttctctggtgtgctcttcatgtggtttaatccatccggtcatgactgtggtctcaatgtgttctttatcgtcatgacactcatccttgcttttgcgtttgcaatagttgctttacatcctcaggtccatggaagcgttatgcctgcttctgtcatttctgtttactgcgcatacctgtgctacacgagtctctcgagtgaaccggatgactatgagtgcaatgggcttcacaggcattctaagcaggtttcaatgagtgctcttatactcgggatgctcactacggtgctctctgttgtgtactcagcagtccgtgctggatcctcgactacattcctttcaccgccatcatctcctagatctggagccaaaaacccgctactcggtgacgaggaggacggcaaaggcgatggcaaagaaagcgaaccgcgacccgtgagctactcctacaccttcttccacctcatcttcgcccttgcaagcatgtattcagccatgctcctgaccggctggacgagcgctgcatcagagagctccgagctgatggatgttggatggacgaccgtctgggtgcgcatctgcacggaatgggtcaccgccgggttgtacatctggaccctcatcgccccactgctcttcccagaccgtgatttctcctaggcacccacgcacccatagcctatgagttgtttggtggtgttagttgcgattgtgaatatgaataagccgaagctgggagctggtagggatctggtattgtctctgtatgctatctggcatgcctaatgtgatggcactggttagtacctgtttgtatggccttgtatagaatatatttcgaccgagtgtaggttgtggactttaaaagcagaaaaacaaaactgagcagaaaaacaaaactaagggtaaaatgaggaacactagcaaaactgaggataccagcttaaaaaccctatatcttaaggggtaagtacaaaaaataaagagacgtattttggttaagtaatatctcgattctctaagtctagatatgttccattcatacaattcatataaggtcttgttcggttaattcccttacccatggattggatgggattgaaaaaaataagaa

SEQ ID NO: 13282 - DNA, 624 bp, Zea Mays
ctaaacatagcgccggcagtggcaccgagcacgagacgaacagacctctaaaacctagcagaggcccgcgccgccgccgccaaccgcgacgaggaaggaagcaggaacgcgatgccgaagtcgaagcgcaaccgcccagtgaccttatcgaagaccaagaagaagccaggtttagagcgcaagggcaaagtagtcgccgagataaaagatgctgtcgacaaatacagcagcgcctatgtttttacctacgataacatgaggaatcagaagctcaaggacctcagggagcagctcaagtcttcgagcaggatttttctcgctggaaagaaggttatgcagatagcgctggggcgttcgcctgctgatgaagctaaaacaggcctccacaaactttccaagttccttcaaggcaactctggtctgttattcaccaatcttccaagggatgatgttgagaggatgtttcgagaattcgaggagcatgattttgcaaggacaggaagtactgctatcgatacggttgagcttaaggaaggccctctggaacagttcacacatgagatggagccatttctacgcaagcaaggacttccagttcgcttgaacaaagtctaccattgttgt

SEQ ID NO: 13283 - DNA, 171 bp, Zea Mays
atggtgcgaggtaacatactcattacccaccactacgagctaatatacacacacctacagtctcccattgctaaaatcactggacatgtctttcaatcaaataaacactctgcccaaagagattggcctggctactgctttagtcaaggttgagttctcaaacaattgcct

SEQ ID NO: 13284 - DNA, 1234 bp, Zea Mays
gatccctcgaggagattatcgacgagagccacgccatcgtctcctcctctgtcggacccgagtactatgtcagcatcctctcctttgtcgacaaggaccagctcgagccgggatgctccatcctcatgcacaataagattcaagaaattaaagaggctgttgagcttcccttgactcatcctgagttgtatgaagacattgggatcaggccacccaagggagtcatattatatggcgaacctggaactggaaaaactctactcgccaaggctgttgccaattcaacatctgcgactttcttgcgtgttgtcggtagtgaacttattcaaaagtaccttggggatggtcccaagctagtcagagaattgtttagggtggctgatgaactttctccctcaatagtcttcattgatgagattgacgcagttggaacgaagaggtatgatgctcattcaggaggggagcgtgagattcaaagaactatgttggagctgctgaatcagctagatggttttgactcacgtggagatgttaaagtcattctagcaacaaaccgcattgaaagtcttgatccagccttgcttcggccaggccgtatagaccggaagattgaatttcctctaccagatattaaaactagacgacgcatcttccagatacacacatcgaaaatgacattagctgatgatgtgaacttggaagagtttgttatgaccaaagacgagttttcgggtgctgatattaaggcaatctgcacagaggctggattgcttgccttaagagaacgcagaatgaaggtgacccatgcagatttcaagaaggcaaaggagaaggtgatgtacaagaagaaggaaggtgttccggatggtctctacatgtagccaatctattcatcatgccgaacaagttacccgattgtgtgtgtactagcacatctcttcatcatgggagatatgttaccacaatacttgttgcatactgtgctaagtggtcaggagaaccttgtattaattaattatcctttcattgtctcaaagtaaaaatttcccttgcgctaaaaatatgcatccgttcagcatccgtgtgacgtgttggcagcttgatcgcatggtgactattgcgtacacgaaattgcaacttatttgaatgaaaaaattggatattagaggaaattcgcatctctatatatatgtagtttgttgtgaagcaaaaaaaaaaaaggaaaatgttgaga

SEQ ID NO: 13285 - DNA, 136 bp, Zea Mays
gtggtataagagggtatgcgcgagagagaagttgcaagttcgaatctcaccatttacaaaacatataagtttgtttcaaaataatagtgaaaaatgatagggcaacgtgtaaggtaatagggtagggttggagagt

SEQ ID NO: 13286 - DNA, 1489 bp, Zea Mays
gggaaaatcaagcaagaagaacacttcatcagctctcatctaattgattatattaacttgctagcaactagggaaggtcaagtgagtagagatcccttgtgaacatgccttttgtttaacctgtgcaagaagtgattccagctgctatctttgtgatgagcgcattcagaagatacaaagtgtgaaaatgatggaggggattttcatctgtgctgcaccgatgtgtctcaagtcattccttaagaaagcagattttgagtttcatgttcccgatgtccatgccaacctcctgcaaactaatctagagaaggaagaagaacgcaatgagccagatgctcctaacatctcccgtgcttctgcaggggatacacaaagacaatctcaaatgcctgaaatgtctactgcacgggctccttcaaggccaggtgtttcacaagatcgtgatgaacgctctcgctaccaccagtccagggagcaaacaccactgaggcccccaaccctttcaaaaccaccttcattccatggtcggcattcgtacccaccaggggatactcaggccgagaacaatccacctcaaggattcgaccgggcctacaactgggcttctcaatcacggcaagagagcccaggtgcggcgactccacttcgccaagaatctgaccaaagtattcaggacaagcagcaattgatggctaatgcaccttttatgtttccgccgattcctcctcaccagggaaactttatgatgcctatgaatatgaatcagcctttgattcctaatgcaccattcaattatcctctccagcaagatggaaaccctcagtacttctctgcccctttccagatgcagctaccagatactggatcagaacaaggttccatgtcaaatgtccagcctccagctggtcctatgagtttccctgaggggcctcagcgcccatggggtatgaggctgatgagtaatccatttcaatcgatggcccttggtcagggaatgattgatggtgcgggtgatcctcaaggtggtggtggccttgccttcatgcaagctggttttgggggcatgcctgatggctccatgaatacaggcatgcccgatagaggtgatggaaggggtattctagcacagatgcatatgcaaatgcagatgtcacttcccccacctccgcctacacaacctcctccaggttcacagcaaacgtttaacaggacttgatatttttttttgtacgaattgatggcaactcccagaattgcatgtcaattcattgagcaaattgtaattttgtcgtttttggcatgtaacctgtggactagatggctcagttctgttccctggttggataggagcctgtattatgctataactcctgtttgaatgaaatgttccgaaatttcgaaattttagttcgagatggtagattctagtatcagtaaaatatgttttaagaaaaaaacgatgcagtaagaagtttgaaacatgcggctt

SEQ ID NO: 13287 - DNA, 115 bp, Zea Mays
tgggtggggaatgccgaagaaaaaggaagaagggaaaaagtatgaacttgtacgacttccttatcggtttaaattccaaaaaaggttcagcaaaccctgcactgaatggttggag

SEQ ID NO: 13288 - DNA, 1017 bp, Zea Mays
gttcatctaggggtgggaaagcggaaaggcagacggggagggaatccttatcttctgagctggtcgaccgcaccgctgagaaggagaacttatgtttatatggacttcctaatgagacatgggaaataaacttgcctgctgaagaggtccctcctgaactgccagagccagctcttggaattaattttgctcgtgatgggatggatgaaaaagattggctatcacttgttgcagtgcatagtgattcttggctaatgtctgttgcattttattttggagcaaggtttggattcgataaagaatccaggaaacgtctcttcaccatgatcaataaccttcccagcatatatgaggttgtcacaggaacagccaagaaagagcccaaagaaaaaactcctaaaagcaacattaagactaacaaatctggctcaaagccctcgcgccatgcggaacccaactcaagggtcccaaagatgccacctccaaaggacgaggagagtgaagaggaggaaggggaaccacaggaagaccaggagagtgcgctgtgtggcgcatgtggcctaggttatgacgacttctggatctgctgcgacctatgcgagacatggttccacggcaagtgtgttaagatcaccccagctaaagcggaccacatcaagcagtataagtgcccctcctgcacgggaagcaagagggccaaggtttgatccacgatccaaggagcctttgacgagagctgtaagctgactcttcgtgctagggcagctaatagattcgaatgcttgttttgatacaaattatgagtactgacgaaccgtaaactgatgtagtttgtgtggccctcaaagcatctatgtcctgacttgtgtggtttaggtttcctttggcacagtttctaagagctgattgtctatgaatctaatatgagttttgtcaattagagagaagttgctatgctgaatttatgagctgattttataaagtgatgatataaaataaactaaaagaccagagccg

SEQ ID NO: 13289 - DNA, 1962 bp, Zea Mays
cttggttggtgggtgggatatgctaaggacactgatgattccatcgggagaattgtacgaataagccctggtgtcgggagatatgtggcgaagagctacaacccaaggcaattggtcactgcatcttcaggaactccattatttgaaattttccttgtcaaagaagatgatgagacatatacaatgaaggtggtacacatgcgaccaacaaaaggaacttcaggtgcaccatccatatcatcaacaataacagaaagcccagcaaaggtagagaatgaaaattcatcagaaagtagtgctatatctgacagtgttacagaggaggcaaatacagatactacggtaagaggaaatgaggatgctgaagagaaagcacaagatgttggtagcagcaaggatagtagtgtcgaaggattaaaaagtgttttgaatttttttaagtctcggattcctgaattcaaagttcaggtgataaatgttgatgtggctgaggaaactgaattagctgcaaattcgtctgaagaattagtgcaagatgatgtgaaaagtactccagaaagctcattggaagagccagccactgaggaactcgagcaggaggaagatgttccggaagaaaatacggatgaagaaagtaaaagcacggaagtgaagctttttattagtggagtggttcacaataaagaagatgctggagcaaaatcatatgttcgagttccagctgaaataaataacatggaaaaggactcctttgaactgtacattcctggagaaggttctgatcgtgatttggctgaaacaaaggctgcaaaacagaaagttgcagatatggctgctaaattagcctcagagcttatgccgtctgatgttgccaaggcattatggggtacagccaagagttcttcaaagataaataaagaagttcaggagcttttaaggcttacgttaagcaaggcccgagtcaagctgaccgaaaataccatttttaaacgaatcattatggacactaacagcacagatccatttaatggtctctatgtgggagcatttagtccatatggaccagaaattgtgcagcttcgtcggaagttcggccactggaacagtactgatgacgttgagtttttcgagtatgtcgaagcagtaaagttgactggtgatctgagtgttcctgctggccagataacgttccgtgctaagattgggaagggcaagcgacttgagaatcgaggagcatatccagaggaatttgattgccagttacaaaggtcagggtagaatagctcagcctggattcaaaaatcctcgatgggtggatggtgagctgttggtactcaatggcaagagtacaattccacaccttggaggcgcagagctcggtttcctgtatagtgtacctgagcagagttttctggttctcttcgatcggcttaatcttcccgagtgatgagactcctaaagggagcagactcctcacatgtagattgcatgaacgcgcagaggccggccacagctccaagtgaccgaaacaggtctggggggccgtttccccatcgtcttctgccctctgggcttcctgccaatcctttctccgcacctactttttaggagctcatgtgcttaactcgtttcagagtgtgagggaaagtcgacaccattgctggtctaaactaacggaggagtcttaatactaataatatatatgttatagcatggtagtttgctctccaatgccacagttgtagctgtattgggtatgggcatgacagttttgcgagttttacccgtcatcgttgatttcagtaattaccgaattgaataaaaatcgttctggtgtatcgtgatgttacaattataataatataaaacaaggcaaataaagtctcatgatttatgatcgtttttctcttgtaatatggtcgagatacttttattcctgtcctattagattttgatattgac

SEQ ID NO: 13290 - DNA, 371 bp, Zea Mays
cttcacacctgtgtctctgcctccactcctctcccttcccttcgcgtctcttcttcccccttccacttcttggccgagcccctcttggtctcggcatcctgctcgatcgaagaatgctggatcaggcatattggaggttgcagtaaaggcggtaggtgcttttcttcttccccgttggtggctagagggactggccggggagaactacaacatattggaggctgcaagttctcgggaggagccgggcttctcttgcggcggcaaacatgaggaagctcttcttcgtctacttcgtcctcctgctggccgctgcagtagttcacggtgaagatgattgtagcctgcatgcttgtgtctcattgcaatcttgg

SEQ ID NO: 13291 - DNA, 1630 bp, Zea Mays
atttagttcaatcagatgatttttatgagaaaagcttcagagccgataaactgatggaattctataaatcagacatgaaactgaagaaattcttgcatataattgagaattctccagtgtacccagttatctatgatagcaacaggactgtattatcattacctcctatcattaatggcgcacattcagctatcacccttgcaacaaggaatgtctttattgaatgtacagctactgaccttaccaaagcaaatatagttctgaatacaatggttaccatgttctctgaatattgtgagactaaatttgaagtggaacctgttgaagtgatacatcatgatggaaggaaaacagtttaccctgatctttcatgttacaaaatggatgttttgttatctgacattcttgggcctattggcatctcccaggacgagaaacaggttgtctgtcttttgaataaaatgcaactgcaagctgaaagtcactccttgaaaggggaggctcgcatttcagtgtctgttcctccaacaagaagtgatattctgcatgcccgtgatttgtcagaggacgttgctattgcttatggattcaacaatgtgccaaaatcaaagccgaagtgtatgacaataggaggaaggcaaccattaaacagattctcagataaaattcgtgctgaggttgcaagagctggttatatggaggtgctcacatttatcttgtcttcacacgaagagaactttgacatgttaaacaggacagatgacaaaagtaaagcagtcattattgcaaaccctcgcacttctgaattcgagatttttgaagttggtgatgttgtgatgctggactcgtcacgtgatgttggtgcctctaataatcgcaggcttgcagctttgtactgcaatagggtttctggatttgaggaaattatgggattggtggatagtattgtcaaagttgtcagagctccacatgttaactttggcgagaattactatgtacctacagatgaacctgagttcttcccgaaaagacaatgtaaaattgtgacaagtgatggcaagcaagttggctacttaggaattgtccatgctgaggtcctaaggaaatttggcattccggatccctgcactttcgttgagatggacctcgaagcactgttgtaatgcagtcaacctgaaacaaaggaatgcttgaagctgatacctcatacctgccacatattggttttgttcgtaagcatggtggggtaccagcaagaagtgcatattacccaagctgcagtatctcgatgtacttctcaattgcattggattttgctgtgggaaaaaagggtacaacgatacagcaaatacccagcctaatttttgtgttagggattatgtttgcattgtaagggcttattcctatccaactttctatgaaaagtgtaccgtacatccttttgtaaaccatcgcgcgtccaaaagttatttctcaactcttgtcacctccacatgaggtcaccatgatgtaaagcaggttcagaatattagacctctaatatctccttgtgtttgtgaatggcattaaaatttgacattaaggattgtttggtttataaagactaattttagtccttttattttatttc

SEQ ID NO: 13292 - DNA, 1954 bp, Zea Mays
cgaagacgtagttctcgtccatccagtattgcaggcgccagccgcccccgctgcggcggacgaggtcaggacgctctggatcggggacctgcaatactggatggacgagaactacgtcttcgggtgcttttcgaacactggggaggttcaaaatgtgaagctcatccgtgacaagaattcagggcagcttcagggttatggttttgttgagtttacaagccgtgcagctgcagaacgagttcttcagacatacaatggacaaatgatgccaaatgttgacttgacatttcggctgaattgggccagtgctggtgaaaagcgcgatgatactcctgaatatactatttttgttggggatttggctgcagatgttacagattacttgttacaagagacattcagggttcattatccctctgtcaagggtgcaaaagttgtgactgataaattgacaatgcgcacaaagggttatggatttgtgaaatttggtgatcctacagagcaagctcgtgcaatgactgaaatgaatggaatgccttgttcttccaggcctatgcgtattggtcctgcagcaagtaggaaaaatacaggaggtgttgttcaagagagagtaccaaattctcaaggagctcagtctgagaatgatcctaacaataccactatatttgttggtgggcttgaccccaatgtcactgaagataccctaaaacaagttttttctccttacggtgaagtcgtccatgttaagatccctgttgggaagagatgtggttttgttcagttcgttaccagaccttctgctgaacaagcgctgctaatgctgcaaggggccttgattggtgcacagaatgttcgactttcatggggtagaagcctgtcgaacaagcaggctcagcctcagcaggaatccaatcaatggggtgcggctgctggtgctggtggctactatgggggctatggacaaggttatgaggcttatggcagtgggtatgcacaaccccaggatcctaacatgtatggttatggcgcttatggcggttatcccaattaccaacagcaaccagctgcacagcagcaacagcaacaacagtgatgcctgtttgctcgggtaggtcattgggttgtcgcgacggaattaattaaatattatttcaggacactctcatattgcattcttgtcaattgaggtggttttgaaaggctcctgattttgatggccccatggcacggtttcatctatttattagtatatgacatatatgcgctgtgaacaagtggcgctctactgtgattgctgtgttgagacatgctttcttagtttctttccatgtttctcggatctgttgtgttacctttattactgtgtatttgcatatctactgtgatgctatatatgcactgtgccgtttgtttcctattccatttttttctcgttactttattatagcgttggattctttcttctatcacaacgaacagccgtgggcacatgggcatgcacgatgtcatgacagaatgtgtcgatggcaacatgggctccatcttttatctgtttcgagtccttgacatcaggataatgtaatgtgggttttgttgccgctgtgactgatatggaagcatgagctgccatcgttttcatggccgtccgagtctgaaaaatacatttacagtacgatgaatccttttcattcggtctattattcggtctattaggttaattcggtttggtttatttgggtttgtgaaattttgggttttgaaaaatgagaatcgaaattttcaaaattattttagaaaccgaatctgaatagactcacaattttagtttggtctatttagtccaccgaatagacccaaatagtagagagactaatatcttttgttaaaatatataataaataattaattgaaagtactattattaaaaaaattataaaaatatcatacaaagata

SEQ ID NO: 13293 - DNA, 1524 bp, Zea Mays
gccaggttgaagaaggaaagagatgaggctagagcacttttggctcaagctgagagacagattccagcatcagttgcaggagctgctcctgcagctgttgtttccaatggaaaaagagcaatggaagatgaaattggccctgacggaaagaagattcgtcctggtatcaaccctgtcatgattgatgaacttacagagtgtaataccatgctttcagcacagcgtaagaaaagacaggttcctccaactctggcaccattagatgcactcgagagatacactcaaatctccagccatccccttcataagacaaacaaaccaggcattttgtccatggatgttcatccttcaaaggatgttgttgcaactgggggtatcgatacaaatgcagtaatctttgatcggtcatctggtcaaatcttgtgcacgcttactggtcactcaaagaagataaccactttaaagtttgttccacgggatcaactctttgtaactggatcagcagataagactgttcgcatttggcaagagaacgagaatggaaactataactgcgtccatacattgaaagatcatactgctgaggttgaagctgttacagtacatgcgactcagaagtattttgtgagtgcttccaaggataattcgtggtgcttctatgatatttcaacaggatcttgcctgacacaggttggcgaggcttcaggacaagagggatatacatccgcgtctttccatccagatggtcttatccttggaacaggaactactgatgctgttgttaaaatttgggatgtgaagactcagtcgaatgtcgcgaagtttgaggggcatgtaggaccagtcactgctatgtccttctctgaaaatggttacttcctagcgactgctgctcatgatggtgtcaagctttgggatcttcggaaattaagaaattttaggaccttctctccctatgattcagatacgccaacaaatactgtggaatttgattttagtggaaactatcttgccattggtggttcagatataagggtctaccaagtagctaatgttaaggccgaatggaatctcatcaagacattaccagatttatctggaacagggaaagtaacttcggtaaagttcggagcagatgctaagtacatagccgtaggttctatggaccgcaatctacggatatttggcctccctggagacgaccaaatggaggaatcaaccacagcggcagagtgaggaaaatccatggttatcggcattcattgtctatttggccactgtcgagaggtaatccacggagacacaccgctggcgcccgtgacacttggcctgtttggttacttgctaaaaattgctacacatttttgtgccacacttgtttaagcacacttgtttaaggtgtttaaggttatacgctcaaattccgcgtcacagcttgtttgtcactcataagagaatattgcctgtaaaatgagagtctgaacgacttgcccgtaaaatgagatggaaaatcagttagctgta

SEQ ID NO: 13294 - DNA, 1782 bp, Zea Mays
atccatggccatgcgcttcgcattcccgtcgcaaagagagtccagacggagacatcatagactgcgtgcatatctccaaccagcccgccttggatcatcctttcctcaagaaccacaccgtccagatgcggcctgcataccacccggaaggtctgtacgacgacgagtccaaggttgcatcgcagcggaacgcgcagacgatcacccagatgtggcatcagaacggcaggtgccccgagggcacgataccgatcaggcggaccaaggaggaggacgtgctgagggccagctccgtcaggaggtatggcaagaagaagcgcaggagtgcccccaaccccatgtcggttgaccctgacatgctcaacgagagcgggcaccagcacgccatagcgtacgtggagggggacaagtactacggcgccaaggctaccatcaatgtgtggcagccgaagatcgagcaggccaatgagttcagcctgtcccagctctggatcctgggaggctccttcggccaggacctcaacagcatcgaagcaggatggcaggttagcccagacctgtatggggacaacaacactaggctcttcacctactggactagcgatgcctaccaggcaacaggatgctacaacctgctgtgctcggggttcatccagataaacaaccagatcgccatgggcgccagcatcttccctatctccaactacggcggctcccagtatgacatcaacatcttggtctggaaggaccccaaggagggcaactggtggctgcagttcggcaacgactacgtcctggggtactggccgtcgttcctcttctcgtacctggcggacagcgcctccatgatcgagtggggcggcgaggtggtgaactcggagcccgacggcagccacaccagcacgcagatgggcagcggccacttccccgaggaagggttcggcaaggccagctacttcaggaacgtccaggtggtggactccaccaacaacctcaagccgcccaggggcgtcggcaccttcaccgagcagtccagctgctacgacgtgcaggacggcagcaacgccgactggggcacctacttctactacggcgggcccgggaagaactcaaactgtccatagcccaagactgactgagctgagccgccgcctatcacactcactaccagagccgcctaaccttaacacacctcagctgtatcattcatgcatccggtcaattagtttatactgcctcagatttttaacttttttttttgttttcgttttgtttcgctctttcttgcttctacctaccccctagtttactgactcgtaccctaggtgagtgagcgtgtgtgttgttgacatgtgagattgttctctctctctctctgcctcagagagagtgagatgaaggagagatgtcggtcgtctggttctagggaagagaggaggactgtggcccgttttctgaagagaaaaacaaggcctcatggttgctgtgccttgtgcctgtcaaataattttgtttgtttcatcccatgctggactggactgctaatcctttgttttctgttatgaaaagtgggcaatcgagtgcttagctgttgggtagacgtgcaaagatgccaacttttccgtgcgcccgccgagtctgtctgttgcccacttgtgtcacctggaaaagtgcgtgtgcgggtgatcattttatatgtaaatgtgtttgttattaatattattatagcagcgtgtggtgctggtgctggtgctgctactgtaataagctggtggagttcgc

SEQ ID NO: 13295 - DNA, 688 bp, Zea Mays
gtttagtcacctagaagcaaaatgaagagtgagatgtcagaatacaagaacgtcgttggggggaggctaaagctgaagggtaaggcactggatgtgaaggaaggtggagtcaagaagaaaaaaaagaagcatcagcttgaagagtcgtctcagattgagcacgatgagctccacaaagggggaaactctggcttaccagctgatcacaacaatgagcttattgaagctggcaaggtgggagatgaagaaaggaatctacatccagactacgaccacctcacaccggcggagcgacgctatatagatcagaagcagaagatcgacatgcaaaagctggccaaagttgctaacaagtcacacagggaccgtatccaggacttcaaccagtatctggcgaacctcagcgagcactatgacatccctaaagttggccctggctaacaaacatagccaaactgctgtgtacgcacaaacaattgtatgctcggtgggcttcaagaacattaaaaatatataaatgtatgttgggtgattgggtctatccagctttttgttagcatgttatatatatcctagtattttccacttttcttttaaaaaacataattgatactcttatgtgtattgatttgaattgaattacgtctgcatatgttcaatttgaaagtagcaagactcaatttgcctt

SEQ ID NO: 13296 - DNA, 2613 bp, Zea Mays
acacaatacaggcgacttgtcctcggcgcctccgcaccccatttccctttttacgcctacttgacccggcagcgttcggtgacgaaaaaaaaaacccaatcgcctccgccccctcccctactccgggcgcagccgccgacgtcgccacgcgcattccgccgcgccaatcgggtacacgagcagggcgggggatgacgtcgtcggcgtccgcgccggcgtccaatggaccgcgctacgcgccgccggatccaacgctgcccaagccgtggagggggctcatcgacggcaacacggggtacctctacttctggaaccctgagaccaaggttacgcagtacgagcgccccgtcgcggccgtgcccaactccccgccgcagccgcctggctactccaggcccgaggagaggccgagaagcagcacaccttccgagcggagctcggaaaccacggtgagccgcccgcagtatgcacctctctcggataacagggcaaggaatgaccactcggagccacattatgcatctggagtgaacctttcacaaagtgctccttccactaatcaagtttctcaggctgccagtggaaaccaaatgtcgacagaagcatatcgtgctaagcatgagattaccatcatcggcaacgagtcacctgcaccattcatgacatttcagtccacatgcttcccatcagatattctaagggaggttctgcaagcaggattctctgcaccaactcctatccaagctcagtcatggccaattgctatgaagggtagggatatagtagctgtggcaaagacaggttcaggaaaaacactgggctatctcctcccagggtttattcttctgaagcgcctgcatcataattcaagggaaggtccaacagtattagttttgtccccaaccagggaattggcaacacaaattcaagatgaagcaatcaagtttggcagatcttcaagaatatcttctacttgcttatatggaggtgctccaaaaggtcctcagctaagggagttggagcgtggtgccgatgttgttgttgcaactcctgggagattgaacgacattttggaaatgaataaagtgagcctgcgccaagtatcatatcttgtccttgatgaagctgaccgtatgcttgatatgggatttgagccacaaataagaaaaattgtgaaacaaataccacctagacggcaaactcttatgtacactgccacatggccaaaagaggttagaaaaatagcgtcggatttactgaataacccagttcaagttaacattggaaacactgatcagctggttgcaaataaatcaattactcagcatgtggaagttatcccacatatggagaaatcaagacgacttgatcagatcttgcgttcacaagatcctggatcaaaaatcataatattttgctccaccaagaggatgtgtgatcagttggctagaaacctatcacggcagtatggtgcttctgctattcatggtgataaatcacaggctgagagggattctgtgttgaatgacttccgaagcggcaggtgtccagtactcgtagccactgatgtggccgctcgaggcttggacataaaggacatcaggatcgtggttaattatgatttcccaactggtgtggaggactatgtccatcgaattgggagaacaggtagggctggcgcaacaggatctgcctacacattctttggtgaccaggattcaaagtacgcttcagaacttgtgaagattttggagggtgcaaaccagtctgtgccaccacaattaaaagaaatggcccttcgtggaggatatggtggaagatcacgtcgatgggcatcttctgatgactcttatggtagtcagggatatggtgctaaaagatcaactgatagtttcaagaacagcagcttcggcaaccaggccgggggtggttcaagctttcactcgagcttccataacagctctagtggcaatcagttcggtgatactacaagctttcatgccagctatggtaacagcagccagaacaatcagacgggtgacaatccgagcttcccacccagctccagcaacaatcagtccggggatggtctcagttttcatgaaaggttctatggatcacgcggaagggacgagagcagatcaaacaatgatggattccgtgctaggagcagaagtcctggcaagcctgtggaagtttccaactggtgattgcatccactaggtgcaatccaatttttgcgatggtgacgaaaccaagtaaaagatggtacctcgacaagttatattttcctcttatcctgcttaaatctaaggatgtcctggaacatcactaacttaggatatgggtgatggtctgatcccaatggacaatggtctcctactttcttgatttgacgcctgagagacgcctgattccataccatatgcctgtggttgtagtttgtaaaatgttaaaaacttgactttgctagtatatttcctaatgctataacccaatcctgggtaaacagacgcatggggatgaattttggacggaaccatggacatttgatgtatgtgtttaatgttgtgtacaatctatgtcgaattctgttgtaagtgccgtcaagaa

SEQ ID NO: 13297 - DNA, 1855 bp, Zea Mays
gcaatttggagaggagacgcatctatggactgaagggaaggaacatagatgtttttgcagagaatagcagcttagccattaatcctcactatatccggtcctggttggatctgttgtcacggacaccacgggttgcaccttttctgcagaaaaatgaccccttcatagcagcactggaaaaggaactgtctgcacacactactgatgtgcgtgttcaaagtgatgcgcttgatggcatgttcactttctatgatgcgacgaaagcaactctaaatgtctaccaggttgcaggtgttacttttgatctgctgttccttctggtgctcggctcctacctgattgttctcttctgtttcctagtgattactacacggggtgttgatgatctcattaacatattccggcggcctccatcacgcaaactcaagggtgcataggctaggctgtgttttgtgtattagcgccagccaagagaccgcatgcctagtagtcattagaagaagagatagagatgaggatgacaggcaggcaggcaggctagcttgcttcccacagcacatagacaaacattttttttcctttttgtgtcaggaatttcgactgtaatttagctgtattttggttacaattctggcttattcggggtggactggtggcggtgtctgatgagagacagagaagcacacaccaccacgccgcctctgaactttggatgctgagaaattcttgtctgaaacacaaacactgaaggcctgccgtgcctgtgtttacttgttgtctgaaatataaaaaataatagagaagaggaatataaagtcaaagcgaaacgaagcacctaccttgcaggatgagatactggaacatggagataggccaagaagatcgtgattgaatttcagtcccttgattttagatcggacggccgatagatagatagtaggatggataaggcagtgagtgatccagggccaatgggccatccaacaaagagtcagccgagtctgctctgctgctccatcggatctcccgcgcgccaaaccatgccgacgcagcaagcatgttctgctgcggcagcattgagatcgcggcggccttcccctgcatccacgacgacgacctcccggcagctgcggctgcgtccgcctcgtgccgccaccgcgggcgtgcggctgacggtgtcggacgcggagctggagtcccgcgggttcgctgtgcggcgcacggcggagggcatcgacgtggcggcgctgaacgaggtgttcgtgcgcgtgggcttcccgcggcgtcaggaggagcggctgcggcgcgcgctggagcacagccgtgtggtgtggctgtcggccggggaggaggaagggcggcccgtggcgttcgcgcgcgcggccggggacggcgtgttcaacgccgtggtgtgggacgtggtggtggagccgtcgagccagggcctcgggctgggacgcgccgtcatggagcgcctcgtcgacgagctgcggcgcgacggcgtggccaacatcgtgctctacgccgagacgcgcgtggtggggttctaccgcctgctggacttcgccatggaccccgacggcatcagggggatggcatactaccgcaagtccactactaccgccgcttgattcgtctcgtctgtcttgaactcattcatcaatgaaggaagtcgatcgaattccctaaagccccccatgtttgtatgatgtagatatgacatggtttatttttatcactcatctcatagttgctcgtttattacctttcattttatattccgcgaaaacgatctagctagaacatgtacttatatttcccgcaaatcaagcaatataaaaacctcacttctttc

SEQ ID NO: 13298 - DNA, 1237 bp, Zea Mays
gtccaaaatatatactgccatcaggccgacgttctaccgcgtgtaccgcaagaagtcgacggaggggttccagtcgaccccgtacgtggtgacgctgttcagctgcatgctgtggatcttctacgcgctgctcaagtccggcgccggcctccgcgtgcgcgtgctcggctggatctgcgtcagcgtcgcgctcagcgtattcgccgcgccgctcagcatcatgcggcaggtggtccggaccaagagcgtggagttcatgcccatctcgctctccttcttcctggtgctgagcgccgtgatctggttcgcgtacggcgcgctgaagagggacgtgttcgtggcgttccccaacgtgctgggcttcgtcttcggcgtcgcgcagatagcgctgtacatggcgtacaggaacaaggagcccgcggcggtgacggtggaggaggcgaagctgccggagcacgccaaggaggtggtggtggccgcggcggcggccgaggccagggcgagctgcggtgctgaggtgcaccccatcgacatcgacatcgaagctacgccgacgccggtggaggaggtgcacgagccgcaggtggtcgtggtcgtcgacgtggacgtggagcctgtcacctgcgccggcgccgccgaggcagctgcgggagcaggggcagatgcgtccggcgtggccgacggcggcgtccctggacccatggcgccgccggagcagctggcgatcaagcccgacatggccatttccgtggaggcgtaggttggttaaagtgtaatagcagagtgagtcgatatcgatcagtagtagatttgtcgagtcaaggaaggggcctgctgctgctgctacgcgacagcagcggccagatgtactgcctgcatgcatgcagtccctcccgttgactcgacccgtagagaagggatgggatggaagtagccgggtccttgggcgagtagcggcgccttggcacccacgggccagccgtactggcctgtgtgatgaaccggcgagagagatgagataatgtgcgagcgagagagggttggttgggttgtggtagttgaagaagacggctagctagctgctgctgctgggctctctatctgtctctagatctgtgtatgtctgtgtaatcgaggattccctcaccttgcatgccgcctcccttttgtgtccttctagtctgatgattgttttcattccatccatgccggcgtcgcagtaataaaatttttttgg

SEQ ID NO: 13299 - DNA, 547 bp, Zea Mays
cggactgtgcctgcggaaaggagtaagggggaaaacatcataggtcctctttgcgcgacggccgccgcctcctctttgtagtttcattccgccgccgccgctccccgctctctcctctgcttgcggactgcgtggagcaccagcggcggccagcgggcaggaggagctccctccccaaacagagaggggtggggtatcagtgcgtgcgctcctggaggagggcgtggaagagcagagcaggcggcaagcaggggtttgggaggatggtttcgctctcgacttggttccgctatgccgcacacaagtttgattactgcatctccctctcgttgaagaaatataatgtgggccagatcagcagcacgcagctaactgatgtgatattcaaaaatttcttccatggcaagctcacctacgtgtgtcagaccaaaggggaagaagccatggctcccatcgtatctccaactggaggagccgtccttgtcagaaagctcgcaaatttgagccccacgaccgtggatatcattgatccatgtaaactggcgaa

SEQ ID NO: 13300 - DNA, 276 bp, Zea Mays
atgggctgacaaaaccctggaaaaggaagtgctgattcaataggggcatgccaaaaattgaaggtagacctccaagcagcattcaatgtactgccgaaggacttgcagcaactcctgctctccaaccctaaaagagctgttcttcttcaaggtagtcaagagaaggccctgggtgccaatggcattggcacccagacaagtttgtagcagccccctctgtaacattaccattgtcactattttttgcacacataatacaaagttacacatttatat

SEQ ID NO: 13301 - DNA, 835 bp, Zea Mays
ccattctgacgtgctctaatgtgtatgccttgcatattttctgaactacgacgatgatgacggcggggacttcgacgacgccaacgacgatgagccaaatcccaacgagtttcagtctctcgacaacagtggttggtcttctcgcaccaggggcgttgcaagatacctcaaggctttattcgacgacgagtctggtctggagaggaagagcgttgctatcgaccatctggtgcgcgggaagacgcggaaggaagcgtcgagaatgttcttcgagaccttggtgctgacgacgaaggactacatcagcgtggaccaaccgaaccccttcgacttggtgagaataaagccaggctcaaagctgctgatgtcggaattctagaccgtccaagccagcttttacccctggcgccatacatacgtgttaccaattgtatccatcacaccgacctaccgcaccccctcctttaccccctccaaatccatttttgtttgtttgtttgtttgtttgttgttgttgttgttaagttatcctcctctgtgtagcatctcccgcgcgctagggctcgagtaggatggctgctatgttgtaccgtcggctgtatatatgatttagtgacacatgtgaagcctgccatgtaatctgatagcgctggctccctccctccctcccctccgatccactaaagctattgtataatttgtatttgcttggctaaagcccgtaggaatttgcgtattggtaacaagacgatatgatggtgtacctgttgattatgtcaggatctattgacagctttaactcagctattattggactgacctttcttgtgaacca

SEQ ID NO: 13302 - DNA, 1128 bp, Zea Mays
cgctcgctcttcagcgcggggaaaccgaccggtctcggtgcaacccacgggctctggaacaggcccaatcgagccatgtatagtaattacgggaatccttcggggatgcagatgcccccgcaaaactctcaacctgtccagtttgataatccattatacggtgcaagctcgggcctaatcagatctgggataggagtatatggggagaagtttttgggttctagttcagaattcatgcaaagcaacatcaatagatacttctccaacccgcagtattacttccatgtgaatgatcaatatgtccgtaacaagttgaaagttatactgttcccgttctttcacagggggcactggactcgaataagtgagccggtcggtggccgcttgtcctacaaacctccaatctatgacataaacgcaccagatctgtacatccctttcatggcatttggaagcttcatcatcctttcagggtttacattgggtttcatgggaaagtttactccagcagctataaatctgcagtttacaagggcgctcatcggctggggcttccagctcatggtcctgaaaggtctgctctactcgatgggtggtggcgaggtgccactgctcgacttggtagcgtacggcggttatttattcgccgggctatcgctcgccgtcgtcgcgaggctcgtgtgggcgtactcgtactatgtgatgatgccgtggatgagcctgtgcatgggggtgttcctggtgaggacgatgaagagggtgctcttcacggagatgagaagcagcgagaggcactcgtcgcggcagcactacttccttctcttcatggcaatcgcacagttccccctgttcttctggctcggcagcataggtgcatgatacagttttgtgtacttttcgcagcattaacgttgcaaaaatgatattgaagtgtttagatgtgttgtaaagaaaaaaacaattggacaatggtctcaacagcttagaggttggcagctctgcttgtgaagttgtatgtgatccacaatcatgttatgctattgacttttttggttggtacatcttttctgccatgtgtctaggctatctctagtcactcttctatcctactaccttctatttcaattc

SEQ ID NO: 13303 - DNA, 1161 bp, Zea Mays
ataaattatcataataataattatctatattaactgactatacaagagtgtcgtataaaattatcataaaaactaaacaccttgtatacaggaaaaacgataaacaaaagagtaaaaaaccaaaaaacaaaaacaaagtaccatcgcccttccggttttctccccagcccccgccccggtcgcggagccgtcgttctcgtctttcgcgctccgaaaccctagcgccgccgcgggtgccaggccgcgagcgtcgccatgggcatcgtgtttacgcggctcttctcgtcggtcttcggtaaccgcgaggctcgcatcctcgtcctcggcctggacaatgctggcaagaccaccatactctatagactgcaaatgggagaggtcgtctccacgatcccgacaattggattcaacgttgagacggtgcagtacaacaacatcaagttccaagtatgggatcttggtggtcaaacaagcatcaggccatactggcggtgctactttccaaacacccaggctatcatatatgttgttgattcaagcgatacagataggcttgtaacagcaaaagaagaattccatgccatccttgaggaggatgaacttaaaggtgcagttgtccttgtgtatgcaaataagcaggatcttccaggtgcactcgatgatgctgccattacagagtcattagaactacacaaaattaagagccgccaatgggcgattttcaaaacatctgcaataaagggagaggggctcttcgaaggtttggactggctcagtaacacgctcaaatctggaagcagctaaggagcctccgcctcgtcatgaatcatttgctggatggtaaagaatagccgatgcttgcaagtcagcgcgcaaatcccattctctttgttttaactccagaagttctacaccgccatcaattatctgtaaagtgcgtgttaaattttttggatactacattagatgtacccccaggttgagatcaagaataggtctgtggaaaatgacgagcaaactgtgctactgtctttacccgtaaatctcatggatcatgacaagtttttttttgtaccccaatatgattaaacttactccacatttctatgttttcgtatcagtgatcattacagaaactgctcttaagcaccttctgctacc

SEQ ID NO: 13304 - DNA, 104 bp, Zea Mays
gtgaacacaaagcgaactaatctttcgccttttactaaagattaccgtgtgtttgctgggaatataagcagcataccaatatttttgtagggtttcttctcttt

SEQ ID NO: 13305 - DNA, 960 bp, Zea Mays
ctcatggacacatgtttttcagcaagataaggacaacaaattgaagaatggaatggaggttgaggatagcgaagatcatgtccaattgagcactgctgaccgaagctctctggccaaggatcttcctagtgcattgtcattgaaggctcaagctttaattgaagcattagagggaaagaggtttgattcatttatggatgccttaagagatatactggaggaaagtggcttgacatttaagaagcttgataaaaggttagagaggacaatgctgcattcctatcgcaaggatttgacagcacaagtttcatcagagaatgatcctgttgcctttcttccaaaagtcgttgctttacttttcctgcaggcatataataaggctattcaggcaccaggaagagctgttggtgctgttatcacactgctgaaggataagctgccagctgcaacctacaaggtattgactgattatcacagcactactgtgaaacttttagcactacaagctgctgctactgacgatgaagaagattgcacatcagaccgaatgcgagaaaggaaggaggatctggaagaaaggctgatgccagaactgaaatccctggtcctcggcacaaacaaagagtgatcaacaacattcttgtgcataccggaccatttcggcgtacatatacaaagcaacactcagcttaaaagtttttttttgctctgtttttgcaatttgcaccgtttgaaagcaaaagatagcaggaaacaggtttactgattgtaagaatctgactagtttatactcccgtttacattcctgcactaggtttctactgataacaacaaaattatactatggtgtaatgaagagcatagtggatgttaacagggaatcagggatgaaagtagatatctgaattgttaggataatatatatatatatactctattcattacctagggtgatgatcc

SEQ ID NO: 13306 - DNA, 111 bp, Zea Mays
  misc_feature (110)..(111): n is a, c, g, or t
gtcacttctattttttttttttttttgttttttttttttttttctttttttttttttttttttctttttttttttttttttttttttttttttttttttttttgcggcann

SEQ ID NO: 13307 - DNA, 969 bp, Zea Mays
atgacggaaaatgattttagcaaaatcgtggtcgactcggccatcaccgacagaaaccggcttggacccgcccgcatgaaagccttgtgcggcttcagcttcaggtcgaagcgtatccctctgccctcccggctccctcaagcgctaatacggctggctgcgcgtcattctcttcctcttccggtgctcgtgctcgtgctcgtgctctccgccctccccctccgccacttcgcgcggaacggaacccaggccgccgccgacccagccaccgctaggcgtctaggcgaccgcgcggcatggtggcgcttttacactacctatgctagtttgcctgatgctacatttccacgatggttaagctgactatgatagcgcgtgtcactgatggccttccattgtcggagggattagatgatagtcgggatctcaaagatgctgacttctacaagcagcaagcaaaactgttgttcaagaacttgtccagagggcagcatgaggcgtcaaggatgtcaattgagacaggaccgtaccttttccactacatcattgaaggccgtgtttgctatttgactttgtgtgaccgttcttatcccaagaaacttgcattccagtatctcgaagatctcaaaaatgaatttgagaaagtcaatggcagccaaattgaaactgctgcaaggccatatgcatttattaaatttgatgcattcatacagaagaccaagaaactgtatttggataccagaacacagaggaaccttgctaagctgaacgatgagctctatgaggtgcaccagatcatgactcgcaatgttcaagaagttctcggtgttggtgaaaaactagaccaggtgagtgagatgtcaagtaggttgacttcggatactagaatctatgcagagaaggcgaaagatctcaatcgccagaggatatgatatttaactattctacacgtagttccaaattgtagtt

SEQ ID NO: 13308 - DNA, 689 bp, Zea Mays
gcttatcaatgctggaaggatattggagaataatcggacacttgcagagtcccgtgttccagtaggagaggtcccaggaggtgtaattacaatgcatgtggtagtgcgacctccacaagctgacaaaaacagtgagaagcagcttgcgaattccgtcaagcagaacagatgcgggtgcaccattctctgataagacgcctgcttgatgttgtacaatctgtgtagtcttaggattttgtatctgctttgctgtgttcacacaagcgtgaattcattttgatatccagtccttgaagccattcgagtccagaaacatacacactaaaaatccatcgaatatgaaggtttctggatggtagatttggatcgtcttgttccagagttgaggattggatgcttcctgctgtataaatggtgttgtcgaaactagaaaaaaaaactcttttatttcttttttcttttctgccatgttgacgttatatatatatcgattctttttagatcggttgctttgtctcgtctaacagaaatattgtactcagatataagttgcaaaaggagtaatgtatggtgttatggtaaaggggaaacaaagaggtgaaaagagcgcatggctagttttacatttgattctttggttaacctgacctgactgtgcatgcagtagctgaaggagcagtgatgtgttt

SEQ ID NO: 13309 - DNA, 1519 bp, Zea Mays
gtgtccctcatcaccgtcgatgctatcactgccacaaggcgggtgtatacaagggattactatgatgtgcttggagtaagcaaggatgcttctgcaccggatataaagaaggcatattatgcgctcgcaaagaagttccatcctgatactaataaagatgctgatgcagaaaaaacatttcaagaagttaaccgtgcctatgaggttttgaaggacaatgacaagcgtgaaatatatgatcagcttggaccagaagcatacgagcgtcaagcgtcaggtggtgaccctggagggccgggttttcctcggggtaacccatttggtgacatctttggtgatatctttgataatgcatacagaggtggccaagatgtcaaggtttctgttgaactatcattcatggaagctgtccaaggttgcagaaaaaccattacgtacgaagctgatactttttgtggaacttgcaatggaagtggcgtcccccctggaactgtgcctaaaacatgtaaaacatgtaaaggctctggcgcgatatacatgcagaagggtatatttactgtcgaatgtacttgctccctgtgcaatgggagcgggaaaattgtcaagagtttttgcaagacttgcaaaggagaacaggtagtgaaggggaaaacgtcagtcaagctagatatagccgcaggaagtgacgataatgacatcatgaaggtttttggtaagggtggtgcagatgttgaccgaaataagcctggtgacctttatgttactatcaaggtcagagaggaccctacttttcgaagagaaggcatccatgtgcatgttgattctgttttaagcattgctcaggctgtcctaggtggaactgtcacggtaccaaccctcactggaaatgttacagtcaaggttcgtcaaggtacccaacctggagagaaggtcgtcctccggggcaaaggaataaaagcgaggaactcgccagtgtttgggaatcagtatgtacacttcaatatcagggttccgacggatgtgacgcaaaggcagagggagctgatagatgagttcgataaagaggagtgcgcagaccgggaaagacctgcggttgcctccggatgaagtttttggttcaaccattaattagttttagcaccacactagtttgatgccctcaatttctccaacccgccataaggtgctgtaggcaccaaaagcttattgtaacatttgaatcttatatagcatctacccagtgtgtaacgtatacattacgcgctaaattattgtaccattttcgatttttaaacagaaaagatagcgggggttgtcttcactcttcagtaacattcttttgggggtgtggttgtgtgccaagaatgaagagaggggatattggcaggagaaagtgtttttgaatttaatacgaatgtcatggtaccaattttgtgtcatcaaaattatgtatcactagagtagctgttattaaaggcaatcctaacaacgaaataaccattataatttcaacggagag

SEQ ID NO: 13310 - DNA, 240 bp, Zea Mays
gttgtggtggaatgctcggtagatccgttgttaggtacgttaattgatcacgtgatgtggaagacaatagttggattaatctcaaagtgatgctgatgaataaaccagagaagtggatgatttgatcatgtaccaggatgggagatgctcaccaagtgatcgtcatctaacaacactgacttagtgttatcccaggcaagccccggtgcatttgccaccttccttgtgtttacaaaattt

SEQ ID NO: 13311 - DNA, 653 bp, Zea Mays
cctaataacgaggttgttgatgtgtggctttgccatgcgaatattgatatatattcaggcaactcagtagcccaagcaattgaccttcttataagaaaaggtgttcctgaggatcggatcatttttctcaatctcatctcggctcctgaagggattcagtgtatctgcaagcgatttccttcgctgaagattgttacatctgaaatcgattatggtctgaacgaggaattcagggtgatcccaggactgggagaatatggcgaccgctacttcggcacagacaattgatggatcataccactctatggctgtgtgaagatctcacttggtccctggatagggatggtatcttgcaagtaatatttaatatggaggcgtaattgtgtttaatagtcggcatgccttagtaacatgtagaaccttctgcataaagcttgaccaaggacagcgggatgctagagaaggacctgtgaacggagaacgtggtgtgtgttttgtcttgtacgggtgcagaaacattgatgttttcaaataagtgtgtttgatccaaatactttacggtgaagtcatgagattaaatctgcaaagcactttaactctgttgttctattgggtttttaattccaacctacatcaacttgctcaggataaaa

SEQ ID NO: 13312 - DNA, 117 bp, Zea Mays
tgatgccttcagcttcttcagacattagatatcagttactgtgccatagcaaagctgacagatcataaaacagaagagtagagggaaaagagcaatacaggagcatctaacagccat

SEQ ID NO: 13313 - DNA, 757 bp, Zea Mays
tcctctccctctccctctcctgggactgcacgccattgcatgcacacaaaaggaagctctactgggatcaaaaaaagaaaggctgcttgaacatgccaacaaggaaatctgagaggcttgctaagagaatgaaactcatggcatcattgctcctcacgcaacggaaaaagattggagtaggtgagcactttcaggcagaggtacctggttggactgggcaaccttcagggaaagagctttcatgttacaggaatgacccagagacatcaaagatgttagggactagaatgtggcctcctgagggtgaagtttataaaactgacattgtagctgttgggcagggaaggcctggatcatgtaattgcccctacccaggatccttcctctgcagacagctccacacaaatgaagcaagagatcagctacgctctgaacttggtcgagtttttacaatgtggcaatttgattctatgggggaggaggtttctaagctgtggagtcgtgatgagcaactaaagttcgacgcacttgagcaattggttcccgttatggatcaaaagacatattgggctgttgtgtcgaaaaattttgcttcaaagcccaggatagatttgataaagtactatctgaatgtgttcctgatgagaagagtgttgtaccagtgcagactcggtcttctggaaattgatagtgacgaagatgacgtggaggaagaagaggacgaagatcaacctgaaggatccagctctctcagaga

SEQ ID NO: 13314 - DNA, 651 bp, Zea Mays
gccaaaccttcgctgtccatcgtcaccctccttccttccccagcctctcatcctatgcaagaacccataatccagacccacgaactcgcagcagccattagcgtgcgctagccggccgcagccatggccgcccccgcaacgacctctctactgagcaccctgctgaatctgccgctcgccccgttgtcggggaagagctcgccgccgtccgtggtgcatgtggcgcggcgggggccgatggtggtggtggccgccaaggggtacaatgtgcagatcctggtggacgagaacgagggggaggagtccatcttccggcggttccggcgggaggtgatgcgggccggcgtgctgcaggagatcaagcgccgtcggaggtatgagagcaagacggacgagaagaagcgcaaggcgcgcgaggccgggcgccgcaaccgccgcaggcgtatgatggatgagccgaggttcccagaagaagacgccgacgctaccgcaaaggctcgggacgaggacgatgacaactgggagatcgatggcatcctgtgaaagagaagcaacggagtccatgatttcacaacgtccagacacacagaccccgacagctaatctgagttctttttggcccccgcctctcccaagtgggccgtgctaccg

SEQ ID NO: 13315 - DNA, 1340 bp, Zea Mays
catgggcctactgatgggcacaaacacgggctggccttctggttgcggatgggcgtctgcagctgtgctgttcctttttcctctggtgagacttcgcgattcgtgaatgcgcctttccgttccaagagaaggaagagaagccgcagcctccgcgagggcgagacagctcggcggcgtggttcggggatgggcaagggcgccgaactgtgggacgactccgcgctggtggacgccttcgaccgcgccatgttcagcatgaaagaaatgcattgcaagagcaagcgagcaacgccaagcgaggatgggaagaccgaacttgctgctgctactgcagaagaggagccaattactgctggagcagcggatgtgtgcggagaggaagatgccaactgtgacagcacacactgtgatctgtcagagttacaacaacagccctatgaagacagacagacaattgagcatgctcctcttcaagaaactgatccaggcaaagagacacatgtttcagaggctaagacgctctccaccgatgcttctactaatgctggtggaaattggagctcaagccagcaaactgggcagtacaatgaattgctgagacaatactatgaacttgaggagaagagtcggaacattcttgagcaactccaacaaacaaactattcaaattatcaagcatcaggatatgcttctacggcccaacagcagcaagttcctgtctatagtgccacagtaccagatccttactcttccaccactcaatcctcatgctgcaattggaacgttcccctggtatctgtctcctgctgttcagcaggccaaccaagtggaggctctgcttgtacgccacctactgctggctgcagcgtatcattgacttgtgatcaatgcccaggtgcaactactgcataccctagtgtttcaaacttcatgcaggtcccaacgatggtatctaccaatgatgatcaagttgataaggctgcaatgatgactgctgaagctgcctttaattttatgagaagtacgatatctggacagcctagcacacaaggaagcaaatctgatactggaaaggaggaaagcacaaatatgggcatgaacccaaatcttgacagtgatcttgctgctctcttaaattcatggtatgctgctgggttctacacttgcaggtacctcatgctgcaatctacaaagaattccagaccgtagtgtagtaggccatggccgtcttgagatagatgtccgagaagaagcaggttgaagcatcgctgggtgccttcatgctggtttcggcaggataacatttgtgctaacacgagtagattcgcttattcccgttc

SEQ ID NO: 13316 - DNA, 1330 bp, Zea Mays
tcaagacaaaatacaaattttgataaatcttaatggctacacaaagggtgccaggaacgaaatttttgcaatgcagccagcacctatccaagtttcgtacatggggttccctggaacaacgggtgctgcatacatagattacttggtcacagatgagtttgtttctccatctagctatgcacatatatattcagaaaagctcgtccatttgcctcattgctattttgtcaatgactacaagcagaaaaatcgagactgtctcactccagtatgtccacacaaaagatctgattatggattacctgaggataaatttatttttgcttgcttcaatcagctttacaaaatggaccctgagatatttgacacatgcgcattatggcttttaagattcccggcagctggtgaaactagagtgagagcatatgctgctgccagaggagtaagatcagatcaaattgtattcacagacgttgccatgaaaaatgagcatatacgacgcagtgccctggcagaccttttcctggacacgtatgaagttcttcatctgctattcttttttccaaacataagctgaaaatgtaaaattaatttacaccctgtcctcatgattttttctggatcagtcccctctgcaatgcacacacaacaggcactgacatactgtgggctggtctgccaatgatcacccttccactagagaaaatggcaaccagagtagctggttccctctgcgtagctactgggcttggggaggagatgattgttagcagcatgaagaagtatgaagatagagcagtagaactagcgctgaatccggtgaagcttcaagcgctgactaacaagctcaaggaagttcgtatgacctgcccgttgtttgatacagctcgatgggtgcgcaaccttgaaagggcatactacaagatgtggaacctttactgctccagtcgccacccggagccattcaaggtggtagaggatgacaatgagtccccatttgaccgctaacgagatctcatcagcagcccggctctgtaaataaggcgagagttgtagaatatttagcatcgtgaccgctgttgctccaggtgcttgtttgccgccccctttcctgccgtgcacatcacctctgtggaggctaacttcgtagtatgtatgtactacactgcaaaagaagtcctagggttagcctattgttatcactatttagtttgctatattgtatcgcggtcgtggtttctaaaataaactgcaacctttaggagtgttgatgtgaaatctcattcttaatagcttctgtccaaaaatgagcaaaaaggacttgagtgtg

SEQ ID NO: 13317 - DNA, 833 bp, Zea Mays
catatgatctttatctgtcacactggttgctgcaaatgctacttttcgccacttctactgaatagtttggttgatgtgcaggcggagtggatggcaccagaagtacttcggaatgaacgatcggatgaaaaatgcgatgtttttagctacggagtcatattatgggaactttgtacactactacagccttgggaaggtatgaatgccatgcaagtggttggtgcagttgggtttcagaatcgtcgccttgaaatcccagataacatcgatcctgctgtagcagagataatagtgcaatgctggcatacggatccaaagttgcggccatcatttgcagatatcatggctgcactaaaaccactgttgaagaacttgaccagcaatctagcccctaagagagtgcaacaaacagatgagtgagacaaggaggttgacaaccgcccaacctagaggtgcaacatttcggattggcaaagccatggtaagcttaaggccgcttgccattgatccacattcgaagatcagtgctggtatacccgtgaaagaagacggaggagggctgtgatctatgcaaagaattgtgcagaacagtaatgttttggcactgtggaacgattgaaccaggaactcgtatgggtggcagaccggggcttttgttcataccgtccctttttttttcttttgttgcctcaccgaatggtgggtattattatgtgtaaggtggcgattggttcacgaaacgtaatgtaaatgacaacggtaatgattcatgtttgattaccagcggtaacaagtttgaataggactatatcagtttctagggtgatatatga

SEQ ID NO: 13318 - DNA, 1057 bp, Zea Mays
aagctattctccagtagtagttgggttgttgcacctattctttactgggaatcaataactttcagcagaccagctattgctctaatatgttttggcacaatcgccttattcccaagtgttttgttaccttcttcgcccttcatgtggcttgctgggatgacttttggatatctttatggctttttgataatcacagtggggatgagcataggcatgtcgttgccgtattttataggttctgcattccactgcaggatacatagatggctggagaagtggccaaagaaagcagcttttgtaaggcttgctggcgagggagattggcatcatcaatttaaggctgttgctttactcaggatttctccatttccatatttagtttttaactacgcttctgtggctacgaacgtcaaatattacccatacatagctggttccatggctggaaccatacatgaaactttccttgcaatatacagtgggaaacttctacagagcttggctgtagcaactagccaagggtcattcttgtcggtggatcagattatctacaatggaatcggctttacaattgctgcaacttccactgctgctatcactatttatgcaaagaaagcgcttcaaaagctccaagcggaggacgagatattttgagaggtccaaggccaggatcaaacccgtaacgctagttttctttcaggtgtactatatatgaacagctggtactaatctggtttcctgtgtcgactaccggactgctactaccatccatctgaggaagaggagggggggaggtgcttcagcaattgtaaagaaaatagaggcccagagtttttcgttcttgttttgttttctgtagagagaattaccaacctcatctgtgtattgcaattgcgctatgtaaatccccaagttgaaagttgtttccttatcttgagaagtataacaaggtatgctggctgcgtcgaaatatattacatacactgcagccatgatttgcgtgttgtatagtaatgcatcttaagctaatatatatacgacgaaaaactttggggct

SEQ ID NO: 13319 - DNA, 1020 bp, Zea Mays
ccgcaatgttatatttatgcctaaatttcaacaagaagataaaaaactatctaactccgaggcttttctgcgtagatcagagactcagcgaaaggctgagcaaaaggtccgcgaagaaagtgaaaggctgcgacagaaggaacgtgagcaaattgcagagaagcgtaagcgtgatatgacgcttcgcgctcgtgtagctgctaaggcggaagaaaagaggttggagctgttgtacattcagtggactgagcaccataaaaggctgtccaatttcttaaggacaaaagctgaaccacctatttactacatgccaactaaaccaattattgacgatccagccattgttgaacagaacaaggaaaaggtattcgaagaatggaaatctatgcgcagggatgagctgactcggttccaaaagcaagttgaggagcaatatctctcaaatgtggagaggcagctggagaggatccagaatgcccggaacgctcgaaaggcgaacgggcatgctaacatgcaagaaatggacaaggagctggacacacacagggcggagcatggtccgaagactcggcgagttcctgaggagggcggtaatgatgacgacgaagacgcagaggacatggctgcggaagacgaggtgatggatgaagttctgggcatcaacgatgggatcaacgaggacccatccaagccgtccgaagaagctactactgaaggtggtgagcctgcacccgaggaagcacaataggattctttgttcacacaagctaggcacatagccgtacgtaccattccgtatgcttagttgccgtattgttgggaactgtttgtgcgtgtatttctgttagacgttccccgctggtttaggctgtgttttatattgctgttttgtctttttgaatgttgagaccatacaactgtcgatcattatctcataattgttgtaaaaatactataattgataccttgatttggacgtcggtggcgttaaacgtttcgggttctgttcttcactacccg

SEQ ID NO: 13320 - DNA, 956 bp, Zea Mays
atcatgttgctcaacctaacattgttgctagagctgaatccgaggaagatgctgctgcagctgaggttgttgaaggggctgatctagttgtactagcaggtgaagaaactgaattactagttggtctgcaaaatgacggtgaatcaattttgaatgttgttgctgttcattcaactctccatcttccttttgaccacaatatgtatggccagaaccttactgttcagaatttcttcaattcatcagttcctgtttctgtgcaagcaaccttcccctacaagttcgttgtgagcaagttcttgcagcctggagcatatgatctggttggttacatagtgtatgagatcgaccagcacccttaccagaatgtattctacaatggcactatcgaggttgttgaggctggaggcttactcagtgttgagtctgtgttcctcatcacccttggatttgcacttcttggtctgtttggattgtgggcatatggccaggttcagcagctctcgaagaaaacaaagaaggcacccaaggtggagctcggaactggaacaactgatgccaacatcgatgagtggctggagggcacttcgtttgtgcagagaagcaaatccaagaagaagcagacctgaggctctccaggctagttaaatccttttgaggatctagaatgagacatttgagggtagcccttcacaagtgacttttgcagaaagatagatgcgtaaggaggtgctgaaaaccgtaaacatcttcgttgacattttcgaccttgtgtactttacatggaacaaaattttgttaaaagaaagtatatgctgttgccgctgtggtttctgatcttattcgctgcctttgtcatttttcctgtcatggtcaccccaggattttttctttgtttcggtagtttagccgaagccggttggcaaaatgaaattgttaatgaaattgttttgttc

SEQ ID NO: 13321 - DNA, 76 bp, Zea Mays
gctcttctcgtgtttttttttttttttttttttttttttttttttttttttttttttttttttttttttttttctg

SEQ ID NO: 13322 - DNA, 3042 bp, Zea Mays
ggccttagtcatggtcatgacattcttactggggccactatgccactgtgtatgggtgagggttttgtcgaggaccaatttggccttgggttgattgctcgtgcggtggaagaagggatatctgtcataaagccttcaggtattatggtattcaacatgggaggtcgaccaggacagggtgtctgtgaacgtctatttcgacggcgtgggtttcgcattactaagctctggcaaaccaaaattatgcaggctgctgacacagatatttcagctttggttgaaattgagaaaaacagcagacatcgattcgagttcttcatggatcttgttggggatcagcctatctgtgctcgcacagcctgggcatacatgaaatctggtggtcacatttcacatgctttgtctgtgtatagctgtcaacttcgccagcccaaccaggtgaagaaaatatttgagtttcttaaagatggattccatgaagtcagcagttcccttgatttatcctttgacgatgattctgtagctgaggaaaaaattcccttcctagcttaccttgctagttttctgaaagagaacaagtcaaatccctgtgagccaccagctggatgtctaaactttaggaaacttgttgctggatttatgaagagctaccatcacattcctctaactcctgataatgtcgttgtgttcccttctcgctctgtggcaatagagaatgctcttcaattgttctcaccggcgcttgcaattgttgatgaacatttaaccagacacttgcccaagcaatggttaacatctttagcaattgagggaagagcagattgtaatcacgccgatggtacagttactgtaattgaggcaccacgccaatcagatttactgattgagttgatcaggaagctgcagcctcaggtggttgttactggcatggctcaatttgaggctatcaccagtgctgcttttgagaacctactaaacgtaacaaaagatgttggctcccggctgttcctggatatttctgagcatctggagttgtctagcctgccaagctctaatggtgtattgaaatatcttgctggaaagacattaccgtcacatgcagctatactgtgtggtttagtaaagaatcaggtgtactctgatctggaggttgcttttgccatttccgaagatgcagctgtatataaagcattatcacaaactattgagctattggaaggccacacttctctgatcagccagcactattatggttgccttttccacgagcttctggcatttcagattgctgaccgtcatccacagcaagagagacaacctgcggaagtgatacctcagcagatgataggattttctgacccagctgtgtctaccctaaaggctactgaatttttcgttcctggttcagctgaatccagcattattcatatggatttagatcgcagcttcctgccagtaccttcagcagtgaatgcgtctgtttttgaaagttttgtcaggcagaacatcactgattctgaaaccgatgtccgttccagcatccaacagctggtgaaagacagctatggtttatccgcagctggttgtgcagaaattatctacggaaacacctccgtagcactcttcaacaagctcgtcctttgttgcatgcaagaacagggcaccttgcttttccccttgggcaccaatggccactacgtctccgcagcaaagtttgtgaacgctagcaccgtgactataccgacaaatcccagttcagggttcaggatcgagcccaaggttctagctgacactcttaagaatgtatctcggccgtgggtgtatgtttgcggccccacgatcaaccctactggctttctgtacagtgacagtgacatccgagagctgctctccgtatgcgctgaatatggagccagggtagtgatagatacatccttctctggcctggagtacgagaccgatggatggaggcagtggaatctggcaggatgcctttcctctttgaagcgttcagagccatcgttctctgtggtcctgctcggagagctgtcctttgcgctgactgcaggtgggcatgactttgggtttgtgatattgggtgactcgtcgttggctgagacgttccatagtttttctagcttgagtcgaccgcacaccacattgaagtacactttcaagaagctgctggggcttaagaaccagaaggaccagcatttctcggatctgatagtggagcagaaggaggagctgaagaatcgcgccaaccagttgatacagacactggagagctgtggctgggaagctgccatcggttgcggtggcatctcgatgctggcgaagcccaccgcgtacatggggaaggccttcaaagctgctggcttcgacggcgagctggacgcgagcaacatccgggaagccatcctgagggccactgggctgtgcataaacagcagctcctggacggggatccctggctactgccggttcagctttgctctggagaggggggaattcgagcgtgcgatgggatgcatagctcggttcaaggagctggttctgggaggcgctcagatgaatggtgcctgatggagcaatccatgttatacgtaaccttggtgctgtgtagtagcgatgatattgttccaggtgatggagatatcaaggaataacaagagcctacctgctgtgaagtcaatgtactactaggatggatagggcgcttcgatgcgccctttctgtcttcgaattgctgtgctgtgcacggagaataaacatatactattatatatatacatacaatttgctaagatatactcctatttgttgtcgttccatgcataaccgtaacccattaattccaaagaaacctggggggtcatgatcttgtgaaccgttgggatcatgattagagggaaatttttgtttttagaatggattgcgcagcttgatttaactggaaatactgatttgatggatggaatggaacaagtgtacataaattgttggaggttacaatgtaggcctgcatcaggccttaggtgc

SEQ ID NO: 13323 - DNA, 2412 bp, Zea Mays
tgagcgccgagatttgagctgccgtctctccttcgcatcggcgtgatccaatgatagcaccaagagcgcaccttcccctctccctgacggcgtcgtcctccccgcacggcggcgcgcgcacccgcaccaagaagaggaagaaaccatgtcccccaacctggacagcgccatcaagagccaggtgccggcgctgctcctgaggcgtctcttcggcgcgtcccggcgggacgaggccaagcagctccagcggaccccggcgccggtggggaggcggcgggtgtttgtgcagacggagaccggctgcgtgctcggcatggacctggaccgcggggacaacgcgcacaccgtcaagcgccggctgcagctcgcgctcaacatgcccaccggcgggacctcgctcaccttcggcgatcgcctcctggagaacgacctgtccttcatacgcccggactcgccgctgctgctcacccggaacagcatcaaccggagctgctccaccccgtgcctctgccccgtctccaaggacttcgagcacaaggactgcagcggactggttgagatgctcggctgttccagcagctgtgcccgggtgaagcgcctcgtggacgacgtggtgactgccatcaggagcggcgtggatccggtccccattagcagcggccttggtggctcgtactacttcaggaacgtcttgggcgacagggttgctattgtgaagccgacggacgaggagccctttgcgccaaacaatcccaaggggttcgtcgggagggcgctcggtcagccgggcctcaagagatctgtgcgagtgggagagacggggtttagggaggttgcggcgttcctgttggaccatgacaacttcgccaacgttcctgccacggctctggtgaagataacacactccattttcaacataaactgcccggtaaatggaggaaacctggcaccggctcatgaccagcaacagcaagttaacagcaagattgcttcgttccagcagttcatagcccatgacttcgacgccagcgaccatggcacgtcaagcttccctgtcgctgctgttcataggatcggcatactagatatccggattttcaacactgacaggcacgccggcaatgtgctggtgaggaagcttaacggtggcacaggccgctttggttgccagacagagctgttcccaattgatcatggcatgtgcttgccggagaacttggaggacccttacttcgagtggatccattgggctcaggcttctattccgttctctgaggaagagctcgagtacatcagaaatcttgatccaaggaaagatgtgcagatgctgcgccgggaacttccgatgatacgtgaggcctgcctacatgtactggccctgtgcacaatcttccttaaggaggctgcagctttcggactctgcttggccgagataggcgagatgatgaccagggagttcagagggatggaggaggaaccaagccagctggaggttatgtgtatggaggccaggaagagagtagcagagtgggagcccttctctgccacggctgaacatggagaagataccgatttccagttctcggtggatatgctaggagaatacagtgatgtagtgcgatcaccgaggttcaatggctcaggttccaaggtgtccagtttcagaagccctttgtctaagctcgtcgagagtgtcgacgagggcagtgatggccatgaagatcaaaacgagtctgatcgagtcttgtatgctggatggaatacatccagcgttcctagcaaagctatgggccatagtggcaatgcctcaaaaagtgcaatgaacaggagtgccgatgaacaacttccatcaagtatgtgttttgtcaggctgtcggatatgagtgcagatgagtgggatgtattcctcgaaaaattccaggagctgctgaaagaggcactgcacgagagcgcaagggcagcagtaggtcaaaggatgaagcagcggctgggcacttcatgcaagttttgagcagggcaatagcgcatcagagaagaaaaaaatgcagtgctacttgtactgcttgcttatggagtgagtacaggatgaagatatcatcgtatgtggcaccttcaaccttgtgcaacgatctaggttgcagcagccatgtccagcaggtagataggaccacaagcatatgtagtgacggtgtggagaactgctacgcgtgtttattagctatatgtttacgaaggggaatgcttaataataaatgtttgtcagcctgtgtatattggcttgatgttagatactccagctttagcatgcaatttcttagtcgctgaaaattctttgtagcttgtgatgtgacctgtgagcagtgtaaacgttgcacctttgatggaaaaataatgcttacctgttgttgaata

SEQ ID NO: 13324 - DNA, 1189 bp, Zea Mays
gtgtttggttggttgagagtggagcttgattgacccagcgaaatacaagagtatctcatctggatttggtatcctgttaaaggagcaaggggccaggggtttcttcaggggatgggtgcctactttgcttggttacagtgctcagggggcttgcaagtttggcttctatgagttctttaagaagtattactcggacatcgcagggcctgagtatgcccaaaagtacaagactctaatctacctcgcaggatctgcatctgctgaggtaattgctgatgtggctctctgcccttttgaagctgtgaaggtacgtgtgcagacacaacctggatttgctcgtggattgagtgatgggctccccaaatttgtccgatctgagggtgttcttgggctctacaagggaattgttcctctctggggtcgtcagattccttataccatgatgaagtttgcttcctttgagaccatcgttgagcttatctacaagcatgctgtgcctgttccgaagtctgagtgcagcaagactacccagttgggtattagctttgctggtggttacgttgccggtgtcttctgtgctattgtttctcacccggctgacaaccttgtgtctttcctgaacaatgccaagggagctacagtgggagatgctgttaagaagcttggtctctggggtctcttcactagaggacttcctcttcgtatcgtcatgattggtacccttactggtgctcagtggggaatttacgatgcattcaaagtgatggttggactcccaacaacgggaggtgttacacctgccccagcagcagaggctgaattgaaagccagtgcttgattttttttttctgtgttccctgagatcatatttggtagagtggaattgtatcagccagtcgagagcttagttcccgaatctttttttaatcgtaacggaaaatttgtccgtcatccttctgatgagaggaactcattaaacaggcgaaataggtcttttttgcgctgggaaaagtttgcgcttgatgcataataatttttaggacggcaacgctcttagagcgcaggttttgttcacctcctgtaccgaggaatgcttaaagttacatttcacattatggtctttatgaaagagtgcacctcggttgatgttccttttgccgttgctggaactatgcgatttgctgtaatt

SEQ ID NO: 13325 - DNA, 1324 bp, Zea Mays
tatggcccggcttcggtcgtggtcgtttcatggaatgtcttaccgtgcaggcggtgacaacaaagggacctcaaagaagacctcttctagaaaagccagaaaacaagaaggtctgaagcaacaatataatggagaggaagaccaaaatggtgggagcaatgcaactactggaggtgctcggaaaaaaaagggtgggcatgtaagacaatcaagtgctactcatgatgccattgataaaaattatagtggcagttcagctgaaggtttaaggaacaagagacagaagtctgctgctcaaagcgcttcggtaggcagaagggaagggttgaggcaacgatctgatgccaagcaacatccagatgcagccgagggcagtacagaaccactcgctgatgtacctggaagcgatggtgcagctcaaggttcaatgcaacatggaacttcggctcctcataccgaaataaaagcgatggtcaggaacatactgttcaaggacatcgttgacaaggagcacgatgctgagatggcttatgtggaagaagtgatcaatggcatctgtaacgctactgacagcatggtcggcggcggcggcggtgatgcttccgcgaaaggtggacgaggctccaagcagagcggcagcggagtggagggtgagtctagcaatgccacagaaaggcgaagagatgaagcaactgagaatgccctcgccgtgaaagggaatacccctgtaagttgatcccatttgcccacacccgcacttcccaactgcttttatgacctcccaaatttttacttgctagtttgacgaaatttcctcagagcaggggaacaatggcgatgacgccggggcagcttagcgcacgccaaaataggcagaacaggatcatgcaaaccctagctctgatccctccatcaggatctccgtttggcaggaatgaagaggttgcagccagccgtcaaaaactctaattcacttatgagcgccctaagaaacagtccgtgagcccccctagcgttttgcagtcctgtcctctgcgcaccatgcctagtatcgctgctgccattcagcttgcttttgggagacgcctatatattgcgcctgatctgctgaattacgtagcagttgctattaatctatccagaagacttggactgagtttgattgctatgtaaccacgcggttggttctgtacttctacgcaactgtgcgacattggccaatgtggtgccgttgaaccttatgtattattgtgcacccccatcaccatgttattactagcccccttcggcatttcagttcagcattcagcagttttgcatgttc

SEQ ID NO: 13326 - DNA, 1416 bp, Zea Mays
ttcacatatcatacatcagaagcaatcatctgctatttccatgtatgtcatagagtcagacgagacacaaacccaattatcagaggacaaaattccaagtcaaggtcagacagggaaagatggcaatgatcttgacaaaatacaaacccaaggaattgaaaagcacctgaaaaatgcttcccagctttcgcaaaatggtggttcagattcactccttgtggtgtgctgcgaggatgttttgcttttgttatccctggcgtcattgattcagggaagcagcaagcatctacagaagacgaaacttgcaaaaccttgttgctggtcagcagttttcaaaaacatggatgacaaagtttgtgggctgatattagcttatcagactggcactatagaaatgaggtttgggccagatctggctattgttgctgagacctctttgatgtcattattgcgatggagttacaagacaggcatggaaaaatccacaagctcctcaaatggacaagttactttggtaaatggatctgaatttgcgattatctctcttatggcctcagagaatgacttgaggattccagaatctctgccatgccttcatgacaaagtacttgcagcagctgcggaagcagctatgagtttctcaactgatcagagaagaaagcagaatccagcagcagggattattggtggcttcattaaaggaatgaaaggcaaggctgaagaaaatgcaaaaatgagagaaagtttgacattgcgagctccaagcgaacagttggagtcaattttctcgaaagaaccatttgctgaaccttcaatacccgaccttgatgatccgatggaagaactgtcaatcgatgacatagagattgacgatgaagtagcagtagccctggcacaagcagcatcgtccacatcccaagggaataagagaacagcagtggaggaggagagagcgaagctgtttgaagggtcaaacagtgcggataaaccgagaatgagaacgcagcaggagattctaaccaaatataggtttggcggggacgccgccgccgcagctgctcatgcgaaggataagctgatgcagaggcaggagaaactggagagaattagccaacaaaccgcggagcttcagaatggagcggagaactttgcttccctggcgcaggagctcgcgaaaacaatggagaacaagaagtggtggaagctataaactgggtttgtttgtacgtatgtgtgttgttggatgccacccgtcgttgcgaattgggacacataccagcattaccatttttttgtgtccgtattaatcactttggatattctttttgtgttttggtgatgtacgtgtaaagataaaaaagagagaatgaaaggaaccctcttctcctggctatatgagcgagtctcttattcgtc

SEQ ID NO: 13327 - DNA, 2328 bp, Zea Mays
gtgtgacgactgacgactgaggtctgacgaggcgtaaacctcgctgactcgccctgccgccgccccgccccgcccgcgcgttctccgccgtcgtccccggaaggtttttgcctcagggcatgtggatctgttagttcacctgctgcaagcaagtatagctatagggttgaccagtgcagaagtatgaatccttactttgttgggattcttgtccccgtcgcggtctccctgctgctccgcaagaggagaaaggcccaaaggatgaggggagtgccagttgaggttggtggggagcctggatatgcagtccgtaactatcgttttgaacaacctgttgagacacactgggagggggtgtccacacttgctgatctgtttgagcaatcttgcaaagagtatgtatacatgccactccttggcacaaggaagctcatttcaagggaaactgaagcagcacctggtgggagatcgtttgagaagctgcatctgggcgagtatgagtggaagtgttatgcagagtgcttcaagagcgtttgcaacttttcatctggactaattagagtaggtcaccagaagaatgaacgtgttgctatttttgctgagacacgggctgagtggcagattgggttgcaggcatgcttcagacaaaacattacagttgtcaccatctatgcctcattgggggaggaagctttgtgtcactcactaaatgagactgaggtcactactgtagtttgtggtcagaaagaactaaaaaagttgattgatataagtgggcaacttgacactgtcaagcgtgttgtctatatcaatgaggaaggcatctcaactgaagtttctttagctcaaaactgcactagctggatagttgaatcatttgaggaagtaactaggttaggagctgaagcacctgttgaagcaaacatgcctctaccttccgatgttgcggtgataatgtacacaagtggtagcaccggattgcccaagggagttatgatgacccaccgcaacgtcctggctacactctcagcagtcatgaccattgtgcctgcacttggcagtaaagatatatacttggcctaccttccacttgcacacattcttgagttggcagcagaggcactaatggctgctgttggggcctcaataggatatggatcacctttgaccctgattgatacatccaataaaataaaaaagggaactctaggtgatgcttctgcactaaagccaacattgatgactgctgtacctgctatacttgatcgtattcgtgatggtgtcaggaaaaaggtggatacaaagggtggtatagcaaagcaattgtttgacattgcctataaccgtcggcttgctgcaatcaatggaagttggcttggtgcctggggactggagaaactcttgtgggatacacttgtgtttggaaaggtgcgtgctattttgggaggaaagattcggtttgtactttcaggtggagcacctctatctggagatactcagagatttatcaatatatgccttggggctccaatagggcaaggttatggtctgactgaaacttgtgctggagggacattttcagagtatgatgacacatctgtcggtcgtgttggtgctccactaccttgttcgtatattaagttgattgactggcctgagggtggatacttgactgctgatttaccaatgcctcggggagaaattgtcattggaggtccaaatataactaaaggctatttcaagaatgaagctaaaacaaatgaagtctacaaggatgatgagaaaggtatgcgatggttctattctggagacatcggacggttccatccagatggctgccttgaaatcattgaccgtaagaaagatatcgtgaagcttcaacatggcgaatatgtatctctcgggaaggtagaggctgctttgattgtgagcccatatgtggagaacattatgatccatgctgatcctttccacaattactgtgttgctctcgtggtggctgcacacattgagctggaaagctgggcttcgcagcaaggaatcaaatacaacgatttctcagatttgtgccagaagcaagaggctgttaaagaagtgcttggatctttagcaaaggctgcgaagcaagcgcgacttgagaagtttgagataccagtcaaaatcaagctgataccagagccatggacccccgagtcgggactcgtcactgctgccctcaaactcaagagggaggtgatcaggaagacgtacgagaacgatctggctgagttggaggataaaggtcgatggcgacggtaacaactacgacatgaaggagaggctgacagt

SEQ ID NO: 13328 - DNA, 99 bp, Zea Mays
gcttgcttgtagtggaatggatcgctgcgctatgctagctgttgcagtggaatggatcagagttgcttgcaggccactagcactaggcgttggttcttg

SEQ ID NO: 13329 - DNA, 1209 bp, Zea Mays
tctgactgctgctcagcctcaattctcacagcttaaaatatgttgctactaaacttctaatggtcactggttgtcttccatctgccattggttgttcatgcttaacagctcagatggaaaatatctattaacaggtggtgaagatgatcttgtgcaggtatggggcatggatgatagaaagatagttgcttggggtgaaggacataattcatgggtcagtggagttgcttttgattcatattggtccccaccaagttctgatggaaatggagaaaatgtatatcgctttggttctgttgggcaggacacccaactacttctgtgggacctggcactggatgagattgttgtcccactacggcatccttcaagtgcctcacctacgtttagcagcgggagcccttccacacactgggacaatgcatgccctccaacaggtgttcttcaaccttctcctagaatgcgagatgtcccaaaactatcgcccctagttgcccaccgagtacatgccgatcccctatctggtatggtgttcaccagtgaatctatcctcaccatctgccgcgagggcctcatcaaaatctgggttcgaccagagcagagcgaaaacaatcagcaatcgaattcttcagaatttgctttaggccctgcttcgaaggatagggcgatcacatcttccaataaagcaagtagctccagctttaagaagctgccgcctgttcttgtcacatgatgaatcaacgggatggttcttgtggatatttctgcttcacgtggcattagtggtggatatgaatcttactccatggttgatggggatgaaactctcatatggagtctgcagactgcaagtaatgagggtgagcatttgatggttgatgttcccaggaagcagggccagcgttgccagtttttttggcacgaaagagtaaatgggagctcttgtacagacacatacttaatgataaaattgtaaaaactcactgtccgtttcataatattcaatagccaccgaaagatgattggacgaccatgttatcgattttagctggtgggttgatagtatccttaaactttggtacttcggagacttgtaattatggaccataatatctgaggaatgcttcagtcttacctggtgtaagttgtgttactatttccttctgccttttgtcaattattagatctagtttggcaactccatttttc

SEQ ID NO: 13330 - DNA, 227 bp, Zea Mays
ttgattcacacaattggtcatcgcgcttggttgaaaagccagtggcgcgaagctaccgtgtgccggattatgactgaacgcctctaagtcagaatccaagctagcaaccggcgcctctgctcgccgcccgccccgacccacgttagggcgttcgcgccccaagggcccgtgccattggctcagcccccccggccgacgcgccgcggcgggccgcctcgaagctccct

SEQ ID NO: 13331 - DNA, 1164 bp, Zea Mays
gtcgaaatatatagtggtttatttctttcattaaaaataaaatatacagatgaagagaaagcttttattctcaaagcgttgataaaaagccgagcgaaaaccacgtgcacacatcgatcaccaaacacgcgtacgaagtaccatgcacacacatcatcagtaactacacatgatatacatagacgggcaatcaaacccccgtgacttcgttcgccctccatgcatgctccttctggtcctggggagcagcctacgtacgcaagtagatcgatcgagcagcagcccgatcagccgaagaagtggtgcttcttcttcccctcgccgcggcggccggactcctcctcctccccggcgtcctccgccgcgtctttggcctccttcttgtcgtggtgctcgtggaacgcgaagccgccgctgcccagggcagccaccgccgccacgccctcctcgatcttgtgccgctgcgcgtgctccgggtccttcttcgcctcgtgcctctcgtactgggcgaaggcgccggcggcgagggcgcccatctcgccgaggtgctccttgtgcttgtgctccttctcctccttcctgtacttctccgagtcgtcccgggaggagccgtactctccgccctcgtccgcgcctccaccggactgcttgccgtacccgccaccgccgccgccggcgtacgcgtcgtcgccagagggcttgctgccgtacccgccgccggtgccacggccgtattcgtcgtcgttggtggtgcccgatctgttgtacccgctgtcgtagccgtcgtttccggacttgttgtacccgccaccgccggtgccacggccgtagtcgtcgccgccgcgccggacctgccgtacccatcgccgccgctgcggccgtagtcgtcatcgccgcccgacttgttgtagccaccttcgccacggccgtagtcatcagtgccggacttgctgttgtagccgctgtcgtagtcgtcgccggcgccggacctgccgtagccgctgcggccgtactcgtccgccatggttcacgcttattgttatctagtcacacgttcagtacagaagaagagtagagcttgctgctttgcagttgcttgctgcactatgtttccaagaacacagcaatggaaagggtacttatagaagggcagggagaaacaac

SEQ ID NO: 13332 - DNA, 119 bp, Zea Mays
gtcggcgatcttgctgtcgtcgtgctcgctcttactctgcctctacgtgctcgccttcgatcaccgctgcaatcttgggagtttgagtgaagtagtggaacccgcggggcgcttgccag

SEQ ID NO: 13333 - DNA, 1355 bp, Zea Mays
gctcgtcctggtgctacacgggttatctgtattccttgatcaacatgtcgcgggaggagaatgtttatatggccaagctggctgagcaagcagaacggtacgaggaaatggttgaatacatggagaaggtggctaagaccacagatgtgcaagagctcactgttgaggagcgtaaccttctatctgttgcctacaagaatgtgattgcggccccccgtgcctcatggcgcattatctcctccatcgagcagaaagaggagtcccgtaagaatgaggaacatgttgcacagatcaaggaataccgtggcaagattgaggctgaattgagcaacatttgtgatggtatcctaaagctgcttgacacgcaccttgtgccttcctccactgccacagagtcgaaggtgttttacctcaagatgaagggtgattatcacaggtaccttgctgagtttaagactggtgctgagaggaaggaatctgcagagagcacaatggtagcttataaggcagctcaggatattgcattggctgaactgccacctattcatcccataaggcttggacttgcacttaacttctcagttttctattacgagattcagaactctccagacaaagcttgcaatcttgccaaggaggcgtttgatgaagctatttctcagttggacatgcttggtgaggattcctacaaagatagcaacttgattatgcagctcctgagggacaacttgaccctctggacggaggacggcattgaggagggcttagaatcctctaagggcgatgctggtgagggtcagtagcctggtaaacttagattgatggttcgacgtgtttctcaagcacatcgtgttggacgcccagtgctgacaaaaggcttttgctgctccatgcattccaagcttctgccccctcgttcgcaccctctttatgttgttggctggtagtggtcagatttagtcccattggtttagttggccctgggtccatctgaactgatgtattgttactgctatggaagtcattcctttagttttgctctggcagtggattgctgttgggtcgtgttttcagtctttattggttccgatcggacgctgttgcggcaaaccacccctgtagatactcttcacatgctgaagaaaactaccagcagccgtttagcctgaataattgctaaatgataggttaccgttgaggctgattggtttttatttttttttaccctgtgacatcaagttcttgggtaactttttttaccgttgaggctcaaacaaattgttaagtgggagaattgtgaagtgggagtggtaatggatcatgatctaaatgattcttcacaattcattgaaacc

SEQ ID NO: 13334 - DNA, 648 bp, Zea Mays
cagctgtttacaaatcactgctgagcacacccttcgttatatggggaacactacatctgtgcaagctgaggcttcagattcagcgcagaaacctgccacaacagctcctgcacctgggtcaaagccgaaaaagatctgctgtgcttgcccagatacaaagaagctgagggacgattgcatcgtgcagaatggcgaggatgcctgcggaaagctcatcgaagcccacctgaaatgcctgagagccgaagggttcagcgtctgacgtggtgctccatcatggcaactccacacacctgtttctgcagtaatctgattttgatcatgaacagtgtgatgaataaggacttctggtagagtgatagaaacaactcgcagttttatttctagactggaaggaggaaatcccctgaacattgccagtttgcaagagtttttctatcttttttcaatgcatttagtgccacacatatctgcaattctggataatactttatggagcatatgtatatggaaattgcttttttttggtccactgtttggagattgagcaccacactgtatggaacaactgttgcaaaagttttctactggctagagctttcagtcacttaatccagtgatgtatgaatgaagaagatattaccctct

SEQ ID NO: 13335 - DNA, 775 bp, Zea Mays
caagaagctactagctagatctccttctccactagctcacaacagaagaggacgagaggaagcaaggcggcggcggcggcggcagcaacaacatacaccgctggccgtggcgccatgggcatcctggaccacatgtcgcatgtgtgcagcatcacggagacgaaggaggcgctcaagctcaggaagaagcgaccgctgcagacggtgaacatcaaggtgaagatggactgcgaaggttgcgagcgtcgcgtgaagagcgcggtgaagtcgatgcgcggcgtgacgagcgtgacggtgaacgcgaagcagagcaagtgcacggtgaccgggtacgtggagcccgccaaggtgctggagcgcgtcaaggccaccggcaagaacgccgagatgtggccctacgtgccctacacgctcaccacctacccctacgtcggcggcgcctacgacaagaaggctcccgcgggcttcgtccgcagcgcgccgcaggccatggcagaccccagcgctccggaggtcaagtacatgtccatgttcagcgacgagaacgtcaacgcctgcaccatcatgtgatgcatgcatatgtatagtctctcgatcgtatcatgtgtagtagtacgagctagctagtgcatatcgatcttcgtactgtatcatatcgatcgaaagaaccttaatagccaatacaagaggaatgtgaattaagcaatctatatagtatattacaaactaaaacttctaataatatcagtctattaaaatacatataataagcaaa

SEQ ID NO: 13336 - DNA, 554 bp, Zea Mays
attgtcagctaggacagcttgagcaactgaagaaagaagtgaaggtgatgttagactttgcgcaggggtatatgctcaaagttagctctcctgaccaagagaacagtaatctcgcgcagcaagacaacacggcgccggatgcgccttctgatacagggtgacagccgccatcacatgacaacgaatcatgccattacgatgttatacacagaagggcaggtggaccagtaactagtagtccacatgaaccacatctaacatgttaagctgacttccaaaagaatgggtggaccgtgtgtagcgtgttaagttcgtttcctgccattgctctatccgtttttggcagtttggctgatgtatatatatagctgtaaacacacgcaaatataaagtggtggctgtggcaggccagtgtgttgtttgagtataaaaacaaagaaagaaacggaagagagaaatatttgccacagaaccaacgcttctcgagtcacagactcacaggggggcatatgttgtgcaaataaaagcttgatgtcctagaaacaactttgcaa

SEQ ID NO: 13337 - DNA, 227 bp, Zea Mays
ttccgctcgacaaccgtcgctgcctccctcgtcgtggactccaaacgtcgaccttatcccaacctgcagcctcgtcgaatcttcatcctcgttggttgtcgatctccctcagcagctcggctctaattctgccgatgcgtcgtctccatggttgcggacatcatacggtgctggccttgtgcatgtggccgaggtccatctctgtgtgcgcatgcccctggccccgc

SEQ ID NO: 13338 - DNA, 2301 bp, Zea Mays
ttccatgcagcagtccccccttcgtgtcgcactcgcacagtcgcactccataaggcaaggaggaaaacagagagacgaccaccgctccgcgccggccggccattccatccggcaatggcctccgccgccggtgctgcgttcgccgccatcaccctcctcatcctcgtacccctcaccgccgcttcggactccgaccacaagtaccaagcagcggagcctgtgacgctctgggtgaacaaggttggtccgtacaacaatccgcaggagacatacaactactacagcctcccattttgccatgcgtcagaaaaccatgtgcataagtggggaggactcggcgaggtccttggtgggaatgagctcattgacagccagatcgacataaagtttggaaagaatgttgataaggccacaatttgttcgctagacctcgatcttgtcaaggctaagcaattgtcggatgcgattgagaactcatattggtttgaatttttcattgatgatttgcctttgtggggttttgttggagaggcagacagaaacaatgataacaaatatttcctattcacgcacaagaatattgtcatcagatacaatggcaatcagattatccatgttaatcttactcaagaaagcccaaagcttattgatgtgaataaggcattggatatgacatattctgtcaaatgggaaccaacaaacataacatttgctcaccgttttgatgtgtatctggactatcctttctttgaacaccagattcattggttctcaattttcaattctttcatgatggttatctttctcactggactagtgtcaatgatactgatgcggactctaagaaatgattatgcaaagtatgcccgtgatgatgatgatattgaaactctggaacgagatgtcaatgaagaatctggatggaagcttgtacatggtgatgttttccggcctccttgcaatctagttcttctttcagctcttgttggtattggtacacagttggcagcactgattctactagtgattttgttggcaatcattggaatgctgtacattgggcgaggagctattgtcacaacattcattgtttgctatgctcttacttcattcatctctggatatgtcagtggtgcattatactcacgtcatggagggaaaaactggatcaaggcaatggccatgacagcatcacttttcccatttatgtgctttggaattggcctggtgcttaacactattgctattttctatggatcgttagctgccataccatttggtacgatggtggttgttttcatcctgtgggccttcatctctttccctcttgcacttttgggaactgttgttggtagaaattggagtggtgctccaaacaatccctgtagggtgaagactattcctcgccctattcctgagaagaaatggtacctcacaccatctgtcattgcgcttatgggaggactgcttccttttggtagtatctttattgagatgtactttgtcttcacatcgttctggaactataaggtctactatgtttatgggttcatgttgctggtctttctgatactcatcattgtcaccatatgtgtaacaattgtcggtacatatttcttgctaaatgcggagaactaccactggcaatggacttcattcttctctgctgcttccactgcggtgtatgtttacctctactccatatattattaccacatgaagaccaagatgtctggattcttccagaccagcttctatttcggctacactctaatgttctgcctaggcttaggaacactatgcggtgccgtcgggtatcttggatcgacattgtttgtgaggaggatctacaggaacataaagtgtgactaagtgaagataatatcgccccattttgggtcagcgcagagaaaatgtatggcagagccttatttgattgagcgatcactgattctaaaaccaagaacgcaggtcattttgtgaaatatgatcgttgcttggcgccgagctgaaagccatgtttttctattcttgtcctcgtttctctctgatttcttctggacttggacaggcaacaaattttcatgttgaattagttatatatatagcggtggttgtagttgttgagtagttctgtagtatataccacaattgttatccttggccccaatgatacctcagattgatgggtataaactgtaacatttacattacctgatgtttgacgatgaacacagttccaaataatcatgttcggtactggaggatcgagatttttgagaggcaacatcaaagaaaaaa

SEQ ID NO: 13339 - DNA, 64 bp, Zea Mays
ttacaaaagtgattcaaagaaataactttgaactgttataaattatttgtagtttttaaatata

SEQ ID NO: 13340 - DNA, 368 bp, Zea Mays
cacgcacccacgcacacgcacgccccccagagcgagaaccgagaaggacaatcgcgtcccaccgccgctgcacaagacgaggaagaggttcccggtcccggcgccgccactatgtcgtcgatgatgaacgcgctgtcaaactggctggtgaacccgcgccgcaacccgctcgcgcgcctccacatgcacaccgtctcctcgcgcctcaggaaatacgggctgaggtacgatgacctgtacgacccctacttcgacctggacatcaaggaggcgctcgggaggctgcctagggaggtggtcgacgcccgcatccagcgcctcaagcgcgccatggacctctccatgaagcatcattttttttttttttt

SEQ ID NO: 13341 - DNA, 1185 bp, Zea Mays
gaaaaagtggccttgtagtagctaacaccccctcccccctctttaaactgaaatagaattgacggttataattaacggaatgttttggatatcaggagaaatggagaaccagacttgtaccccccaagtgatttctctctgaataatagtcatggtcatgacacatgcggccttaccaaatcacattgtcattaaaattattagcagaaacgctgagccggtcgcaaacaagaatataaacatgcatgatctggctaccatagtaaagaaatatcagtttgaagctctgacgaggataattgttaccagggcacaagctgtgggttggccaccagtccggtcataccgcaggaacgtcatgaccgtccagtctgtgaagagcaagaaggaagaggagcctgagaagcagcagtccgctgccaacgccggcggcaacggctccgccttcgtgaaggtcagcatggacggcgcgccctacctgcgcaaggtggacctgaagatgtacaacagctacacggagctctccgttgctctgaagaagatgttcagcaccttcaccacatccgggaacaacatgaatgagggaaaactagttgatccggtcagcggtgctgatgtggtcactacttacgaagacaaggatggcgactggatgctcgttggcgacgtcccgtgggagatgtttgtcgagtcatgcaggcgtctgaggatcatgaagagctctgaagccataggtcttgcaccaagaacgaaggacaagtgcaagaacaggagctgaagaagatacagcgttaaagacgctgcccgttgtgtcaaaagaatggtgcccttgcagtgtgctgcggtttttctagaaatataatgcgttttaattactagttggagggagacctgtcttgttcaatttgttcatggaccagaagcaataatctatctgtgtgtagctggattggtgttatgcgatgtcccctaccgtgtgtcccagaatctacttggtgattttatcccagtgttgttaatcaagcttgtgtgattgttaagtaaagggcatcaatgagactattattattatggtaccttgtaagttaacctgtttgttaattgtcattataatatttggcaacctgtatgtggtcaagcggggggaacaggccatgtgccgggtgatggggaatccattagtat

SEQ ID NO: 13342 - DNA, 2400 bp, Zea Mays
acgcgtgaacgagaagcgaggagagcgtgcgcacgagcatccatgtgtccataaaggagaagggagaggagtaggagcagtagacgaatgatggtgccatactgccatcgccgccagctcaagccctcccttcaatccaactccacctccacaaaaatcctatccattctccaccaaacgcccccacgacgagagctcatcatcccctgctaaaaatttgcgtcttttatttctaaagattccttaccggagttttctttaataaaaaaatcccccttctgttgtccatttctcgacgcgccaattgtttttttctttctttctgatttggattcgtggatttggaccacgcgcaccaccacaaccaatcctcctccccccttcgagtccccgtcctgccccaacaatcccaatctccggaagaaggggaagcaagcatcagaaatcctaaatagggggggcgcaccaagaactccactgagaatccccaatcatttctcggtgcatttggccccgctccaccatcaccgaaatctccaagaaaactcatcccgaatccgcccccgcccccaaatcggccctacaccgcaccagatcacagctcataattccagtgagaattcggaaaggaggggagcaatgacggaggtggcgctcctccggggcccgaccaacctcgcttccaccgcaagccgcgcccccgcctccccctccccctccccctcctcttcgctgcggtatttagccaatgccgacagcgacgtgctccaaggaagcgacagcccggagcgcactgcgggatctgcggggagccgacgactccttgaactgcgcgggcaagaggcggcggaggaggaagaggagcggtggtccttcttggcgctgctctttgagctactgcggaagtcgttgctcgggtgcaggaccgtgggcggcggcgaaggcgaacacggcggctgcgggatggagattgggttgcccacggacgtgcagcacgtggcgcacgtcacgttcgataggttccacggattcctaggcctgcccgttgaattcgagcccgaagtgccccgccgtgctcccagtgccagtgcaagtgtcttcggtgtttcaacagaatcaatgcagtgttcctatgattcccgaggaaacagtgtcccaaccatccttttgatgatgcagagacgcctttatgaacagggtggtcttcaggcagaaggtatcttccgtataaatgcagaaaatagccaggaagagtttgtgagagaccaactaaatagtggaattgttccagatggcattgatgtccactgtttggcaggtctaattaaagcctggtttagagaaatgccgaggggtgtactggaccctatcccacctgaacaggtgatgcaatgccaatctgaagaggactgtgctcgcgtagcgaaatgccttccaccagctgaagcagctttgcttgactgggctgtgaatctgatggccgacgtagtccaagaagaacacataaacaagatgaacgatcgcaatattgctatggtcttcgcaccaaatatgactcagatggcagatcctttgactgcactgatgtatgcagtccaagtgatgaattttctcaagatgctggtacaaaagaccctcaaggatagagaggagtcgaccccagaggatgctttgctgccccagaaggacccatctgatgaaaacgggcatcagaagcccaccgtgacacttgattctctcctcgaggaaggatccaggcgcccttctttcgccaaggaagagcccctcctgaacagccctggccacagcactgatgacaagtctaacgaaactaacaccgatttaggagccactgctgctttcactgcccagacaagcgaggtagcaacgggtgtggaggactccactagtagtggctcacagcctgcacctgctggcccagctgctatcgctgatgcttccggcacgacagccacaaattctctccaggcaggcaaggggagccgaagcctgaaccggaggaggactagaaagggcaagggccagtctggcacgcgcaccacgcctgcagctgagaaatcaagaggtgcgagcatcgtgagccggataaactccagagttgagcggatcgaagcgtggagatgagaccgaaagccatttccatcgctgttgtgtactagatgatgactgacccagcgtttcctgaaaatagcaccccccgaactgcttgcttgcacattttacatttttctctctctctctatgcgcttatcatttcttgctgtatcatggccatggtattttgagattcgatcttcctgtctttactaacttctgtatctttcttatggttaattctgtgagtcaatgaaagatgcttgtgctttcctttaaaaaata

SEQ ID NO: 13343 - DNA, 144 bp, Zea Mays
ccagttttttgtttccatttttcatccttaaaatactgacacgagcgatgctcctctcattcatctaatagtctttccgacgctgacataagtgtatctgtctagaacagttctatctctataaaaagtaaatctgaatctaga

SEQ ID NO: 13344 - DNA, 1051 bp, Zea Mays
gtgcaaagtttgtcaagtttgagaaagctggacttagtaacacctcttgagtcaactggcgccttcatcggtgcttcgagatatgcgagtgcaactatgattcctccatcgattatcagtcggggcgtgggatggcagggcattggtctgttgctcgattcatttttcgggacagcgaacgggacatcggtttcagtagagaatattggactgcttgcgttgacacgcattggcagccggagagtggtgcagatatctgcaggcttcatgattttcttctctgtccttggaaaatttggagctttgtttgcgtcgattccgctgcccgtatttgccggcatgtactgtctcttcttcgcatatgttggtggcgttggcctgagcctccttcagttctgcaacctaaacagctttaggaccaagttcatcatggggttcgctttcttcatgggcctatcggttcctcagtacttcaacgagtacacagccgttgcaagctatggtccggtgcacactggcgccagatggttcaatgacatgatcaacgtgccattcacgtcgaagccgttcgtcgctgggttggtagcctatatcctggacaacaccctccaggtaaaggagagcgcggtgcggaaggacaggggcaaccactggtgggagaagttcaggagcttcaagaaagacgcgaggagccaagagttctactcgctgccgttcaatctgaacaagttcttcccgtcggtctgatctcaaatggcgccgccgctgaatcaattctggaagcaacccttgttcatatgggcgttaatgaggaacataattctgctggtctggccagtggaagcttctgtgtctccattgttggtcaattttgtgtgttttcggacgagatgggagtaattgaactgtagaaattattacgattgaagtatatcgcgttctttttgtaatctacatgaatcagcgcagattaaatatttgtaggcgtagatactttgatcagtcaaacgttataggagcaaaccaatcttttttttaaaacgaaccggca

SEQ ID NO: 13345 - DNA, 2183 bp, Zea Mays
gctggagggtgggatcttgctaatgcgctggttgctctggtcagtgatggccggtgacattacatgcggatccttgctgcaaaaattgcagtttatatgggatgaagttggagagagtgaggaggaccgtgacaaggtcctttatcagctggatcaggaatgccttgatgtctacaagaggaaagttgaccaagcaactaactctagggatctcctgatccaggcgctggatgactcaaagatagaacttgctaggcttctttctgctctcggagaaaaagctattgcaagaactcctgagaagacaacagggacaatcaagcagcagctagctgctatagcgccaacacttgagcagttgactaaacagaaaaatgaaagaaaaagagagtttgttaatgtacaatcacaaattgatcaaatatgtggtgaaatcgctggcaccatagaggtgggtgagcaaatgacaacaccccaagtcaatgaggatgacttaacacttgagaggcttgaagattttcggtctcagctcaaggatcttgaaaaagagaagagtaataggttggagaaggttcttgattatgtaggcatagtacatgatctttgtaccgtcttggggatggattttctcagcacagtgattgaagttcatcccagtttagatgactccatcggtgacaactgtaagagcattagtaatgatacattgtcaaaacttgacaatacggtagctacacttaatgaagataagaagttgcggctaagcaagcttcaagaactcgctggtcagctctatgatctttgggatctcatggatgcccccaaggaagaaaggcgcatgtttgatcatgtcacctgcaacagatcagcatctgtggatgaagtcacagcacctggatctcttgctctagatttgattgaacaagctgaggttgaggttcaaaggttagaccagctgaaatacagcaagatgaaagaaattgctttcaagaagcaaaccgagctggaagatatctacgctggtgctcatatagtaatagacacagctgctgctcatgagaaaatattggcgctgattgaggcaggtaacattgaaccgtcagaactaattgcggatatggatacccagatagcaaaagcaaaggaagaagcattgagtagaaaagacatccttgataaagtagaaagatggatgtctgcgtgtgaagaagagagctggcttgaagattataaccgggatgacaacaggtataactctagccgaggtgcccacctgaatctgaagcgtgcagaaaaagctcgtattcttgttaacaagattccagcacttgttgaaaccctggtgtcgaagaccacagcatgggaggagaaccgtggtctgtcctttatgtatgatggtgtacctcttctagctatgttggatgagtatgctatgctcagacaagaaagggaagaagaaaagaaaagaatgcgggaacaaaagcgctacattgagcagcaactgaacaccgatcatgaagggccatttggatcgcgggtgagtccaaaccggcctgccagttcgaagaaggctgttggcgtaaaggtgaacggcagcgtctcaaacggcactcctccaaacagaaggctctcaatcagtggccaacagaacggtggtggccatggcgtcaggtctggagggaaggatagcaagaaagacacggcgaagacagcatctccagggaacaatgcagttgcagctgctcctgtggacgcggtctcccaaatttctgtcaccgatccggttccgagcacaccatgatctttaacctagcatcgtatattagatataagcgactctttttctgatgttctgttgttttgtggtaatatcttataatgccttcgtagagtaattatgatgcctgcccatccttcagctgctttggcttcatggtgtaattcttgttttagttccgctcggccgtgctgtttcgacctgtcagacggtgtagtgtagtcttactgagatgtattgcattaatcagtgtgctggacatatagctgttgaaacgttttttgtgtgcacccgtgtgagagtagcgtacttttaacattatctggaaactggactccgcatatcattctgtaggtacgcttaattgattgcttccacaatgctgatatgtttgaagtcttggtac

SEQ ID NO: 13346 - DNA, 1685 bp, Zea Mays
ttatataatccaaaagacaaaggaaatttcattaaacgacagagaagaattcagtagaatcgattcgattcaccaaattaatagagagcaattaaaccgccatgtaattgtatcgtaagtataaccttgattgttattactcgcacatggcagagacaattcgacgcagaagaagaatttagaatccacgacatgcaagagctcgacaagacgtaccggccaccatggatcgggggcagtctaggccagccagagtgcatgatatgaagaaagaaaattaagcaaaagtacatgcatacgcgagagcagcgaggtagcagcgcaataaccagaagaagacgacgacggcgacgtacgatacgaggaccaagcaagcaaagcatgtggcagccatgccatctcatcgcggcgacggtggttcacttgatgaactcgatggcccaggcgttggcgtagatgtaggtggccttgaacccggagaagccggcgccctttgcgagctcgcggaactcgcgctcgtaccgctccttgccgccggggttgtgcgcgagcatgatcatgtcgacgtggaagacgccctgcgccttgggggtggcctccgtgttgaccggcagcacgcactcgacgacgatgaccttgccattttccggcagcgcgtcgtagcagttcttgagcagcgtggcgcagtgcgcgtcgctccagtcgtggaggatccacttcatgaggatggcgtcgccggcgggcacggacgcgaacatgtccccgcccacgtggcgcacgccggggaacggcggcgcctcggagatgacgtgcggcaggtcgaagttgaccccggagatgtgcgggtggcgggacgtgatggcgtgcagcgtggcgcccacgccgccgcccacgtccaccagcgtcgacacgccctcgaagcccgtgtagaagtccagcagcttcttggtgatgatcaccgagtggttcttcatgccctcgttgaacacgcggttgaagcgcgagtccgtgccgtggtactcgaacgccgtcatcccgtacgccttgttgaacgggatgccgccgtccagcaccgcgtccttgagatagtacctgctctccatgaggaccttgtcctggttcatgagcgcgagggcggccatggacacgccgtcctcgttgggggtgagccacttgcagacgggcgcggcggagtagcggcgctcgtaccggccgtcccggtcctccatctggcaccggacgacgtcgtaggaggcgagcaggcggagcatgcggtccaccatggccgccgcggcggcggggtcgccgggcgccgcgggcatccgcgccaccacctcctcgggcgccagcgccgccttgccgccgccggcctccttctgcagcacctccagcaggcccagctcgatggcgttcttcagcgtcatgggcaggatggacgacgacgccagctgcatcgcgtacatgcacgcctcctcgtccaccaccgcggccacgtcgccggcggtggagcccatggctattacgattagcgctgccggcctttctctgctgggctcgaggagcgcgctagctgctgatggcgtgcgatgcgacgaagagggacgaggtggtgcgaggggtttttattgggccggacggctcaccaaccaccacaccaaaacacgcactgcttatttttcactatt

SEQ ID NO: 13347 - DNA, 394 bp, Zea Mays
tacctctggcatccgctttaatttctttgaagaaacaggtgtcctctctatatccttcaataactgtacccctatcatttgaagatgatggttgggttcttttgctggtttatctttagtgtcatcaccaacttgattttctgtttgctcaacaacctcttcatcatctatctcatcttcttctgcttcttttacagattcatcgtcatcctcatcatcatcgttgtcatcatcatcttccaattcatcatctaaatcttgaccgtcttctttactatcttcttcacaaagatagtttcgagtttctcccagaaaacggcgtttccagaactccgtgttcccatcttctggcttgattcgtgagatcagctcatctaaatcttcatcaacctat

SEQ ID NO: 13348 - DNA, 3539 bp, Zea Mays
ccttccttccgtcgcggcccgcctccttcactacaaccaggacaggccaacgcggaagcccgtcctccccacccccttccagatttgcagctcgcacctcgcgaatccccgaattccccactgcctcgccacgccgcgcgctgaccgcggcacccggagccccacctgctattcccgaggcggaggacccatcctgccttggcgctcgttcctccctcgtgatcggcgccgcgggcgaatcgcgctgcccggtgggggggaatctagggttccggccatgccggcctagtcgtagggcgggggtaccggcctgcgtcgccggcgcgcgtggagatctcggtgcctccgaaccctggcgggggccggggaggccgcagctgctgaggcatggacgtggactcgcgcatgacgacggagtccgactccgactccgacgcggcggccgcggccgcccgcgggggcaacgccggaggttccgggtccgggagcgagacctcctcgtcgtccgcgccctcgacgcctgggacacccgggacgcccgcggcggccccgaatccggcgccggtcggcgctgtgggtccgaggccagcacctgggtacacggccgtgaacgcggtgatcgagaagaaggaggacgggccagggtgccggtgcgggcacactcttaccgcggtgccggctgtcggggaggagggcgcgcccgggtacatcggaccgcggctgatcctgtttggtggggccacggcgctcgaaggaaactctgccacgccgccctcttcggccgggagcgcggggatccgtcttgctggtgccacagcagatgtccattgctacgatgtgtcattgaacaagtggagcaggcttaccccacttggcgagcctccttcaccaagagctgcacatgtggcaactgcggttggaaccatggtggttattcagggtggaattggtcctgctggtttatctgcagaggatcttcatgttctagaccttacacagcaacgaccacgatggcacagagtggtggttcaaggacctggtccaggtccacgatacggtcatgtgatggccttggttgggcagagatttttgttgactattggtggaaatgacgggaagcggcctctggcggatgtatgggcccttgatactgcagctaagccatatgaatggaggaaacttgaaccagaaggtgaaggaccacccccatgcatgtatgccactgcaagtgcacgctcggatggacttctcttactttgtggtgggagggatgcgaatagcgtgcccttatcaagtgcatatggtcttgcgaaacatagagatgggcgctgggagtgggcaattgcccccggtgtctctccatcacccagataccaacatgcagctgtttttgtgaatgcacgtcttcatgtgtccggaggtgctcttggaggtgggcggatggtggaagactcctcaagtgttgcagtactggacactgctgctggagtctggtgtgacacaaaatctgttgttacaactcctaggacaggaagatttagtgcagatgcagcagggggtgatgctgctgttgagcttacacgacggtgcaggcatgcagcagctgctgttaatgatctcatattcatttatggaggtttacggggcggggtacttctggatgatcttcttgtggccgaggatcttgctgctgctgaaacaacaaatgctgctaatcatgcagcagcaaatgcagctgccacaaatttgcaagcaggacgaacacctgggaagtatgcgtataatgaacaaacaagacaaacaattacagaatcaggtcctgatggggctgtagttcttgggactccagttgcacctcctgtaaatggggacatgtatactgatatcagtcctgagaatgcggtgctgcaaggacagaggagattaagcaaaggcgtggattacttggttgaagcatcagcagcagaggcggaggcaatcagtgctacattagctgctgtgaaggccaggcaggttaatggtgagatggagcagttgccagacaaggagcagtctccagactccacatcaactagcaaacattcaagcctcatcaaactggacagtgctctttctaacaacttggcagctccacctggggttcggttgcaccatagagccgtcgtggtcgctgcggaaactggaggtgctctaggtggcatggtcaggcagctttcaattgaccagtttgaaaatgaagggagaagagtcagctatggcaccccagagaacgcaactgcagcaaggaagttgctagatagacaaatgtctattaatagtgttcctaaaaaggtaattgcatctctgttgaaacctcgtggctggaagccccctgtccggaggcagttcttattggactgcaatgaaattgcagatctttgtgacagtgccgagagaatattttcaagcgaaccaagtgttttgcagcttaaagcacctgttaaaatatttggagatttacacggacaatttggagatctgatgaggttattcgatgaatatggtgctccttcgactgctggtgacattgcttacattgattatctattcttgggggattatgtagatcgtggccagcatagtttagaaactatcactcttcttctcgcattgaaggttgaatatcctcaaaatgtacacttgattcgaggaaatcatgaagctgcagatatcaatgctttgtttggtttccgaatagagtgcatagaacgaatgggtgagagagatggtatctggacatggcatcggatgaataggctatttaattggcttcctttggctgcgcttatagaaaagaaaatcgtttgtatgcatggtggcatcggtcggtcaatcaaccatgttgagcaaattgagaatcttcaaaggccaattacaatggaagctggctcggttgtcctcatggatcttctgtggtctgatccaacagagaacgacagtgttgaaggactgaggcccaatgcccggggtcctggtcttgttacatttgggcctgatcgggttatggagttctgcaacaacaatgatcttcagttaattgtactgcaaataatgccggagcgatcttggttttgggtagagatcttgtggttgtgccaaaactaatccatcctttgccccctgcaattacgtcacgtgaggcgtcgccggatcatattgaggacacatggatgcaggagctaaatgctaacagaccaccaactccgaccagggggcgtccccaagcagtagctaatgacaagggttctcttgcctggatatagtagattgaccacacattggttggtatgattcatatgaagcctgagtggtctggatcttgttattttcatttgtgttcgggagaggggctggtcgacagccgtaccgaaacgaaagattgatgtacaggggagcataaagactataaagttggtagaagggagcttaatctattttcttctctctccaattcgtttcattgaacacgagtagcaaacgaatcaagctgattcatcaga

SEQ ID NO: 13349 - DNA, 143 bp, Zea Mays
aattggatttttgccactcacaatgttgtcttcttgttataattaccactgtgtctatgaattgtgggtccagctgggtctataaaatgtgggcctgatggcaattttacaaacatgtttcttgctgatggcaaatatcagaa

SEQ ID NO: 13350 - DNA, 1142 bp, Zea Mays
gtagggggaatcttttgattggtgctgcttaattaggtgatacttacaccaacacatcttatgattgtgatggagtttgcagcaggtggagagctttttgatcggatctgtgatcgtgggcggtttagtgaggatgaggcccggtatttctttcagcagttgatctgtggagtgagctattgccattacatgcaaatatgccatagagatctgaagctggagaatgttctcttggatggcagcccagctccacggcttaagatctgcgattttggctattccaagtcatcagtgttgcattcaagacccaaatcagcagtaggaacgccagcatatattgcacctgaggtgctatcccgtcgcgagtatgatggaaagtggtacttgttcatgcagcttgcagacgtatggtcctgtggggtgactctttacgtcatgcttgtgggagcatacccatttgaagacccagatgaccccaagaatatacgcaacaccattcagcaaataatgcaagtgcaatacaagataccagatcatgtccacatatctacggaatgccagcaacttattgcccgtatctttgttgccaatccaatgaggagaatcacaatgaaggaaataaagagccatccatggtttttgaagaacctaccacgggaactcacggagactgcacaaggcatgtactacaggagggataacagggtcccttcttattcagaccaaacgtcggaagaaatcatgaagatagttcaagatgcaaggaccatgccgaaatcatccagatcaggctatgggtggagcagtgagtattcggatgaagaagaagagaaggaagaggaacacagaccagaggagcatgaggaagaggaagatgaatacgataggagggtgaaggaggtccatgcaagcggagaactccgtatggacgctcttcacatatgaaagctagtggaagagaaagttgcatgtagataactgggttgttgcggatctgaaggatccagtgggatgtatgcagttttggcttgagaatttgcttctgtttgtcaattttcatgtaacataatttaatacaccgagacaacagactaccatgttcttatattggtaaatatgaagcatgtaccttctatctgcat

SEQ ID NO: 13351 - DNA, 897 bp, Zea Mays
aaactggatcgctgccgttggcgccgccaccgccgatgtagggtggagcactcagcgtgccgtcgtcgcatgcggcctcgaacatttacgtctggccgtgccggtgctgggaaggaaggggatcgaggggcagcagaccgcagagagacgacagccaccgaggcaattccaactttttaagcttgccccctttgatccaaccaagaagaagaagaagaagaaggttgtcatccaagagccttctgatgaagtggacaagcttgcagagaagacagaatcgctagcagttgcagaacctgctgaacttaacttcactggaatgaagaagaaaaagaagaagcaggtggatcttgattcatctattgatgaccttggagatggggaggacactcaaggtgatcaagttgtagaggaacaaggggacggtattgtgcttggaggtggccctacatatccttgggaaggaactgaccgggattataaatacgaggagctgttggacagagtgttcaacattcttcgtgagaacaacccagatcttgctggtgataggcggagaaccgttatgaggccacctcaagttcttagggagggaacaaagaagacagtttttgttaattttatggatttgtgtaaaacgatgcataggcaacctgagcatgtaatgatgtttttacttgccgaaatgggaacaagtgggtcacttgatgggcagcaaaggttggtgatcaagggaagatttgctcctaaaaactttgaagcaatcctgaggagatacatcaatgagtatgtcatctgcaatggatgcaagagccctgatactattttgtccaaagaaaatcgtctgttcttccttcgctgcgaacagcctagagctggattcgttgtcaactccgg

SEQ ID NO: 13352 - DNA, 626 bp, Zea Mays
cagaagctaaaaaatatatagtgaagaagacagatcaaaaatgccacttgagctatcgagtgcactctctcatgaacgggaagttgttgaggattctgaaattcggcagcaggcattagaggctatttatatgatcgtattgcaggatggtggccgaaggtccttttggtcagttaatggcccacgaattctgcaggttggttatgaagatgaaaaggacccgaaagtgatggaagcatatgaacttattggttccctgcttgttgggaagggtgaagatgtacaagataacaagaaggaacaaggagagaagcctcaatgagccccgccgctgataaaaacggtgctgtatttttgtttgtctagaaaacatccctcgccgtgtgcaatagcaatagtatgatatcccaacttgtcaactgttgcaactgcaagagctctgcagtgttgcttttgtaattgacgaatgtatctggaaaatttgcaggtattggccgtcttttccttggttttgagctctctgacaattcttcgttttttttggaatgcatctcttgacgagtctttcacaccgtcgcttcagaacatggatatgcattaaacgggctaccctgtagctttcgctg

SEQ ID NO: 13353 - DNA, 1421 bp, Zea Mays
gatggattagggagggagggcaccacctggagaccaggacctggagctgatgctgatgcctccacacacaatgccaatgccgctcaccactctcaacctccaagaggtttcaccgattggagcgcgtccaacagtgccttcgccgccgttgcctcacagcccgcacctgctaccaccaatacacccttccattacaacctctcccagtcttatgccctatggacccattacatgcttaacaagaatgtatcctactctacttaccctacaccacatgaggagcatccccacccattgcgccatacccacatccaggagaatccccacccattgcgccatacccacatcccggataaggattcaggttgtgcatctagccttggatttgactctttcactacaatgtcccttggaccaaatatttgttcccacatgacgcccatggaaggatctatatctgccaaagaacccgagaattcagaggatttgcctgcaatagttaggagcagtgatgaaatggacactagaaacagtggcaaagttcatcgtgacacagttggcactcttcctgagtcgaagcagagccatgaaagttgtgcttccgtgaataataagttcaactctggagagtaccaagtcattttgcgcaaggagttgacaaagagtgatgtcgcaaattccggacgaattgtgcttcccaagaaggatgctgaggctggtcttccaccattggtgcaaggggatcctctgatactgcagatggatgacatggtgcttccaattatatggaaatttaagtatagattttggccaaacaacaaaagcagaatgtatatcttggaagctgcaggtgaattcgtgaagacacatggccttcaggcaggggatgcgctcattatctacaaaaactccgtgcctggcaaatttattatccgtggggagaagtccattcagcagacaaacccctagacacaatttgatgtgactgtgcaccatcagatatggcgtccgaggatacaccatatgttcacgttccagttgttatcgacttttctaatgtctcaccgtcacactgagataagtcgaaaaaggagatacaccgtgtggatggagaaaaggagaagaaattttgggagacattggaagtgctgccagtgagcctacgtctaagctcagaacaaatggtttatgttttttcccctaattcggtcgtatttggatgcttgagtcctgcattgcatgatgaagaacattctcagtctctctttttttgtaaatattttaattcaggatctataaggtaaaggaagtggtttggaagcagatttctgattcagcgttctcttgtctcattcattttaccaacatttttgttaaatttgtgattgtgctatgctcgtagggcgtatgtctattgtccc

SEQ ID NO: 13354 - DNA, 2078 bp, Zea Mays
ttaccctattctttctgctcaacttggcctcacgcacgatagccgccgccgtcgaccagagcactcccccgtcgtcgccacgatgtcgtctgagcctccacccgcctcctctgccgccgccggagaggaactcgctgctgacctttccgccgctaccctcagcaagaagcagcagaagaaggacgcgaggaaggcggagaaggcagagcagcgccagcgtcagcagcagcagcagcagcagccggcggacgccgaggacccgttcgcggccaactacggcgaggtccccgtcgaggagatccagtcaaaggccatctccggccgctcgtggtcccatgtcggcgacctcgacgactccgctgcgggccgctccgtgcttatccgcggagccgcgcaggccatccgtccggtcagcaagaagatggctttcgtcgtgctgcgccagagtatgagcaccgtgcagtgcgtgctcgtcgccagcgccgacgccggcgtcagcacgcagatggtgcgcttcgccaccgccctcagcaaggagtccatcgtcgacgttgagggcgtcgtctccctcccaaaggagcccctcaaggccaccacacagcaggttgagatccaagtgaggaagatctattgcatcaatagggctattccgacccttccaattaaccttgaagatgcggctcggagtgaggcagattttgagaaggctgaattggctggagaaaagcttgttcgcgttggccaagatacccgcttgaactacagagctattgatctacgaacaccctcgaaccaagccatattccggatccagtgtcaagttgaaaacaaatttagagattttttgttgtcgaagaactttgtcgggatccacaccccaaaattgatttctggatctagtgaagggggtgcggctgtattcaagcttctgtacaatggtcaacctgcttgtttggcacaatcccctcagttatacaagcaaatggctatctctggtggttttgagcgagtatttgaggtcggccctgtgtttagagcagaaaattcaaacacacacaggcatctatgtgagttcgttggtcttgatgctgaaatggagattaaggagcattattttgaggtctgtgacattatagatggcttattcgtatcaatatttaaacacttgtctgaaaactgcaagaaagaactcgaatcaataaacaggcagtatccatttgaacctctgaagtatctagacaaaaccttgaagctcacttatgaagaaggaattcaaatgttgaaggaagccggaacagaaatcgagcctatgggtgacctcaataccgaagctgagaaaaaacttggtcggcttgtcagggaaaagtatgacacagattttttcatcctgtatcggtatcctttggctgtacgtccgttctacaccatgccttgttatgacaacccagcgtacaccaattcttttgatgtcttcattcgaggcgaggagataatatctggagcacaaaggatacacactcctgagctgctggccaagcgcgcgacagagtgtggaatcgacgtgagcactatctcggcctacattgaatccttcaggaagacctccctgttcccgcgcgacccgcagaggctcgtgccgtaagtttctgattccaagcctgagtcttcgagtggtctacggagcagatccgatgttgttaccatcagagttgacttgcaatcttagctcctgaacctggcggttaccgtggatcagagttcctgttgaatttcacaaaagcctacttgttcctaatagattgctgcaaccaacaatattacgaccctttcgggcttttcttcccgcctcacgtgttattctggtctatacttgtttttaagtgcaagtattgctcagttacatatagcgtccattacgtagcggcctagcatagtactaccttagttcacaaatatatgacacctttgattttttcgaaaactttgaccactaatcttatttaaaatatttataaaattttaagttaagcacaaactaccttaaatgataaaacaaattataacaaaataaatgataa

SEQ ID NO: 13355 - DNA, 2760 bp, Zea Mays
atgatttgtacgttcgtgcagaacccactgtttggtgttaaagctgaatatacggaagcagtttctagttttcttcagttcgccgctgcagtttctagtttccagcggttcccaccagttgtctaataacttattgttgttgtacgtgaggttgcttttgtcgtatttgccaggttgcttttgttgtatttgccaggttgacacacttggtgttgtaaatcattgctatttttgggtcatgacttgtttttattgaaatcaattggctgccaagggtacactaaatctttgatgcaacataataggatcaccatgctgtcttcttcagagacttgccagcttggttctagttctagcaaccctgtcatggatcagcagaatttacttcccaacaactctaacgtggatgaacagattttactcccaaatgcattagagcatgaggactacccacactatttgctcaatagtcatgaggtgggaatgccaagtggaagcctgattggtcagcaaaatacaagcttgagcttgtgggaaccagctggatctagctcaatggagtgcttagttgatcatgacaactttttccaggcaaaaagagaacatcttgcctcttctcggtctattggtgccccgttaagtatagagaggaggagacatgaaggcactagttcattgccttcacacaacctaaacatagacctcaacattaatcaggctgatcaatttggctctgatgatgttgatcttgcacatggtaatggacaaccaagagcaaatactgtcacagcccacaggggctctttcataactgagcatattctgcatcatggagtttcttcggatgctataggaaattcttccaggaatgcagagtgttttgttggtgcagcaggccaagacagtcatcatgcagcctttaagagaaagtatcttgatggatgtcatgcagagtcttctgctaacggaagctcacgcaatcgtcaccagaataatagtactctgctacctcctccgaccacctgtgaaagttttactatacccaccgcaacaaattttagtgttccgtaccatcctgtggagcagctaaaccagagtactaatattgctgcaagctctactttgtctgatcactattcttcatacagtgatccacgtggaaacgaattcgtgcgaaatacacggatgcgaataaaccctagtgattatgatcaatcgctgcccagtctattacctgaggggagtttcaggtgctcggcttaccaatctacacagcagcagtcatcatttattccagcgcaacctagacaagttagctcttcttctggttctcatagtcgatctcatgtgcctgctgttactcagttttcacaaaatcttcgccgtccatcaactgttagttttgggtcaagaattgggaattcttccacttctggttctacaataccaatacctgcttcacaagatcctggtacaagcttgttgggaagcgattatcctgagccacttttgttaggttctttgtttacagctgattcaacaaatttcttatctgcatctggaagcataagtaaccagcaaaattctggatccagctctagttccatgctcaggcctgctgttaatgttggaacacaagtccctgagttcaacgtatctcagccaagtacaactttaagaggttcatctgatgtgttcaggaggtccttaatttctgctggcatttctcattctagaagttcaagcatcccattgcagcaccgtggaaattcatccacatcacatgagattaggaatcatcagccaggatcaagctctcgtgcacatcagcagcaccccttaagacccggtcattcctctgtagacaggcagagctctggttacttggaccttcagtcttttatgcagaccatagcttcaagggaaggaggcagaccaatgtcagagatccgcaatgtcttcgatcagattcgtcaggggagaaatgcacgattggaggatttgcttctcattgaccggtcacttattatgagacgagctaatttgattgatagacatcgggatatgaggcttgatgtggataatatgtcctatgaggaattgctggcactaggtgaacgcattgggtacgtaaacacaggacttactgaagaaaagattttgagtaacttgaaacaatggaaatgtgtcttaaaatcattggatgatcctccaacaagtgttgaaccatgctgtatttgccaggaagactatgtggaaggcgaggacctgggcaggctggattgtggtcatgacttccacaccgcatgtatcaaacaatggctggttataaaaaacctgtgcccaatctgcaagaaaacagcactggacacctaaaaacatggctgcctttttccttaggaaaaagccggtagcggcagggcaagtggttgccatctaaccacaccctcccatgactagcaaagtatgttacacctttcccatcatcaacatacatgtgggaatctatactataggtggtacatggcacttgcctgaagccaatggctgtagaccatggagttttatcctttgtttttttcaatcttagatttgggatttaaaatttattcaatgacatttgatttacttgggcaatctgcgatatttgctatcatcatcgatcgcttatcatctcagattttgttgtttgatttgtgctgtgactagcagcttgtaattcgttcacctcgattcttgaacacgctgtcggttccttgg

SEQ ID NO: 13356 - DNA, 1596 bp, Zea Mays
ttttcagatcctggagcaaaagtggtctaaggagatggtacaacccaccatggttttcagagacggtcccttcaaccccttacaatgctctcttcctccgggagatgtttgagaaggctgttattaagaggctgatgactgatgtgccatttggtgtgcttttatctggtggactcgactcttctttggttgcatctgttgcttcgcggcacttaaacgaaacaaaggttgacaggcagtggggaaataaattgcatactttctgtataggcttgaagggttctcctgatcttaaagctgctagagaagttgctgattacctcagcactgtacatcatgagttccacttcacagtgcaggagggcattgatgccttggaagaagtcatctaccatattgagacatatgatgttacaacaatcagagcaagtaccccaatgtttttgatgtcacgcaaaatcaaatctttgggtgtgaagatggttatttctggcgaaggttcagatgaaatttttggtggttacctttattttcacaaggcaccaaacaagaaagaattccatgaggaaacatgtcggaagataaaagcactacatctgtatgactgcttgagagctaacaaagcaacttctgcctggggtgttgaggctcgtgttccattccttgacaaaagtttcatcagtgtagcaatggacattgatcctgaatggaagatgataaaacgtgacctcggtcgaattgagaaatgggttatccgtaatgcatttgatgatgatgagaggccctatttacctaagcacattctctacaggcaaaaggaacagttcagtgatggtgttgggtatagttggatcgatggattgaaggaccatgccagccaacatgtctccgattccatgatgatgaatgctggctttgtttacccagagaacacacccacaacaaaagaagggtactactacagaatgatattcgagaaattctttcccaagcctgcagcaaggtcaactgttcctggaggtcctagtgtggcctgcagcactgccaaagctgttgaatgggacgcatcctggtccaagaaccttgatccttctggccgtgctgctttgggtgttcacgatgctgcgtatgaagacactgcagggaaaactcctgcctctgctgatcctgtctcagacaagggccttcgtccagctattggcgaaagcctagggacacccgttgcttcagccacagctgtctaaccttatgtttatcacccagcaatgcttgaaacagcaaaggttgtccattgcttgtttcagtttccttccgatcatgtttttagttccatcaatcaagcaatggagacatgcttgtgcttcatacttggcagcatcgtgtttgggttttcactgggcagtactgtttaatttttatggactgaaaagactcagttttgtaaatattcgtcactgtgaccaattcctgtggtggtttatgtgatttgcagattgcagtggttagtgtatcttcccaattttcactcctttaacacttgtggttgtttgtgacgtgtgcagatttatcttttcatttcttcaatcaaggttttca

SEQ ID NO: 13357 - DNA, 1060 bp, Zea Mays
ctgcactgcactggagagtggagacgaccgacacttccgcccaacggctacgggcggcaggcggtgccgcgtccctctcgttgacgcggctggagctggcgtacatacaaaaccctggatcagccagcgttccattccaacaacagcacagcagagcaagagcgcaccagcacgacacagccaagctccactccaccgacacgctgcgctcgagcccgccggcgagatccatggcgcggctgctcccgacggccgcggcagcggccatcgtggccgccgtcctggtggcgggcctgccgggcgcccgggcggcgtctgcctcgccggcggcggacgacgcgccgccgtacaggaaccacaccgttggcggcggcgacgggtggttcttcgacgccaacaccaacgcctcgtccgggaactactccgactgggccgccggcgagaccttctacctcggtgactacctcattttcaagacgaacgacaactcgtcggtggtgcagaccaccaacgccacgacatacgggctctgcgacgccagcgacgacctggcggagacgacgtccatctacggcggcggcggcggcgggggcggcggcctcgagcagaacagcaccatcgcggtggcgctcaccgccgagggcgccaactacttcttctccgaggccgacgggggcgcgcagtgccagcaggggatgcggttcgagatcaaggtcgagcacggccggggcctgccgccgtcgctactgcaccagccgccggcgcccaagggccgcgtcctcgcgccgccgccggcgggcacggcgttctcgggcaccggcggggtcgagcccggcgacggcgccggggacaacggcggcgctggcacgagcggcgcgtgcagggcggccagcggccggttcttgggggtggtggctgctgctgctgcggctctggccgttttggttctttgagtagcgatggtttaaaggcattcgtcatttggaaccactgttctgcttatgtatgtgtctgtatttaaattcatcatttaatggagatttgtgttcgatgcttagaa

SEQ ID NO: 13358 - DNA, 2226 bp, Zea Mays
ccagcctctcatctcatttctgtgtctttgggctgcgatcggatgatggacttaggcacacgtgactggtggactagacaggaaaatcccaagttacgacgacttccccgagacgacggcgtaacaaggggggaaaaaaggaaaggggatcgccatggcagcgtcgccgcagcagcaaggccagggcggccctggcagcggcgggtggactcccgagcagttctggtcgctgctggacaaggcggaccgccggttcgcccgggtgcgagacctgccctccttcggccgccaggagcccgacgagttcgccaaggccttccgcgcctacacccagctctggcggatgcagcaggagcaccgtcaccgtcttctcgacgcgggcctccgccgctggcaggtcggcgagatcgccgcccgcatcgcccacctctactacgcccagtaccagcgcaccgccgacaccgcgcttctctccgaggcgttcgtcttctaccacgccgtcctcgaccgcgcctacttccaggacgccgaccaccacctcgcccccgccaaacacctccgcttcctcgccaggttcctcctcgtcgcactcctgctcggcaggcgttcgcacaccgtcccgcgtctcgcctcggacatacgcacgctcttagatgactccaaaaagtccttccaggatgccgaatacaaggagtggaagcatgtcgtgcaagagatcgcgaggttcctgcgagctgactcaccatttatgaacatgaggccgctcaggtacagctatgcattcgatccgcccccggacacgcttcgtactgtgccaactactgtcaagaagcgaggtctcgtcttaagtgacaccatactttgcagctactatcctaacgaggtcaaatttacagacctctccatagatgtattcagaatggttcagtgcctcgaatgggaaccatgtggttcatttgcgctaaacgatggttacagcgcccatgatgaaagtggacaaaatcaacccaatctattgaaagatttaagagatgctgcactgcccccgaatccacttaagacaattctctatcgcccttcggtaacacatttcctaacggtcctttccacaaaatgcgaggagcttccttcaaatggtatcatgttaatatatctttcagctacaggggagatgggaacttctggattttgtcctgatactggtgaaaatgttttgagcaactttaataagtttgacatatccagtcttagtcatactagttcaaaggaaaacaaagaaccttgtctatggttaggctgccgtgaaactgaaggttcaaattgcatataccctggtgatctaatcccatttacaagaagacctctatttttggtgattgacagtagcaccagctatgcattcaaggcagtctattcatggtactgaaaggggggagacttctgccatgctactttcaccaagttcccgatcttccgctgcgggattcagtggcgattctactcggcacagtggtagccaatttactatgttcctcacatctccattgcaagctttctgccttctgcttggcaacaatgggacagatattgacagggatgcatataacaaagctgaggagttattattattgtccctaaatgaatgggctgcgactttagttgcatcatcttcacttcattctatttgggttgaagttttaggcgacccgctcctaagaaggttacttctcaggttcatcttctgccgagcaactcattccctgttcaaaccaacaaaccataagacagagttccttccgacctgcatgcctcctttgcctgagtctgttgatgcagagagcatgctctcccaaagctgtgtgctgcgagtcgcatcattctttggcgctgccagtcagttctcatttgctgaggttaccacatggcctgatgttgactctgaggaggctgttgtcaccagttcatctggcagtgccaacaaaggtgtgcctgagacagccagagattcagacatttcaaactcatcatcatctttttgatgcgaccatggcgctaccttcgtccgcttgtgttatttacttatctgcatatgcggatccatttgtaattactggtgctcctttatgcttgatttacacatcatgcagaactgccttgcctttttgtttcctggttacttactgaattaatagtcactagaacatttttttatcccttaaaaaaagg

SEQ ID NO: 13359 - DNA, 1942 bp, Zea Mays
agaaaaagaaataaagaaattggtccagtagccctggaagaattgttctcctggattgaattcacaaaacaactgtttgttattttcttctcccgttcacttctctttggcccgaaaccgagagctagtgcttgattcggtcgtttttgggcaccgaacacgttcttgggaccgccgccgccgccctacttccagtcccagctgctcaggtctccatcggcctcgagccctttgccggcgacgagcactcacaacaccagggtgtaacaatgtcttcttcaatggaatcgtcataccttcctgctacaactgagtcattagcccaagctcaagaggctaaggatgcttcagagtccatttcaatcctttaccgtgtcattcaggacccatcttcttctgctgatgcactgagaacaaaagaagttgcaattacaaatcttacaaactacctcactaaagaaaacagagctgaggagctgcgtaatcttttgacccagctcagaccattttttgcagttattcctaaggcaaagactgcaaaaattgtccgtggaataattgatgctgtcgccaagatacctggaacatcagatcttcagatttcactctgcaaggaaatggtagaatggacccgtgcagagaagcgtactttcctccggcaacgtgtggaggcaaggttggcagctctcctgttagagaatcaggagtatactgaagcccttaccctgcttactagtcttatcaaggaagtcaggagacttgatgacaagttacttcttgtggacattgaccttttggaaagcaaacttcacttctccctgagaaatctgccaaaggccaaagcctccttaactgctgctagaacagcagcaaatgccatttatgttccacctgctcagcaaggcactattgatctccagagtggaatcctccatgctgaagaaaaggattacaagactgcttacagctacttctttgaagcatttgaagctttcagtgcactggaggacccgaaggccatctttagcctgaagtacatgctcttgtgtaagataatggttaaccaagctgacgatgttgcaggaataatctcgtctaaggctggcctaaaatatctgggtcctgatgttgatgctatgaaggctggcctaaaatatctgggtcctgatgttgatgctatgaaggctgttgctgatgcatactctaaaagatctctcaagtattttgaaactgcccttcgtgattataagtcccagctggaggaggaccctattgtccacaggcatctttcttctctgtatgatacactgctggagcagaatctctgcaggttgattgagccctactcaagggtggagattgcacatatagcggagatgattgaattgccgattgaccatgttgagaagaagctgtcgcagatgatccttgacaagaaatttgctgggacactagatcaaggtgctggctgcctcattatctttgaggattctaagaccgaggaaatcttccctgccactctcgaaaccatttcgaatgtcgggaaggttgtggacagcctttatgtgaggtcggccaagatcatggcttgaaagcagctagtcttacctgtttgctctgatttcatttccagtctgtcgatgtcctcagacatttattccttcaatattgacagtttattgtgaccgctacaggttcatgtgaccaaaggctagctatttttacgactgaatgagttatgcatgtattggtcttttaatatcagcgtgcagagtcggacggatgttattgtgtgttaattaatctaccatgttatcgaaatgcatgtctttagctccactgcggcttctgtctacagatggacaattagcacttatacgatgtgctgaattaggcacaacacaaaaaagcaccaggctaaccgtcatctcggcccgagcac

SEQ ID NO: 13360 - DNA, 1634 bp, Zea Mays
tctgctcattgagccgtcgtttctgccctactcccaagatggataagctcagtggttctgcacgtcttatgattgtttcagatcttgaccatacaatggttgatcatcatgacgaggagaacctgtccttgcttaggtttggtgccctgtgggaatctgtttactgtgaggattctctactagtcttctcgactggaagatcaccaactctttacaaggaattaaggaaagagaagcctatgctaactccagacatcactatcatgtctgttggcactgagataacatatggggaggcaatggttcctgatgatggctgggaagaatatctgaacaataagtgggacaggaatattgttgtagcagaaactgtgagcttttctgagctgaagcttcagccagagacagaacagcgcccgcacaaggtcagcttttttgttgataagaagaatgcccaggaagtgataaaatctgttgccgagagattggacaaatgtgggctagatgccaaaataatatatagtggtggccaggaccttgatatattacctcaaggagctggaaagggccaagcacttgcatatttgcttaaaaagctaagctcatgtggaaaaccgcccaacaatactcttgtttgtggtgactctggtaatgatgcagaattattcagcatccctggtgtacatggtgtcatggtcagcaatgcccaagaggaactacttcagtggtacacagaaaatgcgaaggataacccaaagataattcattcaaatgagagatgtgcagctggtattatacaagctattggacacttcaagctaggacctaacatttctcctagagacctgcagtttccttatgcaaaggaagcctctttcaaacctacagatgctgtagtgaagttctacgttctctatgagaagtggcgcagggctgaggttccaaagtctgattcagttataaagtacttcaaaaacatcactcatgcaaatggagttaccatccatcctgctgggcttgaactctcactccatgcatccattgatgcgttgggatcatgttatggtgacaaacaagggagaaagtaccgagcatgggtggacagactttttatcacacagactggttcagatagttgggtggggaggtttgacttgtgggaatcagaaggtgatgtgcgtgcgtgttctctgtcaagtcttgctttgattctgaaggctgaatccccagagggctttgtgctaacccacatccaaaagacatggctgaacggatactcgtcaggggttgagcaggcgtttaagctgtagagcagtataccgtctcggctcgtggttggagttttcttgagaatagaatagaataatgtacctgtttataatattaacttcccaaaaccgcactggaggatcaccagggagaggattcggtgccttctcctatttggcgcgtaagataaatgttttgtctcatggctttcatgagaagatgaaattgactcatcttggtatatatttacaaatcttgaataatgcagcgttatctatatccagggatgtcaacggcaatccagggaaattgggtttttacttcattactcattaatgctttatttggttagaagatgattgatg

SEQ ID NO: 13361 - DNA, 3409 bp, Zea Mays
ctgctattggtctccaattttggtaagcaaggggtcgttaaacacttgtacttgggaatactgttcatttataatgaaagtgaaagtgagaactgtggatttttctgtgctcaaagcgggtcatgcgaaaagatacgaaagggtctgggaagctctactactgaaagttcggactttacaactcctatgtttcctgaacctgcttatgagcaaaatgggcatcgggacactgaaaggccttacaggagcaccagagaacaacttttctctattgggcagatgctgcgcattagaaagggtcctttgaagggctacctctgtcgagtagttcggatatttcggaatgatgtgactgttaagctagattctctactgaaaattgttacagtacaagctgatcttctctcagtcccagctaacaggggggataacttgtctggtgccccagctagtaaatttggaagtcaagatacatccttctttggttcagaagcaggcaaaacttcatgggacaatgggttgccatcgtttggaagtgactcatggcaacccttttcgagttcaacactatcagttcagaatgcaggtggagaatcagaagctgatccatggtctaagaaaacttctgccaaagatgattctgatccatggggtaagaaaactgatggtgattctgatcgatggggtaagaaaactgatggtgattctgatccatggggcaaggaagcggtatctgctgctgatggtgattccaatccatggggtaaggaaacagtaccttccgctgctggtgattctgatccatggggtaagaaagtggtgtcttctgctgatggtgattctgattcatggggtaagaaagcaacatcatcagctgttgacactgaaaaggaaggttctggtggtactgcatgggacaaacaagctggagttggtggatctgatgctgctggcagctcctgggacagagcggttgtcaatgagagtgaaaagagtgacaactggggagaggcttgcagggttatggacatgggaactggagctgaagctgacactgacccttggggaagcaaggtcaaagcagtagatatggaaggaccaaataactgggaaaaggctacagtgcctccaaacaataagctggaggatgtcagtcaaggatggggccaacctaagggcaactcaactgaagaccaagcaatagacaacgtttctaaagacgtggacaacaacagggcttgtgacagttctttgcctgtcactgaagatggtacctggggcaagtcaaaagacaacagttgtggtggagcaggtggtgcgggaggttgggatgtttctgttggcaactggaataaatcatctgttgtggctgatgcacaggatgaaggttggggcaaaggaaactggtcatctgctgagtctgaagaaacaaacaatcaaagcggaaattggaacaaaactggagcttcggaccaagctggttacaacaattgggataaaccgaaatcctttggtggtaatggttggaacaagggtgatgatcagaatagcagttggaacaggcctgaaaattttggaggtggacgtggctttgggcgtggacaagggagaggtaggggtcaacaatctggatatttcaatggcagaaatgatcaaggaagctggaagaagtcatggggtagtgacaatgctgaaagaccctcttggaggtctgataatcaggtagacaatgaggctggagagtctggtggatataggggaaggggaagaggaggaagggggcaatatggaggacgaggtaaagacaatggttggagaaatgatgatagaagcaattctgggtttggaagggaaaataacagtggcgatggaccaaaatggggtggtggaggtaattggaacgctacaaatccaccaagtagcagtgtaggcaccaagtcatatggtcaaaatcagcctttcacttggaataattctgaggataacaaaccatctgtaggtgaacaaggtgatccttgggcaagcaaggtgtcttctactgaagatacagaacaacagaatgattcttggtcaagcaagatgatttctggtggtgctgaggataccagtggtggctgggacaccaaggtgaaagactcttcctgcaatgatgggggtgaaggactacaaaatgatccatgggcaaacaagattggttctaatgaaggtaaagaacaagaaactgatccttgggccagcaagatgtcttctactgtgtgtgctgatgacaagaaaggtagctggaacactacagcaaagggcattccatctaaggaaaaggctgatgatccatggaatagtaaggggggtaatgatgacagcaagaaaactgacacctggggtgctggctcgtcaggtggggatcaggaactttcttggagcaaacctaatttctctttgggggaccaggaatctacttggaacaacccaaggttcagtgacgatgacaatgcgaataatagaggtggatttggacgtggaaatcgaggcagagggagaggaaggaattttggggatggtggtgggtcatcatggaatggaggcaatagaaacgatgaatcaggtggcggaaggtctggagagccatggaacagaagggactttgatggtggcggaggaagaggcagaggtcgttttgggcgaggtgaccgtaaccagggcaacaacttcgggtcaggagatggtggcagctggggctctggcaggggaaatggtggccgcggtggttacaggaactggaacgataacaatgagcgatccttcggtgaaggtggtggctggtcccagtcccagtcttccgattggaatgccaacaaaggaaatggcgaaggaaatcaagctttctcgaaaagcaagcccagctgggaagcacaaaacacctctggtagagatggtcaggcaggaaagggtgatgcaaacaactcctggagtaagaacagatcatctccatctagcgcttggggcgctcccagtggaggagctggcggccgaggttcttggggaaagagcaacgaggatggctggaactcagcgggaggatcagccaaagagaagcctgcatggggtggtgggtcagaagcgtctaccaagaaagaggacaaaggtggtgaggggaacgggagccaaggaggaggtggtgtcagttcctgggataaaggggcagatgatgcatggaacggcaacacgggtagtgatattgggagtggtggatggtaagatttccgccaaaataatatgaactctgtcggtgcgtgtgtctagttcgtatccgttacttcgccatgtgtactctacactaaaaagaacatggcttgtgaccatttaaacattaccttagtggtggcagtaactagtaaaaaagataaataaa

SEQ ID NO: 13362 - DNA, 3194 bp, Zea Mays
cccatctcgctaactccagtactccaccgctgatattattgcccgtgccgccgtgtgcgctccagtttccactgtgctccttctcgccgactccgccatgaccgcctcgccctacccgacgacgccgtggctgcggccaccgcctcctatggcatttctgagtctcctcctcctccttggctgcctctccccgtcgatctcactggcgggtgcggaggcggcgggggttctgagacaagtggttggtggggacgacggcgggacattcttcgagccgttcaacgtgacctacgaccaccgcgcgcttatccttggcgggaagcgcaggatgctcgtctctgcggggctccactacccgcgtgccacgcccgagatgtggccgagtttgattgcaaagtgcaaggagggcggcgtggatgcaattgagacatatgtgttttggaatgggcatgagccggccaaaggccagtattacttcgaaggaagatttgatattgtcaggtttgctaagctggttgcagctgaaggtctatttctttttctgcgaatcggcccatatgcttgtgctgaatggaatttcggtggtttcccagtttggttgcgcgatgtccctgggatagaattccgcactgacaatgaaccctacaaggctgaaatgcagatttttgtgacaaaaattgtagatatcatgaaagaggagaagctttattcttggcaaggtggtcccattatactgcagcagattgaaaatgaatacggtaacattcaaggccattatggtcaagcagggaagagatacatgctatgggcagctcagatggcacttgcacttgatactggtgttccttgggtaatgtgtaggcaaacagatgctccagaacaaattctcaatacttgcaatgccttttactgtgatgggttcaaaccaaattcctacaacaagccaacaatatggactgaggattgggatggatggtatgccgactggggcgaatcattgccacataggcctgctcaagacagtgcttttgctgttgctcgtttttatcaacgtggtggaagcttacaaaattattacatgtattttggtggaaccaattttgagcggacagctggtggtccacttcagataactagctatgattatgatgcaccaattgacgaatacggtatcttaagacaacctaagtgggggcatttgaaagacctacatgcagctattaaactttgtgaatcagctcttactgcagtagatggttcacctcattatgtaaaattagggcccatgcaggaggcacatgtgtattccagtgaaaatgtccacacaaatggaagcatttcaggaaattcacagttttgctcagcttttcttgccaacattgatgaacataaatatgcttcagtctggatttttggaaaatcttatagtctaccaccatggtctgtgagcatactaccagactgtgaaactgtggcttttaatacagccagggttggtacacaaacatcgtttttcaatgtcgaatctgggtcccccagctattcaagtaggcataaacctagaattctatcccttattggtgtcccctatctctcaactacttggtggacttttaaagaacctgttggcatttggggtgaaggcatctttactgctcaggggatattagagcacttaaacgtgacaaaagacatctctgactacctttcatatactaccagggtgaacatttctgaagaggatgttttatattggaattccaaaggttttcttccatcactaaccatagatcaaatccgcgatgtagcacgtgtatttgtaaatgggaagcttgcaggtagtaaagttggtcattgggtctcactgaatcaaccgcttcaattagttcaaggacttaatgagttgacattgttatcggagattgttggcttgcagaactatggtgctttcttggagaaggatggtgctggatttagaggtcaagtaaaactcactggcttgtcgaatggggatatcgaccttactaattctctttggacatatcagattggtttgaaaggtgagttttcaaggatctattctcctgagtatcaaggatctgctgagtggagtagcatgcagaatgatgacacagtttcacccttcacatggttcaagactatgtttgatgctccagaaggtaatggccctgttaccattgatcttgggagcatgggaaagggccaggcttgggtgaatgggcatctcattgggcgctattggtcactagttgcgccagagtccgggtgtccatcgtcatgcaactacgcaggaacatacagtgatagcaagtgccgatcgaactgtggaatcgctacacaaagctggtaccacataccacgcgaatggttgcaagagtcaggcaatctattggtactcttcgaggaaacagggggagacccatctcagatatcgctggaggttcattacaccaagacaatctgctcaaaaatatctgagacttactatcctcccctttctgcctggtcacgtgccgccaacggtcgcccctcagtaaatacggtagcaccagagcttcgcttgcagtgcgatgacgggcatgtgatctcgaagattacatttgcgagttacgggacccctacaggaggttgccagaacttctctgtagggaattgccatgcatcgactactctagacttggtggtagaggcctgcgaaggcaagaacagatgcgcgatcagtgttaccaacgaagtattcggagatccatgccgcaaagtcgtcaaggatttggcagttgaagccgagtgctccccgccatcggttaaccaagaacctcgatacgatatatgatcacggtactgtattgtggtgctcaggtcttggtggacgttgccgcagctttgcagggccgtgcacaatggtcctgcatcgttgtctcctatacctctgcacccatattatatgtaaacagtgacctacatgtaaatctaaagaagaggagggattgaaaagaaatgagatggaaaaggaataaagttgcttttattacaaatggtcattcctgtgaaccgtctggcttactcctgcggtcgaccaaccgctggtggtggtgatgcccttttgattgagcccatgtgcattctcctggctcggcgtggacagaggaaaggaaaaaatttattccgaatta

SEQ ID NO: 13363 - DNA, 1549 bp, Zea Mays
attagctgatgttagaggtagacagagtggttttgccggaggtttgtgcaccagtgaaggatactgttgtttgcttgtcaatccaggatgagaaaaatgacccacttgcatctaacagtcaacttaatatgagatcatattccccagaaggtgatggcgtgattaaggaatcaaatcgtgtggtgacagataaggaaaatgataagtctttgtttctttctttggataatgaccaaaaagttcacagccaagcagaagctgaggtgcaggatattatggttcgtactagctgctcaatatctgaaattttagctcagaaaattaccagcaaagaacagccctcccaaaaaagcatagaagttggggatgagtgctttagaccttctcaagatatggattatgttatgatgtttgactccagcaaagatgagaatggaccaaatccagaaagattgacagctgaaggtgattgtggcgatcctcatgaacgtctggatttagtcacagtaggtgatatcggaaaaatggttgtagacaatgcaatcatcgaagatgtgaagagtaataacacaactgcaaacaatgtcaatcacggtgagctgcatgtttcattgcagttgccagagggaaacactgacaatggtatgactggtgttagcacagcttcctctttagacataaaagagggaaacaatgacaaagtagtggcagatgcctctgcacatgaaggtgatataaatgacaatggtagctctgaattgaaaataggaaatacgaacagtggtattactggtgttatcgcagcttcctcagacttaaaagaggaaaatattgacaaagtagtggcaggtgactgtgcacatgaaagtgatataaatgctaaggattgcactgagttgaacattggaaatactgataatagtattgctggtgatagtacagtttcccctgaggtgagcgcggaaaacactgatcaaatcatagcaggtgattgtggaaatgaaaccgatttaaaagctgatggtgagggtgctgacaaattcttagcaactgacagtgctcttccttgtgaagatgatgcaacttgcatggatggtgcgaatgtgattgtatcactagatgtaccccgtagcacgaagaatgatacattttccaagaacacatcttctgacgctgaaatgcctctgcctgttggaacctgtgagctcgtcgatagaccttcttccgagaatgacatgtctgagcacacatcttttgatggtaaacggcctgcggatgataggactttggaagagaacgaaatggttatgcctggtgatgaaaaaacagaggtgcattacaagcgacggaaggttttggcctcagagaaacaaagcagcttctccggagcaacttctacagattaggctagaatcaataagctatagggccggtggtgcgtggtgcttccatcacatcgagatcaagattggcggtggattttgtggacgacaagggagaacggacatggagagacgcggtgcaatgcaagaccggaccggccggaggg

SEQ ID NO: 13364 - DNA, 524 bp, Zea Mays
ctcccctaggagatctctgtttcccatctgcacttccgagttccaggcttccaaccgctgtggaattttggctaccatcccactttcgctttgggtgaaagataaagaaaaagaactttggctaatgagggtcgtcgcaggaattcaggatgggatgaaacaaggaattattaatccaagtgatattgatgttacctttgaggattttccttattatgtcagtgagaacacaaagaatgtgctcttgtcatgtgcattcatacacttggaaaagaaggagttcatcaagcagtttgctgagatttcatcaataaaccaacgaattttgttattcggtccagcaggttctgagatttatcaggaaacattggtaaaggcacttgcgaaacattttggtgctagacttcttgtcgtggattcacttttgctaccttgggggaccaagttatggttatcgaggcagagtgatgcttgcttttgaagataatggatcctcaaaaattggagtctgatttgacaagcag

SEQ ID NO: 13365 - DNA, 1305 bp, Zea Mays
aagaaccagtggctctgcgcattctacctcccgcgcccacacccgcacggccgcacactccattccaaccggcaagcaaagcaagcaaacaaacaaaacgaaacagcacagcagcaaagatcacacggcctccgctcgctcgacggcccactcggttccgatcgatctcgcgatcgcacaactagactcgagtcgagcgatcgagcgcccgacgaccaatggcggccaaggcggtggcttcgccgctcgcgttccgccgcgacgtgcgtggcccgctcggccgtcctgccccgggcggctgccggagcgggaccgggaccgggacagggctgccgggggtgctgtactggagcggtggcgccggcggcggcagcaggctgctcgcggcgcgggcgcgcgggaggaacaggttcggcggcggcggcggcgggcggggcgcgtccagggacgagacagcggaggaggacgaggacgaggccgccgacgtggtgatcgtcgacgccggggacgaggaggagtacgcctccgacgagctgtccggtttcaggggcctggttcttgatctctcctacaggcctgtcaacgtggtgtgctggaagcgcgccatctgcctggagttcattgggaaggcccatgtgttggagtactacgaccagaccgtctcttcgcctagcgggtccttctacatccctgcagttttgagggttccacagttgctgcaggtagtaaagagaagaagggtcaagcagagccttagccgtaaaaacattctttacagggatgacttcacctgtcaatattgttcttgtggtgacgacttgacaattgaccatgttattccgatctcgcgtggcggtaaatgggaatgggagaatttggtgactgcctgtgcaagatgcaactccaggaaggggcagaagacactggagcaggcaaacatgaagctgcgcaagatccccagggcgcccaaggagtacgatatcatggctgtgcccttgacaaaatctgcgttcagaacgctcaagaggaaccatggcctccctgaagtgtggctgcagtaccttgccaggccatctccatgaccaagacccccctcctcgtcatcgccatacgggccagcaacagcaagcaatctcactgtacattaacattattatagattatacaccatgcagcgcacaggcaaagactgcagatactgactccttatatacatgcccattctgtacacaataaactgttgcatgtactaaggacttatcttccaataaactgttgtaagctggtgcagaaacccaaaaaaga

SEQ ID NO: 13366 - DNA, 772 bp, Zea Mays
ttttgtatttctgattgctcaccttctttgttgtttgcgacgaccgtccggaaacacgacggaacgggggcttctacctcgagaaagctccccatgttcccatcgccttgtacttgcggctgcctagaaacagcttggtagtataaccactgaagatggtcagtgggaggccgcatggtgaattggactcatggttcaagagcctcatggtgacctctagcagcgagagggggcaggctgggagtggtggtccagcgccaacattaacaggatggaaggaccttccgatggagctcctggtgcggataatatccacagttggagatgataggatggtcatcgtggcgtctggtgtttgcacaggctggcgtgacgcgctgggatggggggtcactaatctttcacttacatggtgcaaactgagcatgaataatttaatgatatctcttgcccacaagttcacgaagttgcaagttctcactctccggcaaaacaaacctcagcttgaagacagtgccgtagaggctgttgccaactactgccatgacctacgtgagttagacctcagcagaagcttcaggcttagtgaccgctccttgtatgcgctggcccatggatgcccacggcttacaagactgaacattagtggatgttccagtttcagcgacactgcgttgatttaccttacctgccgctgtaaaaacctcaagtgcctgaacttgtgtggatgcgtgaaggctgttactgacagagctttgcagttttggtgcag

SEQ ID NO: 13367 - DNA, 1259 bp, Zea Mays
actccgaccatttccaccaacggtctggacgggtggactgaccacaagtcgccgactcgccatccgcgtcaacaccactgcaaccaccaccgccgtgtgggaggcccaaaccacgcgcctttccccactgcaccaggcaacccaccagcaggccgcagttcacgcttggctgacgaccgacccccattcgttctagccctccctccgacactccgatccattactcgctatggacgcggcgggcggcgaccagctaagcctggccgcggtgcgcgacgcgctggtgcggctggaggactccgtggtgttcgcgctcatcgagcgcgcccggcatccgcggaacgcgccagcctacgcgcccgccgccaccgctggagaacattcgctcgtggagttcttcgtccgggaagcagaggccctcaacgcaaaggctggacattatcaaaagccagaagatgttccattcttccctcaagatctaccctcacctctctttcctacaaagccttccccaaaggtcttgcacccttttgcttcattggtcaccgtgaatgatgcaatatggaaaatgtattttgatgaattgctcccgttattcactgttgatggtgatgatggcagctatgcacaaacagttgcactggatttagcgtgtctgcaggttctatcacaaagaattcatattggtaaatatgttgctgaggtgaagttcaaagacgctcctcaagaatatagtcgactaataaaagaaaaggacagcaattctctgatggatatgctgacattcaaggctgtggaagagaaggtcaagaagagagtagagaagaaggctaggacgttcgggcagaacgtcaccttggatgacaatgccactgctggtgacagcgagtgcaaggtcgatcccaaagtgctctccaagctgtatgatcagtgggtgatgccactgaccaaggatgtcgaagtcgagtatctcctgcgccgcctcgactgatcagtgatcacccgattagctgtagctgcgaactttatgtacgcgtgggtttcagtttgctttgcacatgccctttatggctttatcgttcaaactcaactacgagagaacgttaccaggatctggccttcgtctttgtcagcctgcttgcccgtcatctgcatgagtagtccaactgtaagtgacgcttggtatggaatgtaagaaaagtaatacaactggttacatgttatctttaatctcctgttgttcgtctgtaaaaaaacac

SEQ ID NO: 13368 - DNA, 1943 bp, Zea Mays
gagatgctttggcttggattaatgtctgcctagctagacagatatttttcttcttttcttctggtcccaaaagcatttggcgacgctgcatctggttcagacaactttacgacgcatgggcgcatggcatgtggcggcatataaatggaggcagccgagcgcgcaaggtctccacacgcctctcttgctcaccattctcttctaaccagccaagccaaggcgcatctagcgagctgagcagcaatggcggctgctacttcttctaggcgccctgcagctgctctgctggtcctggcagcagccgtcgtggccctggcggccgagggggccaggtacccgccgctggcgccgggcctgtcgttcgacttctacaagaagagctgccccaaggcggagtccatcgtgcgggagttcctggcgtcggcggtccggcagaacgtggggctcgccgcggcgctgatccggctccacttccacgactgcttcgtgcagggctgcgacgcctccatcctgctggacgccacgcccacccagccccagcgagcagcagtcgccgcccaacctcacgctcccgccccgccgcgttcaaggccgtcaacgacatccgcgccccgcctcgaccaggcctgcggccgcgtcgtctcctgcgccgacatcgtcgcgctcgccgcacgtgaatccgtcgccctgggtggcggcccggcgtacaagttgccactgggcaggcgcgacgggctggcgccggcatcgaacgccgccgtcctagcggcgctcccaccgccgacgtccaaggtgccgacgctgctgtccttcctggcgaagatcaacctggacgtgacggacctggtggcgctgtcgggcgggcacacggtgggcatcgcgcactgcggctccttcgacaaccggctgttcccgacgcaggacccgacgctgaacaagttcttcgcggggcagctgtaccggacctgcccgaccaacgcgacggtgaacacgacggccaacgacgtccgcacgcccaacgccttcgacaacaagtactacgtggacctgctcaaccgggagggcctcttcacgtcggaccaggacctgctgaccaacgctaccacgcgccccatcgtcacgcgcttcgccgtcgaccaggacgccttcttccaccagttcgtctactcctacgtcaagatggggcaggtcaacgtgctcacgggctcccagggacaggtccgcgccaactgctccgcgcgcaacggcgccgctgctggtgacagtgacctgccgtggtcgtccgtcgtcatcgagaccgtcgcggacgccgccggtagcctcgtgctctagataataagcaaataagcagtttgaagcttgcttcgcatgcatgttgcaacaaataagcagctagtagcgatcgatcgattggaaataaagcagctagtagcgatcgttattacagaaacgacgacgacgtcgatggcaatggcagcatgctctgcagggagagcgcgggcacgggcatcgatggcaatggcaccagtagatgatccctgtccgcgcgggctcagccgaccaatcgatgtcaaccgcggcagcagtagcatagctaaggcatccgccgccgcacgccgactcggccacgtgatcgctgtcggactggaacacgatccagcctcgctcgctccatcgtctaataagagggtggcggcggcgaatatgggaattggaccttcggggggagaaaatatatcttggatgcccgtcaagacatctttcaatggtttccacagaaataatttaaaggtggctgactaatgtcagccgcgagtctcccgggtctgaacctagctaggtttgaaccccttgccgcaaggaatcctctaaattgtatactctaaaagaatatttgtatgttctctaaaattatatcctctataacataataactatataaa

SEQ ID NO: 13369 - DNA, 1233 bp, Zea Mays
cgtgaaacgactccaatcgtgttactatactggcagtatcgtgtctcgcaagtttgctgctcttgagagttgagatgctttgctgacgaaagggggcaggccgagaaggagttcaaggtggaggtggaagcaatcggtcgtgttcggcacaaaaatctcgtcaggttgctcggctactgcgtagagggtgcttacaggatgctcgtgtatgagtatgtggacaatggtaatcttgaccagtggcttcatggtgatgttggcgaagtgagcccactgacatgggacatcaggatgaacattatgcttgccacagctaaagggctggcctacctccacgaggggctggaaccgaaggtggtccaccgcgacatcaaggctagcaacatccttcttgaccagcagtggaacgccaaagtatcggatttcgggctcgcaaagctgttgtgctcggagagaagctacgttacgacccgtgtcatgggaaccttcggttacgtggcgcctgagtacgccagcaccggcatgctgaacgagaggagcgatgtgtatagcttcggcgtgctgataatggagatcatcaccggcagatgtcctgtggattacacaagggcggctggagaggtgcagctggtggagtggctcaagaacatggtggccgagaggaaagcggaggaggtagtggacagtaagatggccgagaggcctcctcccaagacgctgaagcgggcgctcctggtggcgctccgctgcgtggaccctgacgcgaacaagcggcctaagatggggcatgtgatccacatgctcgaaatggacgatctccagttccgagacgataagaggcccggggccgggagagatggtcgtcgtccccagggtccggataggtacagctccaagctaggtggaggaagggagcctcagcaagcgcgagcaccagcgtcggtacagatgagatgattgtcattagagagtagcgatattaaccatgttatttttttcccgtcagtaaatacattctttcccaactcgttccatcgattctcaatggtcttcgattgtattatatatgtggagcaaccatcattctgtgacgatacttgaatcacacacacacacacacacaatgtagtggtaggatggtgctgtgtgacttaacatgcccaggccgaaaacctacagtttgtttacatggacgacagagaagagaagtcgccttcgttttcaacggctagc

SEQ ID NO: 13370 - DNA, 3635 bp, Zea Mays
gcgctgcgccaccaatcgccatcgcctcgttgcccagtctccgcgccgccgcctcctccgctccctccctccctcccctcttctagggtttccatcccatgcgatctcgcggccttggtgttccgggacagtagggacgcctcctctccgttcgaatcaagggagtcagcgacccaatgggtaagggcgggcaggacgaaggcaaccgccggcgggacggatccgccgcctcggggccggaccgccccgcgccggtcttcccggcgtgggcgcgcaccccgagcgagtgcctcgcggagctgggcgtctcggcggaccgcggcctcagctccgaggaggcggcggcgcggctgcagcgacacgggcccaacgagctcgagcggcacgcgccgccgtcggtctggaagctcgtcctcgagcagtttaacgacacgctcgtgcgcatcctgctcctggcggccgtcgtctccttcgtgctcgcgctctacgacggcgcagagggcggcgaggtggggctcaccgccttcgtcgagccgctcgtcatcttccttatcctcatcgtcaacgccgtcgtcggcgtctggcaggagagcaacgccgagaaggcgctcgaggctctcaaggagattcagtcggagcacgcaaccgtcaggcgtgatgggcgctggtcgcatggcctccccgcgcgcgacctcgtccccggggacatcgttgagctccgggtcggggacaaggttcccgcggacatgcgcgtgctccagctcatcagctccaccctccgcgtcgagcaggggtctctcaccggcgagaccgcctctgttaacaagaccagccacaagatcgagctggaggacactgacatccagggaaaggagtgcatggtttttgccggtaccactgttgtcaacggcagtgctgtctgtgttgtgacgggcactggcatggctaccgaaattggcaagatccatgcgcagatccaggaggcatctcaggaggaggacgacacgccactgaagaagaagctcaatgagtttggtgaggcgctaactgccataatcggggtgatctgtgccttggtctggctcatcaacttgaagtatttcctttcctgggagtatgtggacgggtggcctacgaatttcaagttctcatttgagaagtgcacgtattactttgagattgcggtggcactggccgttgcagcaattccagagggtttgcctgctgtgatcaccacgtgcttggcactcggtacaaggaagatggcacagaagaatgcccttgtgaggaagctgccgagtgtggagacattgggttgtacaactgtgatttgctctgataagaccggaactttgaccacgaaccagatgtcagcagtgaagcttgtagcaattgggaggtggcctgatacacttaggagctttaaggttgatggaaccacttatgatccgactgatgggaagatacacgattggccaagcttgagcatggatgaaaatctccagatgatcggaaagatagctgcggtttgcaatgatgcaagcattgcccactctgagcatcagtacgttgctactgggatgcccacagaagctgctctgaaggttttggttgagaaaatggggcttcctggtggttatactccatctcttgattcatctgatttgctaaggtgttgtcagtggtggaataatgctgccaagagagtagcaactctggaatttgatcgcaccagaaagtcaatgggagttattgtgaaagcaaactctgggaagaacttgctgcttgttaagggagcagtagaaaatctgctagagagatgtacccacattcagttgctcgatggatctgttgtgctattggatgatggtgccaaggcgctcatattatctacactccgtgacatgtctgccagtgctttgcgctgcttgggttttgcttacaaggatgaattgtcagaatttgcaacatatgatggtgaagaacatgcagctcacaagtatctgcttgatccttcatattactcatccatagagagtaatatgatcttttgtggttttgttggtctaagggatcctccacgagaagaagtccacaaagcaattgaagattgcagagctgctgggatacgtgttatggtgataacaggagataacaaggaaacagcagaggccatttgtcgtgagattggggtttttggccctcatgaagatatcagttcaaaaagcttcacagggaaggaattcatgggtctttctgataaaaaggagctcttaagacaacagggtggccttctcttctccagggcagagccaaaacacaagcaggagatagttagactgctcaaagaagatggtgaagtggttgcaatgactggtgatggggtgaatgatgcaccagctcttaaactggctgatattggagttgcaatgggcattactggaactgaggttgccaaagaagcttcagatatggtacttgcagatgataactttagtactatagtcgcagcagttggtgaagggagatctatttacaacaacatgaaggcttttattagatatatgatctcctcaaacatcggagaggtcgcgtccatattcctgacatcggctttgggtattccagaaggtctcatcccagtgcaactcctatgggtcaatctagttacagatggccctccagcgactgctttggggttcaacccgccagataaagatatcatgaagaaacctcctcgaagaagtgatgactcgttgatcactccttggatcctgtttcgctatatggttattggcctttatgttggggttgcaacagtgggaatcttcatcatctggtacacgcatgacagtttcctgggaattgacctggctagtgatggtcatacacttgtatcgtactcccagctctcaaactgggacaagtgctcctcatgggagggcttcaaggtgtcaccattcaccgcaggagcgaggacattcagcttcgatgcaaatccatgcgattacttccagggtggcaagattaaagcaacgaccctctccctgtcagtcttggtggccattgagatgttcaactcactgaatgccctgtcagaggacggcagccttgtgagcatgccaccatgggttaatccgtggcttcttctggccatgtcggtttctttcgggctgcatttcttgatcctctacgtgcctttcctcgctcaagtgtttgggatcgtgcccctcagtttgaacgaatggctcttggtggtggcagtggccttccccgttgtgctgatcgacgaggttctcaaatttgtggggcggtgcctgacagcgcgtgcccggaaacaatcagggaagaggaaggcagagtagatgctagtgatcatcggtatttagaatctgtagtgccacggggaatcgatattcaatgtgacacccccattgtttttgagctgctaagggctctcgatcctttcagagtgttttaggttgggaatatgaccgtgcatgacaggctaggatactctatagaattggtaagcatatcgcgttgaacaacactgccttttgtttttcgttgtaacaaatgctggtactgtgaacatgctggagatacaacaatggttacctgacaaaaaaaaa

SEQ ID NO: 13371 - DNA, 1654 bp, Zea Mays
caactgctgcagcgaaggcacacagccgccaccgtttcttcatctcccagcatcttcttcctcgcagactcgcagtgccggcgctccatcttccgctccctcccttacacgtgctcggcacgcaggcgacggcggctacgttcgggctcgggctctcagcaaccgcgtcagcagctgcccctcccgcttctcgccagtcgcaccgtgccctcgcctccggtcctcagcacaccagccgtgaccctgcgtcataacagcggtacaagggtgaacaaagaacatcgagaggaagacaatatgccgaagaaggggactaaatctaagaaggagaaggtggacgatgtgcccaatgaacaagaaaataagcttccagactacctggagctccagcgcacacgtgtcgtctgcaatgctgatgcccccattcatactcaaggtttccaatactcgggtgcatttgctgctatgggaattgataatagcgtgtcagtggataaattttgcaagaatttcaaaattgaaataaatcgtctcactgaagattatatggagttcgatatgattggtattgatgcatcaatagccaatgctttccggagaatcctcatttcagaggttccaactatggcaattgagaaagtcttcatggctgacaacaactcagttatagcagatgaggttctttcacatagactaggacttattccacttgatgcagatccaagactctttgaatatatctcagaaaacgatgtcccaaatgaaaggaatactattgtttataaactgcacgtttcttgtccaaagaattctcaacgaattacagtgaaatctagtgaactagagtggttaccagaaggtagccaattaagcatgtcagcccctgcacagtctggagacaaacagaagactttcacttccttcagtcaaagccaaaaggagatcttagaaaagcctcttggtgtgaagtataaagatattactattgccaggcttgggccaggacaggctatcgagctcgaggcacatgctgttaagggaactgggaacgttcacgccaagtggtctccagttgctacagcctggtacagaatgctccctgaggttgttattcttaaagaagttgaaggccctcaggcagaggagctggtgaataagtgccgggttaatgtttttgacatcgaagacctggctaacggtggaaagagggctgttgttgcgaggccaagggcatgcacgctctgcagagaatgtgtgatgggaccaaatgagaaacaagtggagctacggcgtgtcagagaccatttcatattcaccatcgagtccaccggaagcatgcccccggaggtgctgttcacagaagccgtgaagattttggaagagaagtgcgcgagggtcatatctgagctatcctgagaggccggcggcactgtgcagcactggagttagagtaaaccagctcaggctgcagtatctgctgtttttgatggagactagtgtgcgccattaaacattttttttgtggtgttggatatttgggtcagcaaatgtaagctgtttatatcatgtaacgcagtgtaatgttagattaaactgtggcaggtgatcgaaatggcagctgtatcaaaggtagacgtcggctgttaaaaaacaa

SEQ ID NO: 13372 - DNA, 99 bp, Zea Mays
ggaacttggaagtcgactagcggcttgcaccatcggcgtcaatcctgtggctatacgtgtgaatcgcagcgctgcaactatttgaaaatgaagggaact

SEQ ID NO: 13373 - DNA, 1468 bp, Zea Mays
tcagttttcacccatcccttcccagttctgtccctctcgaaccctaactccaaaaaccctcgctctcctctcatggccgccgccgcagctgacgacgcagccgaggtggagcggctttacgagctcggcgagcgcctctcctccgccaatgacaagtccgagcatgcggcggactacgaggcgattattgcagcggtgaagggacagagtgccaaggcgaagcagctcgcagcgcagcttatccccaggttcttccggagcttccctgcactcggcacgcgcgccatgtcagccatgttcgatctcgtcgatatggaggagctcgcgatcagaatacaagctattcgtggctttccacttcttggcaaagatactgaatttgtgtcaaaaattgcagatgttttgggtcagctccttacaagcgaggaaaatgttgagcgtgatgctgttcataaagcgctcatgtcccttatacggcaagatgttaaaaattcattacaacctttatttaagcatgtggagcaaggatcagagattcgtgagaagattatttgttttcttcgagacaaggtctttcctcttaaagcagagctgctgaaacctcaagcagaaatggagagatttataacggatttgataaagaaaagtgtgcaagatgtaactggttcagaattcgaactattcatggggttcttgcgaagcttgagcatatttggggattctgctcctagagagtcctttcaagaactaattgaaattattcaagcacaggctgatctgaattcacaattcaacgtttctgacattgaccacattgagaggtggatttcatgcatgtatatggctcttccgatcttcatgagaggagcatcagcaagcaagttcctcaattacttcgttaaacaaattgttccagcatttgagaagattcctgaagaaaagaaactggatttgctaaagactattgcttcaagttcaccatatgctgcagcacaagattcacgtcagctgcttccatctgttgttcagttactcaagaagtatatgcctgggaagaaggtggaagatatcaaccataattatgttgagtgcttgctatacacttttcatcatttggctcacaagactccaaacacaacgaacagtctatgtggttacaagattgttactgggcaaccatcagatagacttggagaggacttctcagagcattacaaagatttcacagagaggttaactggaacagaagagacggtacgagcagcctccaagcgactaactcaggggatggcagatttcaacaaggcaatatcttcagcaaaaactgacgaggaaaagactaaaattaaaggcgatcagcaaacttcaacaaggacaatgaggtcatataacaatatattggcaatgacacagcttgatgtctatttgtatcggtcagaagcaatgtttaaaaagcactaagcacgac

SEQ ID NO: 13374 - DNA, 496 bp, Zea Mays
tgaaagaattggacggccgccctcttcgagtgaatgttgcagcagagcggccacagaggggcttttgatgcggttgtatgagagagatgactgtttgtttgtaatgagcatggagacacagagacacaatggaggagcaatggtacaaattagcggaagcggatgctgtcacaagttgctagatctttctcccttagcttcctgacatttggttcttgccacagctttttgatgcttctcttggcagctggacttaatggtttgctattcttgtcgacatcacgagttgaattgtcaaactagtctcttatgttctatgctgatttgccttaaccagattctcagcatggcaaaatgttttgtgggtgaaattaggggtggaaaaaagtttgaggcgcgagccagcgagccaagccgagtttgtttttcaagctcgaaggagcgagccaagccgttcaggcttgcgagttcgcgagctgtgccaaattaattaatt

SEQ ID NO: 13375 - DNA, 80 bp, Zea Mays
tgattggagtacgcaatgggaggttgtgtgggaaaggtacgtcgtgatgacgaagaaaaacttgattttaaaggtgcaaa

SEQ ID NO: 13376 - DNA, 1304 bp, Zea Mays
tttccaaaggaggatatacaatctggtgactttttggctttatcaaagattcgaggacgatggggtgggtttgagacattagagaaatgggtgactggtgcatttgctgggcatacctcggtttgcttaaaagacgagaagggtgatctttgggttgcagagtcaggctatgaaaacgagaagggagaagaaatcattgctatagttccttgggatgaatggtgggccatggctctcaaggatgaatcaaatcctcagatagccctgcttcctttgcaccctgatgtgcgtgccagattcaacgaaagtgctgcatgggaatatgcccggagcatggttggaaatccttatggctaccataacatgatatttagctggatcgatacaataggagataattatccacctcctcttgatgctaacctggtaatggcagttatgtcaatgtggactagattgcagccagtttatgctgcaaacatgtggaatgaagccctaaacaaacgacttggcactgaggatttcgaccttcaggggatcattatggagattgaaagacgtggaatgtcttttgatcagttgctcaccatacccgagcaagacgaatgggtgtacagtgatggtaaatcaactacttgtgtcgccttcattcttgcaatgtacaaggaggctggaatattcacccctttctcggagtcgatccaggtcaccgagttcactattcgtgacgcatacatgctcaagatatttgaagacaacccggcaaggcttccaggttggtgcaacgcaggcacggacaagcttcccttttgccagattctcggagagtacagaatggagctaccagagtacaacacgattgaaccttatgcgaaaatgaacgagaactgtccgtccttgcccccaacgtacaaacgacccgcacgctgctgactacgagattgtctactatgtatctttctgcagctgctgcctttacacagtggcattagagtgttgttgctatgttctgtaaataaaagacactatatatataggtgcttggtagatggtagttcttaccagtaatgtagctgcgatgtattcaggttcacggttttcagtcgatcagttctgaagccacggcgtcggcgaccaatatgaaggttaggatttgtcagctccggaaagttgcttatatgtatcaatgtatgtatgtaggcaacattatggcttggtcataaattgtgaactccgtcaagaaataaatctataatgcaacgtcaggtgattctgatatgtgattaagaaaataaaaaaacaaa

SEQ ID NO: 13377 - DNA, 164 bp, Zea Mays
tgcctcgtcgcgttttaagtcgtctgcaaaggattcagcacgccgcccgttgggaagggagcttcgaggtggcccgccgcggcgcgtcggccgggcgggctgagccaatggcacgggcccttggggcgcgaacgccctaacgtgggtcggggcgggcggcgagc

SEQ ID NO: 13378 - DNA, 3094 bp, Zea Mays
cccctggacatgccactcaatgcattcagagggcgtagctgctcagctgccactgctcactccccgccattaattcgtagtattcaataccacagcagtacctctctctctctctctctcaccttctatctaggcatctcctcgtgacctcgtcactgtcttgcatttcatatacagttcacagttcacgctgcagggcagtggccatagagtagctcgtgagcgagggagcaaaaaccagtgaagaaaaagaaaaaaaaaacaacggggcaaaacgaaatgctgtctttttctcgttcggccatcctctcctacctactgtggtgtcttctatttctcacattggcaagcagcaatggcgcggtcgccacagcaaagccgaaggctgggtgcgggtacaagctggtctcccttgttcagctgcccaacgggggaggccttgtgggttacctgcaggtgaagcagcgcacctccacttatggtcctgacatccctcgcctcaggctctttgtcaagcacgagaccagggagagggtgcgcgtgcagattacagatgcagataagcagaggtgggaggtcccctacaacctgctcccaagggagccagccccacccgtgaccggcggcaaggtcacgggcgcccccttcacgggcgccgagtaccccggcgaggagctggtgttcacctatgggcgcgacccgttctggttcgcggtgcaccgccggtccactcggcagccgctgttcaacaccagcgccggcgcgctggtgttcaaggaccagtacctggaggtgtccacggcgctgcccaagaacgccgccctgtacgggctcggcgagaacacgcagccggggggcatccggctgcggcccaacgacccctacaccatctacaccacggacatttccgccatcaacctcaacaccgacctctacggctcgcacccggtgtacatggacctccgcagcctgggcggccgcggcgtcgcgcacgccgtgctgctgctcaacagcaatggcatggatgtgttctacaggggcacgtcgctgacctacaaggtcatcggaggtcttctcgacttctacttcttctcgggcccgacgccgttggccatagtggatcagtacacgtcgatgatcggccgtcccgcgcccatgccttactgggcattcgggttccaccaatgtaggtgggggtacaagaacctttcagtggtagagggcgttgtggaaggttaccgtaatgcccagataccgctggacgtgatctggaacgatgacgaccacatggatgccgctaaggacttcacactcgatccggtcaactacccacgccccaaactgctggcgttccttgacaagatccatgcgcaaggcatgaagtacatcgtcctcatcgaccctggcattgccgtgaacagctcctatggcgtctaccagcgtggcatggaacgtgacatctttatcaagctggacgggcagccatacctcgcccaggtgtggcctggccccgtctacttcccggacttcctcaacccgaacggtgtgtcgtggtggatcgatgaggtgcggaggtttcatgatctggtcccggtggatggcctctggattgacatgaacgaggcctccaacttctgcacgggcaagtgcacgattccgaagacgcaccagtgccctattcctgacaccaagacaccatggctctgttgcttggattgcaagaaccttacaaacacgaggtgggatgagccgccgtacaagatcaacgcctccgggcagactgcccgtctcggcttcaacaccatcgcaaccagcgctacacactacaacggcatcctggagtacaatgcgcacagtctgtatggcttctcgcaggccattgccacgcatacggcgctgcaagggctgcaggggaagaggccgttcatcctgacccgctccacgttcgtcgggtcgggggcgtatgccgcgcactggaccggagacaacaagggcacgtgggaaaatctccgttactcgatctcaaccatgctcaactttggcatcttcggcatgcccatggttggctctgacatctgcggtttctacccgtcgccgactgaggagctctgcaacaggtggattgagctcggggccttctaccccttctccagggaccatgccaacttcgcgtcaccgaggcaggagctgtatgtctgggactccgtggcgaagtctgctcggaacgcgctcggcatgcggagcggggccccagtgaagctggacgcgccgctgaacgagatcaacgtgcacgtgtaccagaacacgatcctgccgatgcagcgcggcgggttcgtctccaaggacgcccgggcgacgccgttcacgctcgtggtcgcgttcccgttcggggcgacgcaggccgacgcggagggcgcggtgtacgtggacgacgacgagcgcccggagatggtgctcgcggaaggccaggcgtcgtacgtgcgtttccacgcgagcgtgcgcggaaaggccgtgacggtgcggtcggaggtgctgatgggaagctacagcctgcacaaggggctggtcgtcgagaagctctcggtgctgggtctggagggtaccggcaaggaccttgccatccaggtggacggcacggacgccactgccgtcgcgacgtcgagcccttactttgcagcaggtggcaacgcgaagctgcagggggaagaaggcgtcgaggatagtaagaacggcgtcatggtggagatcggcgggctggcattgccgctcgggaagagcttcaccatgacatggaacatgcggatcgaagcataggtcgagtgatgctgtgcttccgtctccatgaatttgcttaaagtcgtgttccgtttctgatttagatgggtagatcctgccatgctgatgtgcagtcagaatccatattctgaaaaatctgtcatcagggggtgctctgtgcaaggagcagagtacaacattgctgcaacaataaaagattgaatctttgacgtttgactagtatgatgaatgtgttaggatttatgggtttggcccagttgagaaattcaaataaattgcaggaaaatctcaaaagctt

SEQ ID NO: 13379 - DNA, 1539 bp, Zea Mays
gttcctgcaattttggatcgtatcagagatgcagtgtttaagaaagttggtgagaagggtggcctgacaaaaaagctgtttgattttgcatataagcggaatcttgcatcaattgaggggagttggtttggatcctgggcaccggagaggatgatatgggataccattatttataaaccaatacgggcaatgcttggaggacgtgtaagatttgttctttgtggtggtgcacctttatcaggtgacacacaaagattcatgaatatatgtctaggtgtcccagtgggtcaaggctatggtttgactgaaacctgtgctggagcagctttcactgaatgggatgacacaagtgtgggtcgtgttggtccaccacttccttgctgctatgtgaagcttgtttcatgggaagaaggtggttacaagatttctgattatccgatgccgagaggagaggtcgtggttggcggacacagtataacaaaaggctatttcagcaatgaagcaaagacgaatgaagttgacgagaggggtatacgctggttctacactggtgatattggccagttccatcctgacgggtgccttgagattattgacaggaaaaaagatatagtaaagcttcagcacggagaatatgtgtctcttggcaaggttgaatcggctctagcaacaagtagttatgtggagagcatcatggtctacgccgatccgttccataactactgtgttgccctggttgttccagtacgccaggccctggagaagtgggctcaaaattctgggataaactgtgaaggctttgaagagctttgccaaaatggccaggcggttaaggaggttcagcaatcactatcgaaggccgcgaaagcagcgaggctggagagattcgaggtgccggcgaagatcgagctgctgcctgagccgtggacgccggagtccgggctggtgacggcggcgcttaagctgaagagggagcagataaaggccaaattcaaagacgatctggacaagctctaccactgaagaaaagcggggcttgcacccacgcgttcaggagcttgcgctgccaaaacgctgcctggatgcggaatggaacctactgacctgcacgagaccacgagtggtgtgtgtgtgtgtgtggatgtgtgtcggcgtcggtacagcaggagctgcttcttgtgtgatgaaaaataagccaaagtgttggttggaacgatcttgatttgtatagcttcacttaacttgcatgaaccctagctcgaaatcagttgaatctggatggaccggtcgataagagttgccgctatcggttttgatgcctcacgatggttgaagccgggcagccggcaattgtcggggcgttctctgagatggccatagtcgtcgcaatttgacctgtggatttagatatttgttggatatctaatccaatagataccagagccgggtatggatacatgtttttaccacagttttgatgtttttaccacagttttgatctgtggtcagactttaataaaatggctccctgtgctctga

SEQ ID NO: 13380 - DNA, 1730 bp, Zea Mays
ctttgtccaggcaatccagcctcattgtacacaggtctatccaaattcttagggacaaacaggagttagctgaagctcagaaggaattggccaaatttcaacttacacaagatacatctaaaaagaaggaagatgtaccaacatctattcctgagcaaaagaagcttgaagaaaaccctgacacatcaaaccagcaattggctcttgttttgcctcatcaggtgaacctgccatcacttgcccctagagcttctgaatcagtccaacagtacaagaatcaacctgtgcaaccatcagacccaacccctcccgtgccacagcaggaccgctatgttcttagccaagccatcgtctactacccacagcgccaagctccaggtatccaggacacacaagggcaaaaattgcaaccagaagtgcaatacttaccagcaagatccccagcacaagatgttccggtccatgctccatcccaaccacctcaggctggaaaccaaacacagccacagccttaccctccttaccagcagcagtggcaccagcaatcctcccagccagctcctgcaccggtggcccagacacagcagactttctcacagccatttcctccacccgcacagcagccccagttatccaatgtgcagcagtttccaccgcaaccagtacagcagccccaatccaatgctcaacagtatcctccaccagtgcaaccacagcaatctagcccacagcttcctcaggcaatgcaaccacaacatcctcctatgcaaactcagatgagacctcaaaccccaccaaactacccgcattatccaccccaccagccattgaaccccacccctgaaactcttcctggcaatgtggctatgcaaggatcatacaacactgctgttccatcaggtgccaaccgtcctgaactgccatattcgtatggaggggctggcatcccactgtctcagtctcagccactgccacagcacaacatgcaaaggcaccagctaccaccttcaagtcagggctcctttgggccacctccaagcaaagggtcctatgctggctctccacagtatgcaccacagggcaatccgcaaggctacagcacaggttacgcttacccaccaaacggccctccagcagtccagccgcaacagatgccccctggcggagttggcatgagtcatccggcttcgcatatgatgcgtggccatccctacggagaaatgatggagaaggcgatcaccatgggataccctagggaccaagtgctgaacgtcacccaaaggatggccgagagtggccagtcaatggatttcaacaccttgctcgacaggctgaacgaagcagggtcgggagctccacccccacgcgcgtggtgattggatccagtttgggcgccgtgcttggtgtcggttatgtgacttacgactgttatcatgcagctaaataaataagatttgggttgatgccgtgtactgcttatctgtacaatgtgcatatgtgatttttttctccatgtaactgccactggtactacgaatgcatcgcaccaattggactgttcagatattatgtatatatattccgatattcggaagcaattactggcaggcatcctaccatttttgtagcgtgtcatgtgtccgttgcgttgatgatgtgaacaactgttgtccgtcgacttcagcttgacgctaaattttgtaaagactcttttggatccctagatctta

SEQ ID NO: 13381 - DNA, 80 bp, Zea Mays
tgtccggtgcgccaacggctccaaaacgtcaacggtcgactgcgccagaataggaaagaaatctgcaccggacagtgtcc

SEQ ID NO: 13382 - DNA, 619 bp, Zea Mays
gagaaaaccttcgacagtgacccggtccggtgggtgtggctcgcttcctctctgtccgactcctttccttcattttcctcttctgacctccggcagcaccatggagaacgtcgccgcgaatccttccgctgcggccgccgccgcagggaatggcgtccaagcatcgggggccggaggggagcgcccggaggacgcgtcgaagcagaacctggcgcaggtgacgagctcgatccagaagacgctgggcctgctccaccagctcaacctcaccgtctcctccttcaactctgcctcccagcttcccctcctccagcgcctgaacgcgctcgtggcggagctcgacacgatgcagaaactagccgagggttgtaacatccaggtgccaatggaggtcgtcaatttgatcgacgatgggaagaaccccgacgagtttactagggatgtgctcaacagctgcattgccaagaaccagatcaccaagggcaagactgacgctttcaagagcctacggaagcatctccttgaggagcttgaacaagctttccctgaggacgtagaagcatacagggagatccgtgctacttctgctgctgtaaaagcatgactttactcaactgac

SEQ ID NO: 13383 - DNA, 757 bp, Zea Mays
tttggaaggtgcctccatccagggactaattgctgctggtagaacatttgagaacagtcctgcaattagaaaggcatgcgactttctgttgtcaaaagaacttccttccggtggttggggagaaagctatttgtcatctcaagaccaggtttacaccaatctcaaaggcaaccggcctcatgcggtgaacactagttgggccatgctggcgctgattgatgcgggccaggccgagagagatccaacgcctctacaccgagcagcaaaggttttgatcaacttacaatcagaggacggagaatttcctcagcaagagatcataggagtgttcaacaagaactgcatgataagctactcccagtacaggaacatcttcccgatttgggctctgggtgagtaccggtgtcgagtcttgggggctggcaagccttggcggtgaacgggaggtgtgtgtgtgtgtgtgtcatggatcagcttttgtgagtagccatgtggaagttggaataatgtagctacgttacgttcagggggttgcgttactagtggtcctagtaataatagtgatggtgatagtaatgtactcctcattattacaatctcaaagcggttcatgccattgccatgcacatctcagatccgagtcacgcacttgagagagttcaaggattgcaagtatagttgggagaatcaaatccaatcggcttattgtctgctcatctcaggtgtcaggtcttttcagccacacacacatacacat

SEQ ID NO: 13384 - DNA, 1211 bp, Zea Mays
attatccacggaatggaatcgaatcgtccaggaaaggggaggaccggagcgagagcgagatggtagtggtggccgccgcggccgcacgcggccgcgctgtaaagcccctgttcctcgtcctcgtccaccacagccgccccgcgccccgcctcccccgccgaaccgcccgcgcccggccgctgcgcttcctctcctgctcgacctcagcgccgccgctgttcgcagccgtcgcatccatggactcgccgccccagggttaccgcaccaacgtcggcatctgcctcgccgacccatccctcaccaagattttctcggcttctaggatcgacattcctagcgcgtggcagatgcctcagggtggtatagatgcaggggaagaaccaagggcggctgccttcagggaattgagagaagagactggtgtcacatccgcagagatcgtggctgaggctcccgtctggttaacatatgatttcccgccagatgtcagaaccaaactgaatgccaggtggggaaccgattggaaaggccaagctcaaaaatggtttttatttaggcttactggaaatgacgatgagattaaccttaatggtgatggatctgagaagccagagtttggtgaatggacatggatgacacccaaggaagttatcgaaaaggcagttgatttcaagaaacctgtatatgaggaagcattgaaacactttgccccctacctgcagtcagatccagccgcttcatcatagaagatttggccaatttgcttgcatccctgctgtatctggacccccaataatttgacacgacgcaatgtagccatgaggtgtgctatacaatttgatagtgtgtggcctgtttgagtgaattatatatgccagcattggatcctcgccctctacttagtcacataagtatacaataagtggtggaaacagtttcagccaatctggaacatggtggccagtgtatcttgtctgccaatgactgaatgctttaggttgaagcaataccataattccagagagactgcggtacagcaacctcaggttatgtggggggtcgtcggcaaaacgacgctcgtttggcattggctacggcagaaactagtgtctggctgccattggttgtgggaggagcagaggaaaacaaattgttggttacactctgtactactgcgtcatgatattgtcggctttcgctttaaaaataaa

SEQ ID NO: 13385 - DNA, 567 bp, Zea Mays
aaaagcttttctcccttgttctcgagctctagtcccagtccactacaaaggtgctggagtcctggtattcttgctggtgtgcatcctctctttcagccaccaattttgctttactccagagctgaatgccaacctcttgtttgtggtgaccaaacccaaccgttcttcacctccccgtggacaaggcttcccacaagtattcttgaccgtgtactacttgttccatgctcgacaaaggtgatgaggagtactctaggtgttcctaaggctggagggtgtttccagttctggaggaagattagttaggcttatgtttaagctttggagggttcctaccttcctgatattgtaataagttatgcactttgagtatatcaggacttgtaataaatgtaactgttcctatgtaataaccttccgttttagaaataaaaagaatattttgtaaagtcttccgctattatctccgaagtgtgtgtatcgaatgtgattactgtaatatgcatgtatggtgggagatccttgggatgatgagttcaagttgttgaactcgtgatagccttgtta

SEQ ID NO: 13386 - DNA, 810 bp, Zea Mays
ccgcgcgctccctggagcttctctcccagccgccgccaccgcctctatctctcccttccctcttctctctcccctcacatctctcctctctgtcccgaccgagcaacagcggccaagcactcaagtgttccgcgctcggcactttggcttcgggattcctgacctagcgcagccgccaccacagcgctgcccctgtcgcgatagctctgcgtcgccgctcaacggaggccgacgaggtgacgagaagcggaggccgagcagtcgcacttgcaggtccagtcctgctggtccgcagtccacagttcgccctctaccctctgctctgggatctgcagtaccgtctgcttcggcctcagcactgccatccgcttcagcctctgcactaccgtccaagtcaagtcgctgtatcaccttagcccatggacgctccccatgccttgacggcttgacctccgatggagaggaagcaagttgtactgctgtaccagttcactgtatttgtagactacactacgccatgctttgccaatgaaccagccatcatgttctacaaaattggaggatgaactagccatgatactttgccaatgaaccagccgaagagatctcctctaccttggcagcacgatcaagaatgctgttgtcacggtccctgcctacttcaatgactcacagagacaggcaattaaaaaagagaattgatctttttatgggcgaagtgtcttgttagcatcaagtaagtggcgacatcacaacccctacaagcttgtgtcttaaaacaagaggatacaagaagttggagcgcttttc

SEQ ID NO: 13387 - DNA, 119 bp, Zea Mays
atttaaattaatcaaagatacatgtggccagaaaataacacgatacgattgtgcgtcggaagtcacaagtcacacggtattacacgcgaaaacgcgcatgcgtgcgtgtgagacaagcc

SEQ ID NO: 13388 - DNA, 157 bp, Zea Mays
tgccgtcaccgtcgccatcgccaccgtcgtcgtcgtcgccgtcgttgtcgtcgtcatcttcgtcctcgccgccgtccgagtcctcctcgtccgaggagaactcagactcatccgagccctcaagcccggagcgctcgacggcccggatgtacgtcca

SEQ ID NO: 13389 - DNA, 1189 bp, Zea Mays
agaaacaaactgtaggaggttgctgcggtggtccctgtggggttctactgctttaggattattttctgggatctgttttttttccagcccgagtatgcatgccgtcgagtagcaaccaccacccatggcggacgtgcacgaacctttggtgcgccgtaagaggaagaaggttttggtggactacttggtgaagttccgatggatcctcgtgatcttcgtggtccttcctatttcaactctgatctacttcaacatcttcctgggcgacatgtggtccgccatgaagtcggagaagaagcgccagaagcagcacgacgagaacgtgcagaaggtcgtgaagcggctcaagcagaggaacccgaagaaggacggtcttgtttgcacggccaggaagccctggatcgctgttggcatgcgcaacgtggactacaagcgtgcgaggcatttcgaggaaaggagatcaccacttcactcaagaaggcaccctcccttgccactccttttccttgagatgacgatgacgacgatgaagaagcagcagcagctcctcctcctcctttctctcatgtttctcgttgctgtgacagcagccgctgttgctgccgatccacatccacagcagcaggtgcaggtgcagcagcagcagcaagcacagatgaggattaacagggccaccagatcccttcttcctcagccgccgccgaaactagactgcccgtccacctgctccgtgcgctgcggcaacaactggaagaaccagatgtgcaacaagatgtgcaacgtctgctgcaacaagtgcagctgcgtgccgccggggaccggccaggacacccgccacctctgcccctgctacgacaccatgctcaatccacacaccggcaagcttaagtgcccctaggccttcgccactcatgttatgtacaatgtactatcatcacttcaataaataaataaaaaaacttctggttctggatgcctgtttctactcattctgcccattctccttcagaacgtgagatgctacactgcactgcggctctcctgaactcagaatcggatttgcacatctcaaaccaccactctgcctgcattacgagaggagagttaaggtacaagagtttccagaacgcgttgcattgattgatctagagaaccaactactacgtgtttaacaatgaacaataaaaca

SEQ ID NO: 13390 - DNA, 791 bp, Zea Mays
tgactattatgtatcctttgaaataagataggctctcgttcagtcatgcattgaaaatgttggagaattacttcgaacaaattttggcaaagaagtattgtatgagatggctgttggtggtaaagacaacgttctggatggcctcaccgataggatccacatgttgcacgatgcaatagcgtctgatgcggcccaaccgaagactgaagatacggaacatgcatttgaaaacttcttttccagccgtgtaatcagaagaatggtaatcgattgcccagcgtttgcagtcactctctggagaaaggctcttcaggggaagtgcaagatatgggctgaaggacacagttcgaaggtggttgcgagtttcctggagtcgccaagtacggaggtcaaggatcttgcaaaacctgagttgcagccgctggttgatgctggcatccttaaagtgccagaccctaaggttgttcaaaaatgactcgtgcgcgggggcctttttgcgccagtaaatgactcgaggaccatcccttgtttaagggatacggataggttttttgaagctcgttctgccgataaaaattgttaaatcactcgttcgtgtgtacgccagtccgttgtacacataccctggatatatggtgaatcggatacgttattttgttttaaactcggaatgctcctttttatctataaatttttttaggagatttgtgttcttgtcctgctttggaaggccaaaaattattttactcttgtttttttttaaaaaaatccgaggttcttgtaagctcact

SEQ ID NO: 13391 - DNA, 474 bp, Zea Mays
atgaaggcgaacaagttgcccaaaaccactcgttgctcatgtaccatactgtgaactatatgaaggtcaagtccctacgagaccaacaataatttgtacgtccacaaaaatattctgcagagaatttgagaacaaagattcaagatgtccatgccattctctgccaacgggtggcaatggcgaaagacaacgtccacatgttgtaagctatatgtaattgtaacttaggtacaaagagtcgtccctgtgctgtgcggtcagggaaaatagtctggtggttgcgctgttttactctacaagatgtcttatatgatgtacaagatacagacacttctgggtgtagtgaccttgttcccacctcaccttttaaagtttgtggcgctgagtcaatatggatctaagtcaattgattgaagaaacattttcgactatgcagtattttctcatttatttatggcctgtttgaggcaagag

SEQ ID NO: 13392 - DNA, 199 bp, Zea Mays
gattaattccctggtttacccaagtgatttcaattcggtcactttaatcgagcaataagaaatagaacgcgaagaagaagtggaagtgactgaagaaaagacatcaccacctttggaatctcaggcagagacttggctctacttcgacatctgcgagtccgagcctgactcacctactaacaaaggcaagccccggtgc

SEQ ID NO: 13393 - DNA, 246 bp, Zea Mays
ctggcatcgttccattctcctctaaaccctagccgcctagcgcctcgatctgagcagcctgtctcgcggaggtagttctggttgatttggtcctagatggcggaggaaaaagtggggcggatcttcgtcggcgggctgtcgtggaacaccacggagcgcacgctcgagcgcaccttcggtcagtacggcaaggtcatcgaggctcagaaagactgcacttgaaaaacattttctgctcgatctggg

SEQ ID NO: 13394 - DNA, 554 bp, Zea Mays
ctgaaagcatacaagaaacagaacatagctaatctgcaggaactacactgtggcggctatggtcctgttgctgaaggaagacctgtgagaatgaggcgtctcccatgttgtggcctcggcttaggctggtgtctgttcataactgggtttttcttggctgccattccatggttcattggagctttcgttcttatatgtgtgcgggtacatgaccaacgagagaaaccaggatacgttgcttgcacaattgctgccgttgttgctgccgttgccatcctcttgggggtaactaaaggaacgcacgtgtggtgaattgcctccagagaaggcaatcaatgtgtatttgcgttgtatatctgtgtgtgctaaaaagtgtggagcaacatccatgtgatcttatgtccatatatattctactttgcaatgaagtttgaaatgtagtaatgtaccatctgcttcttgtaagcagcactgcatcatatataataagataccttttatttaaattgcggaatttctgttttcgaatgaagatgcagcactggacgtctcag

SEQ ID NO: 13395 - DNA, 502 bp, Zea Mays
gcgcagtcgcgtggaagaagacaggtgcaaaactcagaaagaatctgcagttcaccctggtgtgttatagcttgctgttggattattttgttccaggatatgttgctgcctgttctagctccttcctcaagactgcggtttgagttttttcgattctgcagtgtttttgctgctctcaaatgtttgtctcgatatttcattagtgcttgttgaagttcccccatttgtttatggtataagcgcttgaataaaatgtttctggaaagtaccggcctacaatctggattttggcaaaataattgaattagttgttgtacaatgaagcaaattgtcttacgttgtactttatgaactctggagtattatcactcgtcgggttgaaaaggggaactatacaatgtaatttcagtacagattattattttttcctgagactccagttgtgctgttatgcgagttttgcccattcagaatacttttgatgcattcatcagaattcggc

SEQ ID NO: 13396 - DNA, 540 bp, Zea Mays
tcgaccgccatgcgcgctcgtgttgggaccttggtgtcccggccctctacctccactcccctatataccgctcgcggctcgcccgaccaccggtcgcacccatgccaccaccacgaaatccgaagttgagtgccggaccgctattacagaggaaaaggtgtgccgccatggttcctcgctccactggcgttcggtgtgcacggcccagttgctgacaatcgcatgccgtgggaagtaagggcggagccgcgactggctaatctgggcatcggctcgttgattctcctgggcatgcagtgttctcggcgcgggtggccggatcttggccggaaatgggaatcccgccagacccacgctccgcctcgtccagcttcgattacgctgcgattcatggtgagttttacctcttggcgttcccggtaattagcgcattacaaagtacttagcggctcgatgtttgggtgctgggggaatctggcgtagttcgccggagctagcgtcgtcgggtgtgtctctcggctggggaaggagaaccttgtg

SEQ ID NO: 13397 - DNA, 1823 bp, Zea Mays
tttttttggttttttgtgtctaaactctaaacccgttaagtttgtaaccgcctccctccttcaactgtctcagcagattgtgcagcaccgtgttctccctcccttcccaatcccctatcccgttactttccccggctccaccccaaaccctaatacgtcatggcgctcactacacggggcggcgccggcggcggggatcccgcgaaggcgccgtccgcctccgaccccagcctcggcttcctcaccaagcgcgataccgaggtcaagctaccccgcgcaacgcgggtcaagaacaagacccccgcgccgatccagattacggccgagcagatcctccgggaggccagggagaggcaggagcctgagatccgcccgcccaaacagaagatcacagacccccacgagctctccgattaccgcctccgtaagcggaaggagttcgaggacgtcatccgccgcgtgcgctggagcgtctcggcatgggtcaagtacgcgcggtgggaggagcagcagcgagacttcgcgcgcgcgcgctccgtctacgagcgcgcgctcgacgtcgcccaccgcgaccacacgctctggctcaaatatgctgaattcgagatgcggaaccggtttgtcaaccatgcccggaatgtctgggaccgcgcggtgtcgctcctcccccgggtggatcagctctggtacaagtacatccacatggaggagctgcttggtgcagttgccaatgcgcgccaggtgttcgagcgctggatgtcttggcgacccgacacagccggctggaattcttacatcaagtttgagctgcggtacggggaggtcgagcgtgccagggctatctatgagcggtttgtagctgagcacccaaggccagataccttcatccgctatgctaagtttgagatgaagctcggcgaggtcgagcgggcacggcgggtgtatgagcgtgcagcagacctgcttgctgatgatgaggatgctgaagtgttatttgtggcatttgcagagtttgaggagaggtgccgcgaggtcgagcgagcacgtgcaatatacaagtatgctctagacagggtgcccaagggtcgtgctgaggaactgtataggaagtttcttgcatttgagaaacagtttggtgaccgtgagggaatagaagatgccattgtgggcaagaggagatttcagtacgaggatgaggttaggaagaatccactaaactacgactcatggtttgattatatcaggctggaggagagtgttgggaataaggacaggatcagggaggtgtacgagagggccattgccaacgtgccccctgcagaggagaagcgatactggcagaggtacatatacctctggattaactatgcactctatgaggagctagacgcacaagacagagaacggacaagagaggtttacaaggaatgcctgaggttgattcctcacaagaaattcacgtttgcaaagatgtggctcatggcggcccagtttgagatacggcagagaaatctaaaggctgcaagacaaattcttggaaatgcaattggaatggccccaaagggcaagatattcaagaaatatattgaaattgagctttatctgggcaactttgaccgttgtaggactctttatgagaaatatattgaatggtccccagcaaactgttatgcctggaggaagtatgccgaattggagaagaaccttagtgagactgatcgtgctcgatcaatatatgaacttgctattgcacaaccagcccttgatacaccagaggttctgtggaagctaaggcggacaccctccgcgcatggacctgcatg

SEQ ID NO: 13398 - DNA, 1279 bp, Zea Mays
gaggattttcttgacctgcatgagaaccgtcctgcggaattgattgcaaagtttcttgatgagaaacttcgagctggcaataaagggacatcagaagaagagctggagggcatacttgataaagttttggtcatgtttcggtttatacaaggtaaagatgtatttgaggcattctacaagaaagatctagctaagaggttgctgcttgggaagagcgcatcaatagatgctgaaaaatcgatgatcacaaaactcaaaactgagtgtggaagtcagtttaccaataagctggagggaatgttcaaggacattgaattatccaaagaaataaacgattcattcaggcaatcatctcaagctaggacaaagcttccctcaggcattgaaatgagtgttcatgtgcttacaacaggctattggcctacatatccaccaatggacgtgaaactcccacacgaactgaatgtgtatcaggatatatttaaagagttctatttgagcaagtacagtggaaggcgtttaatgtggcatgcctatcagttgaaactatctgagatcaataattatgttttcccgtaacttattgctgccatcagagtgtggttttgatgttgttcaatgacgcacaaaaattaagcttccttgacatcaaagattccactggtatcgaggataaagaattgagacggacactgcaatcgcttgcatgtggtaaagttcgggttctccaaaagataccaaaagggagagatgtagaagataaggatgactttgtattcaatgaagattttagtgctcccctctatcgcataaaggtaaatgcaattcaaatgaaggagacggtagaagaaaacacgagcaccactgagagagtgttccaggatcggcagtatcaggttgatgcggccatagttcgaataatgaagacgcggaaggtcctgagccacacccttctaataaccgagctttaccagcagcttaagttccctgttaagccagctgatatcaagaaaagaatagagagcttaatagaccgggagtacctggagcgggacaggagtaacccccagatctacaactatctggcttgacagagctttggaggatcattaaagagaccgctcactttattatcagaaaagacactgtaaattggtttgttttccagttccttgttctttcctgtttttcttctctgggagggagttgtaactgttgcaacgtgtctgtatacgagaacgtctttttttcagtattagtataaaatgtataagcataa

SEQ ID NO: 13399 - DNA, 749 bp, Zea Mays
tcactctgccagagaagtgtgcctttcgtgctctgctggtgcaaaggcacagagaatataggcagaggatactccacctttacaagcctcttcatgaagaattatacaatatgcatccttcagtgttcttcttaccaacattccttgaagcagttaggagcaatacagaagaatgctttagaagtattatgactgagccaattcctggtgtttattcgtttgctatgttgcagcctactttctgtgagatgttattggaggaggtagagaactttgaaaaatgggtccatgctatgaaatttaagataatgaggcctaatacaatgaacaagtatggtgctgtccttgatgattttggcctggaagctatgctgaaccagttcatggaacagttcatagctccaatttctaaagttctttatcctgaggttggtggaggaacattggactcccatcacgcttttattgttgaatatgggaaagacagggatgttgaactaggttttcatgttgatgattcagaagttacattaaatgtttgccttggaaaacaattctttggtggtgaattatactttcgaggtattcggtgtgagaatcatgtgaattcagagacacaacatgaggaaatgtatgactacacacatattcctggttgggctgtactccaccatggtcgacacaggcatggtgctcgagctacttcatctggtctcagaataaatctgcttttgtggtgccggaggtat

SEQ ID NO: 13400 - DNA, 700 bp, Zea Mays
cagccgactgctgtcccgctcccgcccggcacttccctccggcgctgcctggtacacctgctatgacctcaaggggtttggttgagaaggacttcgtgcagattgccgagtaccttcaccgagctgtgaccatctgcttgagcatccaggcggagcatggcaagattctcaaggacttcaagaagggcttggtgcaaaacaaggacatagagaacctgagggcggaggtcgagaagttcgccacttcatttgacatgcctggcttcagggtgtctgacatgaagtacacagactagactgctgctgacttgggtgcaaaccgttgctcctgttacagtaacactggcaggctggtgcaatgcaaaccgttcttctgttacggtaatattaacgcctctgaaatgtcacgtgaatggtggtaaacctgaatttcacacgactagagggatggtttactttctattcagtgctctgccattctgttggcctgctattccgtcggtctattttgttggaactgataataatatgtttagagaataatgattgagaaagaaaatggcattgcactggagataattctgcttagctcggccttccagaagctctatgataaaccccccttgatttgttagttggcttgatatgacacgctggttgttaaagaactgtggctaggtcccgtatggtttgatggact

SEQ ID NO: 13401 - DNA, 1992 bp, Zea Mays
gtaccagccatgagcagatagtcggatgatgcttgcagcatgaaggccagaacagggctcaaggagcttaggatcctaaaaaatgaggataccaaggcaaaaattatcagtgggaactctgtgcacacgaccactaccactacgacaattaccaccaccgcattagtaccattggcccctaaatgcagaagccttgctgatgatgaaggctatctccttccggagttcaatgacatggttctcagagaatttggccaagatatagatagcattccatccacacctgcagcgagagtaagggaagatgtatcgaatgaccatgaagtccacaaacttagagatttggtgagatcactgcaagaaagggagaagactctggagctacagcttctggagtgttacggtttgcaggagcaagatgctgcggtgagggagcttgagaatcagctgaagattaacaacgttgaatcaaagttgtacttgctgaagattgaatctttacagactgaaaaccagaggctgcaaacacagctctcagagaactcaaaaatattctctgagcttgaggcgacaagaacaaaatgcaagtttctgaagaagaagtttatatcggatgcagaacaggcaaaggagcaaatcatttctcttcagaaaatggtcgactcattgcagaacaaacagactgatgaggagaaaaaatttattgagtttgaaaataaactgaagagactagaggagctggaaaaagaggcaacagagctaagagcggcaaattcaaggctgcagcaggagaatgcacatcttattaggcgactggaggttacacgcctaccccctgtacccaagcccaaaactagtatggaggtaaaagcattggaggaggctgatcggttgaagcaagaaactgataggttggctaaagaggttgaacaacttcagagtggcaggtttgcagatgtcgaagaattggtatatctgaaatggataaatgcctgcctacggtatgagctgagaaacaaggatgccccatcagggaagactgttgcacgagatcttagcaagaccctgagccccaagtctgaattgaaggccaaacagctgataatggaatatgccaatgtgggtgcggaggacagtcacttggggcatgtcgaattcggttcagagtgctcttcctcacgggcttcgtcaggtgaaccggatgatgtgtcaattgatattgcttccatgacaaagcatactaataaaaaccccaaaaagaagaagttcttctctaagcttcggaaactggtgctgggaaaagggaaagagaaccgtgaaatttctactctggagaggagagtgtctatttcaagttgttccttcgatgacttcactggaagggattcacatgatagctattcttcgttcatggcagaaccaaacatgcctgatagtcgacggcatggtgatcatggctttggtacacattcttctttggacagcgcaaaatctagtcctcttggcacagaaattgtaggtgaaagaagtgaccattctgtggtgaagagtgtatcttctagagaggaaaaggtaaatgcattcggtcccagcattggccttgatagtagcaaggccatacctgaggatgttgagatccataaatttgctgatgcgctgatcacatcaaggtcaggttccatgtcatcaagaagatcggcatccttccgacactgatataggagtcatctgctactgacccctctgcctggatgtatatttctgccagttcttgatggggggagttataggagatgttactggaatataagttgtcaatactttatttttttgtaccattgcgtatagggtgtagtttacttacctttaataccaactcctactacctgggctcgtcatgtgtaccataaaatggcacatttcaatggcaaacacaagacaattgtaacaccctaaatccatcaattaaggtaacctagattatattattaa

SEQ ID NO: 13402 - DNA, 2386 bp, Zea Mays
gaaacaacggagatgtgctttcaccgggaaatgcccagaggccagagtgtgcacctaggagaatgtggagctgcaaaactttacatttacgagtgtctgagtcctccggcgataaaattcagagaaggatcatattagaaagatccacttcctgtgaaagtcaacaagctgacctcaatcaagacacaacttccctactcctactattctctcccattctgcaagccggataccatagttgacagtgcagaaaatctcggtgaagttcttcgtggagatcgcattgaaaactctccctatacgtttgaaatgagggagcctcagatgtgtcaagtagtctgcaagatatctgttggggagaaagaagcaaagcttctcaaggagaagattgaagatgaataccgtgttaacatgattcttgacaacctacctttagtcgttcctattcaaagagtggatcaagaaggtgcatatttctatcaacatggattccatgttggggccaaaggaaaatattcagggagcaaagatgaaaaatacttcatccacaaccatctatcttttacggtgaaatatcacagggatgagcaaagggatgtttccaggattgtggcctttgaagtgaaaccatacagcgttaagcatgaatatgaagggcaatggaatgataagaagacccgcctgacaacgtgtgaccctcatgctcaacgtatcattacttcgtccgagtctcctcaggaggtcgaagttggcaaggatatcatatttacttacgatgtggatttcaaggagagcgacatcaagtgggcatctcggtgggacagctatctattgatgacagatgatcagatccactggttctctattgtgaattctctcatgattgttctcttcctttctggaatggttgcaatgatcatgcttcgtaccctttaccgggatatctctaagtataaccaacttgagactcaggaagaggcccaggaggagactggatggaagcttgttcacggcgatgttttcaggcctccgtcaaactcagactggctctgtgtttatgttggcaccggtgtgcaattctttggcatgctgcttgtcactatggtatttgcggttcttggcttcctttctccatcgaacaggggtggactgatgacagccatgctcctgctctgggtgttcatggggttgcttgctggctactcttcttcacgtctttacaaactgttcaagggctcagaatggaagaacatcgccttgaggacagccttcactttccctggcagtgtgtttgctatttttttcttcttgaatgctcttatctgggggcaaaagtcctcaggtgctgttccattcaccaccatgtttgctcttgtcctcctttggttcggtatttcagtacctttggtttttgttggaagcttccttggcttcaagaaacctaccattgaagatccagtgaagacaaacaagataccaaggcagatccctgagcaggcctggtacatgaacccaatcttctcgattctaatcggagggatccttccatttggtgctgtcttcatcgaactcttctttatccttacttccatctggctgcaccagttctactacatctttgggttcctcttccttgtgttcctgattctcatcgtgacatgtgctgagatctcgattgtcctatgttacttccagctctgcagcgaagattacctgtggtggtggaggtcgtacttgacttctggttcctctgcactctacctcttcttgtatgcaaccttctacttcttcacaaagcttgagatcaccaagtttgtctcagctgttatgtacttcggttacatgctcattgcctcgtacgccttcttcgccttgaccggcacaatcggattctatgcttgcttcctgttcacaaggctgatttactcatcggtcaagatcgagtaaggtgaagtgcactcttgcctatttctttgttgccacgaagaaagaagtattctatggatagtgaattctacaggactgctgagtttagctgcaagtgggctcgttttgagttttcaaagctggtagttatgatgaagatgcgattcattaccgtatgattccggtattatagctagctcagtatgtttctgtttttcttttgtttttttttgttttcgggctgtgcccgaccgtgaggatatatgcttatcaagagcttgacgctgaaagaattgtatacgggtgctgagtaatctatctcttgttcctctcagaatttatgtacttgttgatgtgcactgtgacgtacatgatatacatttatagctaccggctcggcggctcctgtttcttttgtacctgagtccagataaatggattcttatacatgtttttctaa

SEQ ID NO: 13403 - DNA, 574 bp, Zea Mays
ccgaagcccaaacccttcgaaaacccttctcccgtcctgctcactcccgtctccgagcgccgccgccgccagcgccgacacgcgataaacaagaggaagaagaggccaaccgatccagcagcgatggcaggcgggggcatggtggggggcgctttctgggcgacgcgggcgctggaggtggtcaagcggaacgattccccgggcctattgtggaagcgcatcaagctcaccaccacccgcaagaacaacgccaagaagcgcctcaagcggctctggcagaatgaggcggttataagagcttgtggtgcatcagcgtctgacgcggcttccacagctgacaaacaacagtagcttggagcacaactggagcaggtcctgtgacctacctatgcttgataagctgaagccttgactttgctgtccacccccagtgttttgattttgctgtcctcggattgaatactttctccatccagaggacaacatcattgcttgttaccagacaatgtttggaccatttttattgtaacatctaaatagacggtggactgatccggcaacttgataaagtgcg

SEQ ID NO: 13404 - DNA, 1243 bp, Zea Mays
cgtcggacatccagtagcccgctgcagcacattctatcatcgagtaaactctacgtcgagtaaacgcaacaacgcgcactcgcgcagagacactgcccatcaggatttcgcaaaagcaacaaaacccactcgacgtcgagggtagaagaggcctgcaaatttccgaagagctcgcggaaatggcgacggtgctgccgcttgccgccgcctcggcctcggccacgccgaggacttgcatctccggcggcccagttcccgcgcgattcctcgggacttgcatgcgtctccgcatccacatcccaccgcggggcgttgcctgcgccctcagaaggagacccaccaagtacaagactaaaatccagagtgaggaggatgtggtggctgcagaagatgtcatggatgatgatgacgacgaggatggtgcactggaagcacttttcaagcagctggaagaagatcttgacaatgatgatttatctgtcgatgataatgatatatcagaagaagatatggcaaggtttgaaaaggagttggcagaagcaattgaagatgtcagtggtgttgatgactcagcgggggattcgttgctgagctctggcgactatggtattgatgagcaactagatggaagcgaacgggcagagctgaaaacctggcaactccggagattggctcgtgcactgaaaataggccggcgtaaaactagtattaagaatcttgcaggggagctaggcctagataggggtttggttattgaaatgctccgcaatccaccaccgaagcttctactcatgtctgattctttgcctgatgaagtcccttctaaatctgaagtgaaggaaatagaaacccctagtacgaccactgttgacgaggttgataccagtgaaatcaaaccacagttggagcttccagtgcacgtcatgagtgcagaatggtctgcaagaaaaagactgaaaaaggtgcaacttgagaccttagaaagagtctacctgcgaagcaaacggcccacgaatacaatggtcagcagcatagttcaagtgacaaaccttccgcgaaagaccattgttaagtggtttgaggatagaagggagcaagatggagtccctgaccatcgtgctgcattcaagagatccctatctgagattggtgctagttcataacttcttcagataagcctttgttacgatgccggggtgcgttcatgtccaccaagctcaacacgggtactcgaagcttccaa

SEQ ID NO: 13405 - DNA, 821 bp, Zea Mays
gcatgtcgttgccaagcaagagaacttccaggaacaaaattgattagcatctaccttcaaatcattctcttggtatttattgagcactgcaagtggttgaggacttgaggtaaacatgctgaagtgcatcttgagccagtcatggaagagaggagcacatatgctacatgcaggaaattcagcaccagctgtactaacttgctggagtcaatttcacagtgggcaggtctggagttcttccaggagcttcttcggcgtggaggacttcgtggacgaggacaacagtaggccatacacgtacaagaaggagaagaggtccaagaacccccacaagcacatctcgttcaagcagcgcaccatcgcccacatggagccgttcacgctggacgtgttcatctccaagcgcttcgtctcggcgtccctcacgcaccggtcgacctgcaggcaggtcgcggtcgccgggaccaactccaaggacatcaaggcggcgctcaggtcgaggtccgacgtgccggcctgcctggccgtcgggcggttcctggccgagagggcgaaggaggccgacgtgtacacctgcacgtacacgccgagggaacgggacaagttcgaggggaagatcagggcggttgttcagtcgctgatcgataacgggatcaatgtgaaactttaccttgactgagttcggtgctgtatgagtatgagtagtagttctgttggaacttgcgcgtgggtttatctgttgccagggttgcaggtcgaattattttgtgtccttatgttgatattttttttgctcaaatgaacatcattggatacccagt

SEQ ID NO: 13406 - DNA, 634 bp, Zea Mays
ctttcttccagctatttgtgtctctggtctccttcctatatctcaagaattatataggtggccctaaagctacatgctttggatgtgtggggtttgctgcgttctcagtggcaattgaaaagttctttgatcggcatacttgaaatgggtgttgtgaatttgaacgctttttggccatgttcgtttgatcccaaaaccatagggattgaggtggactggaagagattgaagaggattttgacttgtaggggatttgatcccctcaatccctatggatcagcacaaaacgaacagagccttagctgagcatgagcagcgttggcaggagaacctgattgtttgcaacatccagtcatctacaactcattaaggactgtaacctaatttttttttacttattcccagtttcttgcctggattcgtaattactgaactaccggaacgcctaagagatctaccctgatcaatatcgatgcacgatgacattgaccagagttgttgttctcgaatgtgttttgtgttattctcgacatctgcaggcaacgggtgtctatttattattgcaatctgactgaggtcctgtttggaagtgtagcgtttttggagttttcaaacaatactatgatatttgatg

SEQ ID NO: 13407 - DNA, 174 bp, Zea Mays
cttgctatctcacaccccccaggtcaaggacaggtaccgcaggatgagacggatggaggatgttgtgatgagtttgtgagaggtctaggctgtcgtctcctagtcaacttgggttgctggatcgttgtctccttatgatgtaattatttattgggaaatttggatccataccat

SEQ ID NO: 13408 - DNA, 1785 bp, Zea Mays
tgctgtatataatgactttgtaaataaaatgaaatgtctgcgaaatctcgtgaaggagctttacttgggtttgagtgcctgtgtgagaagctcggcaaactatttgagccgtatgtcattcaaatgcttccattcctacttgtgtctttctctgatcaagtcctagcagtgcgtgaagctgccgagtgtgctgctcgggcaatgatgtctcagctcactggtcctggtgtgaagcttgtccttccttcacttcttaagggtctagaagataaagcatggcgtactaagcaaagcagcgttcaacttcttggtgccatggcatattgcgctcctcaacagctatctcagtgtcttccaaagattgttccaaagttaacagaggtactaacagacacacatcctaaagtccaagcgtctggacagacagctctccaggaggttggaagtgtcataaagaatcctgaaatttctgcactagtccctattcttctgtcagctctgatggatccaaatgcccacactaaacactctcttgacatccttcttcagactacttttattaactccatagacgcaccatcgcttgcactgcttgtgcctattgtgcatagaggactgagggagagaggtgttgagactaaaaagaaagctgctcaaatagttggaaacatgtcttctttagttacagaaccaaaggatatgatcccatacattagtttgctcctaccagaagttaagaaggttctagtggatcctatacctgaagtgagggcagtggctgctcgagctctggggtctcttataagtggaatgggtgaagaaatcttcccagatcttgtgccatggttattagatactctgaaatcagataatagtaatgttgaacgatctggtgcggcccagggattgagtgaggttttagctgctcttggccaagattattttgaccatattcttcctgacatcatccggaactgttcccaccaaaaggcttccgttcgtgatggacatcttacacttttccggtatttgccaaggtccttgggtggtgttttccagaattatctgcaggctgttcttcctgctatattagatgggcttgctgatgagaacgaatctgttcgtgatgctgcactttctgctggtcatgtctttgtggagcattatgcaactacgtcattacctctgttgcttcctgctattgaggatgggatcttcagtgataattggcgtatccgacaaagttccgttgaacttcttggggatctcttatttaaggtcgctggaacttctgggaaggcaatccttgaaggtggaagtgatgatgaaggtgctagtacagaggctcaggggcgtgctattattgaagtacttggaagggagaaacgcaatgaagttcttgccgccatttatatggttcgttctgatgtcagcttgactgtccggcaggctgcgttacatgtctggaagacgattgtagcaaatactccaagaactctgaaagagataatgccagtacttatggacacacttatttcgtctcttgcatcatcttcctccgaaagacgtcaggttgctggaagatcacttggtgagcttgtaaggaagcttggtgaaagagttttgccctcaattattccaatcctgtcacagggactcaaagacccaagtgctagcagaagacaaggagtttgcattggtttgagtgaggttatgggcagtgctggaaaacaccagctattaagttttatggatgaacttattcctaccattcgtactgctcta

SEQ ID NO: 13409 - DNA, 1344 bp, Zea Mays
cagcttctaccggtggactcccttttttccccaacacaaatcaggccttgacgggacagcccaatgcctcagatgtccatcgggaatggtggatcttcaccttcagttcaatatggaatatcaagtttgccggttgcggagaagcctcttccaagtagatcattgtccatggcggttcctaggcatttgtcacagagaaggataaaactgctgccaagaaaatataatccaatatctgatggcaaggttccattctttgctgatgatgaagaatctccagcaacaccaaaggcagatgcttttttcatccctagagagaacccaaggaacctggtaattcgtccaattgagcagtggtcttcacggagagaaactggccggcaatatactgcaaagaatgttactgattcgaacaaatatgaagatgcttccattgaaagtgagcgtggtaagtctgccatgtcaccaagcagcaggccacctgcagtggaaaatgacaaacagcatgaggccagggccatggctcaacatgcgaatggaaatggtacttcagttgagaggctgttgcctaagcttccacgtgcagattacttcacagagcctagtatagaggagcttgcggccaaagaacgtgcggagccaggctactgcggtcgagtgagggacttcgttgtgggtcgacatgactacggcagcatcaaatttttcggggagacggacgtgaggtgcctcgatctggagtcaattgtggagtttaacgaccgggaggttattgtgtacaaggacgatagcaagaagccccctgtgggcgaggggctgaacaaggctgcagaggtgactctactgaacatcaagtgcgtaaacaagaagaccggggagccgtgccagggggcaagagtggagaggtacagggagatgctggtgaagaaggcggaggagcagggcgcagagtttgtgtccttcgacgctgtcaagggagagtggaagttcagggtgaagcacttcagcgcctacgggctttggtgaaatcctggggagttaagtagtttgtttgttctgatggaacaacgctttacgctcttgtcaattaccatgcttggatctgttgtgctgcttctgtacaatgttgctgctgttaaaatgcttgcaaattgcactgctctgctgctgaaaacaggagcagcagtagaaactaccgcaacaggagggcgtgctacctgctactgttatgtattattattattatactatattctaagtataataagacttagttttttaaatacatgaatattactttatgcacttagatatatgctatgtatggagagaaaataattatat

SEQ ID NO: 13410 - DNA, 84 bp, Zea Mays
ccaaataggaagcagtgctcgtcgactttctccgcacgaatgccgaggtttttgcgtggagtccctcggacatgcctggcatac

SEQ ID NO: 13411 - DNA, 4362 bp, Zea Mays
atgcctggccggagcagtggccaccactgtcgtcggatgaggagaagagggttccagttgcggtgtgggtcacttggccgaggagaagagggtcctcgggcggttctggctcccacctgtccccgtcaatccgcagtcaagtcggcaatcccagtccatgcaaacaccgcttctttctcctgcatgcgcggtctgcggtgtggctggctagtggctgcggcttccatccgtcgtctccgtccatccgtccctggccgactgcctgcctgctggctagggccaatgccacagggagcaggatcaccagcggcagccgacagcgagacgaggcgagtgctatgcgcccactcccaatcgcgcggggccgtttcctcccagaccgctgcggcgtcgaagccgcagcagcagcctcctcctcctcggcctccgcggcagccaccgtcgcctccatctcggtcgcgtgctcgaccgccttcacctggagaaacacaagttacacatatcagcagcacaaatacaggaagacgatggaacaacgactccatgggggaccgcaatcagcggcgagacgcgagcgtggcggcgaggtctttgcgtacgggcctgaaaccagagcatacctagaaacagcccaacatttgcgcgaggacgaaaccctcgcaccgtttcagttttccctcccaaacttgccccaaatatctaaatccatcctccttcgcaggcgctccaactttccccttcccggcaaccaccctgtgccttcctcgctgcctcgattccgcttctgtgctcggctagggagagcggcagagtatcaggcgggtgacctctatctcgccggggcggggcggggcggtgacgctcgcaatccctcgcttgctgctgcattttcgaatactgagatggccatggagatgtccccgcggcagtcgcctccgcggacgccgcgtagggcggcgaagccgcgactgttcatcaaggagatggtcctccgcaacttcaagtcctacgcaggggagcagcgcatcggtcctttccacaagagcttctcggctgttgttggtccaaatggcagtggaaagagtaatgtcattgacgcaatgctttttgtgtttgggaagcgtgcaaagcagatgcgcctaaacaaggtctccgagctcatacacaattcttccaatcatcagaacctagacagtgctggtgtttctgttcattttcaagaaattattgacatggatgatgggaactacagtgctgttgagggtagtgactttgtcatctcaagggttgctttccgtgacaacacttctaaatactacataaatgagcgtggaagcaattttactgaagtaactaaactgctgaagggcaaaggagttgaccttgataataaccgttttctcatcctccagggtgaggttgagcaaatctccctaatgaaaccaaaggctcaaggtccacatgatgaaggttttctagagtatcttgaagacataatagggacaaaccagtatgttgaaaaaattgaagaagcgtacaagcaactcgaattgctcaatgaaaagagaacagcatcagtgcagatgctaaaattagctgagaaagaaagagacagtttagagagtgcaaaaaatgaggctgaaacatacatgctgaaggaacttttgcttctgaaatggcaagaaaaggcaacgaagctggcttctgatgatgctatctcacgtgttaatcagtgtcaggagaatgtggcagacctggaaaagaatcttgccgctgaaagggagaagatacaccagaattcacaaactctgaaggaaatggaggctatttacagtaaacatgtcaaaaggcaagaggaccttgaaaataacatgaagagctgcaaagaccagtttaaagagtttgagaggaaagacgtaaaatacagggaagatctaaagcatcttaagcagaacatcaagaagctggatgacaaagctgaaaaggatacatcaaaacgtgatgaaaaaacaaaagagatggaggagtcatccaatctcattccacagctggaggcagaaatacccaaattgcaaaagcgacttaatgaagaagagaaagtcttagagcagatcaaagcatcctctcgagaagaaactgagaggtttcgtgctgaacttactcaagtaagaactgagcttgaaccatgggaaaatcaaattattgaacataaaggaaggttggatgttgcatctgcggagaaaaagttaatgaaacaaaagcatgatggagcacaagcagagttaactgatgcacaaaatcagatggaaagtataaaggagaaagttaaaacaaaggattcatacattgtggggcttcaagaaaaaatagagaagcatttgaatgaagcatctgaagctcgcaaaatcgaacaggaatgccaaaagcaggaggattcactgatccctctggaacaagcagcaaggcagaaagttgcagagatgaaaaccactagggattctgagaagaaccaaagtactgctctgaaggcaattttgcaagccaaggaatcaaatgaaatacaagggatttatggcaggcttggtgatcttggtgcaattgatgcaaaatatgacgtggccatatcaacatcagcttcatctgggcttaattatattgtggttgaaacaataaattcggcgcaagcttgtattgagttgttacgtagaaggaaccgtgaggaaactgtaacttgtttaatcctggaaaaacaaacacacctccttcacaaaattaaggagaaagtaaaaacacctgaaggagttccacgcctttttgatctagtaaaggttaaagatgagaagctgaagttagccttcttccatgtcttggggaatactgttgttgcaaatgatcttgatcaggcttcacgaattgcatacactgcagcaaaggagttccgtcgggtagttaccctcggcggtgaattatttgagaagtctggtaccatgagtggtggcggtaaaagggtacaacgaggcatgatgggaacagccatccgagaaagcttttcagaagaggctattaaaaatgctgaaaatgaactaaccaagcttgttgatgaactcaacaagttgcgtgaaaaaatgaataatgctaaaaaacaatatcgatccatggaagatgctaaatcccgtcttgaaatggaattggcaaaagctaaaaaggaggttgagagtatgaatgcacaatatatttacaatgaaaagcgactagattctctgaaaaccgcttcacaacctaaagctgacgagcttcgcagaatgcaagagctggatggcatcatatctagtgagcaagctgaactagagaggctcacaaagtgttccagcaaacttaaagatcaggcttcggaacttcaacaaaaagttgaaaatgctggagggaagaagctgaaggaccagaagacaaaagttggcaacatccaatctgaacttgacaaaacaagttcagaaatcaacagacacaaagtcaacgtaacttcaggtgagaagttggtgaaaaggttaaccaagggcattgaggagtccaagaaagatagagaaaaactttctgctgaaacagagaagatgatgtctatgttcaaagagattgagaagaaagcgtttgttgttcaggaagagtataagaaaaccccggagatgatagacaaccataaagttgagcttgacaaaactaaggaagaatacaccaaactaaaaaaagcaatggatgaactgagagccacagaggttgacgctgagtacaaattgcaagatacaaaaaaacttgccaaggagtgggaaatgaaggtgaaaacattcaagaaaaggcttgatgaaattcagataaatgttgttaaacacatggatcaaatccaaaaggatgctgttgatcctgataaactcaaagcgactctaggtgatgagcaactaaatgatacatatgacatgaaaagggcaatggagatggtagcattgttagaggcccagattaaagatttgaacccaaatctggattccatagcagagtaccgcacaaaggcttgcttgtacggtgagcgtgttgatgagttaaatgctaccactcaagaacgtgatgatcttaaaaagttgtacgatgggttaaggaagagaaggctagatgaattcatggctggattcaacataatatctttgaaactgaaggagatgtaccagatgattactcttggaggtgatgctgaactggaacttgttgattccttggacccattttcagaaggtgttgttttcagtgtgaggcccccaaaagaaaagctggaaaaatattgccaatttatctggtggtgagaaggtatgttcc

SEQ ID NO: 13412 - DNA, 1061 bp, Zea Mays
tttttatttttttatgagtaagatgttagaaatggttagaggaggctaataaatatattttgatgttttaacgacttgaagaacacattgatttatatttttgttttttgaactattaaagaaagcaaattgatttgtaaagggactattatataaagcgaattgatttgtaaaaagggaccgggaaaaaactagtacttttgggccgttcgcaggctcccatcttctcccgcataatcttcctcccgcacatcccgatcctccagctgtggcatgggtcttgtgcagtgttggtgggctgaccagttgggctatggcctgctcgcataatcttcctcccgcacatcccgatccttctctcggcggcccgttggtcacgtgactcatccccctgtgctctcctctcgtggccttgtttcctggcggcgacggctggtcgagcggcgccgcccttggctaggtcttcgctgggtccttccccggcgacgagcgtccatctggggtcgactgaactgagcaggcagtaggaagagacactatgttgttcttctcctacttcaaggagctggtggggaaggaggtgacagtggagctcaagaatgacttggcgatccgcgggacgctccactcggttgaccagtacctcaacatcaagctcgagaacacccgcgtagtcgaccaggacaagtatccccacatgtgcggaactgcttcatcaggggctcggtggtgcggtacgtgctgctcccgcaggacggcgtggacatcgacatcctccacgacgccaccaggagggaggcgcgcggaggctgatcctgatgcgcacccgctccctcacctgctggctgctgcttcatccccgattgtacgaagcatgcatgtacggtgtgtggtagacagatgccccagtttagttctttggtgcttgccttgacatagatattccaggttggatgatgacctgaatcacctgatatattattgtcatatcatatgcaatgttcttgcatggggttgctatattattaccatatcgtattatcacatcatagacacttaaa

SEQ ID NO: 13413 - DNA, 1014 bp, Zea Mays
tgtgatctcccctctcccgtacgagctctatataaacagaagcaggcgtgccccctctctctgcagattggcggcagcaaagcaacacgcgcctcgatcctcctcgcccctccggcctctcctcccctccctgcacccgcacctgcggagagcgccgcaagctagctgcagaggagcgagacagtagcaggaggaggacgagaggaagaagagatggcgggctgtgatggagccaagtcgtcggcgtccatggaggaagaggcatgcgcggagaagaagtacggagggatcgcacccaagaagcccttgatatccaaggaccacgagcgcgcctacttcgattctgcggactgggtgctgggcaagcaagccgcgaacagcagcagcagcacgaggaccgcagccgcggtcgagtctctgaagcccaagctgaagagaacgccgcaccaccagctgccgcctcgtaagcccacctgcgcttccagttgagacgcatggccacgcgtcgcagctgctggaggaggagctcggtcagagtcaaggactgaggatgccgacgagctcgagctcggataaatgttttagctggtccggaatcgtagggacgacgacgagccagaaagatccgaatccgagatgccgtctggcttcttggcgagcagcgcctgttattgtgtgccataaagaacggatcaattaattatcaattgtctggctgaattctggcatggcacctggtgtttgaatgacctacagctacagaagcccagtatttggacacgggccgtgcaattcctcacgcaggccgccggctttgttgggctcccccaccgttcgaggctcgtggccagccagccagccccatccactgtctatccttctcagcgtagggcctggtcgctttttccgtactcggtccgtcctggagcacaagtcatttcaattatcttcaagactctcagcaaatttgatcaaattttctctgtaataaatatcactagattctttattaat

SEQ ID NO: 13414 - DNA, 1832 bp, Zea Mays
tggaattgaagtgcatgttatcagactgagtggcatccaatcctgaatcaatgaggggctggggtttgctcgtgttatcgctacatgttctttcatgcctggttagtggcgttgcttctggtcgaacaagctcttatgtgcgcacagagtttccatctacagatatacctctagaaagtgaatggtttgctattccaaagggatacaatgctccacagcaggttcatatcactcaaggtgattatgatggaaaggcagttatagtatcttgggttactccagaagaacctgggccaagtgaagtattttatggcaaggagaagctatatgaccagaaagcagaaggaacaacaacaaactatacgttttacgattacaaatctggatacatacaccattgccttgtcgatggccttgagtataacactaaatattattacaagattggaagcggaaattcagctcgagaattctggtttgaaacgcctccagcaattgatccagatgcatcatacacatttggcatcataggtgatctggggcaaacatttaattctctctcaactcttcaacattatgagaaaactggaggtcaaactgttctatttgttggggatttgtcgtatgctgatagatatgaacataatgatggcattcgttgggattcctggggtcgattcgttgagcacagtactgcataccagccatggatttggaatactggaaaccatgaaatagagtacaggcctgatctgggagaaacttctgtattcaagccatatttgcataggtacatgactccatatttagcatcaaagagcagttctcctatgtggtatgctgtcaggcgtgcatctgctcacatcatcgtgttgtctagctactctccatttgtaaaatacactcctcaatggctgtggctgaagaacgaattcaagcgcgtggacagggaaaagacaccctggcttatcgttctcatgcattctcccatgtacaacagcaacgaggcacattacatggagggtgagagtatgagggctgctttcgagaaatggtttgtgaagtacaaggttgacttggtgtttgcagggcacgttcatgcttatgagagatcataccgcatttctaatgtcaactacaacataacgtcgggaaatcggtatccagtgccggacaaatctgctcccgtttacataacggtcggtgatggaggcaaccaggaaggacttgcttcaaggttttataacccccagccggattactcagcgttcagggaggccagctatggtcactcagttttacagctgaaaaacaggacccatgctatctaccagtggaatagaaacgatgatgggaatcctgttccagcagacaccgtaatgttccataaccaatattgcacgcgccgcaggaggctgaagaagaaccatctccatctcgaggaccttgaggatttgatctccctattatagaaaaccgggttcgcaggacgcatgaactgtgtgtgggggaataatcgcaggttagcactgttgctagtgtgcccgcctctcttggaatggaagcagcagagccagctatcagactggcagtgaccaccacctcctcagctacctggttgcatgccacagatctgaaattctgaaatgctgtgactgtgactgtgaggtatgaaaaaacagtgtaaataacgcggttgcctccgtacatgtgtgacattttatacacgtgcaagaaagcatcggtgtccaccgttgtccgtgaaccattttcgcttgtatgcgcttgtgcccagtggaaatcctttccatctcgttggtttgctggtgaca

SEQ ID NO: 13415 - DNA, 519 bp, Zea Mays
ctcgtcttccccgagatccccatctgtgatcattgacttcacggcctcctggtgcggcccctgccgcttcatcgcgccactgttcgtcgagcacgccaagaagttcacccaggctgtgttcctgaaggtggacgtggacgagctgaaggaagttgccgcggcctacgatgtcgaggcgatgccgaccttccacttcgtcaagaacggggtgacggtggagaccgtcgtcggtgccaggaaggagaacctcctggcccagatcgagaagcactgcgccgcggccgtgcctgctgcgtagagaggatggagaccagcacagcacgtggcggtggcggttgtcttgtcgttttcagtttgggcttgtcagcgctgtggctgggtggtcgattgttgtgaactggagcatgcagttctaatactttggaatttggatgtctggcttcgttctgttatgatgatgatgatggattgatggtgatggcatggcaacgctgctaatccctgcactagctagagtgc

SEQ ID NO: 13416 - DNA, 2145 bp, Zea Mays
aactctaccaaaataattagttttaaattttgttttaaaaaatagaaataaaaaaacccaccgcgttcgtgcgtccgtggagagggacggagaccagtcgcccgccgacccgtgcgtctccactcgtccacgcgcaaatccccttcccaccccctgaccagaccaaaggcagtagcaactagcaatgcagcttcctcctccagcagcagcagcccccacctccacgtcctccgccgccacaccaggctccccccgccgcctcccccgccgccccgggcgcggccaccgtcggccgcgtgctgggccggccgatggaggacgtgcgcgcgtcctacacgttcggccgggagctgggccggggccagttcggcgtcacctacctggccacgcacaagcccaccggccgccggtacgcgtgcaagtccatcgcgacgcggaagctcgcgcacagcgacgacgtcgacgacgtccgccgggaggtgcagatcatgcaccacctcacgggccaccgcagcatcgtcgagctccggggcgcctacgaggaccgccactccgtcaacctcgtcatggagctgtgcgagggtggggagctcttcgaccgcatcatcgcgagggggcactactccgagcgtgccgccgccgccctctgcagggagatcgtctccgtcgtccacagctgccactccatgggggtcatgcatcgggacctcaagcccgaaaacttcctcttccttaacaagagggaggactcgccgctcaaggccacggatttcggactctccgtcttcttcaagcccggcgagcagttcagggatcttgtcggcagcgcttactacgtcgccccagaggtgctcaagcggcgatacggagctgaggcagacatatggagtgccggagttatcctctacatcctgctatccggcgtccctcctttctgggccgagaacgaggatggcatatttgatgctgttttgcgaggtcatattgacttcgcatctgatccctggccttccatatcgaatagcgcaaaagatttggtcaagaagatgctgcgccaagaccccaaggagcggcttactgctgctgaaattttgaaccatccatggattagagaggatggagaggccccagacaagccactagacataacagtaataagcagaatgaagcagttccgggccatgaacaagcttaagaaggttgccttgaaggttgttgctgagaacttgtcagaggaagagatcgtgggcttgaaggaaatgttcaaatccctggatactgacaacagtgggacaataacgctggaagaattgagagctggtttaccaaagctcggcaccaaaatctctgaatcagaaataaggcagttgatggaagcagctgatgttgatgggaatggcaccattgattatgttgaatttatatcagcaacaatgcacatgaatagactagagaaggaggatcatatatttaaagcattcgagtattttgacaaggatcatagcgggcacattacagttgatgagttggaagaagctttgaagaagtatgatatgggcgatgaggcaacagttaaagaaattattgctgaagtagacacagatcacgatgggagaatcaactaccaggagtttgttgccatgatgaagaataatagccccgagattgttccaaatcggaggcgcatgttttaaggctcatctcctacatttaattggaaaaaagaaagacttctaagatatatttttccgcggtcagaggggagagcaactgatactcgaaagtgggattcagcctgggcatatgtgcaatgatattacagactttggacaagtcatcagtcatgggtgattgcctttgtgttgcttccattttcgaccatctcatcctacgatctttccaagttatctttaatgaggtgtgtcgtgtggtctatgtttcctgcctctggatcttttatgtaagagaaacggacttgtaaaacagttccaaattatcatataccaggcgaaaagagcaaatcgtaatcgcccactgcccccttttcaagaacggaacacatgactcctgtgtacatgccaaaacctcttggacagtgagcaggtttgaaacgagcccttccagaacaggaaaaaaaacaacaac

SEQ ID NO: 13417 - DNA, 532 bp, Zea Mays
aacatttgagtaatcttcgtcaatcccaagacaataatgcaaggtctccagctggagggatttcatgaagacaggaaagaagggacggaaaggtgaaatcaagcccccaaaactgaagactgaagatccgaacaaatcttatgtgcaaaggccagtaaagcgaaactgagtggaatgtcagcaatcaaagaacatccggtagcggcctttcatctcaccagattagagctgcaacccttcaatgttgtacttgtcctgaatgtggtaaggttcaattacgcccgctgggaaacagaacggaacagagcagattttacccgtattgctagctagagtgatttggtttgatgtactcatcatccgtctgaagattttactgggaaaaaaagtacaaacttttccgttggaaaagaacctaatgaagtgaatgttgacaggccgtctctttactgcttcattgcattttagtgtatgtaatggtgatacgtgtgcatcgcctatcatcattgttgcactcttcagtagatgccga

SEQ ID NO: 13418 - DNA, 1320 bp, Zea Mays
ccgcgtgctcggttggcctggctggtggtcgtggtcgtggtctggtttctggaggacaattcttcgctgtctagccttcctcaaaagtaaaaagggtaaatgggatcagaagggccttcagttgtcactgtccatgttactggatttaagaagttccatggggttgctgagaacccaaccgagaaaattgtgaccaatcttaaatctttcttggaaaagcgagggttgccaaaaaatcttgtcctcggaagctgcacagttctcgaaacagcaggggaaggggcacttgccacattatataaggttttagagtctgctgttgcagacagaggaactgggtcctcggcacagggacaagtaatttggatccactttggggtcaacagtggcgcaataaggtttgcccttgagaaccaagctgttaatgaggctaccttccggtgtccagatgagctaggatggaaaccacagagggtccctattgtgccctctgatggaagcatctcacggacgagagagactaccctgccagtcaatgaattaaccaagtcactccggaagataggctacgacgtggtgccctccggcgacgccggtcggtttgtatgcaactacgtgtactaccactctcttcggttcgcggagcaacacggcatcaaatccctgttcgtgcatgttcccctcttcttgacgatcgacgaggaggtccagatgcacttcgtcgcttccctccttgaagtcatcgctttctcatccaactaggaacagcagttggaagatcagcgtctggattcctatctcaaggatggatgtaaagctggaatgctgcatgtaggctgaataaggtggtgtggtcattggcgatagatgttaatcttgctccacaggttgtgtttgggaatcgggagggaaaaaaagagaggtcattggcgatagatgatgatcttgctccagagggtgtgtttgggaattgggagggggggaaaagaggaaattgctgcatagagtcagacggtgtatcagcttgtacgccatcaatcaagtgctgtaaacatgcctgggaaataattggggacctggatttgaataagatttgagttgttgggggcggacgcgctacattaagacttgttcggttattcccaatatatatggatcggatgagattggaaaaaattaagaaaaagtttgacttgtttgggattcaaacccatccaattccactcaatccatatggattaggagctaaccgaacaagtccttacgtgatttacgtgcgacgggatagaaatcatgtatgttgacgtggataaatgtgct

SEQ ID NO: 13419 - DNA, 1841 bp, Zea Mays
gtcttgaccagagccttgatcatccaaatggacgtgaacaatttgataagattctcatgggattgctaagaaggatattggatactaacaaaagagtgcaagaggctgcttgttcagcgtttgcaactcttgaagaggaagcttctgaagaattagtaccccacttggaagtaattttgcagcacctcatgtgtgcctatggaaaataccagagacgaaatcttcggatactctatgatgcccttggtaccctggctgatgctgttggagcagaattaaatcaggcaaaatatctagatatatttatgccgcctttgatcacgaagtggcagcaactttccaattctgacaaagatctatttccactccttgaatgctttacatctattgcacaggcattgggaccaggatttgctcagtttgcggaaccagtgtttcaaaggtgcatcaatcttatccaatcgcaacagttggcaaagattgatcctactgcagctggtgcggtgtatgatagagaattcattgtttgttcgttggacctactgtctggacttgcagaaggtcttggcgctggtattgaaagtcttgttgcacagagcagtttgagagatctgcttttgcaatgctgcatggatgaagcagctgatgttcgacaaagtgcccttgcccttcttggagacctttctagggtttgcccaatacatttgcatccacgtcttcaagaatttcttactgttgcagcaaagcaactgaaccctcagtctgtgaaggatgcggtatcagtagctaacaatgcctgttgggctattggagaattagcaatcaagattggcaaagaaatagcacctgtggtgatcaccgttgtttcgtgcttgattaccatcctaaaatccccagagggtttgaacaagtcacttgttgaaaatagtgcgatcactcttgggaggcttagctgggtctgtccagacatcgtggcccctcatatggagcatttcatgcaagcatggtgcagtgccttgtgcacgatcagagatgattttgagaaagaggacgcgtttcatggactgtgtgcaatggtggcagcaaaccctacaggagccgctggttcattagcttacatctgccaggcctgtgcaagttggactgagataaaaagcgaaggtcttcacaatgaggtgtgccagattctgaatggctacaagcagctgcttggaaacaacggtgggtgggaacaatgcatggccgccctgaaaccagacgttgtgcagaaattagctagatacggagtatgatgagaagcaagctcgtgtggtttattcacctcatacaccgaccatcatctttatggcggagacaagagaggagcagaaaggggtgggggtcgtcgagagtgtctctgctgctgatgcatcatctttacatgtgtggcacttgagagtcgattcggttcgttggtacgccattgtccgttcgttcattgttatactggttggtgcacagcatttccagagcgagagtaggatgtcttggtaaaccccccatgtgtattggttggttgggccagtggacttggttttggtttttttgtcattcctactggcaaacacaacaaggccaccaccctcttgctcgccccaccccggcaacattgagaaaacagaaaggttttgtagcgtgtaattctctctcttttcttggtttcttattattattaggtgtaggattgttttcgagtcttgtttggcaggaagggtttgtacgagaaatcaattgattgctcactcaccacaaaataataaaaaagatcgatcgatggggcttgtatctcctgcgactcttcc

SEQ ID NO: 13420 - DNA, 764 bp, Zea Mays
atccttctgactcgtccctggcctggtggtgcgagatctttccttctttcccacgctccaagaaagaaaaccagaggcgccccccgttagccaattccgtttgtttccgacggcacaaggaaaaacaaaaaaaacaagaccagactgagggctcctctcccgttccgatcgccaattcgtcttccaccgcctgcaacccttcttcccttctccgtcatcgtgacggcatcacgcgcgcgctctcctctcccacgagtccgtcagcctgctaagtcttaagatggcgtcaagcaatggtcagacagaagctccagcaccatctgtccccaaaaatcccgctatggcatcatgccggaagaagaaaacagatgatgctaccttccttgaagatctgaaagaccacatggatgagttcattcatgcctctatggatgagcacaagacctgctttaagaagacaattcagaagatgtttgggatgtcgaaggctgttgcagagagatccgcggaagcaaacaaagctgaagttgaaagtgctttgccacttcagaccagtgtctcgcagtagaatttcatgttggtagtttcttgctcgtgccaatagttttataagggtttttgttgctgtgttttctgaaacgcataagcgtgtcagtagcatgttttcataaccggattgtagtgcttcattatctatagttttctgtacgtgtaaaatagaccagcgtaacagcgtagtttgcttcattctccgaaaaaaataa

SEQ ID NO: 13421 - DNA, 190 bp, Zea Mays
taccttattgttttggagctttaatctttgcacttcctcagcaagttcggtgacactgtaaatttccacaaatttatcaattgtctgaaaatatgctgaaccattatcacaaatttttcgtaccttcgctgcaattggagaacatacaaatgcaattccttttctcgggcaggccctccagaagactgca

SEQ ID NO: 13422 - DNA, 1599 bp, Zea Mays
ccatcaccctagcagctaggtgctcgtcgattcgattgcaaggacaagaaaaagaccctgctactttgttcgcacaagcctcagggatgatggacctgaggaagtatgatggggcgcttggcctgctaaatgctgtgttggaaattgacccaaatcattctgaggcttataggcagcgtgcatccgtgcttcggcataaatgcagatacgaggaagctgagagggactataacaaacacctggagctaagtcctgggtctgcttcagtggtgaaggaattatcccagcttctgcaggctcaaaattcattacaatctgcttatggccaattcgattctggagacttctcaaaagtcgtggaatacatcaacaaaattgtgctggttttttctccaggttgcttaaaggcaaagcttctcaaggctaaagcattgctagcactgaaagactactcaagtgttatttcagagaccggattcattctaaaggaagatgaagacaacttggatgcactgctattacgtggtcgtgcctactattaccttgctgatcatgatgtggcctccagaaagggcttcgtcttgatccagagcattccgaattgaagaaagcatatttcgggttaaaaaatcttttgaagaagaccaagagtgcagaagataatgctgccaagggtaagctacgtgtgtctgttgaggactacaaggcagctctagcaatggatccagaccatactgcttataatgtacatctttatcttgggctgtgtaaaactctggttagacttgggagaagtaaggaggcaatcagcacttgtacggaagcactgatcatagacagtgaacttgttgatgcgcttacacagagaggtgaagctaaacttctctcagaagattgggaaggagcagttcaggatttaaaagaggccgcccagaaatctccacaggacatgggtatccgtgaagcacttatgagagctgaaaagcagcttaagttgagcaaaagaaaagactggtataaaatccttggtgtttcaaagacagcatcagctgcggagataaaacgcgcctacaaaaagctggcgttgcagtggcatccagataaaaacgtggataaccgggagaaagcagaaaacatgtttcgagaaattgctgctgcttatgaggtgcttggtgatgaagacaaacgtgtaaggtatgaccgtggagaggatgtggaggagatgaatatgggaggcgggggtggcttcaatccttttgggggaggcggccagcagtacacgtttcaatacgacggtggcttccccggcggcggcttccctggaggtggcggctttcagttcaactttggataaactgtgccatgcaccatgacattttcttggcactggaattgttttaggaattcttaacggcagctggtagctattcttaggcaggctgagactgttctactatgttacataataatgacaagtgttacgattttttccttcatcatttgtttcctgcttacatacacacgcacacattgtctctctgatacatcagttgaatgtaagaatggaaataaagttactttttttttcttggggaggat

SEQ ID NO: 13423 - DNA, 1163 bp, Zea Mays
tctgctgattgagatttcgtgtctctctattgtcttagcttagggtaacaagttacttaccatttggtggcggaccaaggaaatgtgtgggtgacatgtttgctacttttgagactgtggtggcaacagcaatgcttgtcaagcgatttgactttcagatggctccaggagcacctccggttgacatgacaactggagcaacgattcacacgactgagggattaaaaatgactgttactcgaagaacaaggccaccagtaattccaaacctggagatgaaaattattaccgattcacaagaatccacactttctgccccatcgatggttgttagtgctgcttctgttgcttcaggagaagaccaagggggcatctcctgatttaagcagtttcaacatagagaacgagcatatccatttatattgctctggaagtatttggctagtttacagcatttgattacgcaagcagtacaaaacagagatagtctcctggcgtgctacaacgaaaaactccaaacccttccgcagacttgttaccgatggatggcacagcagactcctataggttacagggggtgtgtttgtttactttctagattatatatgttggattatggtggaagggtaatagggtaaaaatcactttaggactgcaaataagctaaaataatctaacattgggtagtttatttcagcttatttgtgatcttaaagttgtattttaccctattactctttcaccataatccaacttatataatctagaatggaaacaaatagggcctaggtctccttgctgatactcaaaagcatcaaaagcaccatggacatatctacatatttacaagaagtttctgacttccatgcatggatttgtgcgctcctaaatcttcagcatgccttccaacacacgaagaacatcagcacgggcaattatacctgttgatagtgtttagaaccccattaggcttgcaacatactctgtgttgtcaatgttaattaaggataatacaaatgaagtatgtacatgcagtttttttatctctagtttgtcagcattctgatactcacatattacttgttcatcctgattctcagctggtaatctcacttattactaatctgtggatctccatcttgagcatccgaaccacagcatct

SEQ ID NO: 13424 - DNA, 2010 bp, Zea Mays
ttggctgtctgcaacacagatgttggtgtgcaatgagcaaaaacgggtggattttgaagaaaggaaaaaacttgatcaacaacgagctaaaattaagtcgcagatggctcaatacgaggatgagctaaaaaggaagcgactgcaggctgaacatgaggcgcagaggttaaggaaccaggagcttgtgaagatgcaagaggaatctgggattaggctagagcagatcaggcgggcgactgaggagcaaatccaggaacaacggagacagacagagagacatagggctgatctagagcaggcgaccatttcaaagaaagccatggcagaggcggaggggagaatactagtaacaaggcaaactgaagatgtgaagagacgattgattttggaggagataaatgctgacagagagaagtggatccaagtgataaatacaacatttgagcatataggaggtggtttgcgaacgatattaaccgaccaaaataagctagtggtagcagttggaggggtaacagcacttgctgcagggatatacacaacaagggagggtgcaagagtagtctggggctatgttgatcgtatcctgggtcagccatcactgataagggagtcatcacgtgggaaatatccctggtctggtttcctctcacgtgctacaagtaccctgactagcaaactgaagaatggaagcaacctagggaaggacagaaatgggtttggtgatgttattctaaatccttctctccagaagagagtgaagcagcttgctaatgccacggccaatacaaaacttcatcaagctcctttcaggaacatgcttttctatgggcctcctggcacagggaaaaccatggcagcacgagaacttgctcgcaattctggattagattatgcactaatgactggtggagatgttgcaccattgggatcacaagcagtcaccaagattcatcagttgtttgactgggcgaagaaatctaacaggggtttgcttctcttcatagatgaagcagatgctttcttgtgcgaacggaacaaaacttacatgagtgaagctcaaaggagtgccctgaatgctctcctcttccgcacaggtgaccaatccaaggacattgtccttgcacttgccaccaacagacccggtgatcttgactctgctgttgctgaccgtattgatgaggtcctggaatttcccctgcctggggaagatgagcgattcaagctcctgaagctatatctggacaagtacataatcaaagctggtgacaaacatgagaagagctggctccagttcttccgtcgccagccccagaagattgaggtgaaaggcatcactgatgacctgatccgggaggcggcatccaggacccagggcttctctggaagagagatagcgaagatgatggcaagcgtccaggccgctgtctatgggagcaaggactgcgagctcaccccaggcctgttccgtgaggttgtggactacaaggtcgctgagcacaagcagcggagaagattagccggtgaggagccaaagcaggatgcctagtttaccaatttttttgattcacccccattttgccgtgggatgtactgtgtttcccccccgggatagattgcttcatcgggcaggcgttttgcatgccccgtgttattcttttgttccatttgccttaccaggttggtctaaggtggtaggcgatggtaacttttttggtataagagatgagggttgcatgtggcatgtgatggaaactttggcgacaggtcacacacacacccagcaagctggccccgttttgatgcattatactgtttggtcagtcttctatcttcttactgatgctcgtcataaaatagtctgatttactgacaataatcgacagtgagccagtggctataatggtgttggcattgttttgcagctcttgtagatgtgtcgtacctactgatgctcgtcacaataagttagaacctttaaataattttagttaaaaaaacaaatataaa

SEQ ID NO: 13425 - DNA, 517 bp, Zea Mays
cttgagccgtgtcttcagctgtgtctaaggagggtcacatgcacaccgtcgccaatccgcattacatgagtcaacctgttccctatggacaatacgagagccagcacaccaatgttcaaagatgactggctgcaagagatagctttgactcgcctgccatctcattgtaacaggatagtcgcagaatccaccatgttacattgaaagtgctgaagtcctcatgttcatgattttttttttatttatttggctaatttgttccagaatcgatgggttgaattttggagcaaaaacctctcgcgcctctccatttactaccctgatgattcctcagttagtgatggtgttattcagggacgatgatgcctctagccttttacgaatgcgaccgtccatgctcgccgagatcaagcttagggcatatttgggagtaaagtatttttatagtttcttgataatgctatgtttttaataatattttagtattttatatcataagatgtttggttgtgtttct

SEQ ID NO: 13426 - DNA, 792 bp, Zea Mays
gttgacgagtatggccggcaggccgcggcacgcgagggccgtccagtttccggagggttcatgggggcaatgatctcgaacctggcgttcgtcgtccggaccatcttctccaagaaggggatgaagggcaagtccgtgagcgggatgaactactacgcctgcctctccatcatgtcgctggtgatcctcctccccttcgccgtcgccatggagggacccaagctctgggcggcgggctggcagcaagcagtcgccgagatcggccccaacttcgtctggtgggtggctgcgcagagcgtgttctaccacctgtacaaccaggtgtcgtacatgtcgctggacgagatctcgccgctcacgttctccatcggcaacaccatgaagaggatctccgtcatcgtcgcctccatcatcatcttccagacgcccgtccagcccatcaacgcgctcggagccgccatcgccatcctcggaaccttcatctactcccaggcaaagcagtaacgccttgcattaattggcgtctagatggcctgccctcatcagttcaccgcggatcagctcggtgctcgaagatgacagcttatgacctttgagaatgtctactaagaatcgccctttgtataatactactagatcctctcttttttgtattttctttcctaggactagcttccagtgttactgggctcatttcgtggtgtttctattatgactaagattagagagagaatgagagatggatccatctaaataaaggttccagattttttttcccctctctgtccttct

SEQ ID NO: 13427 - DNA, 2324 bp, Zea Mays
ccgacaactattgtgaatgcatgttgcttgcttatcaactcattgctgtccacagaaggagcctccttccacactgttgtggaccctgtttttgatttctcagcactacgacagaagagggcaatatgacattgctttgaataaaatcgatgaggctatctcacatacaccgactgtcatcgatctatattcagtaaagggaaagatattgcaacatgctggaaatttcacagcagcagccgcattagcagatgaagctaggtccatggatcttgctgatcgttatttaaacagcgagtgtgttatgcagatgcttcaggctgaccaggttggccttgccgagaagactgctgtcttgtttacaaaagatggtgatcaacacaataatcttcatgacatgcagtgcatgtggtatgagcttgcttctggggagagctattaccgtcaaggtgatcttggccgggccctaaaaaatttcttggcagttgaaaagcattacgctgatatgactgaagatcaatttgacttccattcatattgcttgcggaaaatgacacttcgagcatatgtttctatgctgaagtttcaggatcgtttgcatgctcatgaatacttccacaaggctgctgctggagctatcaggtgctatatgaaactacatgattctccaacaaaatcttctaaggaagagaatgatgagatatcaaaactgccacctgctcagaggaagaagttgaggcaaaagcagaagaaagcagaagcgcgtgctaaaagggaggctgaagagaaacaagaggatgaaacagcttcatctaacagttcaaaatctggcaagaaacaacatgcaagaccagttgatctggatccacatggtgaaaaattaatccagattgaagacccgcttgcagaagccacaaaatacttgaagcttctgcagaataactcgtcagactcattagagacccatatactttcatttgagctaagcatgagaaagcaaaaggttttacttgctttccaggcagttaaacagctcattaaattggatgaagataatccagacagtcaccgttgtttgataaagttcttccacaagataaacagtcttcctggacctgtgactgattctgagaagctaatttggaatgttctggaagctgaacgacctgacatgaggcaattacatggaaagtccctcgttgaagtaaacagaagtttccttgaaaaacacaatgcttccttgatgcaccgagcagctggtgctgaaatgatgtatctcttagagccaaataagaagatggaggcaattaatttaattgaagattcaacaaatattacatcatcagggcatagtttgcttggtcctgtaaaaacatggcaaattcaagattgtattgatgttcataaattgctggagacagtctttggtgatcagaatgttgcaaataggtggaaggcacggtgcgcggaatattttccgtactcgacgtactttgaaggcatcaagagcgctatttcaacctatgccattgaccatagtctcgagagcccaccagaaaatggaattgcttcaaaccctcatctgaaatcaaaagatggagaacaagggagtttgaatgggactctgcatattgtagatgatttgagcagcctaagcattcggtaatgcacgaacaagttgctgaatggtcacaactggaacacaacattttagaactggagccagtacccaattaaccaaagcgtacacgaacaaggggaacaaagtgctctggtgcaagtagttgtcggcacatcacatatgaagagtatattattgattgggagctgaggtgtccagtcaggttattgtcttggttccagcctgtacctttttgttgccattttgtagacagggaaagaaaaaaaatcttccgtctcaattacggtgaagttgtgacagcgtttgttgcctagcgatatcagggtgtgaccattcgtttgaaacagtgctccctctctttttggactacaaaattttggcacaaagcaggtgtacaaggttaaaccttttaaaactttcatctatttgtttcgggatagtttggtgtgtgggggggtttgtcttgatcctttgtgctactgcaacatttggtcctcgacattgtaaattagttaatcttaaacatagaaactgtattccagttgtcatgacaaataatgatcaatgttaaccctgggtgtttgatctattccatttgggatgcgttgaaaagcatgcattgtcggatttgaagataaaaatccataatgttacatttattaatcatacttgtatagtgacc

SEQ ID NO: 13428 - DNA, 1786 bp, Zea Mays
agtcaaggagaccgtgcctacgcttttcttctccctccattcattcacacaccacacctcccgaactccgaactacaagtttcgcttctcgtcgcgacgactgggcgagaccgccgccgccgccgccgcctgagaaatggctgatggtgaggacatccagcctcttgtctgcgacaatggcactggaatggtcaaggctggttttgctggcgacgatgcaccaagggctgttttccctagtattgttggccgtcctcgccacactggtgttatggtagggatgggacagaaggatgcgtatgttggcgacgaggcacagtccaagagaggtattctcacgctcaagtatccgatcgagcatggtattgtgagcaactgggatgacatggagaaaatctggcatcacactttctacaacgagcttcgtgttgccccagaggagcaccctgtgttgctcactgaggctcctttgaacccaaaggccaacagggagaagatgacccagattatgttcgagactttcaatgttcctgccatgtacgttgcaattcaagcagtgctgtcactctatgccagtggacgtactactggtattgttctcgactctggtgatggtgtgagtcacactgtgcccatttatgaaggatatgcccttccccatgccattcttcgtctggatcttgctggtcgggacctcacagactccctcatgaaaattctcactgagaggggttattccttcacaacctctgccgagcgagaaattgtgagggacatcaaggagaagcttgcatatatagctcttgactatgagcaagagttggagactgccaagaacagctcctcagttgaaaagagctatgagctgcctgatggccaagtaatcaccatcggcgcagagagattcaggtgccccgaggtcctcttccagccatccatgattggtatggaggctgctggaatccatgagacaacatacaattcaatcatgaagtgtgatgtggatatcaggaaggacctctacggcaacattgtgctcagtggaggttcgactatgttccccggtatcgctgatcggatgagcaaggagatcacttcccttgcaccaagcagcatgaagatcaaggtcgtcgcgccacctgagaggaagtacagtgtctggataggagggtcgatcctagcctcgctcagcactttccaacagatgtggatatcaaaggaggagtacgatgagtctggcccggcaattgttcacaggaagtggtcgatcctagcctcgctcagcactttccaacagatgtggatatccaaggaggagtatgatgagtctggcccggcaatcgtccacaggaagtgcttctaggttccgcaagttcctcattgttatctagtctcaagttatgcccccgtcatttctcgagatatgtgtggcagatttgcctgcgacgtttattttcatcggacctgagtcttctcggggttagcagctacctttgaatgttgtggctccctgtgcgagcgtgctgtgtcgtatcacctggtttgtgagattagttgttgtcaaacttgcttggtttgattggttgtgcgtttaagagctgatagttatatacatatattgctttgctataccgccgctatatctatgtagcctttatgtatgtatctggattctgaaatgcaagaatgaacttcgagcagcctttgtgttgccgatattttgtggtgccgttattgaacagtgtgccaactgaagattatacgaccgtggaagcctggtttggat

SEQ ID NO: 13429 - DNA, 1048 bp, Zea Mays
gattggtccttgccttctcacacggatcgctgagccccatccaacagctcgtatcaaccgaaaccaatgccacgcaacgctccagattgcagtaccgccctccacacaacgaaaacacaaacgcacacaagcacacgacgcaagggtgacgactgacgagagggagagagagagaggcgaggaaggagggagagagcacgggggattgatcgaagatggatgccggagcaaaggtggtgaagaagccggtctctcgctccgtgaaggccggcctccagttccccgtaggccgtatcggccgctacctcaagcagggtcgctactcccagcgtgtcggcaccggcgcccccgtctacctcgctgccgtcctcgagtacctcgccgccgagctcctcgagttggcggggaacgcagcgcgggacaacaagaagaaccggatcatcccgcggcacgtactgctggcgatccgcaacgacgaggagctcgggaagctactggccggcgtcaccatcgcacacggcggggttctgcccaacatcaaccctgtgctgctccccaagaaaaccgctgtcgctgctgccaaggaaggcaaagagaagaagtcacccaagaaggccgccgccgccaagtcgcccaaaaaggtggccgcctcgtaggtccctggcaatgctgatgcactgtctctctctgtcctctctgaactgaaacgctcctagctgtcgttgtcggtcatggtcgttgttgtttgatgcgcttttattgtggttgttcgtgtgtaattgcttgcctttcacccatttggcatgcactgtgtagggtcacactggtctaggttttcaatctgggaaacaccggtttagattcaaggagcgtgaactgtgaaggcaggtgagagggtgggatctgtgaatcattaggtgctgtttgtaataagattgcaaagatgtgtaaaatttgttttgtgcttccattccgtgcttgattgtctgaatgtgatttctttttccattaattggtgacctttgttgtgttttatgcttgcatctgc

SEQ ID NO: 13430 - DNA, 1120 bp, Zea Mays
attactcatttacttgaagtttctgatcctctgcatattcaataattggctctgctgcaagcctgcaaatcactaggtcactgagaacatgttgggtggcaagaaagttacagttgtatttgtcctaggtggtcctggaagtggaaaaggcacacagtgtgccaacatcgtggagcactttggattcacccatcttagtgctggagatcttctgcgtgcagagattaaatctggctctgagaacggaaccatgattgagaacatgataaaggagggaaagattgttccatcggaggtgactataaagcttttgcaggaggcaatgataaaaagtgaaaatgacaaattcctgatcgatggatttccaaggaatgaggagaatcgtgcagcctttgagaataccaaaatttctcctgcatttgtgctattctttgactgttctgaagaagatatggagaaacgactcctggggcgcaatcagggaagggttgatgataacattgaaactatcaaaaaaaggttcaaaacctttgttgactcaactctgcctgtcattgagcattacaactcaaaggacaaggttaaaaagattgatgctgcaaaaccaatccccgaggtgtttgaagacgtcaaagccatttttgccccatattctctaaaggctgaatagagcaatctaagggacatgataaaggtgatacatggtgtctaggcaccacataaacatatctgtgattatgatggaccctttaatatagaacaaaagttttggctcatttgagctaccagcgtaccagtaggcaattcgatttgttaccagcaacaagtgatctgattcccagtggtcctgctagagtaacattttttaccactgtctgttgtctatgtatcctttgatattgtgttgtaccaatgtgcaatttactctatggactgatggaacattgtgccatcccatccaccagatttattgtggcgttatggaaagcatagaaccgctgccatattctttaatttgtacgctgaaatatactcgttggcaccgaacttttggttgatgacttcgtgatataataaccctaccggcagtaaatatctacgctcaacaatgttctcaaaa

SEQ ID NO: 13431 - DNA, 1181 bp, Zea Mays
atggatgaattgtgcttgaattacttagatcctgcagagattccatggggtaactttggggctgaatatgttgttgaatcttctggtgtctttacaacgactgataaagcatcagcacacttaaagggtggtgctaagaaagtggtgatatctgcaccatcagcagatgctcccatgtttgtagttggagttaatgagaatagctatgattcgaagatgaatgttgtttctaatgcaagttgcaccaccaactgccttgctccacttgccaaggttgtacatgaggaatttggcatcgtggagggccttatgacaactgttcatgccacaacagccacccagaagaccgttgatggtccttcaatgaaggattggagaggaggacgtggtgctggccaaaacataattcctagctccactggtgcagcaaaggctgttggaaaagttctgcctgagctgaatggaaagctcactggcatggccttccgagttccaacaccaaatgtctctgttgtggacttgacatgccggattgagaaaaacgcctcctatgatgatgtgaaagcagccatcaaggcggcatcagagggtgcactcaaaggtattcttggctacacagacgaggacgttgtttccaatgattttgttggtgattctaggtcaagcatctttgatgccaaggctggtatcggactgagctcttctttcatgaagcttgtgtcttggtatgacaacgagtggggctacagcaaccgggttctggatctgatcgcccacatggctctcgtcagtgccgccgccaagctctgatgtccgtactcgtttctccagtagtagcttagaaaaaaagactgcaattttgacggccattttctgttagctgttgtttggaataagatcaaatgctggaacacttcgaactcgcgcgagactggactcagatccatggcctgtattttagttgtagaagtgggcaaatttgcaccgtagtaccctggcatggttatatgcggaattgttgattgatgagtcgttgtacggtttgtcgacttgatgatatgttgatgtgggagcccctgaatgaggcggtattaatggaaatataggatggcaatggcaatccgtcgacttgcaccctatttttctttgtttgcacaaatctgtctgttgctcgaaagtcg

SEQ ID NO: 13432 - DNA, 1857 bp, Zea Mays
agattgggctggtccggccactccgacacccttatataaagtcccgaaccctagaggccagcaccttcctccccaactcgccgtctgccttctgcgcctccatttcggcctctgtcccttgcaagttcaatctcacctccaaccatgggtaaagagaagtcccacatcaacattgtggttattggccatgtcgactctggcaagtcgaccaccacaggacaccttatctacaagcttggaggcattgacaagcgtgtgatcgagaggttcgagaaggaggctgctgaaatgaacaagcggtccttcaagtacgcgtgggtgctcgacaagctcaaggctgagcgtgagagaggtatcaccattgatatcgctctgtggaagtttgagaccaccaagtactactgcacggtcattgatgcccctggacaccgtgacttcatcaagaacatgatcactggtacctcccaggctgactgtgctgtccttatcattgactccaccactggtggttttgaggctggtatctccaaggatggccagacccgtgaacatgctctccttgcgttcacccttggagtgaagcagatgatttgctgctgcaacaagatggatgcaaccactcccaaatactccaaggcacgttatgaagagattgtgaaggaagtctcatcctacctcaagaaagttgggtacaaccctgataagattgcctttgttcccatttctggttttgagggcgacaacatgattgagaggtccaccaaccttgactggtacaaaggcccaaccctgcttgaggctcttgaccagatcaccgagcccaagaggccttcagacaagcccctgcgtctgcccctccaggatgtgtacaagattggtggtattggaactgtaccggttggtcgtgtggagactggtgtcatcaagcctggtatggtagtcacctttggtccaactggcctgactaccgaggtgaagtctgttgagatgcaccacgaggcacttcaggaggctcttccgggtgacaatgttggcttcaacgtgaagaatgttgctgtcaaggacctcaagcgtgggtttgtggcctccaactccaaggatgaccctgccaaggaggctgccagcttcacctcccaggtcatcatcatgaaccaccctgggcagattggcaacggctatgcccctgtgctggactgccacacctcccacatcgctgtcaagtttgctgagctcattaccaagatcgacaggcgctctggcaaggagcttgagaaggagccaaagttcctgaagaacggtgatgctggtttgctgtccgtgacatgaggcagacggttgctgttggagttatcaagagtgtggagaagaaggacccaaccggcgccaaggtgaccaaggctgctgccaagaagaaatgatgcgatcctgcgcctgctttagcaatacctagttttcatcattacaagttttgtttgtggtcgttgctgttattgtgtgaactgttgagcagacggttgctgttggagtcatcaagagtgtggagaagaaggacccaaccggcgccaaggtgaccaaggcggccgccaagaagaaatgatgcgatcccgtgtctgcttttgcagtgcctggataacttgccactaaagttgtgtatgcggttgttgctgttattgcgtggactgtttgctgcggtgtctcctgtgtctgttgtctgttgtctttactatcagtaatgctcctgagacttgtatttctccttttggcgccgctaaatggaattttcgaacaatgattttcgtgttattattttacaaccttttcgaacaatatttacacgtctgatgtgttttgctgaga

SEQ ID NO: 13433 - DNA, 345 bp, Zea Mays
cttagtttctgctggcatgtctgaagcgtcatgggacgggtgcattgtttgtccatcaacagacagcacatttgaccttcgcaccggggagataaaagaatggtatccgaaaaaccctgtcctacgggctcttacgccagccttgaggaaactattcacctaccgcgtgaaaacagacgaagaaaacatatacatcagcttcagcggagccgacggtgcggggtcagcggagattatattcagcgggaaagctcagcctggtgtgactgcatcggatgtcaatgtggaagagagaagtgagaagctcgtttcactgaacttgtgcacccaacttatatccccctt

SEQ ID NO: 13434 - DNA, 478 bp, Zea Mays
tttcacccttgtgccttgctggtggagttcggtcgaaagtagttaagacgggcatagattcaagatctgaagtgacttgttgttccttgtagggggttggctagttcttctagttctttgtatatccgaaggaacaggcgtagcttgcggatgacgtacattctaggaacatctgacgctcgtagtcagtctgccaactgccgttaggcttcttctgtggtgtgtatttggctgggttttagttgggcgaaaacggcattgtgctttattaggtttgatttgtatggacggacgcgagtacgaataaggttgtaaatgctgataataatttcacctgactataaatccaggtggattgcaggcaccatttgttttttttctttatttgatgttttttccttggcagtaccgctacgtacaaccattatacgtcttgcttttgtgataattcactccagcacatttgctagagttcttg

SEQ ID NO: 13435 - DNA, 799 bp, Zea Mays
gccgcgggggctggggagagcgcgcgcaagtggagggagatggcggccaggaaggaggaactcctggtgcggagccggggccgagtcgcgttcgcgtggacgctcgtcgcgctctgctgcggctcgcacgcgtcccacatcctgcactcgctcggtatccatgtcggccacggaacgtttttggatctgttgcataatccttatgtgaaatgtggcattgctacaactgctttgtttgggcctggaagagatatactctttgatggttttagagcattcaagcaaggttccccgaacatgaactctctagtaggatttggatctgcagctgcatttactatcagtgctgtgtccttgctgaaccctgactgggagtggaattcaaccttttttgatgaaccggtcatgcttcttggatttgtacttcttggacgatctcttgaagaaagtgcaaggcttaaggcatccagcgatatgaatgagctcatttcactgttatcacctcagtcgaggttaattgttacttcctcaagtgacaacccttctgcggacagtagtttgaattctgatgcgatcacagtcgaggttcctgttgatgatgtccgtgttggagactcaatattggtcctgccgggagagactatacctgtagatggtaatgtcattgaaggatcaagttttgttgacgaatcaatgcttactggagagtccttgcctgtagccaaggagactgggcttcctgtattttcaggaactgtgaactgggagagttgcgtatcatttcatgagaagaagaaaa

SEQ ID NO: 13436 - DNA, 341 bp, Zea Mays
aggaacattgctttgttataagatatgtaataaacaattcatactccgtcctgtcgcccccacgctagtcgcccaaactacgcaaccgatatattccccagcacccccgttccagccgtccaaccgagacaccgcgtgcgaaccaagcagaccccagcagaagaagcgaagtcgtcgccggagcaggaggaagagcgagcagcaagatgtcgtggcaggcgtacgtcgatgaccacctgctgtgcgacatcgaaggccagcacctcagcgccgccgccatcgtcggccacgacggcagcgtctgggcacagtccgagaacttccccgagatctgcctcagc

SEQ ID NO: 13437 - DNA, 939 bp, Zea Mays
gaggatcaagcattgaccatttatgatgaaaatcatcctatgctttctaaagaatatgaacgtgttagggctggcaaacctccttttatgctagatatgtctcgctatggtttggagccacctccaatgaacaagaggaatgatgttggcgcttggaggcaggctctacggaatgctcagagccagttgcagcatcaaattataaggatagagaatctcgagcttatgctgaaatatggcgtagatgtttggaagctccagaacagacaaatggaatcagttctgtctaggatgcaaaagatggctgtagaatacaatgaaaggatagaaaatgtcaatcgcgagaggaagttccaccagcaaaatactggaggacagctgcatgccctgaaaatggaatggcaggagctgtgtcaaaaaaatatagctattcaggctgcttgtgttgacctgcagaatcatattgatcagcttaaacttgaagcaaaagaactgggaatgcccatggacgacaactcaggaaccgacccacaagcatcatgaggatttgagatacagaggtggcaaggaagaagctacgcttcatttgagtctggcagctggacgtttcattagccattgtgattacctgtcctgcaattgtcatatgggacagtctgtttgatattgaaaacaatgtggactgtgcctagcaatcccatgacctgtgctcctgaaaacacctcgcagaggaagaatctaaattcgtgtattgttgtccgttgaagtgccctaacttgtggcaagagaaatgcagctgatgtatgcagactctccagttgacattgagttcttacatgaagcttttctgtttgattttctgcttgtttctgaaaataccttgtgctttgccctcttctgaacacgcttacaagtgtttgcagacagtgcatttcaaaa

SEQ ID NO: 13438 - DNA, 117 bp, Zea Mays
tacagactcaactagaagaagagaggaggcaacgtcacgatatggaggcgaggattatggtggagcgggaggcggagcgggaggcggctcgcctggcagatcatcagaggatggcgg

SEQ ID NO: 13439 - DNA, 609 bp, Zea Mays
gcgaaaacccctctcgtatgtcgcatcgcgtctaaacccttgtctccttcttatccccacctccctcgcggatcactcgccgccgccgccggccgcagccatcgccgtgatgctgtccctgtcgagggcgatcgggaggcggctcttctcgtccgccgaggccgcgtcgacggctgcggtgaggacggcgcagaacccgctcgaggagttcttcgaggtcgagcggagcaccgaggagggcaagcctcctccccactacggtcgcagctggaaggcttctgaactgcgactaaaatcttgggatgaccttcagaaattgtggtatgttcttctaaaggaaaagaacatgctaatgacacagcgtcaaatgctgcattcagagagcatgaggttcccaaatccagaacgaatttccaaggtaaagaaatcaatgtgccggataaagcatgtcttgactgagagggctatagcggagcccgatccaaggagatcttcggaaatgaagcggatgataaatgccctgtgattcactcacaggcattctcccttgggacttttgatggttactaagttggcacttgcaagtgccctgcatgaagaggagagatg

SEQ ID NO: 13440 - DNA, 720 bp, Zea Mays
aaacaacaactacttcctagtataaagtgacagtagcgggggagaagggaaccgaaaccaagcaacccaatccaaaccagacaagcaaggaatcccccgatggctcatcgcgttctcctcctcctctctctcgcgtcggccgccgcggttgccgccgccgtcgacgcggaggacccgctgatccggcaggtggttcccggtggagatgacaacgatctggagctgaacgcggagtcccacttcctgagcttcgtgcagcggttcggcaagtcctacaaggacgccgacgagcacgcgtaccggctgtccgttttcaaggccaacctgcgccgcgcgcgccggcaccagctgctggacccgtcggcggagcacggcgtcactaagttctccgacctcacgccggcagagttccgccggacctacctcggcctccgcaagtcccggcgcgctctcctcagagaactcggggagtcggcgcacgaggcgcccgtgctccccaccgatggtctccccgacgatttcgactggagggaccacggcgccgtcggccccgtcaagaaccagggttcgtgcgggtcgtgctggtcgttcagcgcgtctggagcgctggagggtgcgcactacctcgcaactggcaagctggaggtgctttcggagcagcagttcgtcgactgtgaccacgagactatcgctacattcatcagcaagatgcaatttcac

SEQ ID NO: 13441 - DNA, 1234 bp, Zea Mays
ggtgtaatatcgtatacagtaccggtttatattgcagaaatcgctcctcaagatcagaggggagctcttggttctgtcaatcagctctccgtcacgattggtatattgcttgcctatttgtttggcatgtttgttccctggagaattcttgctgttctaggcattttaccctgttcaatcctgattcctggactgttctttgtccctgaatccccaaggtggttggcaaaaatggggaagatggaggattttgaatattcattgcaagttctgcgaggatttcagacagatatcacagcagaagtaaatgaaataaagagatcattagcatcatcgaggaggaggacaaccataaggttcgctgatatcaaacagaagagatacagtgttccccttgtggttggaatcggtctccttgtcctgcagcagctaagtggtgtcaatggcattctattttatgctgcgagcatcttcaaagctgctggtattacaaacagtaatctagcaacatttggtttaggggctgttcaggtgattgctactggagtgacaacctggttgactgacaaagctggtcgaaggcttcttctcattatttccaccacaggaatggtcattactcttgttattgtttctgtgtcattttttgtgaaggacaacatagctgctggttcgcacttatactctgtaatgagtatgctttcactggctggacttgtggcatttgtgattgcattttctcttggcttgggagcgattccgtggatcattatgtctgagatccttcctgttaacatcaagagccttgctggaagtgttgcgaccctggcgaactggctgacagcatgggccattacaatgacggcaagcctgatgttgaactggagcagtggaggaacctttgctatctacgccgtcgtgtctaccatggccctcattttcgtgtgcttgtgggtgcctgagaccaagggaagaacgctagaggaaatcgccttctcattccgctgacacgtcgtcatgatctagtgttcataccaatgtacattgtacaatatgacgacgacgccatagcagaaaggcaagtgggtttatgtttgtacgatggactagtagcagaaagcactcgaacccctgtacgggttgcggaggagagcaatttatttgctgtattttcctggttcaataccggacacgttagaattttgaaaaataaaaatctgagcaaatttatcaa

SEQ ID NO: 13442 - DNA, 835 bp, Zea Mays
gtatatctttgtgctactcgtggtggactgatcacataaacaatggtgaaggctgttgctgtgcttggtagcagcgatggtgtcaagggcaccatcttcttcacccaagagggagatggccctaccactgtcaccggaagtgtctctggcctcaagcctggcctccatgggttccatgtgcatgcacttggtgacaccaccaatggctgcatgtcaactggaccacactacaatcctgcgagcaaggaacatggagcaccagaagatgagaaccgccatgccggtgatcttggaaatgtgacagctggagcagatggtgttgcaaacattaatgttaccgacagccagatcccactgactgggccaaactcaatcattggcagagctgttgttgttcacgctgatcccgatgatcttggaaaggggacacgagctcaggaagagcaccggaaacgctggcggccgtgttgcttgtgggatcatcggactccagggctgaactgaaacaaatggtcgttggacttcgggggcgcctgggagtgccgtcaccagcaggctagaataacatcccgaagacatcgtgaaataataataataagagcgcctgatatgtgatcagtggtgtactcgccattaagcacctgtggcaaccgatgagctgaactgtgttggactgttggctaaaatgctggttcgcctgagcatgtgtcacatgtctgtcggttttgatggcattccgaccgtttcgttgtgctttgcgcttacgtgcgtgttgctgcaaccaatggtggtgactcggttttgatacgcagtcggcgcactcggcagcaagccg

SEQ ID NO: 13443 - DNA, 612 bp, Zea Mays
cctgaactgaaacaggaggaaatcaggtcactcaggtactgcacatctttcagtggctacagctagaggccaccacagcaaactgacaaaccgcagcaacagatccatttctgcggccagtgctctcctatctcctccattcccctcgtctcttcgccatggtcgccatctccgctcacctcatcgccactcttccgtctctcccgacactccggccctgtcctcgccggcttcagccgagcgccttcgctacatccgaggccccgcaccgagcccccgcccccggcgtcgccctccgtggctgcagcaggcgttgcagcccttccgtaagaagatttcatgggtttcagaatgcaataagctttgggaaggagcacaacaggcaagccctattcgcttcaggcagaggttctcctagctccagtgacgatggctcgagttctcctgatggcccacctgtcctgaccattctggcaggtgtcaccgtgttccttcttgtcctctgggtcgttggatcggtcgttacctggattgtgggcttggtctttggcgctgcgaaatcttagaaggtggatgagcaacgatgttttgcatgccctgtttcttgctacc

SEQ ID NO: 13444 - DNA, 1774 bp, Zea Mays
tacggcacccgcactagagcacgtcgagctcaaacgaaagatcctcctccctcccaaaggtgaggccgttagccaggaattccggcaacaatgacttccctctcctccgcggtggcactgccgtcctcgtgccgggcccggccggcggggggcagccggagggcgcggatggtggtgacgcgcgcggcggcgtcgagcccgaagctgccgaacgggcggcggctgcgggtggctgtggtgggaggcggccccgccggtggcgccgcggcggaggcgctggccaagggcggcgtggagacggtgctaatcgagcggaagatggacaactgcaagccctgcggcggcgccatcccgctgtgcatggtgtcggagttcgacctgccgctcgaccttgtggaccgcaaggtacgaggcgcccaaagagccgaacggctcgtacgtggtgcactacaaccactacgacggcagcaacggcaaggtcggcggcgagaagcggtcgttcgaggtggacgcgatcgtgggcgcggacggcgccaactctcgcgtggccaaggacatgggcgcgggcgactacgagtacgccatcgcgttccaggagcgcgtcaagatccccgacgacaagatggtgtactacgaggagcgcgcggagatgtacgtcggcgacgacgtctctcccgacttctacggctgggtgttccccaagtgcgaccacgtcgccgtcggcaccggcaccgtcacgcacaaggccgacatcaagaagtttcaggccgccacgcgcctccgcgccaaggacaagattgagggcggcaagatcatccgcgtcgaggcgcaccccatccccgagcaccccaggcctaagagggtgtccgggcgggtgacgctggtgggcgacgccgcggggtacgtgaccaagtgctccggcgagggcatctacttcgcggcgaagagcgggcggatgtgcgccgaggccatcgtggcgggctccgccaacgggacgcggatggtggaggagagcgacctgcgcaagtacctggccgagttcgaccgcctctactggcccacttacaaggtgctggacatcctgcagaaggtgttctaccgctccaacgcggcgcgcgaggccttcgtggagatgtgcgccgacgactacgtgcagaagatgaccttcgacagctacctctacaagcgcgtcgtgccgggcaacccgctcgacgacatcaagctcgccgtcaacaccatcggcagcctcgtcagggccaccgcactgcgccgggagatggagaaggtcaccttgtgagccgccgcccgcgacgtcattgccgtcgaaatggtgtcgcagctgatcggccggtgtattagtagagatttgcggctgatcgggttaatttaggccaacatgcgtgggcagtgggcgcggagaggaagagaaacaagttgtgcaagtgcagcaagtagatcaaaagtgctgcctgtttgtatcgatggatcctgcaacatatagcatctggtgatgttgagaattcggagcagttcatcgactggattctgacgccggcaagcatcgacgtcaatgaatgtctaatacttagtacatcaagacatgtaataaaactgaaactcccccgttctggttctgattactgtaaccctaatccatgtatcttcagtttctgaactctggcgagaaagcaaatgtacagagactattggactgctcgtccaccaggcaccagctctcatacagaattcaatgcaaaaactgtgataaaatccg

SEQ ID NO: 13445 - DNA, 827 bp, Zea Mays
gtctgaagctggggagtccaatgtgtttcgccaggaaaaagatgctgcagtagatggggcaccatctgacactgatggagcagtggctgagacccgagaggaagaaacgacagagaatgttggtgaagcgacatttagctatgaccgcttgatatctaaatctaccgatccagtccgtgggatagattacaaacgcagagaggcatacttatctgatagtgagttccaaagtgtttttggcatgaccaaggatgcattctaccgacagccaaattggaagcaagaactacagaagcgaaaagcagatctcttctaaagagaacacgccttgtctcaagcgcctgctagaaaatgcgaccctctcgtcgtgaatggtcggtcccatgagagtaagtctcaatatattgctggttatttctgaggacgggctactggtggctttgctcggttgttttttttttgcaaccaattttataggccgattcttttatttgtacatggcctgggttgtgctgcttgcgaggtcctaagatgctcatagctttgtgttgtgactgtccatatgtgtatatcgttttttttcatcagtttgttacgtatgggcatatcctggtaggttgtcaattgtattgtcattcagatgtattgcacacgaaatacttgtgctgtctgtttgttgttgatggttggcagttgttttgtttgggatttgaaacacttgattggatttctctgcccgcacaagttttcgtgtggctttgcattcccccctcccttttcatagacaagcaacatgcaatgcttgtgacctgtcaagagaacataac

SEQ ID NO: 13446 - DNA, 269 bp, Zea Mays
  misc_feature (268)..(269): n is a, c, g, or t
ggggggggggggggaagtatttaaagaaggtgaaaaatgctcaagaagcccatgaagccattaggcccaccagtataaggaggccgccatcatcattggttggaatacttgatgatgattctctaaaactgtacactctaatatggaaaaggacaatggcttgccaaatggaagcttccagaactgagatgattcaagtggatgttggcattcctgaaggagagatgaattttcattccactgcatcaaaactggacttcaagggatnn

SEQ ID NO: 13447 - DNA, 774 bp, Zea Mays
tggacgatggacctgacacgggaacaaaatacagagaagataaagaggtcttcgagatcagcgcgaagggtgcttttatttttattatagtagcttcagttttcctcctcctcctgttctacttcatgtcatcttggttcgtttgggtgctaattgtactattctgcattggtggtattgagggtatgcatgcttgcttggtcacgcttctagctaggatttttaaggactgtggacaaaagactgtacaactccctgttttgggggaggtcttgatcttatctgttggaattgtaccattttgtgcggtgtttgcaattctctgggctgtgtatcgccatgcttcatttgcttggataggccaagacgttctgggtatctgtttgatgataactgtgcttcagatggcacgtttaccaaatatcaaggttgcatcggcacttcttagtgctgcatttgtgtatgacatcttttgggtgttcatttcacctcttatattccatgaaagcgtcatgattgcagttgctcgtggtgataacactggggaatcaattcctatgctcctaaggataccccgcttctttgatccatggggtggttatgatatgataggctttggtgacattatcttccctggattgcttgttggattcagctatagatttgacagagcaaacagaaagggtgtcttgagtggatattttctctggctaattgtgggatatgcagttgatcggtgggtggatgggtctcgtatccaggattttgcccctg

SEQ ID NO: 13448 - DNA, 789 bp, Zea Mays
accgcatgttctagatgcgatttgcttcatgctttttttgtccaaggaagaatgtgaccatttgatttcactggcaaagcctcatatgaagaagtcaacagtagttgattcagcaactggaggcagcaaggacagcagggtgcggacaagttcaggaatgtttcttagaagagggcaggacaaaattattcggacaattgagaaaaggatagcagattacaccttcatacctgtagagcagggtgagggtcttcaagttctccactatgaagttgggcagaagtatgaacctcactttgattacttccatgatgattacaacaccaagaatggaggccagcgtatagcaactcttcttatgtatctttcggatgttgaagatggtggcgagactgtgttcccttcgtcgacaacaaacagcagctcgtcaccattttataatgagctgtctgaatgtgcaaagggtggtctatctgttaaaccaaagatgggagatgcgcttctgttctggagcatgaagcctgatgggtccctagatcccacaagcctgcatggtggatgcccagttataaaaggcaacaaatggtcatcgacgaagtggatgcgtgttcatgagtacaaagtttagatacaaaaagacacagacctgaggtacgacattttgcttagaaaccaaaatactccttttttagtttgcctactgcaaaagtaatgctgggcctctaccttgcaccaacaatatccccggcatacattgatatgctcgccgtcagcttgaagatacatttc

SEQ ID NO: 13449 - DNA, 1241 bp, Zea Mays
cagtgtccaggctcttttccctgctcctgtgggctgtggcgagcgcaaaccagcctcgcttcccaaaccctagctcctcgctctcccgcccgcgtggcctgccaggcaaccacccccggatcaactccgtacagcgtgcctccgcctcccggactccagcggcggcgggatgtggtctcactccaaggacttgctcgagatcgagcccctcgagctccgattcccattcgagacaaagaagcagatctcgtgctctatgcagttgacaaaccgaacagatgactacatcggctttaaggttaagacgacgagcccgaagaagtactgtgtccggcccaacagcggcatcgtgccacctcggtccaccagcgatgtcattgtgacaatgcaagcacaaaaggaggcgccaccggacatgcagtgcaaggacaagtttcttgtgcaaagtgtcgttgtggcggaagggaccttagtcaaggacatcactggcgatatgctgaaggtcgtctacatcccaccacccaaaccgccatccccagtgcatgaggaatctgaagaaggctcatcaccccgaccttcattgtccgatggaattaacttgaattatcaagagacaacgagggaatctgatgagtcactgttgttctcggctgtaaaaactcatatagatcaaaaggactacacctccgagacatctgctttgatttcaaagttgacagaagagagaaactctgccattcagcagaacaataagcttcgagaggaactggaccttacgaggagggaagccaacaagcagaatggtggattctcctttgtggtcgtggtggccattgctctcctgggaatgctactgggatatatcatgaagagatagatgggctcataatgactcggcctcatgttagaccgttttcctcacagtattgaatattgtctaatgcacttatcacatgcacactgctactccatagcatattcatctggtgtcttacgtgatctgtttcgtgcttgggattgggatgactagtcaccagtcgcaacacaggctgtcaaacaatggtctgtgtgcttaatcttgttttagctgttatgttagtgtgtgcaactaaaactgggtaattaatgatgtcgttttggtcgaccgtttgtgtaacagcgaagtcaacttgctgtgggacagcttttgtttcatgactagaacttgccattgccgccaattaggcatgccgcaatttgtt

SEQ ID NO: 13450 - DNA, 746 bp, Zea Mays
gggagacatgcagagagccagagactgttggcgggtaatttcagttttacagagaggtttgccgtgaagtatgctggtgctgcggccatgtacatggtatctaagaaactaaagaagaaatacaacataactgacgagcgtgcttcattgtatgatgctgccaatacatggatcgacgcactgaacggaagagatttcctgggtggctccaagcctaacttggcagatcttgccgtcttcggtgttctgagacctatccgatacttgagagcaggaaaagatatggttgagaacactgaaatcggcgattggtaccgacgcatggaagacgcagttggagaaccatcaagaatacaggatgcagaaggaaactagaattttgacaacattcttttaaatactttagcggtatccgtgcctatgcatggaggctattcaaattttttgccagaatcaagtgtatgcaataatgctctgccagattattaagtatactagcacctgaggaacagtgtttgacttgggaacttggttgtgttactgtgtaaggttttgctcccctagctgttcacgtctgtattgtctgcgatgtggttttgaagattcagcatcagcgattctgctgtgccttgcatacagtttaaagaatttcggaatgctggatctgccgaagcgatagattcatggttgtttaattaattaatgacaatctcatgtggcttattgactgggacatgttccagtaa

SEQ ID NO: 13451 - DNA, 94 bp, Zea Mays
tcacaccaccgcagtaacgcaaaggaactaagggaatgtcaatatcataccagacccttgcttttgccttgaccatctctagcgcgagtccagc

SEQ ID NO: 13452 - DNA, 802 bp, Zea Mays
tggacacataatctgtggctacaacccactcttcgacttgttattcaatttaacgttgtccaattctgtgcaaaccaccagatcaccacaaagatacaaaggcgcatttatgggcatgccacagatgtggcgatcaggcctttggatgagcagaaagctgttcaagctgctacagatctcatcggggaagcctttatcttctcggtcgctgttgctgctctaatttttgaggttcagagaaacgcaaggtctgaggctaggaaggaggaagctcgtagacaggaacttgaggaattgaaacgaagggaagagagtatagctaaagaattggaagatcttaaattgaagcttagtgaaattgagcagcttgctaaagggcgaggcctgacaggaatcttgaacttgaaacgggtccatggcacagaggtcggcaaggcagcagcacctctgcgtgagtaagcaatccggctttggcgcaggaaagtatgattccttgtcgcccccattatttggtaagacttgtgttgtcgtgctcaacctattctttggtgctcatattggatccacatttgtagtggttgatccatggacaccctgagacagtggtaataatacagcgtaacaaagaaatcaaattaaagcgcaatatgtatgtgctacttggtggcggtgaccacaaaatcagatgttaagatggattagggcttgtttggttgtatacttaaggtgtaaaaaatgccacgtttcagattaaagctggttgtttggactgttgcaactataaacgatagagacaaaaaca

SEQ ID NO: 13453 - DNA, 2673 bp, Zea Mays
ctcgtcttcatcttcccacttcagcccccaaacccgaacactcgcaatcgcaagtcgcaaatatctgtcgccgtctcgccaacagcaccaaccgcctcctagaactcgaccgccatggcgagccaaggcgagccgtcttcctccgatccgaaggggaagaaggattactcgacggcgatcctggagaggaagaagtcgccgaaccggctggtggtcgacgaggccaccaatgatgacaactccgtcgtcgctctgcacccggacaccatggagaggctccagctctttcgcggtgacacggtcctgctcaagggtaagaagagaaaggacactatctgcattgtgctcgcagacgagacgtgtgaggagccaaaggtccggatgaacaaggtcgtcaggaagaacttgagggttcggcttagtgatgtggtatctgtccatcaatgcccagatgtcaaatacgggaagcgtgtgcacatacttccaattgatgacaccattgaaggcatcactggcaacttatttgatgcctttctgaaaccatactttcttgaagcctatcgtcctttgaggaaaggagaccttttcctagtcaggggtggcatgagaagtgtagaattcaaagtcatagagactgatcctgcagagtattgtattgttgcaccagatacagaaatattctgtgagggtgagcctattaagagggaggatgaggaaagactcgatgaagttggctatgatgatgttggtggagttagaaagcagatggcccaaatcagagaactggttgaacttcccctgcgtcacccccagcttttcaagtctattggtgtgaagccaccaaagggcatattgctgtatgggcctcctggctctggcaagacccttattgctagagctgtagctaatgagacaggtgctttcttctttttgatcaatggaccagaaatcatgtcaaagctagcaggagaaagtgaaagcaacctcagaaaggcatttgaagaagctgagaaaaatgcaccttcaatcatttttattgatgagatagattccatagcacccaagagagaaaagacccatggagaagttgaaaggcgtattgtttcacagctcttgactcttatggatggcctcaagtctcgtgcacatgttattgttatgggtgccacaaaccgtccaaacagtatcgatcctgctcttagaaggtttggtcggtttgatcgtgagattgatatcggtgttccagatgaagttgggcgccttgaggttcttcggattcacacgaaaaacatgaagcttgctgaagatgttgacttggagatcattgcgaaggatactcatggttatgttggtgctgatcttgctgccctttgtactgaagctgctcttcaatgcattcgtgagaagatggatattatagatcttgaggatgagacaatagatgcggagatactgaactctatggctgtctcaaatgatcatttcaagactgcacttgggacaagcaacccatctgctctgcgtgaaactgttgttgaagtgccaaatgtctcttgggaagatattggtggcctggaaaatgttaagagggagctacaggagactgttcaatatccagtggagcatccagagaaatttgaaaagtttggcatgtctccttcaaagggtgttttgttttatggccctcctggctgtggcaagactttgttggccaaggcaattgccaatgaatgccaagctaacttcattagtgtgaagggtcctgaactgcttaccatgtggtttggtgagagtgaggccaatgtccgtgagatttttgacaaggctaggcagtctgctccatgtgtcctcttttttgatgagctcgactccattgctactcagagaggaagcagtgttggtgacgccggtggtgctgctgatagggtgttgaaccagctgcttactgagatggatggcatgaatgccaagaagacggtttttattatcggcttcagatcttcaaagcctgtctcaggaagtctcctgtggccaaggatgttgacttgaatgctctcgccaaatacacccagggtttcagcggtgcagatatcacagagatctgccagcgcgcgtgcaagtatgccatcagggagaacatcgagaaggatatcgagagggagaggcgcagcaaagacaaccccgaggctatggaggaagacgaggtagacgacatcgctgagatcaaggctgctcacttcgaggagtccatgaagtacgcccgtcgcagcgtgagtgacgccgacatccgcaagtaccaggccttcgcccagacactccagcagtcccgcgggtttggcagcgagttccggttccccgaccaaccgacggcagctgctgctgcggccgatcccttcgcatccgctgcagcagcagctgacgatgatgacttatacagttaaattagcagtcctgtgttgtgacgcatattgagtactttgcttcgttatatgcttattatagtagactacgtgcaagacgcggagtcgctgtacctatataatacttaagttaatattttggtacgatcctctgaatcgtgccatgagccatggtttgtgttcatttgagattatcaaagatggccagctctaccattgtgaatgataaattttcgttcaatgagaagtttag

SEQ ID NO: 13454 - DNA, 587 bp, Zea Mays
gtgaattcttgtgttgtaaataactgcaagaagttcaaggagttggttgaggagatagctgagtcgcttacaaagaacgagggcaaggaaggtgaagatggtggttccacggctggattgctggcgaagctcactgtgagcgagggcaaatctgagggaagtggcaagtctgagtccactgattctggcaaagtgactgaaaccaaagccgacacagccccagctgagtagttggtgtggttgcacttgcacgcagattcgcctggtgctgaactagtttgtctgtccgcgtccagtggaagtttggtgccctttagccatggaatacgattgctatcatttgggcccgggccgagttggaggagtctcaggtgttcggtctggtttggtccgggcttgattttgctaaaaacttgggagtccatgggggttgggaacgtttgatatgtgagtcgctagtatttaactgcatggatcgttgtggattgcggtaaattcataaagtggaccctatatattttttatttcgttcaatacacattcatatcatcaatgatttataatggcagtgcctgtggggagacttg

SEQ ID NO: 13455 - DNA, 2993 bp, Zea Mays
ggccacgccaaggatggaggagcagccggtggctaaaattttggctggctccgcgggcgcacgtcgtttagcgtttccgctcgccttgggaccttgcccctggccctccgagatgccgggaccggccgtggaggcagcggccaggggcggcggctgctgcgggaagacggccggcaagtgggagaagacgtacctggatgtcctgggcatctgctgcaccgctgaggtggcgctcgttgagcggctcctggcgcccatcaacggcgtgagggcggtcaccgtcgtcgtcccctcccggaccgtcatcgtcgaccacgacacggccgccgtctcccagttccacatcgtgaaggttctgaacaaggcgggcctcgaggcctccgtccgagcctatggcagcagcgccggcgcccccgggcggtggcccagcccgttcatcgtggcctgcggcgtgctgctcgcggcgtccctgttcgcgccgctcctccctccgctgcggtggctggcggtggcggcggcctgcgtggggtcccagcccatgctgctgagggcgttcgcggcggccggcaagctcaccctggacatcaacatcctgatgctcatcgcggtggccggggccgtggcgctcgggagctacacggaggcgggcgccatcgtgttcctcttcaccgtggccgagtggctggagacgctggcgtgcaccaaggccagcgccgggatgctgtccctgatgtcctcggtgcccaagaccgtggtgctcgccgagacggggcaggtcgtcggcatgggtgacgtggcggtcggcacggtcgtcgcggtcagggccggggacgtggtccccgtggacggtgttgtggtcggcgggcagagcgaggtcgacgagagcagcctcaccggcgagtccttccccgtgccgaagcaggcgcagtccgaggtctgggccggcaccatcaacttggatggttacatctccgtgcggacgacggccctcgccgagaactcgacggtggcgaagatggagaggctggtggaggaggcccagaacagccggtccaggacgcagcggctcatcgactcgtgcgccaagcactacacccctggttgccgtggtcgtcctcgccgccggggtggtcctcgtgcccgtcctgctgggagctcccgacctggagcactggttccggctgtccctggtgctgctggtgagcgcgtgcccgtgcgcgctggtgctgtccacgcccgtcgccaccttctgcgcgctcctgcgggcggccaggatggggctcctcgtcaagggaggcaacgttcttgagtcgctgggcgaggtcagggtcgccgcgttcgacaagaccgggaccatcaccagaggcgagttcagcatcaaggacttccttgtggtgagggacaaggttcaaatgagccagctactttactgggtatctagcatcgagagcaaatcaagccacccaatggctgctgcacttgtcgagtatgcccagtccaaatctatacagccgaagccggaggacgtgactgagacttgcatctaccatggcgagggcatctatggggccatcaatggaaaacacatctacatcggaaacgaaaggatcatggcaaggtcctcgtgtcgtcaacaagaagctggccaccgagaaacagatggcctcaaaggcgtgtccgttggtctcgtgatctgcgacggcgatctcgtgggcaagttttcgctctccgacacctgcaggaccggggcggccgaggcgatcttgcagctgcgatcaatggggatcaagtcagtgatgctcaccggggacagcgaagcggcggccaagcacgcgcaggagcagctcggcggcgtcctggaggagctccactcggggctcctcccggaggacaaggtccggctcatccgggggctccaggcgcggcacggggcgacgctgatggtcggcgacggcatgaacgacgcgccggcgctcgccgcggcggacgtgggcgtgtccatgggcctgtccgggtcggcggccgccatcgagacgagccacgccacgctcatgtccggcgacgtcctgcgggtgcccaaggccgtcaggctcgggcgccgcacccgccggaccatcgccgtcaacgtggcctcctccgtcggcgccaaggccgccgtcctggcgctcgccgtcgcgtggcgccccgtgctgtgggtggccgtgctcgccgacgtcggcacgtgcctgctcgtcgtgctgcacagcatgctgctgctgagggacgcggcccgcgcgcggcggaggtgcggcggggcgtccaaggcgtgctgtgctacggcgtgcaaggcgcccaagacagcgtgctgcgctacggcgtccaaggcgtgtggcgcgacgacggtgaagcctgtggccacgaggccccagcccgcgggcgcagggaagaaggccgataggccaggaggtgacaagcatggtaatggtaaagacgactgccatcgttgctgccacaagcagagcaagctgcccgaggacgccgtcgtgatcgccataccggtacgagccgtggagcaccggaaggacgcggccgctcacgagaaggcggaaggcaacgccgccgggggatgctgcggtggcgctcccgcttcggccgcgtgctgcgcggaagcacacggtggcgaggacgaggtgtgcattgtcatcagcgcgaggtcgccctgctgcagcacggcgaggagtcggtctgcttctcccaaggacgccatgtgctgcggctccggtggtaaagacggcggcgccatctcagcccttgtgtgctgacctgacctacaacactagcatctgtggaatatcacgagtacgacttcgtagagtgctcttgtactacgctccccttagatcagttgggaatagtggctggcccattgtcagccttgtttttttttcatcaccgtcgccagcttgtgcgttgccatggtgaaatgaaaacagctgttcaattttcagctcctg

SEQ ID NO: 13456 - DNA, 207 bp, Zea Mays
ctcacaccccctccactggtcaagaacaggtaccgcgggatgtggcgcatggcagatgttgtgatgtgttcgtgagaggtctaggtcgtcgtctcccagtcaactttgggttgctagatcgttgtcttcatgtgatgtaattatatatttattctgtacagaactcctattatatagtaaagatgtgacatttgtttccataccact

SEQ ID NO: 13457 - DNA, 832 bp, Zea Mays
cctcacttatatatgagaaggaagaaaaacttgatggtgatgctgcattgaacaaattcttccgtgacatctacaaggatgctgatgaagatatgcggagggccatgatgaagtcattcgtggaatcaaatggcactgttctctcaaccaattggaaagatgttggagcaaagaaggtagaagggagcccccctgatggtatggagctcaagaagtgggaatactaaagtttggactgcccatcttttgtaaatccaggtcttggaaactatgacctaattccgtccacccatagtgccatgagcttgcttggttaagtctctgcttttgtaagctttctgtatgacagtctagcgtgtgtctgagtgctacttgccgtagcttttgatggacataggtatgctattatgtggtatcgaccgggaaccatctgtggtatcaaagacagcaaactataatgtatggaatgcctattctttttggtctaagatgtttttcttgtcagcgtagtgtgatcttcacaactgaataatagaaactatgcagggacctatgttacagtggtccaccgttggcacagttgcatttgcgtctctttggtggatgaattgaatttatgggaaaattgatttctacctggcatttatgcatcggcgttttacttggtttcaggtttcaggtatgttgcctggttcatgcgctcaatacagccaggtggcacctgaattataggagtacatgtacaaaactcaatgcgcaccgacttctcggagattacgcaagcacgatatacaacggaaattcatcagcccgttagttttcggggtcctgt

SEQ ID NO: 13458 - DNA, 653 bp, Zea Mays
gatttcccttgacagtaagcaaatttgctcagctactcaacaaaagaggtaccctggaacgggtgagtacgacaagttctttgaggagggcatttataaatgtgctggatgtggaactcccttatacaaatcatcgacaaagttcaactcagggtgtggctggccggcattctatgaaggacttcctggggccataaggcagacgccggaccctgatgggaggcggacagagatcacatgtactgcttgtggaggacacttggggcacatattcaaaggggaggggtttaagacgcctaccaacgagcgacactgtgttaacagcatctcgcttaagttcaatccgtcccccgaggaagcctgacggcagatgaactcccaatctgtaactcaacaacagaataaatttggactttgtttgttgctttcacattgtgtagagagctatgagatcgagtttgtcattcctcggatcatttcgaatatgatgtaaaaaatccaatcacaagtgctggtctttgttgataaatcaatgtacctcagttttagatgaataggccatgtatatgctcatgctcatacaacaaatcaactatcttcatgaagtcatcgtatccgcaggtacaggttatcaaacatgctaattttatggt

SEQ ID NO: 13459 - DNA, 1580 bp, Zea Mays
aggaagacgagcagggagagggaggtagggcaaaaggaagagaatccgagaataaattcagagagggagggagggagggccatgatgatggcaggcgtggcgtcgtaggtggttaaagcgaagggcgcccctcgtcgtccggttgcagagctgctgggtttcccagcatgtgtcatgtcatgcttagactacttggaagcggtcccttgggtcggggaagaagaggagaatgtggtctcgtctgtccggaacctgcagagcgagagctatggcgtcagtcctgtgctgaagagggtagcaccatctgatcgaacaaccccaccaaacgatacgttttcacatatcatcgaactggtcttgagaagcagcgaggacagggggcggcgcgagatgaaatctctggtgcagaagcttctgaaggagagtagcactggctgcatgagtgggtcttccgacctgtgttctgcggtcctctacagatcatgccggaactgcctggattccttactaatcctgtttcagcaagcaaccgacagtgatttcgctgagcaggctcttaataccaaagaaccagttttccgacaagttgctctagaagcagataacctgctctggttagctgagatcttggctgacaggaatgccgctgacgagttcgcggtcatatgggctagccaacgtgagctggctgggctgcactctaggttgccagtcaagtcgcgccaccttgtcagctgtgtcacggcgaggctgttcgtgggcatcgggaaaggggagatgcttccttcgaaggacacgaggcggcttctcttggacgtctggttgcagcctctcatggatgactacaactggttgcagcacggctgcaggtcgttcgaccggaaagtggtggaggaaggtgttgggcggaccatcctgacgctccctttggaggatcagcagacgatcctgctctcgtggcttgggagcttcctgaaggttggggacagctgccccaatctccagaaggcctttgaggtttggtggaggagaactttcgtaaggccctatgctgagcagcaaggtaatcgatcgcaatcaggtcggagttgagatgtcaattggttgcagaagaagatagtcttgtttcctagtgtagtatatttgatgagaagttagggtggcggtttcttcttgcgtggtagcccgcgtgggagatccccagtatgtggaggaaatgcggttagtactcttgacctgcgtgaggcttgaggaagttcgcgttgtgcttgtgatgcttcgtatgtatgtcaagatctctgaattctgggtgcagaatttgtatcgtcaggcatctgttttgatgctctgttctgcttctcacaacgttgcacgatgttaattaaggatctgttatgtaaaagaactcgacgccttcaatgcaactgtaaagattttgcagaatgtgttcttctaaagtggagacatatcggtttctatttgtgttgtatggatgattgtccagtttgaaacggtgatgtgtgttaggaaatgaatatctgatacattgattgagggctggaggattatgtataggatcc

SEQ ID NO: 13460 - DNA, 1691 bp, Zea Mays
ccatttcctcgcgtactatagtagggagctaggctcaataaattttatcaatcatgggaggacaacccagacattggctttgtcatgatgaagggcagcggccgagcattctgtgctggtggggatgttgttagattacatgaacttatcagtgaaggcaagctggaggaatgtaaggattttttcaagactttgtacatgttcatttattttctgggcacgtacttgaaaccacatgttgccattcttgatggcattactatgggtggtggtggaggtgtttccatccctggaacattccgtgttgcaactgataggacagtctttgcaactccagaagttcatattggattccatcctgatgctgcagcctccttttatttgtcgcatctaactggccatgttggggaatatgtggccttgaccggtgaaaagcttaatggaacagatatgattgctcttggccttgctacacactatttcatgagtggccatctggatctgatcgatgaacgacttgcaaagttagtaactgatgatccatcagttattgattcgtcccttgcacaatatggagacatggtttatccggacaaaaaaagcattgttcataggctggaggtgattgataaatgcttcagccatgacacagttgaagagattgttgatgccttggaaagtgaagcagccagctcaaatgaagaatggtgtatcttggcgctgaaacgattgaaagaggcctctccgttagctttgaaggtttcactgcgatcgatacgcgagggtagatatcagacacttgatgagtgccttgtccgtgagtaccgcatgtccatgaatggaatctcaaagcaattttctcatgaattctgcgagggagtcagagcacgactagtcgacaaggacttcactcctaagtgggatcctcctgcccttgagtatgttacgaatgacatggttgacgcatacttcgcacctcttggcgattcggagcctgagttgaagctgcctatagaatcgcgagaggcatttgtatgatcacaaatcattccaagaaccggatcattgcaaggaccggactgggacctgataaacgtgttataatctgtgtagccattatttttggcagcacaaccagcccgattggaccaactattcacgtgccgtatactcattcagactatcttcgctagcttacctatacatatattcaaactatactttagaaacagtgcaatgtactatgcaaaacggtgcaacagtgttttggttgaccatatgggtgtaacgtacagtagttcatctataaggtcaccaaaaacaccgtttttatactgtatattgtactgtctgtagagtatagtttgaatatcggtataagtacgagtaagctaccagagatgaggttttctgcggtgtgaaactcagcatatcatctgctgatttgttcacatgaatggaaacgaccagtggagtacgcgaatcatttctgatttggagtctgttcttcacgagggaaaccccgtctacaattctctggctctgtattccactgccactcacttgtcagcaatagcaggctgttgcagatgtttttccttttctttttgtttgtgcgactccttgcatcgaatcactagctaggatgacctaggtgcaacgttgataacatgaatataactcctagttgc

SEQ ID NO: 13461 - DNA, 3105 bp, Zea Mays
ccgcacacaagtcctcacgatatttagattcttatgcagctagttatacacgaattcaaattctatatttaaaaggagtaccaaacaggtccaatgtgtgtaataaaaagaaaaaaaaagattccagtagcagcagtaaagcccattcgtatgtggccctgctccggaccgaaagataaagcccatttgaaatccagctcggcctgctgtcagttcaggagcaggacgagtcggggtcggcgcggcggcaggccgcaggccggcagcaggctctcgcttcgctctctcgttgtctgtcgagaggaagaagacgaggcgagggacggcagcagtagcagctccagcatcttctagcttcttcattcatgggattcggtctctactaggattaggggtgcttcatttcatccgatccccaacgacttgacctgattctgatctcgacgacgatgcggaagcgggatctgggcatcctgctgctcgccgccttcgccatcttcttctccctccaccacgaaggcgacttctccttccgggagtcctggtaccacctcaccgacgaggacttccccatcaagtacgaggccgaccgcctgcccccgccgctcgtcgccgatctcaacggcgacggcaagcccgaggtcctcctccccacccacgacgccaagatccaggttctccagccgccccacgcccgccacctcaacgatgactccgccttccaggaggcccgtgtcatggccgacatctctctcctccccgacaacgtccgcctcgcctcggggaggcgccccatcgccatggccgtcggcaacgtcgaccgctcctacagacctggcgaggtcaggaagcaggtgctcgtcgtcgtcacctccggatggtcagtcatgtgcttcgaccataacctcaagaagctgtgggagcacaacctccaggacgatttccctcatgccgcccaccaccgcgaggtcgcaatctccataaccaattatactctcaagcatggagatgcaggcctcgtcatcgttggaggaaggatggagatgcagcatcattcagcagatctcttcgatgaatttatgataccagaacacaacatggatgatcgccgtcgaagcgccagtgagaaacagggctctgaggctggcaatgcagacctgcgccattttgccctttatgccttcgctggacgtagtggcgaccgtagatggagccggaagaatgagaacatccagtcacagccatcagatgcttctgtgatgttaccacagcataattacaaactcgacgttcatgccctcaatagtcatcaacctggtcagttcgaatgtcgtgaattcagagaatcaatccttggcatcatgcctcatcattgggataggagagaggatactaccctacaacttgcacattttaggaagcataaaaggaaacaagttaagagaacgcctggaaaggctgttattaatagcgtgaacaagcccattgaacacaatccacctgggaaggatgcttccaatagaatagctagagctcttgggaaggctgcagatatggctaactcaaataaagccaggaaggcacagaggatgcagtatgttccgacaatcactaatcatactcaagtttggtgggttcctaatgttgttgttgtacatgaaaaggaagggatagaggttgtccatctagcttctggacgtacaatatgcaagcttcatttaaatgaaggaggccttcatgcagatattaatggagatggagttctggatcatgtccaggttgttggtggaaatggtattaaagagcagactgtcgtgagtggatcaatggaagtgctgaaaccctgttgggcagtcgctacatccggtgtgccagtgcgggagcaactttttaacgtctctatctgccattacaaccattttaatctgttccatcatggtgacttctcgagaagttttgggaggacattgatacagctggtttagaggtcgcgactcctatcctggtccagacagacgatgggcataaacacaggagaggaagccatggtgatatcatctttttgacaagccggggagaggtgacatcgtactctcctgggctgctcggccatgatgcggtgtggagatggcaagtatcatcaggggcgacatggtccaaccttccatctccatcgggaatgatggagaacatagtggtgcctaccttgaaggccttctccctacgtgcctatgacccgaaagaggtgatcatcgccggtggtgaccaggaagcggtggtgctctctccttctggtggcatactggccatgatcgagctcccagcgccccccactcacgctcacctcctggaggatttctccggggacggtctcaccgacatgattgtggtaacttccggtggaatatatggattcgtgcagacaaggcagcctggggctcttttcttcagcacgctggtggggtgcctgatagttgtgatcggcgtggtattcgtgtctctgcacctcagttcgtccaatgccgccaaacccagggcttcctcgtctgaatacagatgatgttttgatatgcaaggccaataaataaacaatttccaattccgttcctggaggacgtctgcacggggaccttcccagcgggcgacggccggctgcatccatggcggtggccttcctgctgctgggattgggtttcctccttggcctcctctccctggcgatcgcggaggggctgacgctcctttgggccatccgaagcctcacgcgccgcacatcggcctcacgcagcacgccgccgccatcactccccatccacccgacgccggcgcggtctgtgtctcgccacagcctcaaccgacagggcttcttatggatgctggagcaacccaaggatagcagcatcaatggcgctagcccagggatcagagacaggaagctcctcgtcgaggttttccctgtaaaaatgtctgctacgcttcaaggacattccctcaccttgtctggacccgatgatgcctcgcagctaaccattgacctgctcggttgcacagttgctgctgtttctgcatccaatctgccctcacgtaaatgtacctgtttttttt

SEQ ID NO: 13462 - DNA, 98 bp, Zea Mays
ccatggctgaaatccataatcgtcggcgacggagctcctttcaaagttatacaggattccctccagctgatgggcgacggcacgatcccttgcatcac

SEQ ID NO: 13463 - DNA, 107 bp, Zea Mays
gcaatccgagacacaacatacactaccacatttttataaacacacatactcacaagtattttcgcacatcgaccaatctatacgaatcgtaaaccactaatctctaa

SEQ ID NO: 13464 - DNA, 584 bp, Zea Mays
atcttagttctcaaggatacatttaatgtcgaatctctcatcttgagtgttcaacaactgtacagaatatgtacacaatactgggatgacaagtataatacccaaagtgtttcatcagacgttcttagtaacatgcgggtgctaatgacagaggattctaacagtgatgaaagcggttcgttcttgttagatgataattcgagcatcccgttctccgtggatgatatcttgtcagatcatttattgatttgttgtatattttttggatcctttctaccacatgtgcctttttttagttatcttatccttttgagctagcttttgtaaaaattcatataggtatttgttagggttgggatgggattccgcccttacagttagaaaaggccttatcttttaaagcggggcaaatgattctttgtagggcaacatgaaatcaatctttttacccaagggtgtggtgagaaggggtagatgcaatgtttgtagcctcccagttatagattgtgtaaattatatactgtaaatcaacagtgcaatggaaaagaaaggaaagctatatagcaagtgcagttatgttgtca

SEQ ID NO: 13465 - DNA, 111 bp, Zea Mays
aagtcttccatcaaaacgactttcgcgtctcccggctatatcagtaacaggaccccaagaaacgaataagagtacatgtaagtggcaaggccgaccgagccgagggactcc

SEQ ID NO: 13466 - DNA, 73 bp, Zea Mays
gattgtttctttatttttaacattttggaccacgcttgcaccacgtgttttgtttttgcaaattcttttgtaa

SEQ ID NO: 13467 - DNA, 124 bp, Zea Mays
  misc_feature (124)..(124): n is a, c, g, or t
actaaataaagtcaggtggtgaaaccaaaaccattccaaatagaactaagttaaaatgtgaagaacattacatagccaagtagcatattgccacagtatatttgctttgaacaaaggaaacaan

SEQ ID NO: 13468 - DNA, 2104 bp, Zea Mays
agaagagagaagagggcgggcatcggccagtgggggctctgaggccgagggaggcgaggaaagcggcgggtgccgggccgcccgcgccggtgccgagccgcccgcgccggtgccgaggccctcaccagtcaccaccccctcccctcttccgtctgtcccccgcttgccgccaccgccgctgcccgctcgcgatccttcccctttttaacgctcccgcggccccgcgtcgtgctcccttttgtcgccgctgccttcgtgcccgtactcgcgggttctcctcgctcctcaatctccgcgcctgggcgcggcgttcgccgccggatctgggcgcgggacggtgccccggacggtcgatggcgcgggcggcgctccggttgggcgaccgcgcgctcgcgctcctcgtcctcgtgtcagtggctctgcttccacttgtcagttccgacgatggacacaaacactgcgagggtgttgtcaggggctgggcggattcctccacggggcgcgtgaaggacggggacaaactgagcctcaaggatttgctcttcttcctccacattcctaggactggaggccgcacctactttcactgcttcctaaaaaagctgtatacaaatgcgcaggaatgcccgcgttcttatgacaaactacggttcgacccaagccatcctgattgcaagctggttgttagtcatgatgactatagcttaacttccaagctgccaagggagagaacatctgttgtaacaatactaaggaacccagttgaccgtgtatttagcacatatgagttttcagttgaagttgcagctagattccttgttcacccaaacttaacttctgcaaagttaatgactacccgtgtgttaaaaaagtctcgtgctgtcagtactttggacatctggccttggaagtacttggttccttggatgagagaagatctgttttccaggagagatgccaggggtatcgacaaagttcatagtagtaagaaggttaatgcatatgatgtggaggatatggttatgccgttacatcagtacatcaatgatccagttgcccatgagatcattcataatggggctacctttcagattactgggttaacgaacaattcatactttgatggagcacatgaggttcgacattgtgccagaaagcatccagatcttggtcgtattgtgcttgaagttgctaagaataggctggaccagatgctgtatgtaggacttacagaggatcatgaagagtcagcgaggttgtttgctcatatggtaggagcacaggtgcttttacaatctgggacattgagtttggatctcaaggaagatctgcacagtgagactgactcacacccatccatggtggagcccggggatgaagaagcaagcgaacatctgaataacacacatggttggcaaaataatgaagccctgaactctaccagcgacgaacaaggaaaaggaaatatgactgtgggtaaactgatggaagcttatgaaacttgcatcgctaaactgcggaagtcccaatctagccgtcgtaaaatatcactaaagaaagtggaggaagcaaacttctcaaaagaggcacggaagctggtccccgaggcaattttgaaacaaattatctcgctgaacagccttgacatggaactttatgaccatgctaagaaaatctttacccaggaacatctgatgctgaaagctcagcaatccatggcggggcagcacagacagttggcggaacaagaggagggctggatcggcacgatgtgcagcgacgggacttgctctccctgggtggtggtcttgctgggtctagggatcaccacgatcctagttttggccacattagctgtaacgacgagaaaaagaacgtctaaacttaaggtttaaccagaacttttcatgagacaggtctctagattttggtgtacagtctgatgaatgccccttagcaatctttcggggcagaggtgctagcgtgcgcagaatcatcatgtactaactcgtgcggtcgtactggtatcttcacacaatttgagatgccgcggtggtagtgtggacgtgtagtctaaattgccactccataagaaaaaagcagc

SEQ ID NO: 13469 - DNA, 102 bp, Zea Mays
tgttctctcctgttgttcgtctcacttctatttgagttatgcttgcttttgtttctttatttgatttggagttagagcaacttgaagttaaaattgcatttc

SEQ ID NO: 13470 - DNA, 1006 bp, Zea Mays
gcttttgggttgaactggctagaaaagtaaagttgaagaatgtgtcatgggctattgcaggcttggctttaaagacaactaaaggttgttggcggtgatccacttctagagctacttgcggtcgattggttcaaagttaatgaacgctttgattcagttgccttacatcccaaaagccttgtgcaatcagaagctgcaaagaaacttcctttcatattggttataaatttgcaggtgccagcgaaaccaaattataacttggttatgtactacgctgcagagagaccagtgaacaaagattctttgttgggtagattcattgatggaactgatgcataccgagatgccagatttaaacttataccaagcattgttgagggttattggatggttaagcgtgctgtaggaacaaaagcttgccttctgggcaaagcagtaacgtgcaattatcttcgccaggataactttctggagatagatgttgacatcggttcatcatccgttgcccggagcattattggtctagtattgggatatgtcacaagcatagttgttgatcttgctattcttattgaggccaaggaagagaaagagctccccgagtacattctgggcactgttcgtctgaaccgtgtgaatcccgacagtgctgtatcaatctaattacgtttctagccgatctatgcaaatttactcttatcctcttttattctgagagaaacagcgtggcattttgaaaatgtgaaatagcattactatttgctgatccccaatcgagggtaacatatgtaaattggcatgaggcatgactacgtgacgcctttcgtaaatagaataaatcaatggttatgtaatattaatatcccatatacgcgtgtcataatctatgtggcttaaaagtggcatcaagtcatctagtttcctgtgttaacttcttattccttaggtagtcagacattaacagtgtgtttggtttgaggaatgaagtgatccatctttttctcac

SEQ ID NO: 13471 - DNA, 2288 bp, Zea Mays
tttttttgtggtactgattacaatagcgttgctccggttgaagcacaggggccccgactggtcgggcctctaccagcacgagggcaacttcctggcgcagcagcggctcgccgtcgtctccccgctgtccggcgaccagccgctgttcaacgaggaccgcaccgtcgtggtggtggccaatggagagatctacaaccacaagaacgtccggaagcagttcaccggcacacacaacttcagcacgggcagtgactgcgaggtcatcatccccctgtacgagaagtacggcgagaacttcgtggacatgctggacggggtgttcgcgttcgtgctctacgacacccgcgacaggacctacgtggcggcgcgcgacgccatcggcgtcaacccgctctacatcggctggggcagtgacggttccgtctggatcgcgtccgagatgaaggcgctgaacgaggactgcgtgcgcttcgagatcttcccgccgggccacctctactccagcgccggcggcgggttccggcggtggtacaccccgcactggttccaggagcaggtgccccggatgccgtaccagccgctcgtcctcagagaggccttcgagaaggcggtcatcaagaggctcatgactgacgtcccgttcggggtcctcctctccggcggcctcgactcctcgctcgtcgcctccgtcaccaagcgccacctcgtcgagaccgaggccgccgagaagttcggcaccgagctccactcctttgtcgtcggcctcgagggctctcctgacctgaaggccgcacgagaggtcgctgactaccttggaaccatccatcacgagttccacttcaccgtacaggacggcatcgacgcgatcgaggaggtgatctaccacgacgagacgtacgacgtgacgacgatccgggccagcacgcccatgttcctgatggctcgcaagatcaagtcgctgggcgtgaagatggtgctgtccggggagggctccgacgagctcctgggcggctacctctacttccacttcgcccccaacaaggaggagttccacagggagacctgccgcaaggtgaaggccctgcaccagtacgactgcctgcgcgccaacaaggccacgtcggcgtggggcctggaggtccgcgtgccgttcctcgacaaggagttcatcaacgtcgcgatgggcatggaccccgaatggaaaatgtacgacaagaacctgggccgcatcgagaagtgggtcatgaggaaggcgttcgacgacgacgagcacccttacctgcccaagcatattctctacaggcagaaagaacagttcagtgacggcgttggctacaactggatcgatggcctcaaatccttcactgaacagcaggtgacggatgagatgatgaacaacgccgcccagatgttcccctacaacacgcccgtcaacaaggaggcctactactaccggatgatattcgagaggctcttccctcaggactcggcgagggagacggtgccgtggggcccgagcatcgcctgcagcacgcccgcggccatcgagtgggtggagcagtggaaggcctccaacgacccctccggccgcttcatctcctcccacgactccgccgccaccgaccacaccggcggtaagccggcggtggccaacggcggcggccacggcgccgcgaacggcacggtcaacggcaaggacgtcgcagtcgcgatcgcggtctgacgagagtacgtgctcgcgcacctccctgctagcttctaccgggctgcagcctgcagcatgcactgtgcgagcacagccgatcagcgccaataaactggaggataagaacgactggtaggtgtgtgtgtgtgtcgtgcgtgcccaccggccatatcccggtgcggcagcacgtgctattgttacgtgttgtactgccgccagcgtacgtgtctgtgtgtctcgatcatatctgtacgtttttagatttagaagaaaaaaaaaaggcatgtccgtgtctgtatgtctggatcatatctgtacgttcttagatttagaagaaagaagaaaaacattatatacgtacgtccatgtctctatgtctggatcatatctgatttacagaaaaagtatatatgtccgtgtattcgtgcgagcaggcgtgacgcgctccgacaagcagtacagctcaggcattttccggccgagtgatatttgaacgcgacctctgaattgaactgccatacggattaatctacaattattatctggatttccgtgtacctgttcgcgcaagctgaaccttcga

SEQ ID NO: 13472 - DNA, 548 bp, Zea Mays
ctaaaaagctgcacaccattttggatgagatgatatcggggggacaggtgatcgaaacaagttcagaacagataatgaaatctgtggaagagattgaaaggctggagaaacaatcgagcacaaccagcttcatacccaagtcgattacagagcgttttacccgttgagcttccactcgtttccagaacaatgtgacatttaaggtgtgaacagaactgagatatactattcagtctcattttagttctccgataagaccttgtatgcccccgccccccggctgtattctgtaagcctgtaacctggatatgaatgcggcatctgcagtccaataatactgcctgcgttatatgcttgatcgtctgacagtgctcgctaaggtttagacatgccccagtaacaaattagcaatattcttatcctgagaactagtgtatccatggtgtccgagaaagaactagtgtatccatggtgaccagaatagaactcttcggaattaactaccatccttggggcatggtgctatcatcctgagaactattttggtc

SEQ ID NO: 13473 - DNA, 86 bp, Zea Mays
gcacctcattttggtgctcaacactcacgaactaatgatccccacgccacaaacttctcaaatagcgtgcgagaccagcccgctcc

SEQ ID NO: 13474 - DNA, 69 bp, Zea Mays
tgacaatcctcaataagaagtatagaagagctactttaacctataagaaggctgtgcccaccggcgctt

SEQ ID NO: 13475 - DNA, 1467 bp, Zea Mays
tgtggatgcctctcttttatttcgaccaaggtacgttaccagcgagttaaagaggggtttctcacatgatacgaagattcatgcctagcatcaccggtgttagctgttgtttatgccatcatgacgacaagaaatgaggatctaacttggcaaatgagggcaatacgagtgctacctatgttcattcttcctgctgtatcctctgtcatatattcaacagttgttaacttcacaaggatgtttgagcagaaagaccagaagacccttgaaaaattgagggctgagaggaaagccaagattgatgagcttaaagagagaacaaattattatctaacacagcagcttattcagaaatatgatcttgatccagccgcaaaggctgcagcagcttctgttttggcatctaagcttggggaggagactggcttaaaagttcatgttggagaagaaccaaagctggatgctgcagtggccagaagcaatgatgttgagatagtaccttcagatggtttgagaaacaggaagcaacccagtgcaagaggaagcaggactgggagccccacttctcataccccagcacagggaactgaaactaatctacctcctgctcctgctagtgctggcctggaaactgcaccagctccagtggtggtagagcatcatcaaggttcaggggctagtgatggtggtggatggattgcaaagattgctgccttacttgtgggggaggacccatcacagtcgtatgctttgatatgtggcagctgccatatgcataacggcttggcccgaaaggaagattacccacatgttacttactactgcccgcattgtcatgcattaaacacatcaaaacagtccatggggcaatactcaggctccaactcaggccggtcgacccctgttgttctggctgatggattatctacttccagttcagtacaagagactgaattgagtaacctgacgacattgcaggagctacccgaggaaggaaagacagacaagcaacaagtggaggcaagttgatggttcttatgacttgtactgttgatgtgtgtggaactagtttatctttagacttatatcgtcatgtgttcaactggtggagccacaaatttagcactgttgtaaattggaaatagtgagtgatatgatcctcggaagcatagcacgcaaaaacaagaaatgggacatggtgtacatccttgagtggatgattttttgttgtcatatagagcgcgaagtcttcttcctgcgagacaaaaagctatatgacgttcagacaagatggtggtgcaggatataacataagatcattgcttgttcagagaacagcgacatgtagaattttttgcgtttgtcttgaccttcggtcttttctttgttgtttgttacattaccaccttacagcatttcgtacacagtttccttatgatgttgaaaccgtacttttcatttggcgtt

SEQ ID NO: 13476 - DNA, 680 bp, Zea Mays
gtggggatcatcgccagcagttgctgtattttgggggttcaagcgcggctgtgaaggagagcttgtcaatgctgtaaatgaggaacaaaggaatgaaagccttatgaggttgtcatgggcccttgtgcactccaggcagacagacgatgtaaaccgtggaatcagcatgcttcaagcttctttggataattctgccagtcctctgcagactagggaaaagctgtacttgttggctgttggattctacaggattggcgactactcaaaaagcaggcaacttgcagatcgttgtttggagattcaagcggattggcggcaggccatatcgctgaagaaggcaatagaagataaaattgccaaaggtgagacaacatggtctgattggaataggaattgcgacaactgcggtcggacttctggttggtggaattgcagctgctgttgccaggaagaagtgaggccaatatattggatcggcagctcattgaactaggggagctcctgtctctgtaattccaacttttctgttgttaccttggtgatattacagttgaattgccactctttatatgtacgaagtgatcgtatgataatgataacaccattgtgacattatagctttcatcgatctgtcgttttattctcgccaaatggaccgcagtaacaaatatcaccatttc

SEQ ID NO: 13477 - DNA, 768 bp, Zea Mays
ctccagtagcgcacacgggatgtcttcaacgtcgcagtgtcggtccacaagaacattcagcagagagacatagaggtcggccggaacctcggaaacgcgatccttcgctggcttgatcgcatgaagccatcagcggagatccgcccccgtcttccaggcccaccaaacggcagcacggccgagcagttcagacatgtatcgagcgcgagcaggggcgcgggggcacagaagacctcctcctcctccaaagcttcgccccacgactccagcgggaagatgctgttctcgcgcctcaacattgggcccaagcacttcccggttctgcccacgctagcacagcccaacaggatcagcgcgagcagccagtgcaggcgcttctcctactcctacgccccgttcccgtcggtcactgccaggaggaagggtgtcttccgcgaggacattgcacagctgatggtgtaaggatctaaaatacttgccagcgatctcgtgtactgttttttttgtttttggaacactggacttagtgatttgcccagatcagatgtctgatgtgtcttggtttaataataaagaagcgagcgagcgcaggggaaattgtcactgctgctgcggtttaggccattagatttgtaaccaaatgctcagatgaacagcatttcgtgtttggtaatgaacaccagaacatgtgcactcgtttatgtgctaccctttgtctgtttcttttgaaattcttgtatttccggtgcgttgcattgcattgcatct

SEQ ID NO: 13478 - DNA, 135 bp, Zea Mays
ggaccgccgatttggggctagatttgggggaagaggagaacggggtagtatggcaatgccgtcgtccccgccgctgcggacgagtggaaagcggagaaggcgaagaagcaggacagtgtcgatgccgcggcgagc

SEQ ID NO: 13479 - DNA, 1768 bp, Zea Mays
aatggatctctgcgaccatctcttattgggtgtcctgcctgcagaaactacaagcctcactatgagagggttgcaaaacttttcaatggcccagatgctgcacatccagggactgttgtgatggcacgagttgattgtgcatcaaaggtgaacgtggatctttgcaacaaattctctgttgaccattatccttacctggtgtggggtccgccaacaaaattcaatttggctcagtggaaaccaaagcaagagaatagtgaattggaactaattgatgatggaagaacagcagatcggttactgaaatggataaataagaagatgggaagctcattcaatttagacgacaaaaagtatgagaatgaaagtatgcacccaaaaaatacttcagatcctgaacagattgttcgagcaatttatgacgttgaggaagctacatctcatgcattgcagataattttggagcacaagatgatcaaaccagacactcgtgactcgcttattagctttttacaaattttggtggctcatcatccatcaaagaggtgtcgaagaggatctgctgagctacttattgactttgatgatcactggcatacaaacctctcattaagtttggaagacagtactacactgttgaaaggtgcaggagagaaagtatgtggaaatggagtgccacgtggatactggattttctgccgaggaagtaaaaaggaaacaagaggatttagctgtggcctatgggttttgctgcattcactaactgtccgaatcggagatggagagagccaaacaacatttacatcaatttgtgatttcatccacaatttcttcatatgtgaggaatgccgcacacacttctatgaaatgtgttcaagtgtatcagtccccttcaaatctgcccgtgaccttgccctctggctatggaccgcgcataacaaagttaacgagaggttgatgaaagaagaaaaggagttagacaatgctgatccttcatttcctaagatcatatggcctccaaagcaactctgtccattgtgctaccgttcttctagtaggacggctgatggagccatgcaggttgagtggaatgaagatgaagtattcaatttcttggttaactactacgggaagatgcttgtatcatcctacagggagacctccatgcagtcctttcaagtagcctcaatttctgacgattcttccgcatccagtgccgcaacagtacctattggagctgccctgggtatcgcccttgctagctgtacatttggggcgctagcatgcttctggaggacccaacagaagaacagaaagtactaccatttacgttctttaaagaaaatttgactaaacattttaggcaaagaaagaactggaactgaatatcttgcaccacttgcaaaccctaaactgcatgtctgcatcagaagtagcctccgtgagtgtaaattttctggaccggttatcttgacgatgggcccaaaagagtcgaaaacagatgaaaaacatacagagtagatttagtagtgctgagtcacgtggtagtgttgcgcgacggcgcgaactttgttgcaacaggtaatacagattgaacgtgtaaactctgcccttaacatgtttctcggatacctttacctggttatcgatgtaatattatcaatttaatgagtgaaaacgctgtgccttactttattgctgagctgaaacttcatcgatgttgtatctgtcatcctaatggttgccgtactacgtccagtcgaaaaag

SEQ ID NO: 13480 - DNA, 662 bp, Zea Mays
tccgtgcccgtttgtgccatcatctcccgcgccgcgcgcgagtgcaacctctataaaagaagccacagtgcagcgtcgaagctcacaagcagcgagatctcgatcaaacagcttctctgatctcgctcagaagcgaggacatcagacattattgcaattgtatttgcacagcagcgagatctcgctcagaagagactctgaagagataacgagctgcgcttcttcgtcctcgatcaactagcttctctggtcgcttccatatggagagagctgcgtcaagctgcgctagcctcctagcacaaaggaggtgctactccgtggccgcggtcgtggtgaagggatgcgggcggaaggccgtggagaaggtggccaagcgcatcatgggcaaggaggtgaacaccgcggctgcctccggggagaagacgccgtgggtgccggacccagtcactggctactaccgcccggcgggtggcgccaaggaggtggacgcggcggagcttcgcgccaggctgctcaccaagaggatcgccaactgaatcaatctagctgcagagcagtgcggctgagattatttagcgccagttcatctcttgggcctagagcatgacggtgctgtatctttttgaggcataactagggaatggtcaggatcgctaacagtt

SEQ ID NO: 13481 - DNA, 1142 bp, Zea Mays
ggaacctatgccccgctggactgcactacacgtgggacaggccatcatcatccgtcgcccctcactcgatttcccatctgccgctccctcctggtctctgagccgctgatcgggtctccgacgcagggaagtgaagccgttccgccgtgaagcagcgccaccccttgccatccgcccgaccgctgggaagcagggcccacgtctccaagcttcctacaggaagagcctgcgcccctcccaaaggacaaagatattaggatggatgaagtcacacaagctgttgaaaatctgaagaaagaatggagccaagctgtttcacagcttgaggagagcattgctgcaattgaatcatgtggaaaaacagggaaaggaacagaggaagcaacttctcttccaaggttgaatggttctgcacaggatgctctgcagttgctcaagtccctgcagttccggcttgatcttctagctcagcagctacctacttttgatgaagtgcagtctgggcaagcaaccttagggtcgtgggatgaacaatacaagaagttgcgtgctagcctgaggaatgctaacttacaagcgaaagagaacattagaaaagctgctcaggaggagagggagcttcttctagggggtggagaagagtcaacaatccgtaggcgtaatctccagacaaaggttgggatgacatctgctgctgaaagtatcaccgagagcctccgacggtctcgccagatgatggttcaggaagtggaaaggagtgcaagtaccttggcaacatttgatgaatcaacaagtgttctccggaaggctgaaggtgaatatcaaggacaccgctctttgctaatgcgtacccgtggtttgctctccacgatgcaacagcaagatgttcttgataggatcatcctgaccatcggctttatcattttctccttggcggttctttatgttgtctcaagacgtattggtctattgacgctgcaaaggaaactggccgatgccatcagatccggttcattatcagccgatgacatcgtagcgaatgcccaacgtggacctgccccagcaaatgttcctgctcccatctacgatgaactgtgattcgtttgtcctctgtattgttaagcttcaaacatggacctctg

SEQ ID NO: 13482 - DNA, 814 bp, Zea Mays
ggacaagggtgaactcttgaattgtccagaagattactaacaatattcagtttatcttggaaacagtcatgctatctaacgttgtggaagtgcagggcgacaagctacgaaggcgtggtgcatgggagaattggctgcttccaaaacaaaattattctgctgggagttcttctggttcgttgccccctgtgacatctaacattgattctctgacgtctcagtttcgatttgttggactcgagggggcaacataccatgctaccatgccagtaatgcatggtgaagctctcttgacaagatcagcaacttcagttagtttaggttatcatgcatcaaccatgggtgggctaccgagcaacgggagtgaaccacttttggggccgaagtctgcaagaaatttactcaggagcgataccttttgaggctatatatttcaagatgaagaagtataacggcaggccgagttttcacagtgacggcctgcacactatctcgtgtgaggtgaagatcagttggtcaaaaaaaaaacaaaaaaaaagaggaaaagcataatataccaaaaaaatagagataggtatacacagaactgaaaaaaaacaaaaaaaggcaaaatacaaaaataaaaataaaataaaaaagcaagaggcaacttttgtgctggtactcatgccctttgtgttatgtggtcttagtgggtttgttttcgaatgttagcagtttgatggttctattgtgtaaaccggagttattgaagtgtcttggtatcattcggagactgctgagtggatgaagttatataagtacaagacattat

SEQ ID NO: 13483 - DNA, 3044 bp, Zea Mays
cctccctgcccccctttccaactagggtttatcactggccgggctcgtcactgcatagagttccacaagcttcgcggggcgatggtgtcgccgccggcctttgcggcggcggtcgcggtggtggccgtgctgctatgcgcctcggctgccgccaaccccgcaggcgggccccacatggcggacctgagcgtgctgttgcccccgcggatgacaaagcctgtcgagtaccgtctcatcggcggggatggatgcttctcctggtcatgggatcatcatgaccttatttcagttaaaccagagtataatgatagcagcagatgctcgactagtgctcgtttggcatcaattgccccatactctggccggagggagacttctgtctatgcgactgatatcatcagtggaatcacgatacactgcaaagtattcgtagacaagatctcccggatcagtattttccaccatgctgttaaaattgatctagatgaaattgctacattacgtatacatgccttcgatgatgaagaaaatgtgttctcgacattggtgggcttgcagtttttgtggcaccttaccccgaggttggttgataacagtagccatcatcttattcgtattccactgaaagaaacacatttgagtgactgtggtggcttctgcggtgatatgaatattcggtttgagctagaagacaagaatcttggttcagatttctctgtggtgaagggtattgagattggccaagaggttgttaaagctcagttgtttgagcctcagtttgaacatgtgattgacacaatcacattaactgttgctgaatccatgtcactagagccatcatcaccagttctcgtgactgttggtgttttggtgaagtttaaactcaaggtattccgacagaaagttgctcaagtggttaaattaccatcacaatatcatcgctggtatgcgacaaactcttctgtggcccaagtggattccttgggtatcttgcatgcattgagtctagggtttactaaggtggttgttgaagacacaagagtttctggtcatgaacaagtatcatctctacatgttgttattccacggacacttttcctttatctggtccctattatggatgattctgcccatcttcatgggattacaaacattccatcctcaaaagtatggtatgtttatcctggaagaaaatacatggtccttgccaaagcttttgcagagggatttgatgctagggaaatatatattacagaggaaaatgagcttaaactggagagtagtaccatggaattctggaacttatcgcaggtgccagacagttctacaagttcctatgaagtgcaaacttctagattgttaagtcctattttccaggggcaagggcatttagatgcttccttaacttacctaacgggggcatctggaccaacaaaggtgctcaagcttgtgcaagaagttaatgtttgtagtaaggtgaaggcattctgggatgaaggattggagaactccaacgttatttacctgccctgggttcctggagttcaccaggaagttgaaatgatggcaattggagggtgtggtaagacgctggatgactacaagttattttcctctgatgaggatgttgcttctgtgtctgattcccgtatcgtgcgtgcaaaaaagcctggtcaagctgtcatccgagtagtttctgctttcgatttcttgaattttgatgaggtaattgttgaagtttccattccttcagtactgtctatcttgccaatctttcctgtggaggtgcctgttggaacacgacttcattctgctgcagtgttaaaaacatctgctggacacccattctcacaatgtacccattttaatgcttttataaggtggagtctactatccgaggatgaggcctttcacattcttaacaccgctgaggcctcaagcatcgacgacataaaacataattctggttattggggacaaaatggcaatccttgtgcctgggtctctctgagtgcatttgctgctggcagatcaacaatagttgcaacatttgctgttgattcagattcagatattgagacatttggtggacccatttctctggaggcaacttcaaaaatttctgcatattatcctcttgtagttctccaaggggggaatggaaatcattttggtgggtactggtttgacttatctggaattcatagtaggattaagaacatggataacaactctcccaaggagctgtacttagttcctggatcaacaatggatgtccttatcttcggaggacctgagcgttgggaccaagttattgattttgttgaaacagttgatgttattgatccatccaaaaatcatattattagttctaccgctgtgaagaaactatctagtggactatatcgagtatcttgcctaagcaaagtgagctataaattgctgttttcacgtgggaacatggttggtaaagatcatcctgtgcctgcaatttccaaatcagagttcactgttatttgtgacttcccatcagaaataacattgatagcaaatgaaaatgaaaaccgacttgatatattggaagctgctaggaaagctgaccgtggtccagatagattgcaagcatcacccattgtaatctccaacggaagaaatatacgtctagctgctgcgagtatacatgtaaatggaagatttttcgctaattcatcttctcttcgcttgaaatgggaagccactggatgtgaagggcttgcttactttgaagaaaccaaatctgttgaaatgcttgatgagtcagcttgggagagatctcttgtcctacagaattctacaggagtgtgcactgtacgtgctacagttgatgacttttctaccaaatatgctggccaaactcatgaggaagaatacacattccatagtctcacagatgctattcagttgcagattgtttcttctttaagagtcacccctgaatatgtcttattagttttccatcctgaagcacaggaaaacctgattgtaagtggtggaacatgctccct

SEQ ID NO: 13484 - DNA, 431 bp, Zea Mays
aaaaaaaccaccggcccctagtcggctaatcttcaccttatcccaccctcgctatgcacatccaccactgcccatgctaggctcgctgcggtgccgcgtcatgccgcgcccgcgcaccgccaccagtgtctcatcacacatcaccgagctccgtcgagcgctggagaatggacatcagccacccccatccgaaggcttgcagcgcccgaagctacgccagagcaccacggacatcgacgcctctggttgcctttggtgcaatctatgctgaggtaaagaagaagacgtcgaggtggatctccaggagttccaggacgttgatgagttcgaggattaggctagcgacctcccccagtcagctgcctgtggtgggttgtttacgttggctacgtttcgattctgcgtactttgatttatattatgtaaatgac

SEQ ID NO: 13485 - DNA, 1244 bp, Zea Mays
taaaaatagagaaggaagtggagatcaaggaaatgaaggaacaaatgacagagctggtgggcattcttcgacacagtgaatcacgcagaagagaaatggagaagcagctcaagcaaagagaacagacaactccaatggccactacacctccgaaaagtggaaatggcacgacgaagcactctgctgatgaccccaacacaccactgtcccctgtcgccgttcctgcacagaagcagctcaagtattctgctggaattgtaaatagccccagcaaaggagttgctgcgataaaaaaagagcaacttaagatggttccaattgcacagttgtctgcggggaagagagtttcaatagcagggcattcaggaaagctctggaggtggaaaagaagccatcaccagtggctgatgcagttcaagtggaagtggcagaagccgtggaagttgtctgaggtgatacgacacagtgatgaaacaatcacgaggattaggcccagacctccacttcttccacataaacctcataactgatgtgaaacggacttgtttttgtctcaacaagaactgacacggtttgcaaacctacacagctaactgcctgcacaaggtaacaatgcagttaatactccatgagatctccttcgtgcttgtttttacttggccacgggatcgacaagtatgtgttcatgggtgactcttgtctatggatagatgtaaattccctgtgggttggtataaagtgagatgtcaacgtagagaaagaaaatagttagtgggtgagtgagcagagtgaatgggcattctttcatgcaaatactgagcacaatgcttaatgtttcagccttcactgacggtgacatgtcaatagttggtgttcgtcttcacaaaggaatctgtcaaaggaaggcgccttgtaaagtctttcttgtgctgttgtgtgatagttttgtgtgaagggtaactgaaagttgaatgggttttgtgctcgagtgatagtctattttcccctcttcttttgtttgttgatactaaaatgagaaaagacaagtgatattggtttggtttgctaggagtattgtgatgtaatgcagaaacttgttcccctatatcagtacacccttttaatctatgtattgtggagtactgattgctgactactgttgatgtccgaagggatccggattacacaccgcacgtcttcggttgacacacgacattaaatacagcagggaacatagaggatgg

SEQ ID NO: 13486 - DNA, 264 bp, Zea Mays
gttcttttaagtttgacatcttggattttccattagtctgatcttctcacagggttggtttgctgcctcttctggaatgtcatagcagttactacagcttggatcaagggggaaggtgttaagatctggttattggcaataatttacttcatatctggtgttcctggtgcatatgttttgtggtatcgtcctctgtataatgcaatgaggactgatagtgcattgaagtttggattgttcttcttgctttacttggtaaatata

SEQ ID NO: 13487 - DNA, 447 bp, Zea Mays
acaccatctctaggccgcgtctcgcctcgtctcgtcgtccgatcattatctccctgactcgcctcgtcctccagatatcggccgccaccttcacctccaccgccccggcgcacctgtgcgtctccatcgtcgccgcctctcctccttcggacacgactgaccttccactggcgccaacgaagaaaacacataggaagaagctcaccgccaaacctcatccagatccagtcgctgccctccgaaggccgcatacggaacgtctcgtctcttcctttggatccggcggtcaactccatcacccccagcttcacctcccttagtccccctccgtccgctctcacccaccgcttctatatcgccacctctctcgttgtagaagaagacactgaggatctggcgagctacgcctcgacgctttaggcttttagcccagccagacgaccgccg

SEQ ID NO: 13488 - DNA, 1914 bp, Zea Mays
cgcgccccacccggagacctgcacctgcacctgcctgcctccgtctcctcctccttcagttgttgccaccgcccttccctcccttcctctccgcgtcgctcgccgtcccatctttggcctggacacctggcctgcccccccttcgcggacgcgccgggtcgccggccgaatccgccctcccgccgctgccaacgtcgatctgcgcccgcccgcccgcccgccaagtgagattcaaaggtaggacgacgggggggtcgagttcttgtcggtttcattcctggccgccgacttcacatgtcaacaaccccaaggagcagaagccagggtagtaggaccactaggccgtggatcttgtcagggatggactttgctggttccagacggaagcctaatctcacggggaagattgccgtggctgctgccctcacggtcatgtgcataatcgtgttgaaacagtcccctagtttcagcggtaccagcgtgttctctcgccatgaaactggggtgacccatgtgttagtaacagggggtgctgggtatattggctcacatgctactcttcgtctccttagtgacaagtaccgagttaccattgtggataacctatccagagggaacattggagctgttagagttcttcaacggttatttccagaacccggaaggcttcaatttatttatgctgatttaggcgatgccaaagctgtgaacaaaatattttcggagaacgcatttgatgctgttatgcactttgctgctgttgcttatgttggtgagagcacaatggagccactcaggtactaccacaacataacgtcaaacacattgacagttcttgaggcaatggcagcacataatgtaaatactctgatttactcgagtacgtgtgcaacctatggtgaacctgatacaatgccgattgtagaaacaactcctcagaatcctatcaatccatatggtaaggcaaagaagatggcggaggacatcatcttagattttacaaaatcaaagaagcaatcaaatatggctgtcatgatcttaagatacttcaacgtgattggatcagacccagagggacggctaggagaagctccaaggccagagctacgcgagcatggacggatatccggtgcttgctttgatgcagctttgggaatcattccagggctaaaggttcgtggaaccgattactccactgcagatggaacttgcgttagagactacatcgatgtcacagatcttgtagatgctcacgtaaaagctcttggtaaagctcagccaggcaaagttggaatctacaatgtcggaacaggccaaggtagatcagtgactgagtttgtagaagcttgcaagaaggcaacaggagcttctatcaaggtcgaatatcttgcacgtagacccggagattatgccgaggtatacagcgatccgtcgaaaatccacatggaactcaactggacagcccagtacactgatcttggccaaagcctcgcccaggcgtggaaatggcagaaagcgcacccgaacggatatggaccagcctgattcagagttcaaagattgagagagactcgtcacgcagatccaaagggtccatgtgcagtcatgtagccttcagacagttggttcttcatcaccatagaaagatagcaaagagcaacagaagagtcctgattcttttattgcagcgctcgaagaaggaaaaaatatcacagagaaccccctacctgctccttgattagtttcaaatatatatatataggtcctcgttgacattttaatataatttgatgtgtgctgaggcgctatataataacacaaacgaaattttgttgtagacagggtagatcgatctcgtgtatcaacttttgtggtggtagaatgaaaggatataaataagttgatgtaaaaaaa

SEQ ID NO: 13489 - DNA, 1126 bp, Zea Mays
gagtattttggtgaccgtagcttatctaacctctgccgatcctcctttgaggatccagaaaccgaagttactggagagagtgctgcagatgacagtgctggaagcacagacgaaactccatctattattgtgacaacactgcaatcatacagagtagctctgattaatgatgatgacgcaaaagctgctgagatagaatcctttttactttctatcgaggatgagaagaactctcttttgaacaaaatcactgctctagatgtggaactagcaactcaacgagaacgtatcttgcggattagtgctgattttgacaatttcaggaaaaggacagaaaatgagaagcttaacatgatggaaaatgtgcaaggggaacttatagagagttttttgcctgttctcgataactttgaaagagcaaaaatgcaaataaaggtggaaacagagggagaggagaaaataaacaatagctatcagagcattaataagcaattcatcgagattcttaattcattgggtgttgaagatgttgaaactgttggcaaaccatttgatcctatgctgcacgaggctattatgagagaagaatcatcggagtatgaagaggggatcatactccaggaattcagaaaaggcttcaaacttggggaaagactacttcgcccagcaatggtcaaggtgtctgcagggccaggccctgaaaattctggagatgatgaccctacagttgttgaagatagtgtggcacctcaaaaggttgaggatgttgaagaagacggttttgatgacggcgatgcagaataggtggctggagcttcagctgtgaatcaacaagaacaggtccagaaattttgatgtttttctggagcgtgccaagcaggtaataggatagtgccaattcgttcaagctagagttaggtccccaaatgtgctgttctttactgctactgacatgggggtgttggtattgcgacaaatttgtgtttctacccgccgtggtcaactttttgttcttacgaaggggaattttcgtggttcatacatgaaaaaaaaaatgatatttgtaaggactaaattggctcagtttgctattgataatcaatatatgaattccattgtttgtaca

SEQ ID NO: 13490 - DNA, 98 bp, Zea Mays
ggatggggcggaggagagggaggcatcagtcgcggagaggatctcggagtggaaggcgtcagtcgcggagaggagagggaggcgtcagccgttggcag

SEQ ID NO: 13491 - DNA, 1204 bp, Zea Mays
tgtaaatccaggggagcgaaggaaaggcaaaggagaaaatttcgtagcaataaataaataaataaaattaataaaagaaaggtggcgtagaggataggaggagaaccaaggttgcgtctcgaaggttcttgcctcgttgggaagggatggcgtcggaggtggaggacgaggcggcgacgccgctgctcgccaacggtgcagccgacgtccgccggaggagggaccaggcgaaggcaattctgtccacgcaggccgtcaggatcgccaccaaggccgagcagcatgagcgcttcatctttaagaggttgttaagggaccctgaagtcatgacatcctacagggagctctcgaagaaagcacagaaagcgaacaacatctggtggaggctgagcggactgctgggtgaccggaaccggcaggtcatgtacatactgctccaggcgctgttcacagtggcaacaatggcactgaccgtacctatattcctgtcctaccggatgcacgtggtgttcctgatactcaaggtgtgcgcgtcgacatggaacggtggcagcttcatcttggaggtgatgcctcggcaagtagtgcagaagcagctgaagaaactggacatgaagcccatggaacaggggagctcgacacaaggtgcgccaggtggtgatggtggcacattgggtaaccaccaccagcacacatccgaggagcatatccaggagtgaggaaattgaagctggatgtaagattagattttgatgttcactgacacaacctttgttgtcatcgagtgcgctttgtgttggagtttttctttagttcttcccagtttgtgagttgtgacatctagtcatctataggtttataggctggacgatatggggtgagagattgtgcgtgcccatcttttgtcgggcttgggcaaagatatgtcgagatgtttactttctctgtagaatttcgtgaagctgttgcattgttcgtttgaagatggcgacgatgttcagatgatgcttcatgttgaaggacatatctttatttgcttcattgtacccagattttatttgcttcatgttgaaggacagactatgatgatgcgtgctgaggtgatttgcttattttatttgctgcgtgcaagaaaaggttcctgggagatgccctgtaaatgcagtgggtgaccacctgtgttgactgggaccaagtcagaagg

SEQ ID NO: 13492 - DNA, 675 bp, Zea Mays
gtggaagggcatcacattcatgacaagtaggcagggtcttggtgttggtggtggaacgccatatgggtttgacgtaggcaattctgagagaggcaatgttttaaaaggattggatcttggggttgagggaatgaaagtcggaggccagaggttgataatagttcctcctgaactggcgtatggaaagaagggtgtccaggaaattcctccaaacgcaactattgagctggatgtcgagcttctatcaatcaaacagagtccattcgggactcctgtgaagatcgttgaaggatagctttgcatagagttctgaaagaaatggtacatatctgcatggacagtagagtactagagtgttgctattgaaaaaggctagtttactaaaatatgctggttgtattctcttgatagtacactcttgtaagatttcgacttcactgaaacatagattttttttttcaccgcttatattcaacagttatctacgtgtctaaatcttaatttatggcttctgctatgtttgaacttcaatctactcttaacttatttgagagtaaaagatttttgttattgatgttatatttaataatgtatccttaccaatttcttcattacatgtattgcttagaagaatccttgtagtaaacatttagttgcaaagaaaaaaaaacataa

SEQ ID NO: 13493 - DNA, 731 bp, Zea Mays
ctcatgtgcaactgttctactccggtttgggttgatgatttggtggaggcgtccaagtcaatttcaacattgccttctatggttgagcgagacattcagaccgacactgtcaggaaaccagggagccatacaaggaatctgcttagagtgaagcgcgggattgatatggttaaagtcctgtttgagcaaattcttgtcacagaaggcaactcactaagggatgcagcatcggtggcttatgctcaggtctttgctcctcaccatggatgggcaataaggaaagcagtttctgctggaatgtacgcccttccctcaaagtcccagctgttgaagaaattgaatgaagatgaggaatcagcaaaggttcaaatgcagaactttgtcaggtcatcagctccagtaatctgctatgttgatgaccttttcacctcaaggaatttgggcatagattggtgaagaaaaatatggatacgtttgtttgatgtactaatccagtcagatggtgtgctgtgtgagctgggctcagaaaacctttttctggatccgtgtttccaagtcgtaaactaatataactacttagcgatcccgttctggagttatttgtgatgtttgcgcagtataaatatacgtgtcgacaaatataactacttagcgatccctgataatactggagttaggcgatgagaaaatatacgtgtcggctgattggaaaattttctagacatgctgct

SEQ ID NO: 13494 - DNA, 1285 bp, Zea Mays
gcagttttttgggtaacttctgttctgacaagaagtcagctgctgtgaactggatcgatggccgtgggaagtcggtggtttgcgaggcggtaatcaaggaagaagttgtgaaaaaggttctcaagacaaacgtacaggctctcgtagaattgaacgtgatcaagaaccttgccggttcagctgttgctggagctcttgggggtttcaatgcccatgcaagtaacattgtggcagccatcttcattgctactggtcaggaccctgcacagaacgtggagagttcccagtgcatcaccatgttggaagctataaatgatggcaaagatctccacatctctgttactatgccatctattgaggttggcacagttggtggaggcacgcagctggcctcacaatctgcctgcttggacctgcttggcgtcaaaggtgccaacagggaatctccggggtccaacgcgaggctcttggccacggtggttgcgggtgcggtcctagctggggagctgtcccttatctctgcgcaggccgctggccatctggtcaagagccacatgaaatacaacagatccagcaaggatatgtccaagacccttgcagaggaaacagacaaacccaagaaatgctgaataatatcaagtagttgttctatagccctttgggagaaaaggagcagaaagggtcgtacaggatgactttcttgcggcatgctcaggtggaaaggggggaaaaagaccttcaggcgaaaagagataattcagtcgccttgtcatatttaccaggcggtgagacctgttgtggatcctggagtatgacctatttaatttgttgatgttgttgttatagttcctctaccgtacttgaccccgtttgcatcttgttttgaccgtcccatgggcattggagaatctgaccatgggttttgtcccaagcttgcatcacactggggggacctctgctttgcggcggccccgtctcagaaaaaaaaattgcgctggtaactgccgggtactgtgtatttcagctttgaaacttttatccaatgcttttgagtcgaagagtcagtggactcgatgatgtggttgtaaagaaaaaaaaatgcttttgtgtggaagagtcagtggagtcgatgacgtggttgtaaagaaaaggtgtgcttcagaacaagagtacatcacgttgcctctctgctttctctgtagcgtgttcgtctcaattgcatgttccggttggctgggctgccccgtccacggatcaggtttataatataataatttaatacaaa

SEQ ID NO: 13495 - DNA, 1172 bp, Zea Mays
ctctgacctgcgggtccgcactccgcttgctcagccagctatgggccgctattgctgaaaagagtaaaaaaaccgacagccacagggcagggagccagggccgctccgctcctgctcctgctcctgctcctgctctctctctctctctctctctctcggcgtcgattgggcgaccgccgccgccgcccccaggtcttcgctgggcccgtcgccggcgacgagcacccaccaggttcggaaacattgctgacgttcacctgtaccacagtagttcagtcgagtagctgtcggactcggaacacacatgccggcgatggcaactgctcctgtgaaattctctgtggctacgaactccccatgtgtccagcctagcttgcccctgaggcgtacacctgccgccatctccttcccttgtcgtccatggtcagccgcaatgaactcatgtactggattgttgaggcgctctgacgtggttgcagccgcggggcaccagaagttgatgggatctttgaccactaacgagggactcaggtttggggtgggtgccctggaaactttcgagcgatactctgttaaagaagaaaatataacagttgttagtgttcccggaagctttgaggttcctataacagcacaaaagcttgggaaatctgggaaatttgatgcaattctgtgcattggagctgtgattagaggtgacacaacccactatgatgctgttgcaaactcagctgcatcaggtgtactcaatgctggattatctgctggtgttccttgtgtatttggtgttctaacctgtgaagacatggatcaggcgctaaaccgcgctggtggcaaggctggaaacaagggtgctgaagctgctcttactgccattgagatggcctctctgttccggcatcacttaggctgacgcttttgcgtattctggtttctatacacgaggcaagacatcatttcttcctatcaagagttttggctaatagagcttttccgccgcggctagtataattattttcaattctgttagtccggtgctgattggttgctttctttctatgagatttgaaaagctaacgagacatgtttgtaaacctggcacaatgaataattgtcaccatgaacaaaatatggtcatgaataaggttgcacacttcatgaattgtgagatc

SEQ ID NO: 13496 - DNA, 1153 bp, Zea Mays
cagatatgcaacattatctgactagggagaagatgttattgctatcctgccctgggaggaatggtgggagtttgaagtgacaaaggatgactcaaatcctcagattgcactgcttcctttgcatccagatctgcgggcaaaatttaatgagacagcagcttggatttatgcaaaaagcatggaggggaaaccttatgggtatcacaatatgatatttagctggattgataccatcagtgataattatccaccaccattagatgctcatgtggttgcttctgttatgactgtatggagcaagcttcaaccagagtatgctgctaatatgtggaaagaagcccttaacaaacggcttggaactaagggtcttgacctttctgaaatcatagtggaatcagagaaacgtgggataacatttgacaagttactatctgttcctgagaacgatagctgggtctatgaagatggtcagtcagcatcttgtgtggctttcgtccttatgatgtacaaggaggctggactctttgaccctattaccagctctattgaagttactgaattcacaataaaagatgcttatatcctcaacttttttgaggacaactcgacccgacttccggagtggtgcaacaaggatgacgatgtgaagcttcccttttgccagatcaagggcaagtaccggatggagctgcctggatacaacaccatgaaaccctatgcccacatgaacgagagatgtccatccctgcctccagattacaacaggactaagggctgctagtgctaaccagatatgcgtgtgcattttattcacgctcccttgtagccattgcttcagctgtaaatattatacatttatactagtataatagtactatgggggtatgtactgcttgcccttgagaagcgtgtattgattgtaggcaacttatgtgagacttcctcgaataaggaagaacatgaatcacacaaatgtacagtaaccatgcttgatctttttatcagtgtttacttatgtaacagtaaaaaatgtataatgtatgtgcgcctttggactgagctgattacatgatccccatgcccatatgcatgtgcctcccattgcggattacagagtgtaaaaagatttgactatgtggaagtaagcaatcgg

SEQ ID NO: 13497 - DNA, 604 bp, Zea Mays
gaattttattcgcatccttctctcagggttctttcagcagcactggcctcactatttcttctaaattaccaagattctcggacatgtacactctcacaatagcaagtgcggatccacagtctatctctgcaaacaagccagttcatttcactaagagcgtaacaaagtggtttacaaaggaaggagttcttgtggagggcctgttctggaaggatgtcgagaagctgattgatgactacaacagtgagcgcaagagtaaatgaattggtagctcgtgtctctggccatctggggagacatcgctgtctagagaaatccgtcaaagtttagcttaatctgaacaggcatttttgctatactgtaccggttgaccagtgaatgaatgatgttctagacattaactttggttccaagctttctgtcgtgtccatggataactatccgtccgaatcctagaaacgtggtccgtgcttgtaacctgtttgttctggtgcttccatacgccggagcagattttgaagagaaatgaaacaaatcgttaaatcacattatttcgttactgcggccacttatgcagggtttaagcgtacttccgaatagctta

SEQ ID NO: 13498 - DNA, 2414 bp, Zea Mays
ttttagcatcagcactagagaagaaaaactccctgttgaacaaataatcagcagaaatgttcctgataatgagccagttaagccaccggctttagacaacactccttttacatttgttgaagacctgaaaaccttggaggtgctagccacaaagctgaaggatgcaactgagtttgctgtcgatttggaacacaaccattataggtcgtttcagggtttgacatgcttgatgcagatttcaacaagaacagaggactttattgttgacactcttaagcttcgtaaatatcttggtgattatctaagagagtttttcagagatccaaccaagaaaaaggtaatgcatggtgcaggtcgtgatataatatggcttcaacgagacttcagcatatatgtgtgcaacctttttgacacaggccaggcttcaaaggtcttacagatggaccgcaacagcttggaacatcttttgcaccatttctgtggagtagctgcaaataaagaataccaagctgcagattggagattgaggccccttcctgatgaaatgatcaaatatgctagagaggatacacactatctgctatatatatatgacctgatgagattgagactagtgaatgggtcatcatgtgaaaatgatcttcttttagaggtttgcaagcgcagcaacgaaatttgcttgcaactgtatgagaaggagcagctgactgatacatcatatctacatatacatgggttgaaagaaaacgagctgaatgcaacgcagctgtcagttctttccagtctatatcgatggagagatggcattgcccgtgctgaggatgagagcactggctatatattacccaataagactctacttgagatagcaaaggagatgcctgtgacaagtgggaagttgaaaagaatgattaaatcaagaaattcgattttggaacgaaatctcaaccatgttattaacaatataagggatgccatagcagcttctggtgcttttgaaagtatagtggagcagctgaagaagggaaaactggaagagttaacattggcagatgtgaagaacagcagtgaggacactgaaatgattcctgctgttgatgttgataacattgaagatccgagtgatgaatctgctgtagttcctgcagtgattacaaatgtcggtgctgctccctgtattacaagcgaagcttccttgggtaatatgcatttagaggaccctgtgcctaaaacaaaggactcgggtgcttcatcagggtttactggactgacagacaacaaaaagctgagcaatgaccagcagcaagcagcaaaggctactgttcaagtatcaaagaggcctacagcttttggagctctgtttggaaaggcagctgctggaagaaggccagatcttttcctaggattttcaaatgttcagggtaagactaaggtggacaagataacgtcttccgtggtacttccttttcatcatttctcaggtggtgcaaaactttcatcagccgcccttccagcgaaagaatcgttgcattctgaaccagacagcatccaacacagtgatccagcttgtcagttggaagaagtgatacagttggacatgggaacagacgagcaacaaccaccagaaaatggcaacgaggatgatggacactgtgagactgaagacacggagatgtcaaagtccccttcaggtgacccgtctgttaccgagcaacgattccgatcactcaacgaagaaagaaacgttaagcagaaccagaagacacctcgagaattcgaatttagtgttccggtggtgccttttgattatgccgaagccagaaagaatctcgtgtctagtttgcctaaagctgagaggagaaaggacgatgccgttgccagggctataaatacagacgctggagataagcagaggggttcaaaaaagccaccaggtgggggagagaacgagggaaatttccagcatccacgaagacggcaggctttcccgccttcaggcaatagaaatgctacgtatcaccagtagcaagttgagatgtataactggcgaattggattattccaaaattgtgataaaagagtaccctacgtgttgtatatttggactggggatatctcggactcatgagaaaccaccgagactgctactgcaccgcggtgccctgacgtgttgctaacacgtgctaggtgactgagaatagttgggtattgcgttattttttttaatatgttctgaacatgagaatgccctagtatttcattaggatgtgtacattttacaatgttttatggacaattactgttgtatttttacttttgaactccagagccctgttttggtcacgcactacaattttcacctaaactcttttccgaacgtttactatattgggctgtttggatccctttattta

SEQ ID NO: 13499 - DNA, 98 bp, Zea Mays
tttgcccaggatggagtgcagtggcgtgatctcggctcactgcaagctccgcctcccgggttcatgccattctcctgcctcagccttccgagcagctg

SEQ ID NO: 13500 - DNA, 1598 bp, Zea Mays
aagcatgaccctcgacggagcgagggcccacggaacaccagccgtccgatccatatcgacggccagaaatatcggagaatgcccggaagaagtcttccttccaccaccaccacccttctctcctccgcatctccctttaccattgtctcccccctcgtccgacctcctcgccgccgcagacgaccgccgccgccgctgccgctgccgctgcgaaccctttgtgaatcttcgttgtccgggctgtgtggggcaggcatggcgctccggaggctgctgcaggggagcgtcctgccgcggataatcggcagggatttggcaccggccgtggcgccgttttcaacggagtccggggagaccattcgtgccacgctctttcccggcgatggcatcgggccagagatcgctgagtctgtcaagcaggtattcaatgttgcaggggtaccaattgaatgggaagaacactatgtcggtacagaagttgatcccagaacagagagttttttgacttgggaaagcctggagtcagtgcgtagaaacaaagttggcttgaaaggacctatggctacacctattggaaagggccatcgatctttgaatcttacattaaggaaagaacttgggctctatgccaatgtcagaccttgcaacagcctcccaggttacaagaccagatacgatgatgttaaccttgtaacaattcgtgaaaatactgaaggagaatatagtggtcttgagcatcaggttgtgagaggtgttgtggaaagtttgaaaattattacacgccaagcaagtttgagagtggcagagtatgctttccattatgccaaggccaatggccgggaaagagtctctgcgatccacaaagccaatattatgaggaagacagatggtcttttcctcaagtgttgccgtgaagtgtctgaaaagtaccctgaaattcaatacgaggaggtcatcattgacaattgctgtatgacgcttgtgaagaatcctggtctttttgacgtattagtgatgccaaatctctatggtgacattattagtgatctatgtgctggtttgatcgggggcttgggcctaacacccagttgcaatattggtgaaggtggcatttgtctggcagaagctgttcatggttctgctcctgatattgctggcaagaacctcgcgaacccgactgctcttatgctgagtgctgtcatgttgttgcgccacatgcaattcaacgacaaagcagaccggatccacaacgccatcctccagaccatcgccgaggggaagtacaggactgctgatcttggtggaaaggcatcgacatcagagtttacaaacgcagtctgtgatcacatctgagaaacggatgtgattcttccttctgattgttttgtcatcctaatatttttttgtcacatatgagaggagctttagctttaagaggttaactggcagcacctcgaacttctttggggtgtttaacacggtttgagaccgtcaaataattttgtcacatttcttgcggttcagaaattctttcaacattggaatggagccaagaattgtctgtaataatcaacatcagcattataacaaaaaaaaca

SEQ ID NO: 13501 - DNA, 1682 bp, Zea Mays
tggctgagtttatgggtcctgggcctccattcggtagtcaattttattgggctggtccggcctacaccgacgcccttatataaatcccgaaccctagaaggcagcaccttcctccccaacacgccgccgtcttctgcggttctgccgtttactcttccactttggcctcctctcttgcaagtttaagcttcgcctccagccatgggtaaggagaagtctcacatcaacattgtggttattggccacgtcgactctggcaagtcgacaaccaccggccacctgatctacaagcttggaggcattgacaagcgtgtgatcgagaggtttgagaaggaggccgctgaaatgaacaagcgatccttcaagtatgcttgggtgcttgacaagctcaaggctgagcgtgagaggggtatcaccattgatattgctctgtggaagtttgagaccaccaagtactattgcaccgttattgatgcccctggacaccgtgactttatcaagaacatgatcactggtacctcccaggctgactgtgctgtccttatcattgactccaccactggtggttttgaggctggtatctccaaggatggccagacacgtgagcatgctctccttgcgttcacacttggagtgaagcagatgatttgctgctgcaacaagatggatgcaaccactcccaaatactccaaggcacgttatgatgagattgtgaaggaagtctcatcttacctcaagaaagttgggtacaaccctgataagattgcatttgttcccatctctggttttgagggtgacaacatgattgagaggtccaccaaccttgactggtacaaaggcccaaccctgcttgaggctcttgatcagatcaccgagcccaagagaccctcagacaagcccctgcgtctccccctccaggatgtgtacaagattggtggtattggaactgtgccagttggtcgtgtggagactggtgtcatcaagcctggtatggttgtcacctttggtccaactggcctgactactgaggtgaagtctgttgagatgcaccatgaggctcttcaggaggcccttcctggtgacaacgttggcttcaacgtgaagaatgtcgcggtgaaggatatcaagcgtggttatgtggcctccaactccaaggatgaccctgccaaggaggctgccagcttcacctcccaggtcatcatcatgaaccaccctggccagatcggcgttctggcaaggagcttgagaaagagcccaagttcttgaagaacggtgatgctggtatggtgaagatgattcccaccaagcccatggtggtggagacattctcgcagtatcctcccctgggtaggtttgctgtccgtgacatgagacagacggttgctgttggagtcatcaagagtgtggagaagaaggacccgaccggtgccaaggtgaccaaggctgctgccaagaagaaatgatgcgacctgtcgttgatgcagcgtctgcttttccaatacgtagctgagatgttccattttggcataagttttgtatgctgtggttgctgacttgctgttaccttgtgaactgttgagctctactattgggtgcccgtttatctgtttatgtagcatcttgttatttcacctattgcaatacaagaatgctatatatgacatatagtgagaaaaaaaaca

SEQ ID NO: 13502 - DNA, 3037 bp, Zea Mays
cggacgtccatcaatttgcacactctagcagaaatgggggatgcgtgtttctcaacacagctaattgatggagatggggtcttcaacgtctctggattggagaacttcatgaaggatgccagattgggtgaatgcgggctctcctatgctgttgtatcaataatgggcccgcaaagtagtgggaaaagtacacttttgaatcatctttttggcaccaattttagggagatggacgccttcagaggaaggtcacagactaccaaaggtatatggttagcgaaggcccagaatattgaaccgtgcacccttgtaatggatttggaaggaactgatggaagggagaggggagaggatgacacagcatttgagaagcaaagtgcattgtttgctttggccgtttcagacattgtgttgattaatatgtggtgtcatgacattggtagagaacaggctgcaaacaagcctcttttgaagactgttttccaggtcatgatgaggttgttcagtcctcgtaaaacaacattgttgtttgtcattcgtgacaaatcaaggacacccctagaaaatcttgaaccaattttaagggaagacattcagaagatatgggatgctgttccaaaaccccatgcccataaagaaactccacttagcgaatttttcgatgtacaagttgtggcactgtccagttatgaagaaaaagaagagttgttcaaacagcaggtttctgatttaagagataggtttcagtattctatcgctcctggtggacttgctggggatcgtcgtggtgtcgtcccagcttcaggattctcgtttagttcccagcaattttggaaagtcattaaggagaacaaagaccttgatctgcctgctcataaagttatggttgctactgtacgttgtgaggaaattggtaatgagaaagtcggcagttttacatctgatgaggaatggcaacaattagaggaggctgttcaacatgactttgttcctggatttgggaagaagatcagcagccttcttgatagatgtttatcagagtatgacatggaggctatttattttgatgaaggtgtcagaagctctaaacggcaacagcttgagtctaaactcctacagcttgtcaatcctgcctatcaatctcttctaggtcacttgcgtactagaactttagaagcatttaatgagtcctttgacaaggctctagaaaaggagggatttgctgcagccgctcgcaattgtactcaaactttcttggagaagtttgataaaggatctgaagatgctgctattcaacaagtgaattgggacacctcaaaagtgaaggataagcttagacgtgacattgaggctcatgtagcttcagttcgagctgctaaattatctgaactttgtgccaaatatgaggcacaacttaccaaagctctggcggaaccagttgaatctcttctagattcagccagtgaagatacgtggccagctattagaaagcttcttcaacgcgagacaaaaactgccgtttcaggtcttcaatctgctgtgtcagcttttgaacttgatgaagcaactgagaaagaactgcttgtgaagctggagaagcatggaaggagtgttgttgagtcaaaggcaaaagaagaagctggaagggttttgattcgcatgaaggacaggttttcaatgctgttcagccgagatgctgactctatgcccagggtgtggacaggaaaggaggacataaaagctataactaaaaccgctcgctcagcttccatgaagttgctttctacaatggctgcaattcggttggaggaggatggtgataacattgagaacactctttccgttgctcttgttgacacctcaaaacctgggactactgataggagtatccaattgaccgatccacttgcctccagttcatgggaaagggttggcgaggagaagactttaattacccctgtgcagtgcaaaaatttgtggaggcaattcaaggctgaaactgaatatacagtgactcaagccttagctgctcaggaagcaaataagaggaacaacaactggctaccacctccatgggcacttgctgcaatggctattcttggattcaacgagttcatgacattactgaggaacccgctttacctgtttgccatatttgtgatttatctcgttggaaaagccatttgggtgcaatcagaaatcggcagggaattccaacacggatttcttcctgccatcctttcactgtcgacgaagtttgtgcccactgtaatgaacatcctgaagagattagccgacgagggtcaagcacctgcagccgccccagagaggcagagagagatggagctccaaccaaaacccaccaggaacggttcttcatacaccaacgcgacgtcggcggggtcatccagcgtaaccacttcggagatcggacctgagtattcgagcccggtggcgcaatgatttagctgacctttagcctttggctggaagcccactctagcgcagttgagggaaacagggtgcctctcgagaacataggaacttaggaagattttaaggacagtcaggtgccttgcagttttttctaagcctgcccttcccccaaactgatgcaaggtggtgatggggtggcactgcccatcactattatttaaggatttttgggggctgggggggttgtttgtaagagcattgtagaatgatttcgtttaatttttttggtttctgtaacatgaatacatgatatgtgatggttgtatagaagatctggggggcgtagtagtgcccattctacacagcttatactgggcagggggttgcatagttgccagaagcttgtacatgtctttaaaccgccatcggattgcgatggagtagtattactggtgttctggaataacacggaggaacgtgttgtgacttggcaggccgttggtaactggctgttctcattcggtagttttgacgcgtgcctcgaaccgattcatatttgagccccatctggcgcagattggcagcgtttttaagaggcaga

SEQ ID NO: 13503 - DNA, 1161 bp, Zea Mays
gcctttttttcttcgtctcctcattcctcaaagagccggaagccttctccgttctctccgtttttccccttcgcaaaagacccctcgaaaaacggcggcgctgcgacatggcggaggtcgaggctccagctactgcggtcgaggctccagctgctgcggtcgcgacgacgacccctgaggtggcggcgcccgaggccggagccgctacggaggcgaagggtccgcacaagcttcaccggcagtggaccttctggtacgacatccagacgaagaccaagtccggggctgcgtggggcacctccctcaaaaaggcctacaccttcgacaccgttgaggagttctggagcatgtatgatcagatttttcgtccaagcaagttgtctgggaatgctgattttcatctattcaaggctggagtagagccaaaatgggaagacccagagtgtgcaaatggtggcaaatggactgtcccatgcaacagaaaggcaacctttgagaccatgtggcttgaaacgttgatggctcttattggggagcagtttgatgaaacagaggacatttgtggaattgttgctagtgtccgtgcaagaggagataagctggcattatggactaggactgccagcaatgaagctgtccaggtaaacattggcaagaagtggaaggatgtcatcgactacaacgacaagatcacgtacactttccatgacgactctaagagagacaagcccagcagaggtgggcggtacaccgtgtaagctggacgtcaagaaggccgttgctttggattggaagtggagagcggaggtggggattttcttctgggatcgtcgccgactttcgtttgattcagcttttacacgaggcagttttcgccgctattacaatgttattttcctctcagacagcttatgtggtacaagaaagagacgttggagacattgacggtttctgtatggcactagatttctatcttaatatggcccccccggttcagtagcaaccccaacgagtcatttgctttttggagatccctgcaatgcatggccatgttttagatcttatatatattgtactgtatataaaacgtttgtgatctgtggagccattggcaccttgcatgcaaatgtgccctgtcggtaaggtattggcattttgtgt

SEQ ID NO: 13504 - DNA, 735 bp, Zea Mays
taacgacgacgcgccggcgcaaccgagggcaccaagcagagccggagcgagaagaagagccgcaaggccatgatgaagctcggaatgaaacccgtcaccggcgtcaccaggataaccatcaaaagagccaagaacatactgttcgtggtgtcgaagccggacgtcttcaagagcccgacgtcggagacgtacgtgatattcggcgaggccaagatagaggacctgagctcacagctgcaggcgcaggcggcgcagcagttcaggatgcaggacctcagcaaggtgatggccaagcaggacgcggccgccgccgcggcggcgccggccgacgaggaggaggaggtcgacgaggccgggatagagccccgcgacatcgacctcgtcatgacgcaggccagcgtcacccgcgccaaggccgtcaaggctctcaaggcgcacgacggcgacatcgtcagcgccatcatggagctcacggcctgatcatgatatgccagtgcatgccggccgtacggccgtttcttcctcgttattgcagtctgcttcgctcagcgtcgctgttcatttttgggatttgcatacaagacgagctttgaataagagatgtactgtttgttcaccatatgaacgttgttgcatcatgtcagtttccggattattattattgccactccttaagttgttatgattatttgattctcatttgcacatttaattggcttaagttgttaaggtaag

SEQ ID NO: 13505 - DNA, 1573 bp, Zea Mays
aggcttgcttgttggtcatgaagtagcgagaccgtgatagctactggaagatgatgcacaaatacataggatcagatgttacatcacttgtgacacttccagtcataatttttgagccaatgacaatgcttcagaaaatggccgagttgatggaatactgtgaattgttagacaaagcagatgaatgtgaggatccatacatgtgtatggtttatgcttctacatgggctgtttctgtgtactttgcatatcaacgcacatggaagccttttaatccgatccttggagagacttatgagatggttaaccaccagggcattacatttcttgctgagcaggtaagccatcatcccccaatgggtgttgctcactgcgagaatgaacattttacttacgatatcacgtctaagttgaagaccaagtttttgggaaattcagtggaaatttacccagttggaaggactcgagtgacactaaaaaaatctggtgtcgtgttggatttggtgccaccactaacaaaggttaacaacctgatatttgggcgcacttgggttgattctcctggagagatggtcatgacgaacctgacaactggagacaaagttgtgctatatttccagccatgcggctggtttggggctggccgttacgaggtggatgggtatgtgtacagtgcagcggaagaacccaaaatcatgattacagggaagtggaacaagtccctgagttgccaaccatgtgaccaagaaggcgatcctcttccaggcacggagctgaaggagatctggagagttgctcctgccccacagggcgacaagtatcagtacacacacttcgcacacaaaataaacagcttcgacacggcacctaagaagctgttggcatctgattcacggctgaggcctgatagatatgccctcgagaagggtgacatgtctaagtccggggcagagaagagcaggctcgaggaacaacagagagctgagaaacgaactcgagaggccaagggcgagcaatttactcctagatggttcaacctgacagatgtggtctcccctacaccgtggggtgacctggaaatttatgaatacaacggcaaatacacagagcaccgggctgccatagaccgctccgatgtcaccgacgagacagatgtcacttcagtcaagttcagcccatggcaatatggtagctcatcttcccaatgattctccgtggccagaagccgccatgcctacgcgcattgtgtaaaacacttccaggcctggctttgctggtttgttgtgccatcagcggtttccttgcccttgtagtattgtggccttcccccttttttcccttaaatgctacagttattcaggaagtggtgtagtccgtgtactgtcgcaagtctagcgagattgcagagttttgttgaaccgttgtgctgttgtatttatgcgagataactgataaccgaaggtaacgaacgacacagatacggatggaatcatggagctggagcagaacatatgtgcaatgtgctgcctgcctactgcagtgtgtccgtgcaacagcagagatcccatcacag

SEQ ID NO: 13506 - DNA, 542 bp, Zea Mays
ggccgatcggaatgttcggtgttcacgcgtgcatgcaagcatggtgaccggagaaggtgtcaggattcagcccaacaccagcaagctggaggacttggggttcagattcaagtacggagtggaggagacgctggactgcagcgtcgagtgcgccaagaggctgggagagctctagatgcatgctacacatgcatgcgcagcattggaattcagcgactgtgatacgagtaagtatggtggtatcatgttaatacgtgtgtatattgggtcgattcatcccaccagagtttgaactgttccatattcccatctgtttcccgtgatcataaaataaaaacagtaaaatacatcaacggtcatcaaacttaacatgttgtattacttgggcctctaaagccttaaaaacagaaaaacggatgctagacatgatgacacatctaaaatcaggtctgctgaaagtggatgccaacttaatgtgtcatgctagagtcacttgaatcctcgagtgtgagcagtcgtcctccccatccttccaactacta

SEQ ID NO: 13507 - DNA, 116 bp, Zea Mays
gagcgaatgaacaaactcctgcatctcaacagcaggggaaatccaatctccaatttgagagctaatcagttgtttttttaacactaaaaagctccaaggcttcacctttacacaaa

SEQ ID NO: 13508 - DNA, 1133 bp, Zea Mays
ttttttcttaccaactcttttacggtttctatttgacaaaaactgtccagactacaaatattatgagtttcagcttgctgaagaggaaagggctcttgctcagtcaaaggaggctgaagcatcgaaagctaactctggcactgcaagcttcaaggcaccaggtggtacttatagaagctcatttgaacagaagtctaactatcagacacctgcatcagctttgtacggggcatatgagggtagttcttcccaaggaagctcttctagttatggtgatcatacagctccaccatcagatcctgtagcattgatggaattctatgcaaagaaggctgcactggaagaacggaagaggccaccaaggcagtcgaaagatgaaatgccgccacctccttctcttcaaggtcctcctaagaagggacaccacatgggtgatttcattcctcaagaagaacttgaaaagtttatggcacggtgtaatgatgctgcagcacaaaaggctaccaaagaagccgctgagaaggctaagattcaggcggacaatattgggcacaaacttttatctaagatgggttggagggaaggtgagggtcttgggagcgagagaagaggccgtgcagatcccgttatggctggagatgtgaagaaggatcatcttggtgttggggcagtccagcctggtgaggtcacatctgaagatgacatctatgagcaatacaagaagcggatgatgcttggataccgctataggccaaaccctctgaacaatccaaggaaatcatactactgatgtgggggagttcgtctgaggggagataatgtcaagaagttcgttattcagcatatttcttggaatgccacagatgcaaggcttccgggggttctacaaagctttgttctttgtgtagtgtgtttatctttgtgggtttaaatgtctgttcaaacgtgtatcatgtttcagactgttgtattgctttcttggatcacccttttttctgatctcatttcagttacaagttggaaccataaggtacaaaatttgtgttgggaggggttatattttagaatggagtgtgaataactatagctagcataaggctatctccagcagattagccatcctcacatctaac

SEQ ID NO: 13509 - DNA, 75 bp, Zea Mays
agcccctcgcaatattaatttgttcctttgtaacaaatttagactgcgacatgaacgaaggcctttagccgaagg

SEQ ID NO: 13510 - DNA, 507 bp, Zea Mays
tgcatctcagaagtcagaacacaacctgcactgcacgagatgaggacggtgcactccacagctgctggcatttgcatccttcttctcatggtcatgtcttgcaccctcatgacgacacccacctgggcagcagaggattgctaccagcagtacccgacatgccaggacgccgtgtgcgaggcaaaatgcagtgaggaattccactccaagctctccggtttcaggtgcacgagccgtatgcacatccctgtttgctgctgcacccacacttgacgcggccggccggggatgcgtcagatccaattaatataatacaacaacaaccgtgctcaagctggtcaccgaatagtatgtaagagtagcaataattatatattctataaagatatatgtaacagctggacttgctcttccatgaaagaaaaagattttaaaaaataacccttctaatcttgcatgcaagaaaaagtttttttttaaaaaaaataacccttctaaagatatata

SEQ ID NO: 13511 - DNA, 118 bp, Zea Mays
ctgaaactgccttaggtcaatcacatgttctctgtcttcttggatccatcacaattaactctaccaccagcatctcttaaactattgaacatggtagacaagtcaggtagcaccatgg

SEQ ID NO: 13512 - DNA, 2738 bp, Zea Mays
gttgctcaaacctgaaatgttgctgatgcaaggctttcaaaagtttaacagtctcacttgatgcaaaagcaacacaatcactctaaaggtttggatcagtcatttcagagcatgggttcgcggtttccatcccatcagctaagcaatggcttgtatgtctctggccgacctgagcaacctaaagagaaggccccagtcatttgctcctcggctatgccgtacactggcggggacataaagaaatctggagaacttggaaagatgtttgatctccatagaaaatctggtccattgggtaatccgccttcaaggaatacttcctttggtggtgctgccgccaactctggaccagtttccaatgctgtcggtcgctccaactactctggttctatttcgtctgcagttcctggcactggaggatcttctaggacaaaatctaactctggacctctcaacaagcatggagaaccaacaaagaggctatctggcccccaatcttctggagtaaacccgatggcccgtcagaactctggccctctacctcctgtacttcctacaactgggctaattacatcaggtcctatcacatctggtcagttgaattcgtctggtgctcaaaggaaagtatcaggccctcttgattctagtgtatcaatgaagatgcgtgttacctcttttgcacacaacccagccgtcacaaatatcaatgtgggagatggttactcgattaggggcagcattccgaccacaataatctggttggtcgcgttgctctttttggttgggtttgtagctggtggcttcattctcgctgccattcataatccgatcttgcttatagttgtggtggtgatatttggctttgttgctacactggtgatctggaacatctgctggggaagaagaggtgtgattggttttatcagtcgctatcctgatgcagaccttagaaccacaaaagatggggagtatgtgaaggttactggggttgttacttgtggaaatttgccccttgagtcctcgttccaacgggtgccgcgatgtgtgtacacttcaacttgcttgtatgagtacaggggttgggattcgaaagctgctaactccacacatcaccgatttacctggggtctcaggtcaatggagcgtcatgcagtggacttctacatctccgatttccagtctgggctgagagcgttggtcaggacagggtccggtgcacgagtatccccatatgtggacgagtctgttgttatcgacataaacccagacaacaaggacatgtcgcctgagttcctgaggtggctccgcggaaggaatctctcgagcgatgaccggattatgcgcctcaaagaagggtatatcaaggagggcagcaccgtgagcgtgatgggtgttgttcaaaggaatgagaacgtgctgatgatcgttcctccggctgaacccatctccactggctgccaatgggccaaatgcatcctcccgaccagcctcgacggtctggtcctgagatgcgaggacacgtctgacctggatgtggtaccagtctagttggttccggcgcggaggaggagaaaaagatgccttgactcgatttgagttggtttctgtgggttgttagtgttggagggaaaaaaatgtgcaaatgcagggtgtgattatgggctaagtaaagttacaatgtcagtggtcggtcagctacctggagattggtcgtacagtatgtcatgtgtaatttttgtcgtctcgttttggttgagccatgggtggtgcttgtaacaaaaggatggcttggtgtcagtactacctaccctaccatggagcctgtttggagattcagtggtctggtttcccattcatattttgttcttttttcttttggcgtagggttccgacaatgccctggaagcctgcagtttccttctgtacccagatctacatggaaatcgcttacctaaacttgagaggcatatttccggtggtgagaaaccaatgtaaaaaaaagttgattccaattcgtgttgacgcgtttccgaagcttaccggaggacaaaatctattgccgtgggtcgttgagatgctcagagtcacatgatattccaagttttacagcgtacatgcatgcacgaccatcaatcacatccataccgaccggccggtgtgccgcactgtcaacgttaggtcagtggttagcaacacacaagcaggctgcattgcatttgcattaccgttggacttggacaggaattagggaacaaccgggggttgccgcccaggaaccttattagctggtagcatggtcctgtctgtcacaatcttgtgccttcgtagcatcactcatctaccaaccacaacttagaagacaagtctggatggatctagcaaacgacacggatatgacacaactgctgctagcggagcgtgccaagttgctgaaatgaaaatcttgcaccaacatcaacaagctacgcgatcttcaaaactttgtcgcatgtatcatgaaagcaacaacgagagttgaggaatcatttaggtcaggtccgcgcttcttgtttttctatggtttcttggataaacccctaccaaatgcaagcacgtaaagaagccgtttttcttagggcatgttgggtatatctctgttgtacactatagcagctctaaaactttagattggagcaactatgttgttgagttttagtgacatttaggtaaaataaatggttcgtagcttttagaacaaa

SEQ ID NO: 13513 - DNA, 272 bp, Zea Mays
gggaatcccactgcactatcccgagcagcagggaccggtcgagcgagacatggctgccactgccagcaagacgaggagggcgatcctggcgctcttcatctgggccatggccatcctcctcttcatggcggcgctccaccccaacgcgttggccgccgccgacgagatctactgcatgtgctgcgcggcaaagacagagtgcacgttcgacccgacctgctgcacggacggctgctgccgcatgagaccttgacgtacaaatacgcccaccg

SEQ ID NO: 13514 - DNA, 2621 bp, Zea Mays
acattgtctgaagcatctgtggattccactgctcaaactggtcatccaggcataggtgatttgcaagaggagttatatcaaatgattaagagtttaaaggaccaatactttgtggaattgaatgaattgtacaataaggtatctatcaagatacaacagattgacaaccaaatgcctgctcaaaagtcagcagagcagtatgaaaagatgaagggctttaaaggaatgctggagcgcactttgcatttcctgcaagttaacaagagcaacattcatccaggtttgagggaaaaaatccccatttacgagaggcaaattctcagtatcctaagttcacaaagaaggaaacctgtgcaggcacctgggcagcaaacgtttcagcaatctagtgggcaagctcctagctctaacatttcacagcaacttcagacttcccaaggtttgcagcagcatgatagtcatactagtcagatgcctcaagcaagtttaccaagtatgaacacaggagtacaaacctctggagcacctgcgcctcaaggaacaaactttggtgttccaacaacacagcaaaatgtcacaaatgcaccacaggctggctctaatttggagaatgctcagggaaataattttaatcatgtgcagcatggttcaatgggtgctgctttgcaacaggaaaggactggtcccatgcagggtgcattgaatgcacagcagcagtccagtagcaacatgatatccaacaatgcaatgagtacaatgcagactaataacaatgcaaatgcgaattcattgcagcagttaaagcagcaacgtcaggagcatcaaatgatgcaaagtcagcaaatgaagcagcgccagcagatgatgcaacagatacaacaaaagcaaacgcttcaaccgcagctcccaatacagcaactaaagaaacaacagcagcaagggcagatgcagtttccacagcttcattctggaaatgatgtgaatgagctaaaggttaggcaaggagctgcaatcaaatctggaatgtatcaacagctgagccagcgtaactattatcagcagataaaacagggtggtgtctttccaatttcttctccgcaaaccctccaaacatcgtccccacaaatttcacaccattctcctcaggttgatcagcacagtctgttgcaatctcaagtcaaaaccgggacaccattgcattcagctaactcaccatttgtcccatctccatcccctcctgtggccccatcaccgatgccaatggattcggataaaccactatccaacttatcttcagttactagtgctgggcaggctggacatcagcaaacatctcttgcacctcaaacacaatctatagccgttaacacaccaggtatatcagcgtcacccttgcttgcagaattcacaagtgctgatggaagtccggccaatgtaccaactcaagttccagccaaatcaagcgcagcagaaaggcctctggaccgtttgcttaaagcattgcgaacaacacagcgtgagtccctaagtgctgcagtcagcgatattggatctgtcgtgagtatgattgacaggattgctggatcagcgcctggtaatggttctagagctgctgtaggagaagatcttgtcgctatgacaaagtgccgcttgcaagccaggaacttcataactcatgacgggagtggtgcatcaaagaaaatgaagcgggacacgagtgctatgcctcttaatgtgtcatcagctggaagcgtgaatgatagcttgaagcaatcatatggtgttggtactccagagctacaatcaactgcaacctcacgtgtcaagtggcaaagggctgaggtaaaccatgctctgatggaggagattcaggagataaaccaacagcttatagatacagagctccatgtctctgaggatgatgctgagtccttcactacatctgaggggggcaaagggacggtcattagatgcacattcactgctgttgctgtttgccccagcttgaaatccgtgtttgcgtcagcgcagatgagtccaattttgccgttgaggttgcttgttcctgctagctacccgaaatgctccccggtgcttctagacaagtttcctgatgaacaatggaactcagacgacctgtctaccaaggccaagacaaagttcagcgtattgctccggggtctagctgagcccatgtcactgcgagaaatcgcaaggacatgggatgcttgcgctcgcaaagtgatcacagagtatgcccagcaaaccggaggaggcagtttcagctcgagctatggttgctgggaaagctgcgtaggcgcttgttaattgcttatattgtatctattattattattataagtatttatgtgtcgagtaaaatagaaaaaaaaacagtgtgtctgctgtatactccatccttttgctattgggtcaatgttggcttgataaatatggtcgtgtacagtacagtgtatgcgtcagtccggttagtatcatgtatgctttgcctctatttacagaacttggttttataactttttttcgtcaccttttatatctaaatattttttaatagtctttttttttccattgattataatgtatgccgttccttccca

SEQ ID NO: 13515 - DNA, 3341 bp, Zea Mays
atggtatcactctgctatttctgccccgggctcacaacgcggtcccggatgcccgtgaagcggtacaagaagatccttgctgaaatctttcccaaaacacaggatgaagagcctaacgagagaaggattgggaagctgtgcgagtacgcttcgaaaaaccctcttcgagtgccaaagatcacagtttacttggagcaacatatttatcgggacttaagaagtgagcaatacggctttgcaaaagttgtgatgttgatataccgcagactgtcagtttcctgtaaagaacagatgcctctgtttgcaagtagcctattaagcattgtccacacccttttagaccaaaagaggcaggatgatttatgtatcgttggatgcgaaaccttgtttgattttgctgtcaatcaggtggacggtacatatcagttcaatttggaagggctggtcccaagactgtgtgaaatagcacaagaagtaggagaagatgagcgagcaagtgccctacgagcggcagccctgcaatctctttcagctatggtctggtttatgggggagctttctcatatctcgtcagagtttgacaatgttgttcaagttgtactggaaaactacaaacctcagaagatgcaaaatgatgatcaaggtaccaatgatgccgacaaccagttggtgcaggaagaccagaaggctgagcaccccccttcccctttcattatcactccggccccctcttgggagagcatagttaatgttaagggaggagtcaacctaccagaggaagatgctagagatcccaaattttggtccagaatctgtgtgcacaatatggccaagctttctagggaggcaaccacattccgccgcatcttggaatgtttgtttcggtactttggtaacaatagttcatggttatcagaaaatggacttgctttgtgtgtcttgttggacatgcaacttttagtagaaagctcaggacaaaatatgcacttaatgctttcactgctgataaagcatattgagcacaaaacaatgttgaagcagccggacatgcagcttagcatcgtggaggtggcagctacccttgcagaacaatccagtgctatcgcttcaccaacaactatgggtgccataagtgatcttgtgtctgatgctgggccagttcttgacatgatggctgttatgctagaaaacattgcgagcactcctgttgtagctagatcaactgcagctgctgtttatcgcacagctcaaataattgcttcggtgccaaatttgcaataccagaataaggtgtttcctgaagctctgtttcatcagttgctgttaacaatgatacaccctgaccatgaagctcgtgttgctgcacaccgcatttttgccattgtcttagtcccatcttctgtttccccttcgattcaagccagtccatctagccgaccaaagaaacatgacatgcagaggacactctctagggctgtctctgtattttcttcttcagctgctatctttgacaagatgaaaaaggacaagaactcagaaaattcacaaggagaaagcaaggacaatagtatgcatagcgttggtgaagggaccggacaatcaaagagtcaaaaccttcacgtgtctcaaagccgccgtagcatgaaagctccgaatttttccatgaaaagaggtccttcaatggccatgagagctccttcagtagcgatcagagctccctcaatatctctgagaggtccttcaatgtctttgagagcatcttctatgtctgtaaaggaagaccaaagttcctcaaacaagtcagatgaggaaacggaatctgtgttggtgaagctgagcgcacgtcagatcacacttttgctgtcatccatttgggctcaatcaacatcccctgaaaatactcctgtgaactatgaagccattgctcatacttacagtttgcttctgttgttctctggatctaaggcatcaacttttgaggctcttactcagagttttcaggttgcattttctttgaggagctattcactcactgaagcagattcattacaaccgtctcggcgccggtcattgtttactctgtccacagccatgattattttctcgtcaagagcttacaatgtcttgccactcatcccgatctgtaaacaaatgatcaatgatcgtgcggccgatccgttccttcatttggtggatgagagcagacttacagctgttaaggattcttcaaatgatccttcaaaaatatatggatcaccagaggacaacaataatgcactgaagtccctttcagaaatagaactatcagaaagtcaatctcgagaatgcatagtctccacaatcatgaacaacatcgcaaatatgctggatgcggaattgcataatgtgagaagccaattgctaagtgatttcactcccgatgacatgtgtcctacaagcactcagttctttgaagtgcatgctgataacccttcatcagggtcttatgagactggtcaccatcaagagggcttgctgattgacctagggaatgaccatgatgcttttggggaagcttcagaaagcgcagaagcttccgcatcttctatacctgcatcagatcttctgagtatcgatcagcttcttgaaacggttggtgcagaaccagcacctcaggctggagtagtgtcagcagacattgggttcaaggatatgactagccactgcgaagccctgacgattgggaaacagcagaaaatgtccgccttcatgagcttccagcaaagcgtgcaagcggcagggctgccgagcagccagcccaaccagatggagctggacctttcccaagacccgcagttgcctcagaccggggcacatagcacgaacccattcactgatgacagccttcagggatatccacagtacacgaaggggcccaacggcgacaacgcacagccaggccaggacttccaacaacagtccctgaagttaccggcggcgagcccatatgacaatttcctcagagctgctggctgttagaggtccagcttgcagcagccaaaacatcatttacatggacgatggcaatttcaagatagccacgaactttccattccgcaggaaatcaaggaagaggtatgtccgtgtatgaggtcttagctagagactcaaccggattcgacacccattctttatgtatagctgtatatatgtataggttggctctttgctgctgctgctgctgctgtttttgccaatgcaacgagtagagggactgggggggagcagtgccttctatcacagactgtacatgtaaacatgttgcagaaatatatgaagaaaaaaaatgacgtttgaagaaa

SEQ ID NO: 13516 - DNA, 1180 bp, Zea Mays
tagatagacgcgacggccggggccacgcgtccaggcgaggggaggggaggcttcgcgaatcgaatcgcgcgataaaacctgcggcccgccgcccatcccgccatcctgatccgctcgctcccaaatcctactgccgtgcgcgtcccgctcctgcggctgcgccccccgcgaggagaaagccggttagccacagccccacacgcgcgcatcacgccacaaccacaccacacggcaccagcctcctccgtcgtcaccgcctcgggcctcggccgatcgatcgggtctggcggcggccacaagcgtcgctgtttaataaatagccctgagcggcctccccctgcccctcagttcagcctcggctggacatcgagtttgtaccgggaaacagcttggtagtataaccactgaagatggtcagtgggaggccgcatggtgaattggactcatggttcaagagcctcatggtgacctctagcagcgagagggggcaggctgggagtggtggtccagcgccaacattaacaggatggaaggaccttccgatggagctcctggtgcggataatatccacagttggagatgataggatggtcatcgtggcgtctggtgtttgcacaggctggcgtgacgcgctgggatggggggtcactaatctttcacttacatggtgcaaactgagcatgaataatttaatgatatctcttgcccacaagttcacgaagttgcaagttctcactctccggcaaaacaaacctcagcttgaagacagtgccgtagaggctgttgccaactactgccatgacctacgtgagttagacctcagcagaagcttcaggcttagtgaccgctccttgtatgcgctggcccatggatgcccacggcttacaagactgaacattagtggatgttccagtttcagcgacactgcgttgatttaccttacctgccgctgtaaaaacctcaagtgcctgaacttgtgtggatgcgtgaaggctgttactgacagagctttgcaggctattgctcagaactgtgggcagctgcagtctttgaacctaggctggtgtgatgatgttacagataagggagtgaccagcttagcgtcaggatgccctgatctcagagccgtagacttgtgcggttgtgttcttataacaggcagtgcacaactgggattcga

SEQ ID NO: 13517 - DNA, 88 bp, Zea Mays
caacctcagcacctcacgccccacttcatcctccaggcggccgacttcgcctacctccgcgagatgtccgtgggggcgacgcttcttt

SEQ ID NO: 13518 - DNA, 1094 bp, Zea Mays
cttggaaaaagtttaaaaccacaaatcttgttttacgtgacctggtggtatcaagtatctcaactgtatatctcctgaagggcatattctttgaggtaaagaagaagtttgagacagctcttggtgttcttaaaaaggaaaagatcactattgatccagatgacccagcggcagtttctcgttatgcccaagtcatgaagactgtaagggaaaaggcggatcttctctctgattctcaaaggattaaatataccattgagaccttcaccaagggcatccctgatgcacggacttacttgaatactcttcaacagctcagaataaagagtggtcttatagatcatcttggaattgagcctttgatgatggaagctcttgagaagattgagaaggacattaagaaaccacttttgaggagcgacaagaagaacatggccaccctcttggcagagtttgacaagattaacaaaaagcttggctttcggaaggaggatcttcccaagatcgaggaagagcttgaattggaaattgccaaaagtgagctgactgaacttaagaaggaatgcgttgaagcaatggagactcaactcaagagggaggagtttcaagatgaggagatgcctgatgtcaggaaattggacatcagaaacttcctgtaggcctgatcgacgataatctttgaggcccaacgcacctctggttttggtttcaagttgatcggtgctccacacctatgaatgctgctccttccctttttgtaataaaagaaactgcacggttgggtatgagttggattaaatcttgcctttctgttgttctggactcttgtggctgcagcaacaatgggatgtccttgtgttatagcatatgaactcgttacgaggcattcaggaaaatggtgatacctggtatttaacctttattttggtactcagtttggagagcaaagatccatttgttttattatgtcatttatttttgcaccttgtaaaggaatttgtttctgttgtatcaaccctccctaaagacccacatcttcgattaatgaagagtaaaatataccggctgtctctaaatttatgacacaacgccat

SEQ ID NO: 13519 - DNA, 1418 bp, Zea Mays
tcgagatttggagctggcggggaaacagaagtccaatgttgaaagaggctgtggaaatgtctacagatgaagaatcggatggcgttgttatatgccatccgaatggtaacactgatggatgtgacgaagccattagtggcagtcatgatgatgatagcccagaaggccaggaaactagttccatcaaggaccctgatgtagaaggtgacacacaggaagacaagtgtgtaaatcaagattcactgaagttgattgatcaagagacgtctgctccccccaagtccccagcgaagtccgcgactgcgagttctggaccagagaagcctaaacgtgttgtcacccaaccattgtctctttctactcaacgaaggtcatctggagtaaatggtggtgtgaccaatccatcacccaataaggataaatctggtgataaaagtagcatctctccagcaagcatgacaaagaagtgtacgccgttggcacctaggaagactttgcagcctgagcaagcatttcaccctctggaagaggactcttgttctgtgacttcctcgactacaacatcatcaagagctggcagaactaagacaactgttcctgttgccccatcatttgtgtgtgctaaccgtgctgacaagaggaaggagttctacacaaaattagaggagaaacataaagctttggaagcagagaaggacgaggctgaggccaggaaaaagagcaagacgttgctataaagcaactaaggaagtcattggtgattagagcgaaacccatgccaagcttctatcaagaaggccccccaccaaaggctgaacttaagaaggtgcctcctactcgtgccaaatcaccaaagtttacaagctcaaggagaaagagctgcaatgacacaccacagacacccgagggaaaaaacaccaacgcaacatctaccacccggccacatcgtcacagcatcggggcttctaaagatgccagcagagtacagtgctcgccgaagagcggcgtggcgaccaaaactagatctgtcaagcctgagctgaaggccctctgaagcgcatgcgtagcattcaagtgctgcgattgtctctgtacaaacagaatcgcctgactcttagccgtttccatttgcatgcattttttttgttttgttttgttctatacccagcatctccaccaaaaagaaggctgtagggccaatgacgttgttcgcgctgctggaccttgtctccattttcgtcttgtactcgttaagaactctgttgctgctgggaccatgtgacattcattccatgtaaattacctggggatcccggtagggagctcgactggtgttttggtcttgtgaagtcctcaatgccttaactaatctgtgagctgaaaaactatcgatttggcattgttacgtttgatgcatc

SEQ ID NO: 13520 - DNA, 979 bp, Zea Mays
gcagtcgcctgtcctgtgtcctccggtcccggacctctgtgccgcactgcccacagcgacagcatcgacatcgccccggtcccgtgtcgcttcgcttcgtagctcgccgccttccccgcgccccagcagcaacggattcccctcccctcgagagatccgacccttggcccggtcgctggggagagcggcatggggctctgggattcgctcctcaactggctgcggagcttgttttttaagcaagaaatggaactctccctggttgggttgcagaatgctgggaagacatcgctggtcaatgctgttgctacaggtggctacagtgaggacatgattccaactgtaggcttcaatatgcggaaaatcaccaaggggaatgtcacaattaaactttgggatcttggtgggcaacgaagattccgcactatgtgggagcgctactgccgtggagtttctgctattctatatgttgtggacgctgctgaccgagatagcatcccaatagcgaaaagtgaattgcttgatctgctgacaaaacagtctttagctgggattcccttgcttgtccttggcaacaaaattgacaagtcagaagtgctttcgaagcaggcattggttgatcaacttggactggaatcgataaaggaccgcgaagtttgttgctacatgatctcctgtaaggattctgtgaacatagacattgtcatcgactggcttatcaagcactctagaacagcaaagtaggctttatgtgtgtttgtatcacttgatgcatggtaatttgaatttacctttgtgaatcagtactcccagaatcctggtttcttgtccagatgttaaaagcgttcacctcgtaatttatgatccctttggtctcacagacgaattgtatggtatctagaagaccagaaccttgtatttcctttgcaattcccttgaatcttttattattcttactgtgaattaaaaaaaaaaaaaa

SEQ ID NO: 13521 - DNA, 774 bp, Zea Mays
ttttgtggtggcaagcatttaacaagtacgagtacagatgggctgatggtgtgcagataaagaaacccatagaggtatcagcaccaaaatatgtggagtatctgatggattggattgaaggccagcttgacgatgaatccatatttcctcaaaaacttggcacgccatttccaccgaacttcaaggaagtagtaaagacaatattcaagcgcttgtttcgggtctatgcccatacttaccactcccatttccagaagattgttagccttaaagaggaggcccatctcaatacctgttttaagcacttcattctgtttacaaatgagtttggcctgattgacaagaaggagctggctccacttcaggagctcatcgaatccatcatcgttccttactgagaacacggtttgctaaacatggatacagagctcttaatgctgatgctgtgaaattcagtctgtttatgacagcactttactgcatagagcttattgttcccgttattagacacaaggacatgtcacatatgcgtgtatctgtgttgtttcttcctgatcatgctgaccatgtaagtactgtcatatcagctatagaacggcgatgataatgtactgcagaaagaaaaaaaacacgagaaagctgagttggggctataaattgcatattggcacttatcgagtatagaatagatctccttctctttcttcttacaaacagaattgacttgttatttttaatggaatgaaataaatattcacgctttttgacatagaa

SEQ ID NO: 13522 - DNA, 1575 bp, Zea Mays
cgtgacagatgggatacacattgatttgaaatgaagaaggcacatattattccatagatctcggaggaacaaactttagagtgctgaaagttgaagttggtgatgggtctgtggtcactcgccgtaaggtcgagcttcccatccctgaggaattgattaagggtacaattgaggagttattcaactttgttgccgtgaccctaaaggagttcgtagaagcagaagatggtaaagacgaacaaagggcacttggtttcacattttctttcccagtcagacaaacatcagtatcttcagggtccttaattaggtggaccaaagggtttttgattgaagatgtggttgggaaagatgtggctcaatgcttaaatgaagctcttgctaggagtggactaaatgtgcgagttactgcactggtgaatgacactgtggggacgttagctctaggtcattatcacgatgaggatacagtggctgctgtgataatcggtgctggcaccaatgcttgctatatcgaacgcactgatgcaattattaaatgtcagggtcttcttacaaactctggtggcatggttgtaaacatggaatggggcaatttctggtcatcacatttgccaagaactccttatgacatctcccttgatgatgagacgcaaaatcgcaatgatcaggggtttgaaaaaatgatatctgggatttatcttggggaaattgcaaggctggtgctgcatcgaatggctctagaatcagatgtctttggtgatgccgctgataatctatccacccccttcacattgagcacaccacttctggctgcaattcgcaaggacgattcaccagatctgagcgaagtcagaaggatattgcaagaccatctgaagataccggacactcctctgaaaactcggaggctagtcgtcaaagtctgcgacatcgtcacccggagagctgcccgcctagccgccgctggcattgttgggatactgaaaaagctgggtcgggatgggagcggcattgcctcaagcgggagaacgcgagggcagctgaggcggacggtggtggcgatcgagggtggcctatatgagggctacccggagttcagggagtacctagatgaagccctggtggagatcttgggggaggaggtggcgcggacggtgacactggaggtgacagtggatgggtctggggccggcgctgccctcctcgccgccgtacattcgtcgaatagacagcaaggttccatatagggagaagggaagatggtgatacagcccctctgtgcaaatgtaaaaagggatattatttgatatctatattcatatatataaaatctggtcttgtgcagagaaatacctgttctcctatctcaagctcttatcactcttctgccttgctcttgtggatgtaggcgttgctgtgtactaggtttacctttttttttcagtgtggaagggaattatgattctttgtaagtccgagttgctgatgaactgatcttgtgaccaaaatggcaaaatgtcatgagtcatgacaagctgagataaccattttttttttctaatgttggacgca

SEQ ID NO: 13523 - DNA, 1650 bp, Zea Mays
cctctcctcgcctcccaaacacgcatccgactccgtctccagcaaccccattcggctcctccctccgtctccagcagttctccatccaaacaaaccgcgtgatccgtctgaccgctcgctcgctctcgccgggggtccggagctccccacctccagcgacccagtccatccgcgcgtgcagcgccgcggcgccgatggagtacgacttccgcggcggccgctcgagctcgggcccgggcccctacggcgcgcctccggggggcgcgcccgggggaggctcctcgctctacccgcgcgtcgggcagccctcccacggcgggggcggggcctccacggcgtctccgcgggccgcgccgtaccaccacggctccgggtccggatccggctccgggtcctcggctcccgtcgtaacgccgttggctccaacctccttctcctcgtcctcgtcctcgtcctcgaaagtgggcatacaagttgcgataaagcctgaattccgcattaccccacctcctcaattgccaccagagatggtagagattcctcgcagcaccttcaactttgattttgagtatgagagaatgattcttgctgaggcagagaaggagaaccccaactggactaaatttgtggtagaaagacaggctgcacctcttgtgccacagcaggctagaccagcatcgtcagggtcaggggatccagttgttgacaagtatgtctcaatggggcttgggcgtcaagccgtctcatttgcggtgttgaattatggagataatccaacaaaggtgaaagagttcgtgaaatcctacagcatcctccacgagatgggcttcacatcgccaaacgtccccgagctgctagccatccacgacaacgatcccgacaaagtcatccagcgactgctatcctcgccatcctgatcctagaagaacaagacgcctcgcatttgtgtgccgcatccatgtacagccctgcccctacgctggcaaccatcacagatgatgtatacgcgttgcctgccgttagttctgtgaaccgagtaacacgctttgtatgttgtacttgtataccgtcacccgtttggtgtttttccttaaaaaatgttttcgcgtcgttttattcacgtttgaattttttgtgagcctatacagtacaacatgattgggttagtgatgattctcgtcgagaaacggggcgtacttgctttgcttgactagttcatctttttttcttcagtttccttgcaccgccgagcgtcggcgttggctgtcacggattgtcctgtgtttggtcagaggatacaaggctatagcagcagcgtccgaaatctgaattgatcgaagtgtccaacaaagtccaaaacatctgtcggtcgttggactccactccacagttcacatcaccagtgtaactgagaattctccaacaggctggacagcaaagcatgagcaaatactagtagacgtactagtctacaagcatctccagccagtaacggcgctaccgctttgtcatggcgtcgcggcggcggctgctgccccagagtagctgccgtcgatcagcaacttcaggatcgagatgttttcttggcagacatcaaacaaaggctaatccaagctcaggtaacaatgaagcaggcgcaggacagtggcc

SEQ ID NO: 13524 - DNA, 763 bp, Zea Mays
ccggccggccggtttatcttcttctgtgcctagcaatggagatttactgctgttcatcatcaacatgatccccagagggcaggagaagttcctcgccatcatggatctcaagggctggggctacgcaaactgcgacgtccgggcctacatcgcggccattgagatcatgcagaactactacccggagcggctgggcaaggcgctgatgatcaacgtgccctacatcttcctcaaggtgtggaagacgatgatctaccccttcatcgacgccaacaccagggacaagttcgtgttcgtggatgacaagagcctgcgggagacgctgcggcgggagatcgacgagagccagctcccggagttccttggcgggaagatgcctctcgtctccctcaaggactacgcccagcagcctcagcccgtttgcgagtgagtctgtcgtagcgatggtggccggccggtgacgtgagcgacccaaagccgaaagctgattcgatctagactaagctaatacagcctacaagagggaggaagagaggccctacccgtggaattaagtcattagtttgtggtccaattcaataagaaagtaaatgtggtgtgtgaagatggtatggcattatcagtctttaatcccatattatacatttagatagaagaaaatcaacttatatgtggtagtgttccctactttttatatgagataaataaagggatacggagaatgctgcacgcacgctctcgctcacgtttcatgtttttcgcg

SEQ ID NO: 13525 - DNA, 389 bp, Zea Mays
ggggctgtatgctgggcgccgtcgtccgtgtcccgggcccgatcctacctttcctgcccgggccgacgcgcccctctcctccgccgccgccactacctcccgcccgaaacgcccatggcctcggccaccccttgcgatggcggcaccgggaagcccgacgccgcgccggctcccacgcccgcgccaacgccgctgccgcccgagaagcctctcccgggcgactgctgcggcagcggctgcgttcgctgcgtctgggacatatatttcgacgagctcgacgcgtacgacaaggccctcgccgcgcgcgcggcctcctcaggctccggcggcaaggacgactctgctgataccaagcccaaagaagtacagactggcagatcagatttcga

SEQ ID NO: 13526 - DNA, 1411 bp, Zea Mays
ctgagattgaaatatattgctacttgcttgcactgatttttcttattgatcagaagaaatacgatgagtgtgagcattgctcgcctgaagaatctaaaccggagaactgttgatgtcttggcatctcgtctgtacttttattactcttatgtgtatgagcttaccaacagccttgctgaaatccgcgggaatctgcttgctctacacagaatggcaactttgcatcgtgacgagctcggccaggaaactctgctgaatcttctcctccgcaattacctccactacaacttgtatgatcaggcagaaaagcttagatcaaaggcacctcgttttgaagcacattccaaccaacaattctgccgatacttgttctacttgggcaaaattaggacaattcagttggagtacactgatgctaaagaaagcctcctgcaagctgctcgtaaggcaccaacaactgcccgtggttttcggatccagtgcaacaaatgggctatcatagtgaggctgctgcttggtgagattccagagaggactgttttcatgcagaaaggaatgaagaaagctctgacaccttattttgagctcacaaatgctgtcagggttggggaccttgaactgttcaggactgtcgctgacaaatttgcaagcacattcagcgcagacaggactcgcaacttgattgtgaggctgcgccacaatgtcattcgaactggactgcgcaacatcagcatttcttactcaaggatctcccttgctgacattgctaagaagctaagactagactctgagaaccctgttgctgatgcggagagcattgtagccaaggccataagagatggcgcaattgacgccaccatagatcatgcaaatggctggatggtatcgaaggaaaccggtgatgtctactctacaaatgagccacaaattgcattcaactccaggattgcgttctgcctcaacatgcacaatgaggcggtcaaggcgatgagattcccccctaattctcataaggaaaaggagagcgccgagaagcgccgagagaggcttcaacaggaggaagaactggctaagcacatggctgaggaggaggatgacgacttctaaattagctgccttttgagcaaccacttgcaattgtggacttgttggaacgcctggttaaaccctgcctctagctactcgagtcatgcaaacactgtaatgttatgttgatcagggtttttctttaaattcaatacttgagttttaatctccttgaattgttaaaccacggaatttacccaccatgcaaatggctttcttttatttcatgcattctctcctcccacttggggcttttctataatgctgtattctgtgttcaatttccgtgtcttaatttaataaaattattattggttaaagtttg

SEQ ID NO: 13527 - DNA, 1693 bp, Zea Mays
ctaatatactgactgcctgagaattcttggtgtcaatgttgactagtgtattttttttctctttgagtcctttgcatggcattccatatggcctcaaagatataattgcggtaccacactataagaccacttggggctcaaggacgtttaaaaaccaagtccttgatagtgaagcttatgtgtacagaagattgaagtccgctggagcagtcctggtagcaaagcttgtcacgggctcacttgcctatgatgacatatggtttgggggaaggacacgaaacccctggaacatcgaggaattctctactggctcatcggcaggtccagcggctagcacctctgcaggaatggttccatttgcaattggttcagaaactgcaggatccatagcatacccagccgctagatgtggagtaactgcattgcgcccaacatttggaacagttgcacgaaccgatgtcatgagcatttctgagagtttggataagcttggtcctttctgtagaagcgcagtagattgtgctgttgtattagacacaattcgcggaacggatgccggtgatccatcatcgcgtgaggttgctttgggtgatccatttcatgttgacatcaccaaactcactgtaggctacctcgatgacgctgagatggaggttgtcgatgttctttcctctaaaggtgtcaagctggtccccttcaagctgaactacactgtggaatcagtccagtccatcctgaacataacgatggacactgatatgcttgcgcacttcgataactggcagcgggaaggacatgatgatgactatgaggcgcaagaccagtggccggtagagcttcgtcgtgcacggttaatcccagcggtagattatatacaggcgcagcgagcacggggcaagttgatcagagaaatcaaagatagcttcactgttgatgcgtttgttggcaacgtgactgactgggagcgtgtctgtctcgggaaccttgttgggatgcctgtggtcgtggtgccgacaggcttgaagagcatcgagaacccgcctaaaggcggtacgaagagaagaacaacagtgacgacaggcatctacgctcctcctgaccacgaccatattgctctggcgctggcaatggcgtaccagtccgtcactgatcacaacaaacagcggccgccgatcgatgatctggggccgaatgatgtcatacaaagatagttcaacctgctcatggaccgcgatgatccggtgatggtagcacgagggtcgttatggttatggaagctgaagttgaagacgatcagtgagccagaatggctggccacctggcagaagacatcagctgtggaagtatcaagtaccaatccacatatgggcttcttcatcagctcaaataactcagcactttttttttctgaagcaggcagcattgtatcaccttaacatacgttacaaaggaggttctggatttcatctggggcctcatcagaccaaaccgagccaaagaactgatcagctagcctagtcattacatgagctgcaacttctctgggagggtatttggtttctatggactagtccatctattttattctaaaaatttttattctattttagttaataaattgtaaaatacgatgagttttcgtatttaataatttagggactaaaaccgaataaataaaagaattaaaaattac

SEQ ID NO: 13528 - DNA, 1722 bp, Zea Mays
taaggcgaggctacattagcgctgcaattggtgatggtccaggatgtttgtcattgcgatgccctgatccatcttgtagtgctatggttcttcaagggatgattaatgaattagctaaagatgaggatagaaaaaaatatgcacgatttctcttacgcgcatatgttgaaggtagcaagaagactaaatggtgtccagctcctgactgcacatgtgctgtggagttccttggtgatgaaaactatgatgtttcatgcaattgcatgttcagcttttgttggaattgcactgaggaagctcatcgaccagtgaactgtgagactgtttctaagtggatattaaaaaacagtgcagaatctgaaaacatgaactggatactggctaattctaagccctgtccaaagtgcaaacggccaatagagaaaaaccagggatgcatgcatatgacatgcacccctccttgtaaattcgaattttgctggttatgtctgggtgcatggtcagatcacggagagagaacaggtggcttttatgcttgcaatcgttatgaatcagcaaagaaagagggagtttacgacgagactgatgcaaggagggaaagagctaaaaactctcttgagagatatatgcattactatgagcgctgggcatccaatcagacatcgaggcagaaggcccaagcagatctgctaaaagcggaaaaggaccagattgcaaatttaactgacattttcgggataccagagacccagcttaagttcataatcgaagcttggtcacagattatagaatgcaggcgagtgttgaaatggacatatgcttatggctactatctggatgataagatcaagagtgaattttttgagtatctgcaaggtgaggctgagtctggtttggaacgcctgcatcagtgcgctgagaaagacttgcaaatttttttgccgtctgtgaaatctgacagcactgaaacaacgacacctacagtggctgaatttggtgaattccgcgtgaagcttgctggacttacaagcgtgactcggaattactttgagaaccttgttcaagctttggaagctgggttggaggatgtccgtgccacaggccaggctgctggtacatccagcactgccaccagctccaagaaaggaggaactaaatccaagaagaagcagcacactgcaccatcatctgaccacactgatgatgggtggccctgcgagcgctgcacatttcttaaccctcctacagtggatgcatgcagcgtctgcgaaaagagtaggtactagatgatggaatagctcaaagggagccagggaggcatcccaagaaaacctcaaagctcgtgagaagcatgcatgcatcggatgctgagaagaagagcttccagctgccgcaatgttgtacagagagttattttagggcctcggttggaaacggtgtggaggctcaagtggtcacatgtttgtgggggtcatttggttttctagttcttttctgttgttccttgtaaatatatttgttgtgatgtggtgacctgtgtttatgtgatgagtttttgtttctgacaaactgtgaaattaaactttaacaaaactgatgagaggtagctctgtttattccctcctaattgcgggcagggtctttgtctattcttccacattatttatctacggttacttgccaagtaaccatctgctagtgctggtcaatgttacttcaaag

SEQ ID NO: 13529 - DNA, 1980 bp, Zea Mays
cccttccgcttgtatacagaacatgcagcctgtagatcgttttgttgtggaagaatgcattttggatgtgctacttttcttcaatggatgtcggaaagaatgtgcattttatctggtcagcttgcctgtgtcttatcgctatgaatacctgatggcggaaaccatattttcacagctactattgttgccgaatccaccattcaagccaatttactatacactggttatcattgatctttgcaaggcattaccaggtgcattcccttcagttgtggtaggagcagtgcatgctctttttgacagaattagtaacatggatatggagtgccgcaccagacttatactatggttttcacaccacttgtcaaactttcaattcatttggccttggcaggagtggtcttatgtcaaggacctcccaaaatgggctccacaacgggtttttgtccaggaagtactggaaagggaagttcgcttgtcgtactttgaaaaaatcaagcagagtatcgaggatgctgctgagttagaagaactgctacccccaaaagctgggcctaatttcaaattccatagcgatgaaagcaacgaaagcactgatggcctgaagttatccaaggaacttattggcttgattagaggaaagaagtctacatatgatattattttatgggttgaggaacaaataattccaaaaaatggtactgaatttgcacttgatgttgttagccagacgcttcttgacatgggttcaaaaagtttcacccatcttgtcactattttggagagatataataagataatctctaagctatgtccaaatgaggaaatgcagctactgttaatgaatggagtcagtgcttattggaagaacagtacccagatgactgctatagctattgacagaatgatgggttatcgcctgatatccaatttggctatagtcaaatgggttttttctcctgccaatgttgagcaatttcatgtttctgatcgaccatgggagattcttagaaatgctgttagtaaaacatacaatcggatcagtgacctccgcaaagaaattcaatcactcaagaagggtcttcaagttgctaaagaggctagtgcaaaaaacagaaaggagctggaggaggccaaatcagtgcttgagattgtagaggggcaacctgcaccagctgaaagaccaggtaggataaggcgactagaatcacatgtcaaaaatgcagaggatgaggaaagaactcttgaagaatctttagaagcgaagggagttctccttgctcgggctcatgaggaaagcaaggacttgcttaagctactctttaagagctttgttgacgtgctcactgaacgtttgccgcctgtctctgttgatggggaaattcctaatctgcgcagtggagatcaaaatgtaaattttgcagctcaaaattctgaagcagcaacaatggagattgacaatgaaaatggagcagataataatagtgaaccgaatgagcgaaacacaaaaaatgcatataatgttggagagcttgagcagtggtgtctctgtacactgggttatctcaagtcattttcccgccaatatgcaagtgagatttggtcaaacatagcaatgttggatgaggtcttcgttggggatgttcacccacttatccgaaaagctgctttctctggtttgcgcagatttaccaatgaagggtctcatccttgaatttgacaccatacccatattctttatagaactgagtgtattgtacctgtatgatagaggacaacttttctccttgtttaactaatcaaataggcataaacatttttccttggtttcgtatgcctttttttctgttcccttgcttctcggccactaaatgaaaatttttaccaggtaactaagttaatgttcttttctgaagtaacatcagaatatgcatggttcagtgttaatttaacctattgactgagcctgaggggttgata

SEQ ID NO: 13530 - DNA, 749 bp, Zea Mays
tttttttagaaaagggtcacaaatgtgattccaagctggacctcggtttccttccagagccacaggatgacttctgtatccatccgctcaagacaaaggtctcttgggtttaagatttgctgttcggctaagaaagagacagtggacaaggtttgcagtatagtgaaggagcagctggctcttcccgatgggaccgccatcactgccgaatcaaaattcgctgaacttggcgctgattcgctggatacggtcgagattgtgatgggcctcgaggaggcgttcaacataacagtcgacgaaacaagcgcacaggacatcgcaacagtgcaggacgctgcggaccttatcgagaagctcatgctggaggcacctccaaaggtcgtctagatccagcaaccttgcgatcgacgaccttgtgtttgatctatgttgtgtgttaatttgttcgtgttgccccatttgttctttcttgatgattcaagatgaggttttgtattggtgttgctgaggtgaattagatagccccaaaggccacatgaagcagatgaggacagttcattccactttgaatttgtatgttgtaacttgtagtgctgctatagagaaaccaatggactgttatgaagagtcaatgcaactgttgcttttttagttttgggaagtcacacacatgaaagtctgaatcagatgcagtactaattgttgagcttggggtgcagatatatgcaaataccaggatgtcaggtgct

SEQ ID NO: 13531 - DNA, 831 bp, Zea Mays
gtaccaccgttttttccttctctatgaaagtctgaaaatagctagtgcggagcgtgcctctgcggtccgataggcgggttcgcatccggccatccgatactgtgccagtgcggccgcgcggcggcggagcaaccacgcgcgcagaccgccgtcgccacctcctccctccctccgctccccggcgtgcgtccgatccaccaggaatcgaaggctcccacacgccccaacgcgatgctgcgcaacttcccgcaggcccggaggctcctcaggcggatggggttcgagaaggaggacgcctacttctggaagcagatgggcaaggccatgctctgcacgtacacgctcttcggcgtcgtctggctctggaacgagacgtcgccgctcgggtggtggacgctgaagccgcgccccaaggaagaaagagagatggcacacctctatgagcgcaggaagttcccgtaccctggcgatgatgaggcggtcgaggagtttgtaaagagcggaggtgctcttggaaccacaattggacccaggggattcgctgacgccaatatggattctgaaaacatgcagaagcagctgcagtctaagaagttcgagcaggaagcacagaaactgtggattcggatgaggaatgaggtcgtacaggagctccaggagaaggggtttgatatcgagtgaatttgaaaacctgcagtatggtcggcgctgaggatgttaaaacttaaaaccacttgccatctaaattggagaactgtataacttaggaataaaagagtttgtagctatctttttaactaactatctggtgcattcttgcaaaaaaaaaaa

SEQ ID NO: 13532 - DNA, 102 bp, Zea Mays
tgaatatgtcataataggttagaggacacttgccttcaccaaggtgctccttagggacttctcctgcaactccctcgaaaaacacgagctgctcgttgtcta

SEQ ID NO: 13533 - DNA, 1418 bp, Zea Mays
ttcacgttggatgaaagaaattcagagaatttctgttgtcaaaggactttgttgggatccacacgccaaaattgatttctggatccagtgaaggtggtgcagctgtattcaagcttctgtacaatggtcaacctgcttgcttggcacaatctcctcagttgcacaagcagatggctctatgtggtggttttgaacgagtatttgaggttggccctgtgtttagagcagaaaattcaaacacacacaggcatctctgtgagtttgttggtcttgatgctgaaatggagattaaggagcattattttgaggtctgtgacattatagatggcttatttgtatcaatatttaaacacttgactgaaaactgcaataaagaactcgagacgataaacaggcagtatccatttgaacctctgaagtatctagacaaaacattgaagctcacttatgaagaaggagttcaaatgttgaaggaagccggaacagaaattgagcctatgggtgacctcaatactgaagctgagaaaaaacttggtcggcttgtcagggaaaagtatgacacagattttttcattatgtatcgatatcctttggctgtgcgtcccttctacactatgccttgttatgacaacccagcttacagcaattcttttgatgtctttattcgaggcgaggagataatatctggagcgcaaaggatacacactcctgagctgttgaccaagcgtgcaacagagtgtggaatcgatgtcagcactatctcgacctacattgaagtcttcagctatggcgcgcctccgcatggtggtttcggggtgggtttggagagggtggtgatgctgttctgcgccctaaacaacatcaggaagacctcgatgttccctcgcgacccgcagaggcttgtgccgtaatttactgagtccaatgccctgagtttgcagcagagcgtactggttgttttgatgttctttgagcatcgaacatcgctaacttgcaatctcagctactgaagccccggttaccgtggttcagagttcctgttaaattcacaaagctacttgtatctattagattgctgaaaccagcaagtacgatcctttttgggatttgatctggtctaattgttgttaagtggaggtattgctctcagtttttttgtgctctgtttgtcggcatatgccaagagctagggcttcttaagttctaagtttttagacgagtggattccttttttttaagagccggcaaaagttctgccctgcacctgttaaaaatagatattaccctgttccaattctaaataatatgacgtgtcgccttctagatatttatattatgtagatgtacaatatgtctagatacagatagtaaagtaatgtatgtctttataaagagagaagaattgtgctgcgaatgaa

SEQ ID NO: 13534 - DNA, 1501 bp, Zea Mays
cttggcgaaacctttttattggcaaatcagagatgaacatgggctgttttatgcactggatcttggagggaccaacttccgtgtgctgcgagtccagctaggaggaaaggagaaacgtgttgtcaaacaacagtatgaggaggtttccattccaccacatttgatggtcgggacttccatggaactatttgatttcattgctgctgcattggctaaatttgtcggtactgaaggtgaagatttccaactcccagagggttggtgaagatgttgtttctgagttgagcagggccatggagaggcagggactagatatgaaagctacggcattagtcaatgatacagtgggcacattggctggtgggagatatatggataccgatgtagttgcagctgtaatattgggcactggtacaaatgcagcatatgtggagcatgcaaatgcaattcctaaatggactgggttactgcctaaatctggaaagatggtaattaatacagagtgggggagcttcaaatccaacaaacttcctctttcagaatatgacaaagccatggactttgaaagtttgaaccctggagagcagatatacgagaaaatgatttctggtatgtatctcggagagattgttcgaagaattttactgaagttggcacatgaagcttctctatttggggatgttgttccacctaagctggagctgccatttatattgaggacgccagatatgtcagccatgcatcatgactcctcacatgacctcaaaactcttggagctaaactgaaggacatagtcggggtcgcggacacttccctggaagtaaggtacatcactcgtcacatctgtgaccttgtcgcagagcgtgcagcacgcctggccgccgcaggcgtgtacagcatcctgaagaagataggccgggacaaagtaccaagcggtggcggtaaaatgccgaggaccgtagttgccttggacggtgggctctacgaacactacaagaagttcagcagttgcgtagaagcgactctcacagacttgctcggcgaggaggcttcttcctccgtggtcgccaagctggccaacgacggctctggcattggagctgcgcttctcgcagcctcacactcccagtatcagtatggcgcgagtgactagtagtcctgaaatgggcgcggatcgagattttgagtgtagctctcatttatcttttcttttttcccttttcaaaacatctttttggggatttttttcggcttccttttgttggctattccgtggatgcacttacggctctgcattgggatgtagctagtatagagccaatgagtttggaggttatctaatggcacaaggcaggagcatggaaatggaagcagagcaatgacattcatgctctgcccattcttttttccccttgtatggtgttgtaaaccaataaaaaaatgttaacccttttttttgtgtgtgttggcaataaagagaatacgataatttgaccatgt

SEQ ID NO: 13535 - DNA, 1176 bp, Zea Mays
cagagcgtgggcacagccttgaaagcatcaaggccagcatcgaagccaggaaaccagatttcgatgcatatattgatccgcagaagcagtacgctgacgccgtgatcgaagttctgccgacccagttgatccccgacgacgacgaagggaaggttctgcgagtcaagctgatcatgaaagaaggggtggacaaattcaacccggtctatctcttcgacgaagggtccaccatctcctgggtgccctgtggaagaaagctcacgtgctcttaccccggcatcaaattcgcctacggcccagacatttacttcggaaacgaggtatctgttttggagatggatgggcagttcgacagactagacgagctcatctacgtggagagccatctgagcaacctctcgaccaagttctacggggaggtgacacagcagatgctgaagcacgcggacttccctggaagcaacaacgggacaggtctcttccagaccatcgtcgggctgaagattagagacctctacgagcagattgttgccgagagggctggcgcgccagtggaagcagccaaagtttgatggcccgcgtgcattcagatgtcctaaaacgggacaggcctcttcaaactcgacgcacgtctgttggggatatatgcatgggcagcatggcgaggaactaggagcctaggaggatgtggaagaaacgtcatttgcagagctcaggaaaacgtgcagcacttgtttagatgtgtgccttcttccatgcttcattgcagaaagaaatcaagtgcctctactactatcaggtactcctattcaagtgtaggagacgaatccataccacttccattgttggttattgtttctctgacccggagccaagaacagtcaacaaggacccgaggttgaacatctctttttatggactactggagagtaacaacatgtccgtttggttttaattagtactggattggactgcttctacagtactttgtctttatggattatagctgtagtagtcggttttaattcgtactggattggactgcttccacagtattttatctttatgcattgtagctgcagtagtccgaacaactggttttaatccgaggagagcattaatgttcttgccatctagcaattgaaaaccatagcaggcaaacaaaaaaaatcaaaa

SEQ ID NO: 13536 - DNA, 1251 bp, Zea Mays
cacgagtgagactagggttttagtggcctcatctctctcttcctcttctcccgccgcccagcttctctcttctctcggcggcgccaccacggcgatcaagcgcgatacgggcgtaaccgaagaatcgacaatgggcggcgagaaggaaacctttgatacgtccgacctcaacgcctccctccccgcggccgctgcagccctcagcgccgaggaccgcgccggcctcgtcaatgcccttaaggataagctgcagagcctggcgggccagcacgccgatgtgttagagacgctgtcgcccaatgttaggaagcgggttgagtttttgagagagatccagagtcaacacgatgaaattgaggccaagttttttgaagaacgagctgcccttgaggcaaagtaccagaagctttatgaacctttatacacaaagaggtatggaattgtaaatggagaagtggaggtagatggtgtttgtgatgaaccggccagtgagaatactgttgagggaaaagaaccagacgctaaaggagttccagacttttggcttactgccatgaaaacaaacgaggttttgtctgaggagatacaagagcgcgatgaagccgctttgaaatatctaaaagatatcaagtggtctagaatcgaggatcctaagggtttcaagctggattttttctttgatacaaacccattcttcaagaattctgtcctgacaaaaacgtaccacatggttgatgaagatgacccaattttggagaaagctattggaactgaaatcgagtggtatcctgggaaaaacctaacacagaagattctaaaaaagaaacctaaaaaaggttcaaagaatacgaagcctatcactaaaaccgaggactgtgagagtttcttcaactttttcaatcccccgcaggtccctgaagatgatgatgacatcgatgaagacactgctgatgagctgcagagtcaaatggagcatgattatgacattgggaccaccataagggataagattatccctcacgcagtttcctggtttactggtgaggctgtgcaaggtgaggattttggtgagttgggcgatgatgatgaagatgatgatgatgaagacgatgacgaagatgatgaggatgaagaagaggatgatgatgaggaagaggatgatgaggaagaaagcaagccagcaaggaagtcaggatctggtcgcagacataaggtatcgaatcaatgccaatatctaactgatggcgtgtt

SEQ ID NO: 13537 - DNA, 5434 bp, Zea Mays
ttcgcacgcggacgcggcacgcctccggctcccctctcgaaattcggttccgattcggttcccacaccagaccgaaccaaatacgcgctctcgtgctcgtgcgcgcgcgtcgcctcccaccccttcgtccgccgttgccgcccgcactctcccttccgccgtcgtgggcgcgcggcgacggggagagaggcaggtgaggtcggaagcggcggcggaggcgggcccccctccgtctactcttactcacgcacaccacggcgcccgcgagctagcgccctagcggagcggaggtcgaggcgggagaaaggcggttggggctccccggtgggcaggggggggggggggggggtcggaggcggggatggggctcgacggcacggtctcgggggtggtgtcgaggaaggtgctgccggcgtgtggtgggctctgctgcctctgcccttcgctgcgtccccgctccaggcagcccgtcaagcgctacaagaagatcctcatcgacatctttcccgcggagcaggaagacggaccaaatgtgaggaggattgggaggctttgcgagtatgttgctagaaatcctcatcgcgtgccaaagatcacagcttacttggagaggaggtgttacagggagttgagaaatgagcagtatgacattgtgaaagttgttgtgctaatataccgcaggctattggtctcttgtaatgaacaaatgccgttactggcaaatagtttattaagcatcatacaaacacttttggatcaatcaaggcaggatgacatgtgcatcattggctgtgaaaccttgtttgatttcatagtcactcaggtggatggtacatatcagttcaatttggaagagtttattccaagactctgcaaactttctcaaatagtaagggacaaagagaaggctaatgcactccgtgcagcagctctgcaatcactctctgctatgatctggtttatgggtgagctctctcatatctcctcagagtttgatagcgttgtccaagtagtattggaaagctatgagcctcgacaggtgcaaagtgacaatagtgccactgaaaatccaggttgtcagttggttgaagaggtccttaaacccgagggtcatgcctctccatcgacatttatattttctgtgataccttcttgggacagcatagttagtgactatggaggaattcaactgcttatggatgatgccaaggatccttatttttggtcaagggtctgtgtgcataacatggccaagctgtccagggaagcaactacattccgccgtgttatggagtccctattttgccacttcgataatactaattcatggtcatccaaaaatggtcttgcactttgtgttctattggacatgcaaatgttcatggaaaagtcagggacaaacattaatttgatgatatcagtactagttaagcatctcgaacacaaggccatactgaaacaacctgagatgcaactcagcattgtcgaagtgataactgctcttgcagaacaatcaagagctcaggcttcagcagcaaccatagttgctataagtgaccttgtgaggcatatgaaaaagacactgcatttagctcttggcagcaacgatttggaggtggtaaagtggaatgacaaactccgcatggcttttgatgaatgcatagtccagctgtcaaagaagaagaagaaggaggacctgctgagggagattgccaagaagaagaaggaagaggaagagaaggagaaggagaggaaggctgccgctcctgagcagcctgccgccacaacaaagcggcgcaacaggtgggatcagtcgcaggacggcgacgctggtgccggtgccaagaaggtgaagacatcctcggactgggatgcccctgatgcgactcctgggattggccgttgggatgccacccccggacgtgttggagacgccacaccctccgtgagaaggaacagatgggatgagacaccgactccagggaggatggccgatgctgatgctacgcctgcagctggcggtgccacccctggggctactccttctggggcttgggacgcgactccaaagctgcctggtggtgtcacgccaacccctggtaagaagcagagatcaaggtgggatgagacaccagcaagtatggggagtgcaacccctggtagtcttggtgctgcaacacctgctggttatactcctggtccaacgccatttggtgcagagaaccttgccacaccaactcctagccagattgctcgtggaccgatcactccggagcagtaccagctcatgcggtgggagcgggacattgaggagaggaacaggcctctcactgacgaggagcttgatgccatgttcccgcaggagggctacaagattcttgagcccccggcttcctaccagcccatcaggaccccggcaaggaagctccttgcgacaccgacacctctggggacaccactttatgctattccagaggagaatcgtgggcagcattttgatgtgcccaaggagctgcctggtgggttgccactcatgaagcccgaggattaccagtactttggaactttgctgaacgaggaagaggaggagcagctatcgccagaggagcagaaggagaggaaaatcatgaaactgttactcaaagtgaagaatggcacacccccacagcgtaaaacagcacttcggcaactgacagacaaagcccgtgaatttggtgcaggaccgttgttcaacaaaatactgcccttactcatgcagccaacactggaggaccaggagaggcatcttttggtgaaggtcattgacagagtactttataagctcgatgagctggtccgtccttttgtgcacaagattcttgtggttattgaaccactgttgattgatgaggactattatgctcgtgttgaaggcagggagatcatctcaaaccttagcaaagcagctgggcttgctactatgattgctgctatgcgacccgacatcgataacattgatgagtatgtgagaaacaccactgctagggcgttcagtgtggtggcttctgctttgggtatccctgcccttttaccattcttgaaggctgtctgtcagagtaagaagtcttggcaggctaggcacactggtatcaaaatcgtccaacagattgctattctcatgggctgtgctgttttgccacacctcaagtcactagttgagatcattgagcatgggctgagcgatgaaaaccagaaagttcgtacaattactgccctttctcttgctgcacttgctgaggctgctgcaccatatggtatagaaagttttgatactgtattgaaacctctgtggaagggtatcagatctcaccgtgggaaggtccttgctgccttcctaaaggccattggtttcatcatccctcttatggatgctctgtatgctagctactacacaaaggaggtgatgcaggtcctcattagggagttccagtctccagatgaagaaatgaagaaaattgttctcaaggtggtgaaacagtgtgtcagtacagagggtgtggaggctgattatatccggaatgacatccttccagatttcttcaagcacttctgggtgaggagaatggctctagatcgcaggaactataagcagcttgtggaaactacagttgagatggcaaacaaggttggagttgctgatattgttgggagggttgttgaggatctgaaagatgaaagtgagccctacagaagaatggtgatggaaacaatcgagaaggtggtagccaacttgggtgcatcagatattgatgctcgtctggaggagctgcttattgatggtatcttgtatgctttccaagagcagactagtgatgacgcaaatgttatgctaaatggttttggagctgtggttaatgcacttggacagagagttaagccctaccttcctcagatttgtggtactatcaagtggcgattgaacaacaagagtgcaaaagttaggcagcaagctgctgatctgatctccaggatagccatagtaatgaagcagtgccaggaggagcagcttatgggtcacttgggtgttgtgctgtatgagtacttaggagaggagtatcctgaggtgcttggttcaattcttggagccttgaaggctatcgtcaatgtcattggtatgactaaaatgactccaccaatcaaggatcttcttcctcgtctgacccccattcttaagaacaggcatgagaaggtccaagagaactgcattgatcttgttggtaggattgctgatcgtggagcagaatttgtgccagcaagggaatggatgaggatttgttttgagctgctcgaaatgttgaaggctcataagaagggtattaggagagcaactgtgaacacatttggttatatcgcaaaggctatagggccacaggatgtgttggccaccctgttgaataacttgaaggtgcaagaacgacagaaccgggtctgtacaactgtagctattgctatagttgctgaaacttgctcacctttcacagttttacctgcccttatgaatgagtaccgggtcccagagctcaatgtccaaaatggtgttctgaagtcactctctttcctctttgagtatattggtgagatgggcaaagattacatatatgccgtcacccccttacttgaagatgctttaatggatagagatctggttcaccggcagactgctgcatctgctgttaagcacatggctctaggtgttgctggcttgggttgtgaggatgctcttgttcatctgcttaactatgtttggcccaacatatttgagacatctccccacgttataaatgctgtcatggaggcaattgaggggatgagggtcgcactaggtgcggctgtgattttaaattattgcctgcaaggtctcttccatccagcaaggaaagtacgagaagtgtattggaagatatacaactctttgtacatcggcgcgcaggatgcacttgttgcttcttatcctgccctggaagacgatggggataacatctttagtcgtccagagttggcaatgtttgtctgattaacggtacctcatgttgcagctgctgaagcgttacactggatttaggaccaatcctaaggctgcagcatgccaattaatccatcaagatcctatattgtgaaggacaaatgacaatcctagcgcgctgtcatctttttatgaatattaggcgttgggcatttaccgtgttttaaaactttgtattacacatggatgttgtattatgtggtgtggacaatggaacgttgcaagctgacctgaacctgattccttactgtattactgagatgttgatatgcatgtcatgttagtgtacgttgtgttctccttgtcattttgtttgtgatatcgacatgctatgtttgttgctgaagttgagcacaaatgatttgttggtca

SEQ ID NO: 13538 - DNA, 820 bp, Zea Mays
atttgcagcagtagcatcccggtatacactgagctgcggttgattttgaaaagaaggcacactctgataaccttgaacaaagtaaagcaatggagaaaaatatgattgctgtggctagtgagattgagaggcttcgaggagagcttgcaaatgctgaaaaaggggccaccgctgtcaacccagcagcagctgttggtaactctgggtatgttgcggcttatggcaattctgagccaacatatactgcaatgtatggcaatcctgatgcaacatatactgcacaggcctatcctgatgcttataacactaatcaggctcacatgcacgctggtgccagttcctattacacgagtcaaccattttcctatggacaatacgagagccagcacaccaatatccaaagatgactgccggcacaagatagctttgactcgtctgccatctcattctcgctgtaaaaggatagtcgcagaatccaccggattaagcatgctagaaaaatctgttgcatcggagcgctggaactcctcgtggtcatgtttgcttttcttttctggctaatttgttccagaatggatgggtcgaattttggagcaaaaatctttctggcttctccatgtactaccataacgatttgtcagttaattctgcagattggtgtggtgttattcagggccgactatgatgcctctagccatttgtgtacatacgtataaatgaactaggtgagtgcccgtgcgttgcaacggaaccgtataataacacgataacttatgtacatatgtgtgttatattgttatgagaaaatgtttcagaatcc

SEQ ID NO: 13539 - DNA, 1273 bp, Zea Mays
ttgtttggtttgaagccggccaaagttgcctggcctggcacagatctcaggcgttggactttgagtgcttgggctaggattccttgccaaacagacctgagtgcatgacagcgacagccttctgggctcactcgcacggtcgcacccgaaacgccgcaaatccgggcccgcagcccgacccaactcaactcaggcagacactcgccgccgccacgacgtcactagtagagccgtagagggcaagaggcgacggaatgacggagcggcaggtggcggagctgggtcccgggacggcgtgctgcggctggaaccactgtggccgccgcctcgccgctggcgccgtcgatggctccgtctccgtctatgactcccagccgccaccctcgttcaagtggcaggcccatgagcaagccattgtgaatgtcgtctggcttcctccagagtatggggatgctatagcttgtgtttgtgctgatgggacactgtctttgtgggaggaggttgctgctgatgatcaacttccaacctggagaaattgtaaaatcttcgaggatggcaactctcatatactaaatgtacattttggattacatctgggaattctgaaaatggttactgcatactcagatggccaagtcaaggtctacgagctcttggattcattggaattagacaagtggcagcttcaggcagagttccaaaacattactgatccaatctctagatttggaaaacctgcatgcacttctgcatccatagcatggaatccaagaagaggtggaagccaacaagctagttttgcaattggctttaattcagattcgcctcatttcaactcttgtaagatttgggagtttgaagaagctcatcagcgctggcttccacttgttgagctaggttcacctgaggatacaggagataaagtgtgtgctgtagcatgggctcctaacattggcagaccatatgagattatcgcagttgcaacctgcaaaggaattgcaatctggcatataggtttgaacgctgatgctgatggcggaccttcgacgcagaacgttgctttacttaatggccacgatggcgaggtgtggcaactggaatgggacatgggcggtatgacactcgcatcaaccggaggagatggcatggttaagctatggcaggctaatttggatggagtttggcatgagcaggctgttcttgactgcagtggatcacatgtctagggtctacgtgtttcagaaaacatttttttttttccatggtgctttgt

SEQ ID NO: 13540 - DNA, 1960 bp, Zea Mays
ggaggcatcgtgtggaccgcgccctgcacaccttgagcgtgggcctgcctcctccatctccctctgcggcgtataaagaagcgacccacggccaccgccacggcctcgccggaatatcatacgaaaaccctcgcggcggggagagcgctttccctcccacacactcgcgccgcagcatccgcagtccgcacctgcctgcctccacgacttgtcgtgctcgtgcgctactctcctcgagtgcggcgcgggagcacggggacatctaatggcggccgcggcggagatcggtggtttcacggcggccgcgctcaggccgcttgcgcacccagccccggcggcggcgcctaggagggcggtggcggcgcagtcgctgcggacgaccgccaccgagacgctgacggcggatctcgccgccagcacggccaacggcgcggtgcatgctcagatgtatagtgaggctagtagtgaaatcccttcacaggcagctattgcaaattctaggaggaagacaaagatagtatgcaccataggtccctcaaccaacactcgtgagatgatttggaagcttgcagagactggaatgaatgtagcacgccttaatatgtcccatggtgaccaccagtcacaccagaaggttatcaatttggtcaaggagtacaatgcacagaacactgatggaaatgttattgccatcatgctggacactaagggtcctgaagttagaagtggggatgttccagagccaattatgctcagtgaagggcaagagttcaatttcacaattaaaagaggggtgagcactgaagacactgtcagcgtgaactatgatgacttcataaatgatgttgaagctggtgacatactgttagtggatggaggaatgatgtcgcttgctgtgaagtctaaaacagctgatacagtcaagtgtgaagtagttgacggcggggaattgaaatcaaggcgccacctaaatgttcgtggaaaaagtgctactttgccatctatcactgagaaggattgggaagacataaaatttggtgtcgaaaacggtgttgatttctatgcagtttcctttgtgaaggatgccaaagttatccatgaattaaaggactacctaaaaggtgttaatgcggatatacatgtcattccaaaaattgaaagtgcagactcaataccaaatctgcagtccattattgctgcttcagatggggcaatggtggcacgtggagaccttggtgctgaacttccgattgaggatgttcctttgctacaggcagagattgttcaaacatgtcgaaacatggagaaaccagttattgtcgccacaaatatgttggaaagcatgattgaccatcctactccaactagggcagaagtttctgacatagctattgcagtcagggaaggtgctgatgccatcatgttatctggtgaaactgctcatggaaagtacccactaaaggcagtcaaggtgatgcacactgtggccctcagaacagaatccagcatttataacccaactacttcccctagtgttatagcatctgcacagggtctacagaacgaggagttttccccaagccagctaagtaaaatgtttggatcccatgcaactatgatggccaacacccttcggacaccaatcattgtatttacgcagacaggctccatggctgtcctcctgagccactatcgtccctcgtctacaatatttgcgtttacaaacgaggaacgagtgaagctacggctagcactctaccagggggtcatccctattcacatggagttctctgacgacgcagaagaaactttctccagagcaattagcagcttgctgaaagcacaatatgtgaagaagggagactacgtcactcttgttcagagcggagtgacttcaatctggagagaggaatccactcacaacatccaagtgaggagagctcaggtctgatgtgaagag

SEQ ID NO: 13541 - DNA, 1095 bp, Zea Mays
ctcgattctgccccttagatgtttagatcgcgtcatagtggacgctctacgagcaggtggccacggcggccatggattgccagcgtctcgatgtggcaaaggactgtattggagtcctttcaaagcaatttcctggcagcacccgggttgcccggctagaagctcttctgtttgaagcgaaaagtgaatgggctgaagctgaaagagcttacacgcaaatcctggaaatcaatccatttgaccagattgtccacaagaggaaaattgctattgcaaaagcacaaggcaatatgtcgctagcaattggttatctcaataagtatctggaattatttatggcagatcatgatgcctggagagaacttgctgaaacatatgtttccttacaaatgtacaagcaagctgccttttgttatgaggagctaatattatcccaaccaactattccactctatcatatagcctatgctgaggttctgtacactatgggtggcttggaaaatcttcagacagctaagaagtactatgcatcaacaatccagttgactggaggcaagaatacaagagccctctttggtgtatgtctgttgaccaaaggaaggaataaagaggaagagggctcggagctgcagagattggctgcagaagtactgctgaataattacaagcagcaggctccatcaaaggcgccccttatcagcagcttgttgaagaacatgaaactcagctgataccaactagctctacacattcagaatgtcctgattcgatagatagttaagttaaattgatgtggcataatgcttgtttttttttgtggcactggcaccaacattgtgcaatggttaaaaagtaggtgctcccaaggccatgggttgtgtacactacacctgtttgcttgccgagaaatatgcatgacttctttttcattggatgttctattatagatcacaataaaccccggccattgtacttcagcacaaacaaaactttgaatcagtcgctggtgaagttgtacctgttgattttgattggtatctgactgttgtagccttgtagatgaatccctgactcggagcatttttttctttatcg

SEQ ID NO: 13542 - DNA, 2066 bp, Zea Mays
ggatcacgtggatatggcaggacgacgacgacgggagaggggaggagggagaaggagcaacaagagcgaacgcaaaagtacagtacagctcctgagatggcggcgccggcgccgaagcaggaggagctgcagccgcacgccgtcagggaccagctgccctccgtctcctactgcctcaccagcccgcccccatggccggaggccgtcctcctcggcttccagcactacctcgtcatgctcggcaccaccgtcatcatccccaccgcgctcgtcccccagatgggcggcggcaatgaggagaaggcgcgggtggtgcagacgctgctgttcgtggccgggatcaacacgctgatccagagcttcctcggcacgcgcctccccgccgtcatgggtggctcctacaccttcgtcgcgcccaccatctccatcatcctcgccggccgctacagcggcattgccgatccccacgagaaattcgtgcgcatcatgcggggcacgcaaggcgcgctcattgtggcctccaccctccaaatcatcattggcttcagtggcctttggcgcattgtcgtcaggctgctgagcccgctgtctgctgctcccttggtcgccctcgtcggattcggcctctatgaactggggtttccaagtgttgccaaatgtgtagagatcggtcttccacagattttactgctggttgcactttctcagtacgtaccacatttggtccccttgctgagtactgcctttgagcggtttgctgtcataatgtccgtcgtcctcatctggctttacgccttcttcctgacggtcggcggtgcctataagaatgctgctcccaagacccaattccactgccgcactgatcgatctgggcttgttgggggcgctccatggataagtgtaccctatccgtttcagtggggagctccaacctttgatgctggtgaagcctttgctatgatggcagcttcttttgttgctcttgtggagtccaccggtgcatttatcgctgtttcacggtatgccagcgcaacaccatgccctccttccgtcatgagccgtggcatcgggtggcagggagttggcattttgctgggtggattatttggaactgccaatggaaccactgtatctgtcgaaaatgctgggctgctcgctttgacacgcgttggtagtagacgtgttgtgcagatttctgctggatttatgatattcttctcaatccttggtaaattcggggctgttttcgcatcaattcccggcccagttatcgcagctgtatactgtcttctcttcgcatatgttggtatggcaggtgttgggttcctacagttctgcaacctgaacagcttccgaacaaagttcatcctgggattctccttgtttatgggtctgtcggtgccacagtatttcaacgaatacacttccgtcgcgggctttggtccagtgcacacgcgtgcaagatggttcaacgatatgatcaacgtggtgttttcctcgaaggcgcttgttggcggggcggtggcgtattttctggacaacaccctgcacaggcgcgatggcgtcgcgaggaaggaccggggccaccatttctgggacaggttcaggtccttcaagaccgacccgcgcagcgaggagttctactccctcccgttcaacctcaacaaattcttcccgtccttctgatccttgctggtgctggtaactgagagcagaaaaaatggctttggactgtgattttgttggcaatgccacgccgcccaagagggctgtttctcctacttctgttgtggtgagctttgaatcttgcagagctcagcgtaaactatttcgaaaggagtggagaaattgcttggtattgctggatgtaaattgggtcgggaaccgggatagattgataaaatgaaaacagaactgcgccagtactctttctgtagattataaactattgagctccagtgctattttagagtaaactaatgctggttgatgtgcaatcattgcatactctgcagtgagatactgacactgagcactgttgttttgttaatttcctgaattcgcag

SEQ ID NO: 13543 - DNA, 4802 bp, Zea Mays
ttgtgcttttggtcaatcgcatttgatgtttgagattgtgagccttgccgatgatttgcttccgcatatccctgcgagaatcattaagttaccaacatattaccatacatataaaggctcttcaacaaagaaatctgcttccatcaaacaagaggggggtggttcaacaggaaatgaaaggtctggccgtgagaggctattgcgtgagcaacctgagcttttacaacagtttggtatggatttgttacccacaatgacacaggtgtatggttctagtgtaaatgcaccaatacgtcacaagtgtttatctatcattggaaaattaatgtactacagctccgccgaaacaatccagtctctccttggcacaacaaacatatccagcttccttgcgggcattcttgcatggaaagatcctcaagtgttgattcctgctcttcagatagcagaaataatgatggaaaagcttccagagacattttccaagttatttgtgagggaaggtgtcgttcatgctgtggagtcactcatatgttcagaatcttccaacaaaatgccttctcaggtgccacctcaggataaagataaagattctgccatgccatcacgttctagacgtcaacgccggcgtgcgggtgctgttgcagcagaaaatagttcattggatgaatcaaatagttccaaccttggtgttatgtgctcaacagcaaccgcttcagaagctccaaacaccagccttcgtttcacagttagtgaccatgcaaagtctttcaaagataaatactttccggcggatactgattcaagtgatatcgggtttactgatgaccttcttaaactgagggcactctgtgcaaagttgaatactgtctctgagaacgtcaaaacaaaagcaaaagggaaatcaaaagctataagcactaattttttggacatctcaattgatgttgaagaacaattagacaaaataatatctgaaatgctctctgagcttagcaaagttaatggtgtttccacatttgaattcattagaagtggtgttgtcatagcattgcttgactatttgtcctgtgggacatttgggaaggaaaaggtatctgaaggaaacctatctcagcttcgtcagcaggcccttagacgatacaaaaccttcatatctgttgccctttctattgatcatggacgagatgaaactcccatggcactgttggttcagaaactgcaaagtgcattgtcttcgctggaacgtttccctgttgtgctcagccagtctagtaggattggtattggagggtctcgtctgacttcaggtcttagtgctctggctcaacccttcaagcttcgtctttcccgagctcaaggcgaaaaatcacttcgggattattcatcaaatattgtgcttatcgacccatttgctagtcttgcatctgttgaagaattcctttggcctagagttcaacgcagtgaggttgcatcgaagcctataattccatctggtaataattctgaatctggggttcctggcaccacggctggtgcatcattaacagctgcaatggctcaatctggtcggcgcccaacaacaagatcaaagtcatctgctgcaggtggtcttacatctaagaaggattctcatgatgaaagcactagtactgccaaaggaaaaggaaaagctattgtaaagccaaactcagatgaatcaaaaggacctaatacaaggaatgctgcccaccaaaaatctgcttcagagaaagatttggaaatgaagcaggcacatggccacagtagctctgaggatgaagagctcgacacatctcctgttgagatcgatgatgctttgatgattgatgatgatgacatttcagatgatgatgatgatgacgacgatgatcatgaggttctccaagaagggtctcttccaatctgttctcaagatggtgtgcatgacgtgaaactgggtgatgccgatgaatctaacattggatcagctacttttagccatgcacagccatcatctggttctggggctagaaacacttctagcaggggaccggattctactgaatttcgaagtatgggcacattcggttcacgaggtgcaatgtcatttgttgctgcgacgatggctggtctggcttctgttggtggtcgcagtgttagaggtgtccgagatcggcgtggtctgtcacttggaggtagcatgaatgatcacaataaacttatattcactgctggtggcaagcagcttaacaaacatttgactgtatatcaagctatccaacgtcaacttatgctcgacgaggatgatgaagaaaggtttaatggatctgatataccaaatgatggaaaccgcttctggggtgatgtgttcacaataacgtaccagaaggctgataaccaagttgagaagggttgccaagggacttccacctcattaaacataaaatcagattcttacaggtccatttctgaagcacaaggggtttctcttcttgatagcatcttacaaggagaacttccttgtgatcttgagaggacaaactcaacgtacaacattttagcattattgcgtatacttgaggggcttaatcagttatcccctcgtttaagagtacagggagcatctgatgattttgctgagggaaaaatcaataccctggatgagttatatagaactggagccaaggtaccttctgaagtgtttgtcaatagcaagttaacaccaaagcttgctcggcaaatgcaggacgttctcgcactatgtagtggcagtttaccttcttggtgttatcaaatgaccaaggcctgcccattcctgtttccttttgagacaaggaggcagtacttctattccacagcctttgggttgtcacgagcattgaatcgactccagcaacagcagagtgataatcacagctctggtggtgaaagagaggtcaggtttggcaggttacaacgccagaaagttcgtgtttcccgtaaccgtattctagattctgctgctaaagttatggagatgttctccagtcagagggctgttcttgaggtggaatactttggcgaagttggaactgggctggggcctactctagagttttatactctcttaagccatgaactacaatgtgctcaactgggattatggagagctacttcttcatatgattcaggattgcacactgatatgaaggatgtgatccgtttagatcctgaagatgggtcgtcaggaaaagaactcaacacagatctaccaggtgatggcatgtatttgatacaagctcctcttggattgttccctcgaccttggccacctaaagttgatacttcagaaggtagcagattcttcaaagttttggagtatttccgcttaataggtcaagtgatcgcaaaagtcctgcaagatggcagacttttagatttgcctttatcaacagcgttttataagcttatacttggacaggaacttgatttgtttgacatagtgtcatttgattctgagtttgggaagacattgcaagaactgcaagttcttgttgaacgaaagcagttccttgaatccacttctggcaagaaccagctacaagttgcagatttgtgtttccatggcgcttctattgaagatttgtgtttagattttactcttccaggttatcctgattatgtgcttaaagagggtgaaggaggcacaattgttaatatttataatttagaagagtatattactttggtggtggatgctacagttaagtcagggataaagcgacaggttgaggcatttagatcagggtttaatcaggtgtttgacatgtcatccctccacatattttcacctcaagaacttgactatctaatatgtggtcgacaagaaatttgggagtcggaatccctggtggataacataaaatttgatcatggatatactgctaaaagtcctgcgatcgtgaatctactcgagattttgtcagaattcacccctgagcagcagcatgcgttctgccagtttgtaaccggtgctcctcggcttccacatggtggattggctgcccttagccccaagcttactatagttaggaagcatccttcaagtgctgtgaatacttcaaattcaactggggcagtagagtccgctgatgatgatttgcctagtgtgatgacgtgcgccaattatctgaagctgcccccctactccacaaaagaaatcatgcgcaagaagttgctttatgcgatcctggaaggccgaggatcatttgatctttcataagaaatatacaatatccgaactaacatacaggggtcagttttattctggagatttagtttcttggtccatgtataacactgagttgaggttaccagctcactcagcaaacggcttcaagggcgagagccccagtcctcactcggatgcaggctaagctatagtaattgaggatgtgcgccttgagtgaggatgtgcgccaacaagaacccccgtttgtttcagtacatgtaaataaaagggattttttgttccagaattgttatctgtaacaagaacatctacatctgtgatgactgaccattaataaatgtgtcccggtgtaccatttgttttttttctttgagcactggcagtagcaggatacacaaaagggagtgtatgctatatactactagtcgcggatagctcatctggtcatggccacagttttttcttatggagagaataacaaaatttggccctataaacagaaaaaaataaagtgcaagaatcggcagcatgagaattgtttgtacccaagactatctttagtagcttaccc

SEQ ID NO: 13544 - DNA, 326 bp, Zea Mays
aactcggctacacctgcaaaatggatatggcaatggcttccttcgtcgccgctacgcaccaccacggcagtcacctggccgccggcttcccctactccgcgcgagcaggcaggagcgttggccgcagcggcgtcaccatctccattagagcccagaagaacaggcatgaatatgggttaaagaagcctatactgcatgttctcagtgatcgcatgaatgaatctgggttttctcggcctgagggttacctttatccttatcctatcaagcctggcccttatttcattaaagaggaaggaaactgagtaaatcacatgctacttggt

SEQ ID NO: 13545 - DNA, 100 bp, Zea Mays
atcgggtggaaggccgctgttgacctgggaattgctcatcgtggttggagaaagccgtgggtgacgcgaattgcgtcgaagctaggtgccaccgccccca

SEQ ID NO: 13546 - DNA, 542 bp, Zea Mays
cagcaccccccctccctccctatctctctgatctctccctcgctctcgcagccgccactgtagaagcttcgaggctgctgctgcgcccatggccgcggaagccaagacgccgtccctcgctgaggaatattcacttccaccacaggaagttccagtggaaaaggcagctgaggagaagccctctagtggtactgagactgaatctgctccttcaaccaatgatgagactccttcatctgtagaagataagaatgaaacgtctgaagtacaagatgctgctgaaaagtcagacgcagaagaaactaacactgctgcagaggaagcaagtgagactgccgaggaggaagaggctgagaaacctgagatcaagattgaaacagctccagcagattttcgtttcccaacaacaaatcaaacgaggcattgtttcacacgctatgttgaataccacaggtgtgtggctgcaaaaggtgaggatgcacctgagtgtgataagtttgccaagtactatcgatccctgtgcccaggtgaatgggaatgtt

SEQ ID NO: 13547 - DNA, 2229 bp, Zea Mays
ccaccacttgactctcgtctcgtctctgcactggattggaggttggggccgtgaagggtaggtaggtcgcttgatagggacaaggggggagacggcgagaggcgtttcgccgagcagttcgcgtgctcccctccacaggccgacgcggcgacgccgctgtttcaggttctggaatttccagtgcgggtgcattaggctgctatgggcaagtcgccggggaagtggatcaaatcggtgcttttggggaagaaatctaccaagtcaggtcctaccaagtcgaatgaatctaaggctgacaacaacagatactcgaccggggaggaccgcacattgtctgagagttctcctgtgatttctgagccggtactagttaacatccacaagaacgtagctatcaatgggaaggctgcagatgccagtgatagggcacggcaacaagatccgcagagccaaagcgttgttgagtccagatcatcggctccagctgctcagctgggagaagatcaagctgcagcgaaggcacaggcagcctttcgtggttacctggcacgaaggtcattccgtgcattaaaaggtatcgtaagactccaggcgctgattcgagggtatcttgtaaggaggcaggctgtatcaacccttcgcgcaacatggttgattgtgaagtttcaggctctagttcgtggaagaaatgttagactctctggcagtcgcatgcagctcaatgtgaagtttggtcagagtaactttgggggtgttagatcgtctgatgcatggaaagagaagctatcttcaaatgcttatgttcggaagcttctgtcttcaccaattgttttagaacctcttcacttccagtatgacaagagggatcccaattcaacctataactggtttgagagatggaccataggttgcatctggaagcctgcttttcaacccaaaagagttgctgatgggaaaccactggtaaagaaggctagttatgcaatggaaactcaatcagccaagttaaaacgcaacattcggaagggttctgctgctatcgctgggagtttccatacatctggtgaatctgataaagtaaaaaggaatccaaagaatttctctagcttccctgctgattcagtaccagatagccagttatctgaacttgaaaaggttaaaaggaacctcaggaaggtaactgattcgatggctgaagcctcaaagatatctagttccagggttgattcctcgaaggtatgtaattctacagctgaggttccaaaggaatctaatcctgtggcagaaatctcaaagatacgtagtctcctgaatgggatctctgaccatcaggatattcaatgtgagaatacacgtgaatcttcatttcctcttggaactcaagaagactctgacaatgatcatctattgcgatattcaaatatggatagcttggacttggtacctggtttgaaaagtgatcaggaaattcagctggattcggtttctataggagaaaatgttgatgatcccactgttgttgctccagcagttgaagaaatgtcaccgcaaaacattgatacggaagacaatgttttatgcaagaaagaggaagcaaggtccaaggaagagcacttgtctaatggaagccttagaactagcaagaggaagtcttcattccccaacaaatcagaatatgtagaaaatgggactcacgctactcctgttcagccaaggcagccaagctatatggctgcaacggagtccgcaaaggcgaaattgcgagcccagaattcacccagtctggattctgattcagcggcagaaaagaatggtttcacccgacgccactctcttccttccagtacaaagagtagagcacttaaagctgaatggaagcgctgaagaggcaacccatcgtccacttgaattgaattgtgcactgctctgaaacttcgctggatgaactcgaccggtcttgtcccatgttcttgctgtattgaacaaccccttgtgaagttgcgattctggttcagtttgtcgtaggttcatgtgcaaccactagtgccttgtgtcgtatattgcatggttcttgtcgaaggaacaatgcctgcgaaagctgatgttaggactgcattaactgaataacatcacccagttgcccaggtctttgtttgtcgtcttaatgagtgatgaaaaagcagtttcgcagaactgctagtgacatgaaatttaaaacctggatttatt

SEQ ID NO: 13548 - DNA, 993 bp, Zea Mays
tgatattttttgtatgctggtggctgcttcaggcatattcacatctgaagatattagtgagctcaacctgccgaagaccacatcaatttcttttcccaatggcaaggatgatctgatgaattttgagatcaccatccgacctgatgaaggatattacatgggaggcgctttcgttttcacctttcaagtgtccccatcttatcctcatgatcctccgaaggtcaaatgcaagaccaaggtgtaccatccaaatattgatttggaaggcaatgtctgtctgaacattctgcgtgaagattggaagcctgttctcaacatcaacaccgttatttatggcctgaatcttctttttacgcaaccaaacgacgaggatcctttgaaccacgaagctgcagctgtcctccgtggcaacccaaagatgtttgaggcaaatgtgaaaagagccatgaccggaggctacgtaggccaacactatttccaaagatgcttggcttgatgtgatggcttcaagccagcgggcccatgtatcagcaccagcgcgcccaggtttggaggatttttgtggatttagggcgcttctggaagcaaaggtcaaatcggtcgttgttgataatgtgatgtactccctcagttctttttatttttcatgttttagtataaaaatgaactaacaaacgacaaatattcgataacgaggtagtatctgtttgccctgtgacgtgtttaaaaccggtgaatttggggatatggtggtgtcacaagggaaaatgcttctccaattatatcactcgataaatactaaacgagaaatgggaactggattgtaaagaagatcgcttcttttccagaaaaaacaaaattgaggtggtatctttgattttgtactcggctgtcttcaatgtccgatcttccaggtaaacaccctctatttcaaacgtttcgattttttgtaagtttttagtctgatgtgcatttattttaaattataaggta

SEQ ID NO: 13549 - DNA, 1831 bp, Zea Mays
gtggttgttttgcaagtgaatgttagcgttaacaaattggaagatcctgtgcttgaagtccttcagtttgagaaaagtatatcaaacaattgtatgcctgggaatcttgtggatggacaatgtgacagtaacgatgatccatgtcaggagctgcttagttggttgctccctttagatcgcacattaccacctcgttctttggcaccccctactctcaatccaagtgtatcacacaagcaatcttattctgcttctggttctcaaatattcaacttcagaagttactccatgccttcagcctcttctgttcagacaccaaataatataagaccaccaccaatatctgaaagtcaagaatttatgcctgaaaaacctgcaaaaaccccagatattataaatgatgggcaactttcgtttagaggagttcctttagaacctgaacggtattctgtacgttgtggtttagaaggcgtgtatctaccagggaaaagatggcggagaaaagttgaaatcattcaaccaattgaggttcaatcttttgctgcaaaatgtactgtggaaaatcttctctgtgtcacagtaaagaatattgctcctactcatgcaaaagatatagtcgtattcatcgatgcaattactattgtatttgaggaggcatccaaaggaggtgctcctttgtctttaccaattgctagtattgaggttgggcatggtcacagcttgccaaacctagcactcaggaggggcgaggaacactcttttattctcaaaccagcaactatgtcctcaagggaacggaagactaacagtcatgcacctctggccttatcactcccaacgatgaccggtgctactttaaatactcatacaccaaaggctggtgagccgtatgctgatctaagtgaccaatatgctgtactggtatcttatcgctgtaattacacagaatcgaaactttttttcaagcaagcaacaagctggcgaccctctgcagccagcgatcttatgatctcagtatcatccgaactgtctttacggaatcctagtcttggtgctcgtgttcctcaactccccgtgcagatactaacactcgaagctactaatatgacatccgaaaaccttacattaactgtccttgctcctgaagcatctggttcttcttcagttgtatccttgaactcatctccaaccaccccaaatggttcttttgatggtgttaatgagtcagcaaaaagatctggggtgggaaaagatgggattggctttcgaagattgaattctgtcctagctactccaaaagaaggtgtgttcctgcccgctcaagcaccactgtcaaacttgagctgctaccattatcagatggaattatcacacttgatactctgcaaataaccgcaagggagaaaggccttgcttacataccggagcactccttggagatacatgccacctctggtatgtcatcaggaaggtcataggataggagagcatcaagagattttaccgaaggatggttgctgccaacatggggaaactaccccagatgaatcattatgtatcacaattgtgttacaaatccattcatttcatactgaggtcgccgagacactggtgttcgtcttcacaaaggcttatgaaattcgtaatgtgttgcttagttttgatgccgttattgttgttggtggtgttcatttaatcccactcatgttgctgagttgtaccatatgcgggctctgatcataaatatactggagaaataggaacatgtgtgtccattggccattgctcatcttcatgatgatatatcagttgctcatgaatcattatgatc

SEQ ID NO: 13550 - DNA, 1343 bp, Zea Mays
gtccttggtgatatggtttcttttcagctctcggtatctcaacccaagtcccaagggattcgggtgccaggagggcaccatcttctgcggcatcttcgacggccacggccagtggggccactacgtggccaaggcggtgcgcgactcgctgccgccgtcgctgctgtgccactggcaggaggcgctcgctctcgcgtcactcatcgacgacggcgagaagaagctcggcgactgccagttcgatctctggaaacggtcctacgtggccgcatgcgccgccgtggacgatgagctgcggcgcagccgccgcttggacgcggtccaaagtggctgcaccgcgctatccatcgtcaagcagggggacctcatgatcgtcgccaacgtcggcgactcccgggccgtgttgggcaccacgtccgacgatggcgccattgcggctgtccagctcaccgtcgacctaaagcctaacctgccacaggagaaggagcgcatccggcggtgcaatggtcaagtgtactgcctcgccgatgagcccggggtgcaccgcgtgtggcagcctagccgagagtcgccggggctcgctatgtcgcgcgcgttcggcgactactgcgtcaaggactgcggtgtcatctctacgccggaggtgacgcagaagaggatcagcagcagtgaccaatttatcatcctcgctaccgacggggtagctttcggcctatctgcctttaattctctatgcaaacacaggcacatgcacccatcttttcgtttaagaaagcatacacattgcttggtgactgacgatggcaaacgggaattttatccgataggtatgggacgtgctctccaacgacgaggcggtacatatcgtggcggggacgccggaccgggcgaaggcggccaagcggctggtggagtgcgccgttcgcgcgtggaggcgcaagcggcgcgacatcgccgtcgatgactgctcggcgatctgcctcttcttccacccgccgccgccgtcgtagacacgaaaacctgtaacgtgccgaagtccacgccaaggaggagggggcaacgaaatgcacatctcaagacagactacgattattgtgcccgtggcgttcgtagagtgcactgccgccgtccaccgttcagaaacgtgcagtttgtcacgtgagagcgacactccacgattaggaactgcagccggtgcacggccaaacaaaaagatctccggctttcacacgttaccagtcaagatgtacgagaacatcagagaaaaagggtaggaaagacgcattttgtcctcatttttgggtgtctggctctgaatttctcagtcgcaattatagatgcac

SEQ ID NO: 13551 - DNA, 2057 bp, Zea Mays
tccctggttccctgcctcctctgtatactaactctcctctctcccagagtcccggtcagctcgactgctccagttcttcccatttcccagccgccgcggcgccacgcagacctagcagagaaacacccacccgagatggcgatggctctgcgccgccttgcgggcgtgtccggatcgccgtcggcctcctctgccgcggccacggtgctactccggtcggcgctgacccgcccgatctccaccggcttccgcgaggagcgcgacaccttcggtcccatccaagtccccaacgacaagctgtggggcgcgcagacgcagagatcgctgcagaactttgacattggcggggagcgtgagaggatgcccgttcccatcatccgtgcctttggcgtgctaaaaaagtgcgccgctaaggtgaatatggactatggccttgatccaacaatagggaaggccataatacaggcagctgaggaggtcgcagagggaaagttggatgatcacttcccacttgttatctggcaaactggcagtggcacacaaagcaacatgaatgccaatgaggtaattgcaaatagggcatctgagatccttggacacaagcgcggtgagaagtttgtgcacccaaatgaccatgtgaataggtcacaatcttcaaatgatacatttcccactgtaatgcatatagcgacggccgttgagatacattcgaggtttatcccaagtttgcaacagttgcatgattcacttcattcgaaaactattgagtttaaagacataattaaaattggacgtacacatacccaagatgccaccccattgactcttggccaagaattcagtggctacactacacaggtcaaatatggaattgaccgcattaattgtacattacctcggatgtaccagcttgctcaaggtggaactgcagttggaactggcttgaacaccaagaaaggatttgatgccaaaatagctgctgcagtggctgaggaaacaaacctaccctttgtgacagcagagaacaagtttgaagctttggcagcacatgacgcttttgttgagagcagtggtgccgtaaatacaatttctgcatctcttatgaagatagcaaacgacatacgtttgctaggaagtggtcctcggtgtggtcttggtgaactaatcctaccagaaaatgagcctgggagcagcattatgcctgggaaagttaatccaacccagtgtgaggctctgacaatggtttgtgcacaggttatgggtaatcatgttggtgttacaattggtggtgccaatgggcattttgaactgaatgtttttaagccaatgatcgcagccggattacttcgatcattgaggttgttaggggatgcatccgtgtcctttgagaaaaattgtgtcaggggaattcaagcaaaccacaagagaatttcacaacttttgcatgagtctctgatgttagtgacatctttgaaccctaaaattggctatgacaatgctgcagctgttgctaagaaagcccacaaagaaggaaccacgttgaaggaagctgcattagaccttggagtattaacggagcaagaattccatgagcttgtcgtcccggagaaaatgattggtccttctgattgataaccccatgttcactatgtttctttgaagcattcaggttgccacatccgcgagttctggtggccctgtgtttccaagttaatgattctagcgcacccataaataaagcaaataatttttcatatggtcattaggtcctcaccgtaccgcactagagaaatgatttttgcatggcggatggtatctgagaaaacagttgtattcttgttcaaatagggagcagtgcactttgattcatgaggcgccttccattatcttggcatcagtcaaccttttcttgccaagtagctagtgctatgtaacaagtgacatggcaaccatgtatagaaattatttgcatgggtttgtgttcttgccaggtagctaatgttatgtaataagtgacaaggaaacaatgtcatgaattatttgcattgggtttaata

SEQ ID NO: 13552 - DNA, 1691 bp, Zea Mays
attgcctgatcctggatgtcactctgaaggtcacttgcatgaaagagctgttgctggtttagcagcagatggcaggcaaattgtttcaaggacgaagtcagaagctgccagttatgaaaaggtctatggagaacccattcctgttaaggaattggctgatcgtgtggcaagttatgttcatctttgcacgctgtactggtggctcaggccttttggctgcggtgttattcttggaggttatgatagggatgggccacagctctacatgatagaaccctcaggagtttcttataaatactttggtgctgcattagggaaggggagacaggctgcaaaaactgagatagaaaagttgaaactttcagagcttacgtgccgggaaggcattgttgaagttgcaaagataatttatggagtgcatgacgaagcgaaggataaagctttcgagttggagttgagctggatctgcgatgaatcgaaccaccagcatcagaaggttccaaatgaactgttggagcatgccaaagctgctgcccaggctgctcttgaggagatggatgccgactaagagacacgatgatttgcccaaacttggtgttttcggtggtgttgatatctctgatcccttggggggggggggacccactaggggtaggcacatttcaaccgaaaaccgagccgaactggaatcaaggttttttcggtttttcgattcggtgtcggttttcctttcttacgaaccgaaaagatcggctcggcttcggtttctatttgctggacaccgatacaaccgaacttactgcagtctaatgtcctgtgtggcgcgcgttcaactggacctggacaatttgcagtgcagcccaccgaagcccaaaagacaccaacgcacagcttcatagtccataccagctagcccaattatttattaccaaacgtctagggctccaggccaagccacacgcccaaagtccaaaccatgccgcatcgtatagacagaagcgcttttggcctgcccctggtggctctcacgtcggcgtgtcgtgcgccagcgtggtgcatctgtggaaccagcagcgagcggcacctcgcgagaactgcggcgggcggcgcagctctctggaaagagcgcggcggcaacgcggagcagtcgatgggcggcgacgactgcggaagccagcagcagacacacgaagacgattcttttggtagaaactgaacaccgaacgaagtctacctcgacggcagcgtctacgtcgacggctggagtactgcactgagatacgaagtttagctgcaccaaagaaacagaaccgattggtcggtttaaaccgattgcccacgacccactggacatggccagtttcacacagcctacgttttgatccatgtcatgtagaactccaaccacggttgagtgtctcgctaggtaacgagcgaaaactggggaattttctcgttctcggtccacactgggatacgaaagccagctcggattttagtgtatttcggtttcaaatttgaaaatataataattgaatggtcaacaaaacggtttttgaaatttcaaaacgagaatgtaatccctgactccgaccatggaagtctggaatctagattgactgatatcagcgctgtggatgccttggcgtcttgaggaactttttagcttctgctgtaccggttacgcagac

SEQ ID NO: 13553 - DNA, 76 bp, Zea Mays
atttggagatggcatgtggcctgtggtgattacaatcgtgaagacgaagctacaagcttcagttcagtgacataaa

SEQ ID NO: 13554 - DNA, 4282 bp, Zea Mays
aaccagtagccgtactctacagaagcaaggacatagagaattgacaagaaaaatcacgcaagggaggagagagagaaggggggagcatagcataggcatagcaagagcaaagctgaaaaagaggagcaccactcgtggggggttaaaaccccgagaacaaacttgggagtagcagcggccagccggaagcgagcggagaccgaggggagagggggtgaagaagcaacgagacgcagcgagcaagcgaaagcataccagagcaccaagcatagggacgcgcgcgcttctccagttctccctccctgccctgcaaggcggctgcaactgttccagctagcccctctcccagcctctgcgtcgtagacgtggtagtagcagccgcagcagcagaagcggcggcgagcatgctcttggcacccctccccggcgccgggcggatctgccggagggcggcggccggggcgcttggagcgcggcgctaaccgcgttcgaaggacctcgggatctgacgccgcgcctcccctaatcgatcgactccatcggtggcggcggcggccgaggcggcagcagccgggtctctcggctccgggacaagaagggaaagattgcgcttgcgcttgcttgggcgccggccgcgccggtggcggtaatcttcgagagccgcggtcgcggcgcgcggtgaagagaaaaaaaggtgtgtgtgtgtgagagagagaggaggctccctgccctctcgcggtgacttggcgaggagggggagggactgggaaagcgaatggttttcgggaaggcgctgtgatttggcctggaaaggaggaacctttccttcctcttcccgtcctttgccggctcttgtaccgccctcagatcggcgacccggttgtttcttcggcaacgggcggaaatgaggctctcgtcgtcgtccggcagcgtcctgccggctcagccgggctcgccggaagctgtggaggagcacaagtgcctgaactcggagttgtggcatgcttgtgccggcccgcttgtttccttgcccgcggtgggtagccgagttgtgtacttccctcagggccacagcgagcaggtagcagcatcaacaaacaaggaaatagagtctcagatccccaactatcctaatctgccgccacagcttatatgccaacttcataatgtgacgatgcatgctgatgcagagacagatgaggtatatgcacagatgacactacaaccactcaacccgcaagaactgaaggacccatatttacctgcagaattaggttcggccaataaacagccaacaaactatttctgcaaaacattaacagcaagtgataccagtacccatggtgggttctccgttccccgtcgagcagctgagaaagtgtttcctccactggatttcacccagcaacccccatgccaggagttgatggcaaaagatcttcatggcaatgagtggaaattccgtcacatctttcgtggccagccaaagcggcatcttctaactacaggttggagtgtctttgtaagtgcaaagagactcgttgctggcgactctgtcctttttatctggaatgacaataaccagcttctgctgggaattcgtcgtgcaaatcggccacaaactgtcatgccatcttcagtcttatcaagcgatagcatgcatatcggtcttcttgctgcagctgctcatgctgcttcgacaaatagccgatttacaattttttacaacccaagggcaagcccttcagagtttgtcataccactcgtaaagtatgttaaggctgtgtatcatacccgcatatctgtggggatgcgattcaggatgctttttgagacagaagagtctagcgttaggagatacatggggacaattaccggaatctgtgatcttgattctgttcggtggccaaattcacactggcgttctgttaaggttggctgggatgagtcaactgctggtgagcgacaaccaagggtgtcactatgggagattgaacccctgacaactttcccaatgtatccatctccttttccgctcaggctcaagcgtccatggccaacaggcttgccttctctgcatggtatgaggtgggaaggatgatgacctggctaactctctcatgtggcttcgagataccgcaaatcctggttttcagtcgttaaattttggtggacttggtatgagcccttggatgcagccaaggctggatgctaccttacttggtctgcaacctgacatgtatcaggcgatggccacagctgcttttcaggatgcaacaaagcaggcatcgcccacaatgctgcagttccagcagccccagaacatagctggccgggcttccccgcttctttcaagtcagattttgcagcaagcacatcatcaatttcagcagcaaccgtaccttcaaaacatctctgagagcacaatccaagcacagggtcagtctgagttcctcaagcagcagatccaacgcagccagtcattcaatgagcagaagccccagatgcaacaccagcaagaatcacagcagcagcagcaaccacagtgtctgccagtcccccaacatcagcaaatgcaacaacagaatatgaccaactaccagtctatatctaatgcattatcaccgttttctcagctgtcgccagtttctcagtcttcacctatggcgctgcagactatattaccgttctcgcaggcacagagcttcacagacacgaatgtaggttcattgtctccatccaatggtaacaccatgcaaaacacactgaggccgttctcatcagaagcagtttctcacctcagtatgccgaggcccactgcgatacctgtcgcagacccatggtcgtcgaagcgtgtcgcggtggagtctctgcttccttctcggcctcaggtttcatcccagatggaacaattggaccctgcaccagctagtatacctcatagctctgcgttggcaccacttcccggaagagggtgcttggttgaccaagatgtgaactctgatcctcaaaatcatctcttgttcggtgttagtatagactcgcagtcactgctaatgcaagggggcattcctggtctccaaaacgggaatgattcagctgctataccttattccacttccaatttcctcagcccttctcagaatgactttcctctggaccatacactaaattcttcaggctgcttagatgattctgggtacgtcccgccatgttcagataattctgacaaagtgaaccgaccaccagcgaccttcgtgaaggtttacaaatctggaacctacgggaggtcgcttgatatcactaggtttagcagctatcacgagctccgtagggaactggggcgcctatttggccttgagggccagttggaagacccattgagatcaggctggcagcttgtattcgtcgaccgtgaggaggacgtccttctcgtgggcgacgacccttggcaggaattcgtgagcacggtgtcctgcataaagatcctctccccgcaggaggtgcagcagatggggaagcagggcctggagctcctgagctcggcccccgcgcggaggctcggtagcagctgtgacgactacgtcagcaggcaggagtcgagaagcctgagcaccgggatcgcgtccgtcggttcggtcgagttgggatgagcagcaagatagcgcgcacgcagcagcagcagcagcaggttacgcatcctcagcctcagggtaggtaggggactgaagggttggtctgcgacttgatgacccacgagctcctcgttgcgcgcttcgttcgcctccatgcgatggatagaagttcagcgcagaccaagccttagctctgcgagctatgtaccatctaataattctgtccgtgtcgtaccatgtcaactcctaagtagaagaattgaagaaactaccagcagccgctgtctggtatacacgctgaaacattttttttcttgtatggagaaatactaatcatctggatgtagccaggcctatgctctctaatggttgatcgggtaatacagcccctcgcacacagcaaactcacaagagaaacttccagttgctacattaagtttgggcagtaataaaaggtccgtcaaaaattaacttttttttttctcggcagcaacaagaagtccatacaaaattaacttattttttagtggctaaacggaggaggctgaaaatattttttttgttttggcggtatgtactaagacgttgtatttagtcattgaaaatagattgattttcggcagtctctatcgcagcaagaaagaaag

SEQ ID NO: 13555 - DNA, 445 bp, Zea Mays
gcctcgttgatttctggaaaagagaagttaggaaataatgtcctttataagatcatatgttgtgcccgaaggctttccagatagtgtcacaccttcatatgttccatacatgacatggagagcattgaagcatttctttggtggagcaatgggtgtgtttacaacaagaaccttgctcaattctgttggagtctcccaaagcagggccgcatctggtgctgtggctatcaactggatactcaaggatggggctgggcgtgttggaaagatgttttttgcccgccaagggaagaaatttgattatgacctgaagcagcttcgcttttctggtgatctcttgatggagttaggagctgggatagaactagctactgcagctttcccccagtttttcctaccaatggcatgcatagcaaatgttggttcctttcctactgatttgtag

SEQ ID NO: 13556 - DNA, 1576 bp, Zea Mays
caatcaccactcaacagttgagtttaaccccgcctcctctcctctcccctcccctcccttcttcatctcttctcctcacaaggcttcctcccaccacctccagtcctccaccggaccaccacctccagtcctccaccggaccaccacctccaccactcctctctcagaacacgcgcaaaccgctcgaaccctagctggtggcgggaggcggaggtggctccgggatgacgcggcggtgctcgcactgcagccacaacgggcacaactcgcggacgtgccccaaccgcggggtcaagatcttcggggtgcacctcaccgatggctcggccatccgcaagagcgcgagcatggggaacctctccctcctctccgcgggatccaccagcggcggcgcgtcccccgccgacgggcccgacctcgccgacggcggcgggggctacgcctccgacgacttcgtccaggggtcgtcctccgccagccgcgatcgaaagaaaggtgttccttggactgaagaagaacaccggaggtttttgctgggattacaaaagctcgggaaaggggattggcgaggaatttctcgtaattttgtggtctcaagaacacctactcaagtagcaagtcatgctcaaaagtattttatacgccaatcaaatatgagcagaaggaagagaaggtctagccttttcgacatggttcctgatgagtccatggaccttccgccccttcctggaagtcaagaaccagagacctcaatgttaaatcaaccgccactgcctcctgctgtggaggaggaggtggaatcgatggagtcagatacttctgctgtcgcagagagttctggagcttctgctctcatgcccgagagtttacagcctacctatccgatgattgttccagcttatttctcgccgttcttgcaattctcagttcctttctggccaaatcaggaagatggaggcgatcttccccaagaaacacacgagattgtcaagcctgttgcagttcattcccagaatccaattaatgttgatgaactcgtgggcatgtcaaagctaagcatatgggagcatggtcaggagacagtgtctacttctctgtcgctaaatctgctagggggtcaaaataggcagtcggctttccatgcaaaccctcaaacaagagctcaagcctgatcatcccctaccagcacagaaactgcattttagatggaatcctgggcaaaataagctttgctcttttttcttcttctaaatttaagatcactgagtcataaggtcactggttcgaagtagcttctccgtatttgcggggaaagcctgccctggtttctctccttcatcagaccccactcatatgggagccttcaatattgtcttttttatatatttaagattgaccgtgctcggtagcttgtatcatgtgctgtaagttatgctatgtatgaatgtacctgtagtttgtatggcacgcatggtatgccactcttatgttagcaaagtcattaatgttagtgctgatctttatggttgtaattttataaacttctaaaaaaaagtataagccagttcttttcaaa

SEQ ID NO: 13557 - DNA, 134 bp, Zea Mays
atcaagtggaggagccatctaactggggtttaatagagggatcgagtacctcttcactgcaacaaaggtgatgaggagtattctaggagttcctgtggctggaaggcgtttccagttctggaggaggattagtt

SEQ ID NO: 13558 - DNA, 1220 bp, Zea Mays
caactgtttaaagcataaagagtactcagtactgcaattcaacagtatgagaaaaggagggagaactttgtcaaagagcttgactttgtgattgcagatgtggtcatggcaatagttgcagattttatgcttgtatggcttcctgctccaaccgtgtctttacagccaccactagcgatgaattctggagccattgctaagttcttctacaactgcccagataatgccttccaggttgctttgtctgggacgtcatactcacttttgcagagagtaggagcaattttgaggaatggtgcaaagctttttgctgtcggaactagtgcctctctgattggcactggtgtgaccaatgcactgataaaagcaaggcaggctgccagcaaggattttgccggtgaagttgagaatattccaattttatcaactagcgttgcatatggtgtgtacatggcagtttccagtaacctcaggtaccaggttttagctggagtgattgaacagcggatgctcgagccactactgcaccagcacaaactagtattgagtgcagcatgttttgcagttcggacagggaatacgtttttgggttccctactgtggatcgactatgccaggtggataggcgtacagtaggctcaagcatgggtacacaaatgcagttgctcggagttccagcaatatgggttcttcgtgattttatattaccacgcttcctccaactggcaagtactcgtttgcttcatgggagactcttaggacagattttgatatcattctttaaacaatgccttgaggaaagcgtgatttatcgaaattgttcccgcaagcaagagagtgaatttgttttgagggcttaaggttgtgttgtgcgtgttggattggattgattaaaattcgtagtttcgtacagttttgtcattgtttgtgcaagttcctgtgatttggttatcgtggtcgagcaccatttttgctggccatgcctacaccaaagtttggcattactggcaaacatatccgggtgttgtcacgagaagaaaaccattctaacaagtgggcttaaaagtgaaagtgagcccaaatacaaacaaaaccaacgaaaggagttggtagaccgagtgcaaacagcaaaaaatagtaaaagtagatcacagcacgtcaaaaaaaacagagggccggcaatgccttacgagctgtaaatattcgcaacgagaaattca

SEQ ID NO: 13559 - DNA, 1636 bp, Zea Mays
gttttaagcagttgagttcgaattcatgagagtctagacctttcaaggatcgatcggatcatccggcgctcccttggatcgcaaggcatcccgttgcctgccgtcgagcccgtgccggaatctagtgtatccaaggtggaggacaggtctcctgaggacaaggaaagatggtggaagaaggggctcaaagccatctctgaggggaagctggctgttgtccttttggctggtggtcagggtactcgtctgggaagctcagatcctaagggatgtttcaatattggacttccatctggaaagtcacttttccaactccaagctgaacggatcttgtgcgttcagaagctggctgctcaatccagtgaaagcccgagtaacactgtgctgatccactggtatataatgacaagccccttcacagatgcttccactcgcaaattcttcgaaacccgtagatactttggcctagaccctgaccaagtgacatttttccaacaaggcacacttccatgcgtctctgccgatggtagatttattatggagacaccatatagggtagcgaaggctcctgacggcaacggtggagtttatgctgcgctgaagtccaagaagctgatggaagacatggctgcgcggggagtgaaatacgtagactgctacggagtcgacaacgcgctggttcgagttgcggatcctacgttcttagggtacttcatcgacaagggtgtgtcttctgccgccaaggtggtgaggaaggcttacccgcaagagaatgtcggggtgtttgttcaacgaggccgcggtggacctctctccgtggttgagtacagcgaaatggacgcagctatgactactgagatcaatcagtcgacagggcgactccgttactgctggagcaacatctgcctgcacatgttcactctggacttcttgaaccaagtggcgaacagcctcgagaaggacagtgtataccatctagctgagaagaagatcccttccatccatgggttcacaacgggcctgaagctggaacagtttatattcgacgccttcacttactccccatccacagagcttttcgaggtcatgcgggaggaggaattcgcgccggtaaagaacgccaacggcgcgacatacgacacccccgatagcgcgaagctcatgctgctccgcctccacagcagatgggtggtcgccgccggtggcttcttgacgcactccgtgcccttgtatatgacaggcgtcgaagtttccccgctttcctcctacgccggagagaacctggaagcgatctgccgcgggcgaacgttccatgcacccagcgagatatcgttttaggatatcgttttgtgtaactgtggactgaacggaaagggttgcaagattgtgcatgtttacttcgaggcgtgagatgggtgtcgggttgatgtgttgcttgtattctctgagtgttgtgatgtagcatctccaactccaaattcatctcgagttttctcccccatctccttggactactgccatttttaatgacaatgggtcaggttcggatcaggctccgtgtactcgcggatacattttttacatgtgcaattgtttatcttttaagaagcacaactttttttcaatcaaacacgaa

SEQ ID NO: 13560 - DNA, 230 bp, Zea Mays
gccccgacccacgttagggtgttcgcgccccaagggcccgtgccattggctcagcccgcccggtcgacgcgccgcggcgggccgcctcgaagctcccttcccaacgggcggcgtgctgaatcctttgcagacgacttaaaacgcgacggggcattgtaagtggcagagtggccttcctgccacgatccactgagatccagccccgcgtcgcacggattcgtccctccccc

SEQ ID NO: 13561 - DNA, 956 bp, Zea Mays
acttcagtggcagcaaaccaagctaccttggcgttcagaagagtcctccgtcccttgctctctgccctgcaaccaataactgtgtttccacatcagaggaaataagcgactcaaatcactatgctcccccatggaactacaatcccaaggatgggcggagcggtaaacccataaccaaagaggaggccatgaaagaactaattgaagtcgtcacgaagacaaagccggacaacttcactcctcgcatagtagagaaaaaagatgattatatccgagttgaatatgagagtcctatatttgggtttgtagatgatgtggagttctggttccctcctggcaacaagaccatggttcagtatcggtcggcgtctcgatcaggatttatcgatttcaatgccaacaagaagagagtaaaggagctgagattggctttggaaaagaagggctgggcttcagaaagcaacttctgaattgaagtgagaagggtggaagaggtgcaggtgcatgctactcagacgagccagcacaactgggaactgggattgggtactgcccacgcaaaggcaaaaaagtctctttgtgatggtccctcgttctcattcaggtcagcgattacctagtttgtgtactaggcagcgtaagctagctgctggtgggtggtggtggccatcatgaggattcaggatgcatgatgatcttccatgggtggtgccgggggcgcactaagggaaaaaaaaaaggatattacatggacagcaaccaccctggctagctaataccaagaaatcattcatatactcctagtctcctaccaagaaaaaagatatatttattatgcatcttcttgccatccgtgcatcctactacatgcatcggatctgtccttgcgataatgagatatgcatattcgttcgatatgattgatagatagtcgacccagagatgatttaggtctc

SEQ ID NO: 13562 - DNA, 373 bp, Zea Mays
aagcccggcccggtccgttgtgtaataaactgataactacgaccttaacgactagagttcgagtattctcgtctcatctgtggaagaggagagaagactgaagagaagggaagacatggccgtgacggcggaagcggcggcagagatggtgttggagcggcgggcgtacgcgcgggtggggctcctcggcaaccccagcgacgtgtacggcggcagggccctgtccttcgccatcgccgacttttccgccaccgtccacctccgcccttcgcccgagctgctcatccagccgcatccgcaccacgacctcgtcgccttcccctctctccctcaactcgtaggaagatcgagaacttacattacctccaagtcc

SEQ ID NO: 13563 - DNA, 65 bp, Zea Mays
cttctccacacgttcgtccatcgcgctcacagctgcacgtatactactgtattatgattgcttgt

SEQ ID NO: 13564 - DNA, 2057 bp, Zea Mays
ggatgatataagatgccccgttttgtaaggaccatcggcaattcaaacagcggtactacgaatttctcgactactaccgagctccaaatggcccgatcttcctatacatctgtggagaatctacgtgcaatgggattggcaataactacttagctgtggtggcaaagaaatttggtgctgcattggtttctcctgagcatcgatactatggaaagagttctccttttaacagtttgacaacagaaaatctacagttcttgtcatcaaagcaggctttatttgatcttgctgttttccgccaatattatcaggaaaccttaaatgccaagtataatcgctctggggcaaacagttcttggtttgtttttggagggtcatatgctggagcactcagtgcttggttcaggttgaagtttcctcacttgacatgtggaagccttgcaagttcaggggttgttcttgctgtatacaactttaccgattttgacaaacagattgggatctctgctggtcctgaatgcaaggcagcacttcaagaaataacaggacttgttgatggacagcttcagtctggccgtaactcggttaaggagttgtttggagcgacaaagttagaaaatgatggtgacttcctctacttactggcagatgctgctgctattgcgttccaatatggtaatcctgatgtcttgtgctccccactagctgaagcaaagaagaatgggacagatttggtggaaacatttgctagttacgtgaaagattattacattggaaaatttggggcgtcagtagcatcatatgatcagcaatatttgaagaacacaactcctgctgaatcctcatatagactatggtggtaccaagtttgcagtgaggttgcatatttccaggtggcaccaaaaaacgatagtgttcgttccccaaagatcgacacgaggtaccatttggacttgtgcagaaatgttttcggcgaaggagtctaccctgatgtctttatgacaaacttatactatggaggcacaggaattgcaggttctaaaattgtttttgcaaatggatctcaagacccatggcgccacgcttctaagcagaaatcatcagacgaattgccatcatacctaattgagtgcaagaactgcggacactgcagtgatctctctggatgccctcaagctccttcaaacattgaaggtgattcatccaagtgctcacctcccgaagctctgaacaaagtaaggaaggagattgtcgatcacattgacctgtggctatcagaatgccaagagcaaggacatgacaaggagccatggctgggaagcagatggagcatagctgctatttgatcaatctgtgaagctataagcatgtgctgctagagtaaccaaggcaaatatgctttctttttcttgcagcactgtggtttatcgtttcggcaaacaatgtgggctgctgagtaagaggacatatctggtgcacataaaaaattggtgcacatggtgcatatattaaattatcaccactcattttagatctaacgtctttagttgatcattcaatttacaaataacaccttccaggcttccaccactacacaccaccacgttggagggtgcttttagcaaaatataccaaacaactagaaacgttagatctaaaatgagtggtgatgatttaatatgtgcagcatgtgcaccaatcttccatgtgcattagatatgttctcgctgagtaatccacctgtggcgaataaataaagcagtcagttctcagtctgtcatgatttcagggcctgtttggaatgcgggagtttttatttttcctattcctactctccttttttttcttctgtaaaattgaacagctctttacaaaatccctgcgtgattcctacgaattcctgcgtttcaaatatgccctcaaaatgtgagcgatgtacacacggatggcaagtttgtcgatatacatatatgcatctgtcgcatgccctttagcatgagaaacgattgcgatgtttctctgcccttggtgctaattttctgaataaaatctgaaag

SEQ ID NO: 13565 - DNA, 681 bp, Zea Mays
cgactgacagcattaagttccaattgaagtccttctgagttacatgaagaaagggctgaccgtatggttagatgtcccactggatgcacttgcaagaagaatcgctgctgtaggaaccgcgtctcgaccactcttgcatcaggaatccggtgatccttatgcaaaggcttatgcaaaacttacgtcactttttgagcaaagaatggactcgtatgctaatgctgatgccagagtttcacttgaacatattgcattaaaacaaggccataatgatgtcactatacttacacctagtaccatcgccattgaggcattgctaaagatggaaagttttcttaccgagaagaccatggtcagaaactgacctcttgaatgagagggaaaggatgctgacaacatgtggcccttgtttgtttaattgtacatatacctttgcattattgcctaaactctttctacagtgttgttggattattgtttgtgcagcatgaaagaggaccgtttgagtttgtatttatgcaaatgaataagtaaataactttcagttaaaacaatgacaattcgttatttatctcgatgaatggttgatggggacattagggcattagcatggtactgtcatttcaatattcactatgtcagatatcagatggtgaaacaagaaaatgacatgaatccatg

SEQ ID NO: 13566 - DNA, 515 bp, Zea Mays
agaagccagggaacaagctgcagaggcagagcttccggagttctgttcacgggacagctcacttgtagtcaaagaaatctttggagttacagatgaggatgcagacagcctgcggattcacaccctatcagcaacaggtgatatcgaatctatacagaagatggtggacgatctagacctagaacaaggtcccccatcatcgtcttgagttatggtggtggaataatgctaaacatcttcgttgatagtgttgcaattttagattgatgtgagtttctcgaatcttttcgtttagttttttcagctgctgaagtaggacttgggcctgtgaacacaggatactttcggctggagcctggaggttttgtaaattgcctctcgattaggataacgtatgtcagacctgcccatgatttgagtaaacgagaatactattattatagaaaagcgcacggcagcagtgagtttatagaacgcgggacacgtatcaccatacgcttttgcttaaacaaaaa

SEQ ID NO: 13567 - DNA, 1119 bp, Zea Mays
ttttttttttgatagtcaatccccacattgggggaacacctttattgaagcatcttatcagctgcttttacaccaatagcttgtacattaaattgtaaaactcaacacaaacaacaaagcaactcaaaaactcacttcgttttgacactgacaccgtccgttccagcaatgatcactgaactcgccatgttcaagaacaacccatggtcaacaactccttccagagctgcaatttcctgtcctgctgccaacgcatccttgattggcgtcttgaagtataaatcgacgatgtagtttgagttgtcagtaacatagggcttgtcgccttcaaaccttagctttgcctcgactccttcctccttaaacagttcctgcaatcttacaaggttgtacttccagcagaactgcacaacttccactggcatggctagaccactacctcctaacccatcaactagttttgtctcgtcaacaataacaataaacttgtccgatgctgcctcaaccatcttctcacgaagaagagcaccaccccgccctttcacaaggttgaggtcaggagcggacctcgtcggcaccgtcgatggcgaggtcgatgagcgggttgtcgtcgagcgtggagagcgggatgccgagcgactgcgcctgctcgaaggtgcgcttggatgtgggcacgccgacgatcttctcgagcttgcccgcggccaggagcgcgccgatctcggcgacggcgaaggcggccgtggagcccgtcccgagcccgagcaccatcccgctcttcacctgctcgacggcgcgcaccgccgccagccgcttgaggtcgtcctgcgtcagcgccgccgccgccgccgccggcgcggactgcgcgcggacggccccgaggcgggcgcggcgggcggaggccacatggcgcgcggcggttgggtggaggcggactgagatcgcggtggcggccatgggagcacgtgtgggtggcgggaggggaggtgctgcagttcggagaggtgaggtcaggagtgtggggagatgagggggaggcgatgggaagttggtggtggaggctagcggcgatggtgatcgtcagaggttgggttggtggtgacttggaaggccaggctt

SEQ ID NO: 13568 - DNA, 1073 bp, Zea Mays
aatctaacacttgcaaattgcaatagcaaaattgctatggttattctaaggaaagatttgtatggtctctcatatctgcagttggaatattttgcttgggttccggtgctacaattgtgcatggagttcaaaatttatggaattctcatcctccagagaatattcactgggctgcattagtgattggtgggtccttcctaattgaaggtgcttcactgcttgttgctataaaggctgttaggaaaggtgcagaagcagagggaatgagtatctgggactatatctggcgtggtcatgatccaacttccgttgctgttatgactgaagatggtgctgctgttacaggccttgctattgctgcagcatctttggtagctgttcaaatgacaggaaatgctatgtatgatccaattggctcaatcattgttggcaatttactggggatggttgctatttttctcattcagaggaataggcatgctttaattggccgggccattgatgatcatgacatgcaacgagtccttgaatttctgaagtctgatccggttgtagatgctctttatgattgcaaaagtgaggtgattgggccaggtttttttagattcaaggctgaaattgatttcaatggagttgttctggtacaaaattatttggaaaggactggacgtgggagttgggcaaaacagttccgggaagctgcaatgtccaaggatgatacggaattgctaagggtcatggccaactacggggaggatgtagttgaagctctgggatatgaagtggatcggctggagtctgagatccaaaagcttgtgcctgggattaaacatgttgacatcgaggcacacaatcccgaaggacttgctcttagagcagaagttttgtagattacctgtgtacattgcatttgattaacactgttgctggtcgctgccagtttgatttgggtccaccaccattcgataagattgtcttccattggcaatgtaagaatcagatggctgttgttgcgtagcgaggcggtttttttatttggaagaagacgtggtcgcgcctgacatggaaggctt

SEQ ID NO: 13569 - DNA, 942 bp, Zea Mays
agaactaatcattgtttatctgggagttctgtctgaaaatcttggaagcatgtgcaatagctcttatgcagttgcaagataacttgacgaagtatatgagtgctgagggccagtacacagaggaggaacttgaaatgtacatggaaaaccataagaaagtcatggttgattctctgtggaagcttaacgttgctgacatagaagccacattatcccatgtctgtcaaatggtacttcaagacagtagtgccagaaaggaggaattgcgcctccgtgctaaaggcttaaaaactttaggaagaattttccagggggctaaggtcaaccctagcgagggggaaacatcacaaacgaagaatatagacaacatggatggcaatgacggcagctcccctgactcgtccccaaatagagaggcacagttcactcctaatcagcctcctgtcccgagcccgtatgtggaggcgcctcatgttaacggagtctattgtccgttcccgatgccagcagctccgcctggcgcaaggagggatcgaatcccttgagtccagataaaacctgcttgtaaaatgggctctgtttaacattgcctataatactagatcatttgcatgatgaacctggagcagaggggaacacaggagtctgtcaggtgttctctgcacctccctgttattttggtcgcgtatgcttggtagcagccgtgtcttgtgtacaggtgtgttttgctattgttgatcgatgaagctgtaggtgtacatgttatgatgcccattatattattctgttgtcggcctgctgtattttagcataaacagtggatacatttgcatccatgggaaatgaaatgttctagtcattgtttcccatcattcaggagtttggtgttaatggggctaagttttttatgaaacaagtctgctcaggctttcgtacaaatgc

SEQ ID NO: 13570 - DNA, 924 bp, Zea Mays
cacagtttcaaatcccattactttctcccttaaaacctcctctcccctcgttctcctccgcctcctcctcccacctccccacacgggcacacctgccctccccgtcgccgcggacccactcccatggcaaagctcccgcgtctaccctgctcgtttgccgttctcgcgctcatgtgcatcatcccgctcacagcgccgcggcctgcactgtcctcgcgcgcggccccaagggacggtgtctccttcgccggcgcaggcaacacgatacatcaacttcttaaagatcacggccttcccggaggactgctcccgcgcggcgtggagtcgtacaccctggacgagtcgaccggcctgctggaggcgcggctgtcggcgccgtgctacgccacgtacgacaacggcgaactggcctacttcgacaacgtggtgcgcggcaacctcagcaagggcgcgctccgaggcgtggagggcctctcccaggaggagctcttcgtctggctccccgtcaagggcatcctcgtccaggaccaggaacccggggtcatcctgttcgacatcgggttagcccacaagagcctgtcgaggtcgctcttcgaggacccgccggactgcaagccgtcggcctccggcgggatgagcgccgcctccgccgccaggagggagggcacgcaaggtgttactggactacggttgaggcgagagatggcagcagcaggcagcgaccagagtcaggagcagaggtgaggaggaggaggaggagctctgagacgacaacacccgagacaatggcgagccagttttccgctttataaaatcctttttgcagttcttttttctcgcttcttttcttctcttttagcccaagctcctctcttgtccatgcactgtgtgaattaagtttgtcaggcaaaaaagaaaaaagaa

SEQ ID NO: 13571 - DNA, 1341 bp, Zea Mays
caggcatttaatgtgtctgtcaggtttctttgtcacaatttggattgctgcggtaatgttcaagtcgaacgatatattgaggaagcaaactgccttgaagggcgagagaaaaatatctgtactcattggtattacagtaatcttcatgattcatgtgtttggcgtatattggtggtacaggaatgatgatcttctcagacctttgttcatgcttcctccaaaagatataccaccattctggcatgcgatttttgtcatcatggtcaacgatacaatggttcgccaagctgcaatggctgtcaagtgcatgctgcttctgtactacaagaactgcagaggtcgtaactaccgtagacagggccaaatgttaacccttgtggagtaccttctgcttctttatcgtgctttgttgccaacttctgtttggtatcgtttctttctgaacaaggaatatgggagtctcttctcatctttaaccactggactgtatctgactttcaagttgacttcggtagttgaaaaggttcagtcattcttggccgcggtgaaagcactgtcacgtaaagatgtgcattatgggtcttatgcgactgcagaacaggtacttgctgctggtgatatgtgtgccatttgccaggagaagatgcatgtgcctgttctccttcgctgtaaacatattttctgtgaagactgtgtttccgaatggttcgagcgagagcggacttgccccttgtgcagagcattggtaaaacctgctgatatccggtcatttggtgatggttctacaagtctattcttccagttgttctagactgcaagcggtaaaatcctaacataacaatggacgagctattgcatgaaaactcgagtggaggtccttttaacgccatcatgtgaaaccatcttccgcaatgttgagatcaatgtgagaaggttcatgacagtcacgacagtgcagtcgttatttgtttatatattcaaccaaatagtttacagagctttttagttgcaacagaggcaaaatgtttccagcagactgctttcagagcctttagaactctgctggacaaacaatttgatcgttgaggtctgctgagccgacaaccgtatgcctcctgtaaaattctggtatttttttttaattttttttttgcatatgtgggcttacgtgggtgtaactgaaatttgaaagtaccgcttgcacagcaagaattgccggtgggggttgaaagtggtaaatgaatgtaactgtaaagcgttgttacatgaagacaaaaatttccacccgttgcaacatagtaaatgctgacagacgcgacttgtgtactgttttaagttggg

SEQ ID NO: 13572 - DNA, 1234 bp, Zea Mays
tttgcagcctactactgttgcagctaacgtgagatccatatttgcatgcttgcttgatcaagtgagccaatacttaactgaagggcttgaccgtgctagagagagtttaaatgaggccgcagctttgcgggatagatatgtcatcgggacaagtgttagtaggagagtggcagctgctgctgcttctgcacaagaggtggcagcttcagctggtgagagcagctttagatcctttatgattgctgtgcagcgttgtaccagtagcgtagctattcttcagcagtacttctcaaataccatatctcggctcttgctacctgttgatggtgctcatccgtctgcttgtgaagatatggggtcagcagtatcagtagttgaggctgctgctcacaaaggactgctacaatgtattgatactgttatgtctgaggttgaaagattgttgtcttcggaacagaaggctacagattatcgaacaccagatgatggagctgcaccagatcatcggccaactaatgcttgtataagaattgtagcctatctctctcgtgttcttgaggttgcattcagtgcccttgaaggcctcaacaaacagtcctttttgactgagctgggaaatcgcttgcataaggggctgcttaatcattggcagaagttcacatttagtcccagtggtggcctacggttgaaacgtgacataactgaatatggggatttcgttcgtagcttcaatgccccctccatagatgagaagttcgaactgttgggaattgtggcgaacgtcttcattgttgctccagaaagtttagcatccctgtttgaaggaacccccagcatccgaaaggatgccttgagctccgggatgattataagacagcgaaaatcgcttcgatgctcaactatatcatgtccgagtaatgagtgaagtggaaccgttagaccgttacactttgctgctctcgtggactattgatgccgtttgtataaatgaccttcgaaattatgtttattcttggttccaatttatttgttttcctatcctttttctttttgggctttgctcaatttgagctgtacatgtggttcaggtcctttagacctctacttgtataaatgatgagaaatttctgtggctgtttacgtgcgaaaatttacgcaaacgctgtctgatcttttgaaatggaaaatctggagaaacgggaatacactaataaatttatcaggaatatttcgc

SEQ ID NO: 13573 - DNA, 1307 bp, Zea Mays
ctgctgtgtaacggcgtggtgtttccttactaacttaatcaaagagagcatcagaatgggctacaatgacattggtgatttcttctatgcccatggccaactttcagatgctttcaaaagctacatcaggactcgggactattgcaccacttccaaacatatagttcagatgtgcatgaatgtgattctggttagcattgagctggggcaatatgcacatgtttcaaactatgtcagcaaagcagagcaaacccccgactctctggatcctaccattgttgcaaagctgaaggcagctgcaggattagccaacttggaaacaaagaaatacaaatttgctgctcgtaagtttgttgagacaggaattgaactaggaaacaacttctctgaagtcatagctcctcaagacgtggcagtctatggtgccctttgtgcacttgcttcttttgaccgttcagacctgaagagcaaagtcattgacaatatcaacttccgtaactttctggagctggtgcctgaagtaagggagctggttaatgatttttatgcaagtcgctatggatcttgcttgggtcatcttgagaagctaaagcctaacctgctcctggatatccatttgcatcagcatgtagagactctgtatatggagattcgccacaaagcgatcatacaaaggagctggccgcactgattactgaggacaaaatacaggcccggatagactcccacaacaagatcctttacgcaaggcatgctgaccagagaaatgcaactttccagcgtgtccttcaaaccggcaatgactttgagagagatgtcaagtccatgcttctgcgtgccaacctcctcaagcatgattacattcagaagacaagcggaccaaggaagatgtaaagattgcgggcgtcgctgctaggcaaggcttcctgctgcatgcctctccacttttttttttgaagaattgttctgtgacataaaagggaccgaagtctgtctaaatgccctccccctctttctttttattggttgatgaaagttattgtcgaagtaatgtatggttgagcatctggatgtgattatttgtcatgctcgttttctaggcaagatttagttttgaacttgccgggtacctaggaaaggggtacccaaggcgaggcccataaacctctctctggcctatttaccgaccaagttcttgtcgagcaagtcttcgaggcggaaaccaagttcttgttgagcaagtcttcgaggcggggtgaacgatcaagctcttgtcgagcgagtttgcttggcggggtgaacgatcg

SEQ ID NO: 13574 - DNA, 1465 bp, Zea Mays
tcgcagttatggcggccgaatcggccgccgtatcttaggcggggtgtggcgctggacgccagcgtccaaacaggcccttagccacaaacaaacatgcccgtgtagaatcactgtagcaataaagaagcgtctagagcgctcgtccggtctgaactgtggtctctgtacttccgttcacttcttcagcggcggcgtgacaacgagagcaagaaagtatcaaaacccgagagcaatggaggcggtggggaagagcgtgtgcgtgaccggcgcgggcggcttcatcgcgtcgtggctggtgaagctcctcctctgccggggccaatacaaggtccgcggcaccgtgcgcgaccctggtgctagcaagaatgctcatctcaaggtgctggaaggagctggggaaaggttgcagcttgtcaaggctgatttgttggactacagcagtgttgcttcagcaattgccggctgtgagggtgtcttccatgtagctagccctgtcccttccggtcggtcctccaaccctgaggtggaggtcataggtcctgctgtaacaggtacaaccaatgtgttaaaggcttgctatgaggcaaaagttgggcgagttgtggtggtgtcttcatgtgcagctgtctatgctaatcctaattatcccaagggtaaggtctttgatgaagactgctggtcagatgaagcttactgcaggaagaacgaggattggtattttgtttccaagacactggcggaacgagaggcttttgcttatgcagcaaaaacagggctggatgttgtaactatttgcccgtcattagtatttggacccttgatgcagcctacagtaaattcgagcagcaaaatcatccttaaatatttcacaggagatcgcgagactgttgaaaacatactcagaaatatggtggatgttcgtgatgttgctgatgctcttcttctggcttacgaaaagccagaagcgtctggacgatacatctgcagttcacatgcaataaaagttgctgatatgataaacatactgaagaccttgtatccatcttacccttatcccaaaaatttcgtggaagatgatgacaactctgtatacagctctgagaaactgcagaagctggggtggagcttcaagcctatagaggaatccctccgtgacactgttgaatcctacaaagcatttggcatcctgaattgaacatccagctaggactgttccatctgctgtttttgcctccgaactctttctgaataatgtatgtaggcagtgaaacagcattgccagcaggttaatcctggcatcatgctggagcagcactgtagttctatctttttcttttttttttccatccccaatactatctagtggttcaggaccaaataagtaggcccagtgctgactggtttatggcttgtggcctattgtcgctgctaaaactagaagcgttcgtactatcttgcactgctg

SEQ ID NO: 13575 - DNA, 966 bp, Zea Mays
cttttggtcagggatctcgatgcatgtgaagtgagcatgtttctggcatcagaggtcctcatgggcaaggacgagttcttccggtcgttccgggagaacgccgacaacttcatctgcagcctcctgccgggcatctccggccacccacagatccagtactcgccgggtggcctcctcttcaaggtgggcaacagcaacatgcagcacgtgacgtcgctctccttcctgctcctcgtctactccaactacctcagccacgccgacgcccgcgtcccgtgctcctcctcctcctccgccgctgccgcctcgcccgtccagctccgccgcgtcgccaagcgacaggtggactacatcctgggggacaacccgctgcggatgtcctacatggtggggtacggcccgcggtacccgctgcggatccaccaccgggccagctcgctgccgtcggtctcggcccacccggcgcgcatcgggtgcaaggccggggcggcctactacgccagcccggcgccgaaccccaacctgctggtgggcgccgtggtgggcgggcccagcaacagcaccgacgcgttccccgacgcgcgggccgtgttccagcagtccgagcccaccacctacatcaacgcgccgctgctcggcctgctcgcctacttctcccagcaccccgacccagcgcagcactgatgaacgggcagctagctagctagtagtaggtgttgtagtagtattcttccgttgctgctgctgctcgtgctatttgttttgcagtatttatgttttggtagcatatattgtgccgatccattcctgtaaaaaaaatggcaggaacgaggattggtcctactgcttgtactcgtactatgccccaagtaagctgctgtatggtggtaagatgcattctgaaatcgccttaatttcggagtttcagcgtcgtatatagaaaccactgctggacatattgctact

SEQ ID NO: 13576 - DNA, 1713 bp, Zea Mays
cagaaacagaagatattgtggttttgttgcaactacgttggtgaattttgcatgtttgctgtgtctgtggaaagatggccgccgggtgcatgtcatcgagagggatctgacagaacctgacagaattgtgggcgagctgttgcaacctggaggttacttgaaattaattgagttaggcctccaagattgtgtggaagaaattgatgcccaacgtgtgcttggttacgcattattcaaagatggaagaaacacaaagcttgcttatcccttagagaagttccattctgatgttgctggtaggagctttcacaatgggaggtttatacagaggatgcgtcagaaagctgcgtctttgcccaatgttcaattagaacaaggaactgttacatcacttctcgaagaaaatggtactgttaaaggtgttcaatacaaaaccaagtcaggtgaagaactaaaagcttatgcgcccttgacgattgtatgtgatggctgcttttcaaatctacggcgtgccctttgctctccaaaagttgatgttccatcatgttttattgggctggtattggagaattgccaacttccacatccaaaccatggccatgttatcttggccaatccttcgccaatactattttacccaattagcagcacagaggtgcgctgtttggttgatgtcccaggtcagaaggtgccttccatagctagcggtgaaatggcaaattatctcaaaaccgtcgttgcaccccagaaatctatgactctttcatagcggccattgataagggaagcataagaacaatgccaaacaggagcatgccagcggctccacttcctacccctggcgcacttctgatgggggatgccttcaatatgagacaccctttaactggtggaggaatgactgttgcattatccgacatcgttgtcctacgtaatcttctcaagcctctccgcaatctccacgacgcatcttccctgtgcaagtacctcgaatcgttctatacgctgcggaagccggttgcctccaccataaacacgttggccggtgctctgtacaaggtcttcagcgcctcgcctgatcaagctaggaacgagatgcgccaggcctgttttgattacttgagcctcggaggcgtcttctcgaatgggcctattgccttactctcgggtcttaatcctcggccactgagtttagttgcacacttcttcgctgtcgctatctacggtgttggtcgcttgatgctccctcttccttcgcctaaacggatgtggattggagccaggctgatttctggtgcatgcggcatcatcctcccgatcatcaaagctgaaggcgtgagacagatgttcttccctgccactgtgcccgcatattaccgggctgcgcctacgggagaataagtaaagcgagaaccgattccgggctgctgcagtgctgctgatcccaccatgatctgatggcaactgatgtgtcatggatggcatttttttcctgtgttagtggttgttaggtggtttgttgtgctgctgtcattggaatgaggaacctgtatagtgtgcccctgggtactggtcaaagttgggaaatatgttgggtcctaccgtagccatgtcgattactgccaagctgtatatgattctgtcgaactagtgaaacctctccccatctttaacgcgtatcaatcttgtttgctcccccccccgagtacagca

SEQ ID NO: 13577 - DNA, 98 bp, Zea Mays
tgctgcttcaggaacgcaaaatgtgcagcccacgtggaactacagctccctcgttaacagccataataatctctcaagcagaagcaattgctatacca

SEQ ID NO: 13578 - DNA, 1460 bp, Zea Mays
tggacaggcaaggttatggtatgctgacgctgtcggcgacggtgccggcgctgcagccgtcgcacatgccctgcagggaggatggcgtctcgtcgtcgtcatgccaacccgggtggccgcaggtggccttcttctacgtgtccctgtacctgatcgccatcgcgcagggcgccgacaagccgtgcgggctggctttcgcggcggaccagttcgacgcggagcaccagggggagcgcgcctcccgcgggtccctattcaactggtggttcttctgcatggccatcggcatctccgtgtcagtctccgtggtgggctacatccaggagtacgtcgggtgggggctcggcttcggcgtcccctgcgccatcgtgctctgcgccttcctcgtcttcctgttgggcaccccgacgtaccgcctgtacgcacccacgccggaagccaagtccccgttccgccgcctggcacgcggcctggccgccaacgccaacaaaacaggaggcctctccgcctcgcattcggaggaggaggaagcggcagcagacgcgcggtgcgtgctgcgcctgctgcccatctgggcggcgagcctggcgtacggcgtggtgtacgcgcagattatgacgctgttcaacaagcaggggcgcaccctggaccgccacatcggggacggccttgagctgcctccggcggcgctgcagacgctgggccccgcgagcatcctgctgttcgtgcctgtttacgaccgcgcggtggtgccggcgctgcggtgggcgacgggcaacccgtcggggctgagcatgctgcagcgcgtgggcgcgggcatggcggtgtcgctggcgggcgtggcggtggccgcgctggtggaggcgcggcggctggcgatggcgcgggagcacgggttggtggacgacccgtcggcgacggtgcccatgagctgggcgtggatcgtgccgcagtacgccatgatgggggtggcggacgtgctggccgtggtgggcctgcaggagctcttctacgaccagatgcccgacgggctccgcagcctggggctggcgctctacctcagcgtcatgggcatcgggggattcatcagcagtctgctcatctccctcatcgacggcgtcaccggcagcggtggcggggacagctggttcgccgacaacctcaaccgcgcgcacgtcgactacttctactggctgctggcggggctcagcgccgtcgaactcgcgctcttcctctactttgcgcgctcctacgtctacaagcacaagcccaattaatcctgctagtgcagtctgtacagatgaatggaaagcagatgcaggcatgcagcccgtcgtcttcatgttttacttgtccttgtaaaacaaggcaaactcagctcaaagtcaaattcagattctagcccccaataattttcgtcggccgccgcgtggctcgctatccggacatggtggccgctc

SEQ ID NO: 13579 - DNA, 544 bp, Zea Mays
atattcaaagcaagcaagcaagatttcagggagcaaatatttcttggccagatctgtccagaatcttgagcggcaaccttatgatattggcaagaacgctgtgcagtacaaatcagagagacgagcagcaatggaagcggaaggtttcaagatacttgggaactcaggggatcagtggagtgatttgataggatcgcccatggcaacgagatccttcaagctaccaaacccaatgtacttcatcagctgattttattgttagagcagtggacgaaggagcaggttttcatagggtgttcatatggtcccggtgtgaaactgcttttgttagacatccctcgggacataaatttagatttttatcttcaagcatgttgaaattcaactgaggcttgggtccgtcgaatctgccctatgatgatctgtaattacacacttcttttcccacactactggaagcatttgtggtaaggcaaattgtgaggtcatttggtgttcgttccttcagtcaccatctaagctttagtcgttaaattttagtttt

SEQ ID NO: 13580 - DNA, 453 bp, Zea Mays
cacgtgctcatagcttcatattaatcacatgatatcaggcgagtacttttcctgaaaatacctgaagcgcgcaaacatctgttaatgtctgagctggatagagtagctcaggactacaagatccatcgagatgaaattcacaacaaacttgtccagataatgagagagaggttgcttgcaaatcttagaaaattaccccaaattgtggaaggctggaatggcccagaggataatgacgtgcagccgagtcaatttgctaaagctgttacaaaggaagttacctatttgcatcgcattctttcccaaacattgcttgaggttgaggtgcaaacaatattcaggcaagtggttcaaatattccattcacatattacagaagcattttcaaaattggaagtcaatactccctctggcaaagaataggtatgctgcttatttgtgcatcttttagca

SEQ ID NO: 13581 - DNA, 1764 bp, Zea Mays
cgttgttctcatatgagaaggtctaaacatgcttcatcgttcaaatagccggaaccaaaggaacaggggatcaagaatcaaaacactactccaagctaccttgcttataggtgttattttttggctcctatatcaggtgaagcattcctatgataagaaaaatgagtacttggatgatgctgaggatcagcttgcccataatgatataagcatgttccaggggaggaaagaaaaggcaggtagttacagtgatagcaatatccaaatggttgacgacaattctgatgtaacgactaaaccagaagaacgtgatgcagatcaccattcagatacttttaattataatgagaagactggagaaactgtgttcgataaagacagtactaacttgaatgaagatgacaagagaaacactgagaggtcagaagcggaaggacaagtcaacagtgcagatggtaatacagaagttaataataataacaatgaagatgaaactaccggtcatgcagaagaaggcaagcatgatactgaatccaactctgctgctgagagtaaaagtgaagtcaattcaactggagatgatatgtcccgaaacaattatgcacaagaggaaaacactggggaggcaagtggaacgtctcatgaagtggtgcaaggtgaacaatcgaccagtgcaagtggaagcgggaatggatcggatggagatggtgagaaaaatgaggcagttgatattaaaagtggttctgaatcccttcctgatgatgccaaggctgaagcaactgatgaccgtgctactgtcagtcttcctgatgaaaccgggaatataccatcagttcatactgataattcgcaaaatgatgccagtgaaaaccaaggtgatgcaacttacactacctcggattcgtctgagcatggcattgttgaggctgtccatattgaaactggattggaagatgaaagtgcaacagcatcatctgggactggatctggtgatgacaacggtaactcatctgatagcgcctctgcagaagaaaatactgagactgtatctggtgatgatgagaagggcatgggaacaggtacaaccactgaagcgtcatattccatacaacagaactctgagaacagcagtgtctcagctgaggcagagaactcccaaggggattcttccagcggagtgaatggttcttcagaagagacatctaacaagggtgatggagctacagaaacgtataacaagggtgagcaggtggatcccaagattgaaactagcacatccaccaatgccgagcataatgaatctcaaggggctgatggcagctctggatcaaatggtaacggccctgaacaaaccggtaaatctgaaagccagtgatttccaccatcgagagttcgagacacgaatttagtatacaggtttgttttctggagattgaagaggggatagtgcacatagaaaaactgttcactgtggtttatcgagattttagtcgatactgccgaagtataattgtgcagatcgcaagattggttgtctgctatgcttattgcttatggcatgatttctcgtcaagttgtacttgagtcaatatttctgtacggttattaatctcgacatggtactctgttcattgttggatattatgacagtcttacaatattctgcagtgtggccgaaatgccctttgcccgttttgatcactgcgggtacctgtgggtttatacgctcatgtttctcatttacggtcattttttttagagcct

SEQ ID NO: 13582 - DNA, 76 bp, Zea Mays
gttgcccgaaaggaaaccaccacccattttctaatggtggagcgttgaattctgccgcgataaaatgttcgcgtgt

SEQ ID NO: 13583 - DNA, 677 bp, Zea Mays
gacgaaatcagcagcagaagacatgcgaaacggaaacgtaacgaagacaccaagagctcgacgcctgctgacacaccggcagaagccacatacaacatgctgaaacggaagggacttggttccaagatcaatgagggagctgttggcgaattatacaagactaaagatgaagttgagagcgcgagtaggaaagaagagatggagttcgacgcactgtttgggccggacaacgctgatggcgagacggtcgatgatggtggttacggctatgggggctgcggcgatggtggcgcggaagcctacaatggcattgatgacgattttgatttctaggaggatgtgttatgtgtagcagcatttgcagctgaccagcacgggctagattcttcatctgtgcgttatagtttatagttagtttcatttttcttttgttaggggagtttgaccaaatcattatggagctattggatagtgcacttagttttggttgtataataatgttgggaactaggttctgcatgggcgtcgtaactgtcgcaagccctatgtggtcaagcgcctataccatgggcatttgttgtacatcccacctccaaaagattgcaagtggtgatgtaacattttgtattagcaataaaggacacaagaatgcattcatttgaaactttgaaaatctc

SEQ ID NO: 13584 - DNA, 788 bp, Zea Mays
aaatcgttttccttcaaatcaaatcatttcatgatcttcgtggtggaaaatcgatccggcactgctgaataccggtgcccgtcagcaaactgttcaaccagagacacaaccgatgcaaactactctagcgagcactgaagaccagcactagaggacttttttttttgtggacagtagaagtcagagcaaatcaggcagctgttgctccccaagatttgtcaaaagtgtttcctcaagtaaaaaaaatgactaaagtccccagttccccactgatgcaccgtcggtgccaacctctgccaaagtaacagaaggcctcagctcagctcatttctttggactccagataaagctaccagcagcacatgtaatcttggtcacttcgtcgtccaaatccccatgtatcgacgtataaaaaaataggtaagaagtttaattatccatacctccgttccccttgctgtagaatactagcattttaggcatattgttttcgtgtaaaatagatgagagcagggacttgcaaaaggcttgtggtttgggaatccgaagcattggttgtacacttgtatgaaataatgatggtccagttttcacttcgctttctatacacgtcgtacgtatgtcaagatgtttggccgtgcaacccctggcggtcaattggtcttggtgttcctaactttgaaaccatacttccacaactgaatcattacgtattttagatgcatattttatccgactcagatatttttcaacgtattgttaacagaaacggcgagtaaaaaacgaaa

SEQ ID NO: 13585 - DNA, 400 bp, Zea Mays
aacattttctagaggaagctaagaaacgtgatcataggatactagggaaatcacaggaactcttctttttccatgaacttagccctggaagctgtttcttccttccacatggtgctagaatatataacaaactgatgaactttatgcgaaaacagtacagagatagaggataccaagaggtgttgagcccaaatatttacaatatgcaactttgggaaacttccggacatgctgcaaactacaaggagaacatgtttgtttttgagattgagaaacaggaatttgggcttaagccaatgaattgtcctggccactgtctaatgtttgctaatagggtccggtcatacagaggttatacctttgccttcggcatttcatctcctccactgatgaagcatca

SEQ ID NO: 13586 - DNA, 801 bp, Zea Mays
cgtggttcggctgcagttgggaggtgatgtccatggccagtactctgatctcctgaggctattcgattatggtggctatccgcctcaggccaactaccttttcttgggtgattatgtggatcgtggaaagcaaagcttggaaacaatatgtcttcttttggcctacaaggtcaagtacccagagaacttctttcttctaaggggaaaccatgaatgcgcatcagtaaatcgcatctatggtttttatgacgagtgcaaacgcagattcagtgtaaagctgtggaaaacattcactgactgttttaactgcttgccagtgtcagcattgatagacgaaaagatcctctgtatgcatggtggtctatctccagagttgaacaagctcgaacaaatacttaatctgagtcgccccacagacgtgcctgatactggattgctctgtgaccttctttggtctgatccttctaatgaagcaacaggatgggccataaatgatcgaggtgtttcatatacatttggtcctgataaagtttctgaattccttgagaagcatgatttggacctcatctgccgagcccatcaggttgtcgaagatggatatgagtttttcgctagccgccaactcgtaacaatgttttcagcccctaactactgtggagaatttgataacgctggtgccatgatgagtgtagatgagacattgatgtgctccttccaaatactgaaacctgcgaggaaggtgttgggtggttcaactaataacaaatcaggcttcaagtaagtcccaaacctggttggtac

SEQ ID NO: 13587 - DNA, 741 bp, Zea Mays
cgaagcccgccgttcgggatacctctgctccaaataactccccacccagcggtgcctccgtgccgtctcccaccgctgctcgggcttcccgccgcacagcccggcttgcctccgccactccgtttcccgccgcaccgccatccgaatccgccgcagcctgctccctgctatcaagccacgttgcctcgctcatcttccgccgccgcagggatacagaggagagagagagagagggagagaaaagatgtcatcgaagaagaactactataaggagaagttgatgcggcggaaagaggagaaaaaagaagagccagagacacccaggtaccgcgatcgtgctaaggagcggcgtgaagatcaaaacccagattatgaacctacagaacttggttcgtttcatgcagtggcacctcctgggaatgatttgaggctggcagatgctcacaagatctcaattgagaaaagcaaatatctcggaggtgatttggagcatacacatctggtcaagggcttggactatgctctacttcataaagtacggagtgaaattgaaaagaaacctgaggcagaggatgggaaggatacaaagtcaagggcagcaaaagaagatcaggcagtctccttccgcaccgcaactgcaaagtctgtgtaccaatggatcataaagcctcaaagcataattaaagagaatgaattgtttcttcctggccggatgtcatttatttacaacatggaggaggg

SEQ ID NO: 13588 - DNA, 916 bp, Zea Mays
gtagcgaggaagaacggcggtgggctcttcagaggtgcaatagacgagaagataaaaaagaaagaggagatggaacaatttgaggttgagcttaaagcaatgcgtgaggctgcggaatggagacgaatacaaggtgtatcactcgcaggtgatgatgaacttttagcaggtccaaaagagtcacagagacctacgagagatgaatggatgaccacattgccacctgagagaaaagcaggagtgccaatgcattcaactacatcatttagtatgaatggtaaagaaggacgtggagacacaagtgtctggactgatacccctcttgatagagcacaaaaagcacaacaaagctatctagaagcctacaataagacaaaggcaattgcagaaggcgacgacgtgaagagcaagaacccggatgcttcaatcgtagataaatacaacacctccaaacgatcagtgtcccttgtgcagaagcaccgagagagtaaaaaggagaaaaagaagcaaaagcagcaggagaaagaggaatgggagggaagccacccatggaagccatgggaccgggagaaggatctgtctgctgggcgccagaatgtggccttagacgcagagaacatgtcgcaaggattatcttcccgtttcgcatctggtgctgttcagcggaacttcctgtgagctgtgtggaaagatactcctggagcttggtctaatcgatgattaatgtccagttattacatcctggtcggcagatggcaaagataatgctgacatataaaaacgagttatgttaccaaggaccatcgtcctgtaatatcgatcgtgcttgttgtgcttattttctcagtgtattatcgggtgagctaaaatggtgccatagtttgttcgtacgatacaattactttttttttcaaac

SEQ ID NO: 13589 - DNA, 5649 bp, Zea Mays
cacaggtctccggcgaagtctcctcccgaccgccctccgcatctcgtcgacgacgaaaggaaaacctcacaaatcctctggatgcggggtctagccgcctccgccctgtagcaccagtcggatcgaagaagcacaagcgcttcgggtcggcgcgcacctctccctcatggtggcggcgcgaggggcccgatctgggggctcggttgcggcggcggcgctggtctcggttcttctcgtgggttgcctcgtcgcgggcggccagggggcggagatccgtcgccagaaaaacgtgcaggctgcgctccgggccaagtgggctggcacgccgctgctgctcgaagccagtgaattgctttcgacagaatggaaggatctattttgggattttattgacctctggaaggatctagagaaaggctctgaatgtttaacagcaaaatgctgtgcccagaagattgttgaggatgcccacatactactcaatgaaccgctctcttcaatttttgagttttctcttacccttcgatcagcatcaccaaaattagtgctttaccggcaacttgcaaaggagtcattatcttcgtttcctattgatgattcaccagagaacatttctggtcatggcactggaaaaacttttgatggggctgtggatcctggctcttctggaggaacttgctgctgggtagacactgggaatgttctattgttcaattcagccgatctgcatgaatggcttgggggattgggcaagctagctatggattctactgaacagcctgaactctttgaatttgaccatatatatcgtcgcacaaatattactgctccagttgctatattttatggggctgttgggacaaaatgcttcaaagagctgcatgttcaactagtagaagcatcaaagcagggaaaaatcaggtatgctctgcgtcctgtcctaccatctggatgtgagactacgtccaccttttgtggttcagttggtgctgtagatgcagtcaccttgagtggttatggggtggagcttgccctaaaaaacatggaatacaaagctatggatgacactgctataaagaagggtgttcctctagaagatcctaaaacagaggacctcagtcaagaagtcagagggtttatattttccaagattttggaacgcaagccagagctaaatgctgagataatggccttcagagattatctgttgtcatcggcagtgtctgatacacttgaagtctgggaactcaaagatctgggtcatcagacagcacagcgaatcgttcaagcatcagaccctttacagtcaatgcaggaaatcaatcaaaatttcccaagtatagtttcttcactatcacgaatgaagcttgacgattccatcaaagacgaaattattgcaaatcagcggatggttccacctggcaagtcattgatggctttgaatggtgctttgatcaatatcgaggatcttgatctttacctgttaatggatatggtccatggagaattatccctggctgatcagttcgtccggttaaagttgcctcaaagtgctgtcctcaagatcctgtcagctcctccaccagcagaatctaattctttccgtgtggacttccggtcttctcatgtgcattaccttaataacttggaggaagatgccatgtatagaagatggagaagcaacatccaggagctcttgatgccggtcttccctggtcagatgcggtacatccgtaaaaaatctgtttccactctgtttatgtgcttgatcctgcttcagcctgtggtgcagagaccattgacatgatggtatctctatatcaagatagtgtccctataaggtttggtatcataatgtattcttcaagattcatcaatgttgttgaaggaagtgatggcactcttacaaataatgatggagaagacacttccattttgataacaaggctttttcttgtacatcaaagaaacatactcaacacagttggcattccaatttctcggcaatatacataaatcaaggaatggtgaagatgactacaatgaagagcttgttgaggctcatcatgttgaaggggcatttgttgattcactattatcaactgctaaatctcatccacaagatgtgctgctaaagttgcaaaaagagaacatgtacaagcaggaagctgaagaaagctctcattttgttcacaagcttgggttgtatagactccagtgttgtctgttgatgaacggacttgtccatgaagcaagtgaggaagcgaccatgaatgctatgaatgatgaacttcctaggattcaagaacaagtttattatgggcatatccagtcccatacagatattttagagaagtttttgtcagaaaatagctacaagcggtacaacccatcaattactggcaagaatgcagagaagaaatttgtttcgctctttgcatcgtaccatcaggacagctttatatttaatgacatgaagtacttacagtctcctggaactacagatgatgcaaaacctgttactcatctacttgccattgatctttcatcaaaagttggaacaaaattgctttatgaggccatactttacctgatggacggatctgatagagctcgtgttggtctgctactttatgtccacactggtggttcatcacctattttacttctgaaagatattttcgatagaactatttcttctttcagctataaagaaaaggtattagtcttcctgcatgggctcttgaaattttatgatgcccaacctttgcccgcctcatctgttgctgatgattggactagaactatgatggaaaaggtctataccttagctgctgaaactgctttgcctgttgatgactataaagcgtggtttaaaagtttctctgctgatacagttctcaaagggatggataagttatctgacttcttatttgggcaattggggcttgtgtttggtagtaatgctgtgatcaccaatggacgggtttttattatgaatgaagggaaatcatttctagccaatgatttaggtctccttgagtctatggagtatgatttgagaacgaaatacatatttgaaataattgaagaggttgagtttgccagtgttgaccctgatgacctaacaaaccaattctacagcgacattgccatgttgatctcatcgtcgatgtctgttcgtgaaaggacatctgaaagagcccattttgagattttacatgcggaacatagtgctatcaaattgaataatgcaaattcaagtattcacattgatgctgtcattgatccgctaagtcccactgggcaaaaacttgccccacttctacgcatactctggaaacaaattcagccgagcatgaggattgtacttaatcctattagttccctcgcagatcttcctttaaaaaacttctacagatttgttcttccatccatggatgattttagcagtacagatcattctgtacacggacctaaagctttctttgcaaatatgccactgtcaaaaacacttacaatgaacatagatgttccagaaccatggcttgttgaatcagttattgccatccatgatttagacaacattcttttagagaatcttggcgatgtcagaactttgcaggcagtatttgaacttgaagctctcctcttgacaggtcattgcatggaaaaggaccgggaccctccccgtggtctgcagtttatccttggtactaaacaaagaccacacttagtagacacacttgtcatggccaacttgggttactggcagatgaaagtctcccctggtgtatggtacctacaattggctcctggtcgtagtgccgatctgtatgagctacctccgaaactcattgccattgatagcttgagaggcaaactaatgcatattgaagtgcaaaagaagaaaggcaaggagcatgaggacttgctaaatgctgccgatgactaccacttccaggaaaagacggataacaaaggctggaataagaaccttttgaaatgggcttctagtcttatcactggtgatgcttcatcaaaaagtaaagctgataaaaccactgaccgtaaggatgcaagacaaggggaaaccataaatatattctctgttgcttctgggcatctgtatgagcgtttcctcaaaataatgattttgagtgttctaaaaaagacacagaggccagtgaagttttggttcattaagaattatctatctccacagttcaaggatgtcataccgcacatggctcgggaatatgaattcgagtatgagctcgtcacatataaatggccaacatggttacacaagcagaaagagaagcaaaggattatatgggcatataagatcttatttctggatgtcatttttccactttcactgaggaaggtgatttttgttgatgctgatcaaattgtgagagcagacatgggagaattgtatgacatgaacctgaagggtcgcccgcttgcatatactccattctgtgataacaacaaggatatggatggttttcgattttggaagcaaggtttttggaaagatcatctgcgaggaagaccgtaccatatcagtgcgctttatgttgttgatttggccaaatttcggcaaactgcttctggggatactcttcgtgtcttctatgaacaactcagcaaggaccccaatagtctctccaatcttgatcaggatctcccgaattatgcccaacatacggtgcctatattctctcttcctcaagaatggctgtggtgtgaatcttggtgtggaaatgccacaaaagcaagagcaaagaccattgatctatgcaacaatccaatgacaaaggagccaaagcttcagggtgctagaagaatagttccggagtggactggtcttgacagtgaagcacggcagttcactgcacgaatcttgggtgatgatgtcgagcctgcagatgccacacctccgccatcggaggcaccgaagcctgaagatgatcaggatgtgaaagatgagctatgatcgcaagatgtttccaggcttggtcttactgaatgaaagtttggtgactcgacagtcatcagttcagaacacaggcacacagctagtggagcgcagagggatagtttaacgcaggtgcaaatttgtcaaaacactacacctggaatcctagactacgttgattcaggtatttcgtttacagtaaggccttgttcgtttgtgtcggattggtgggtcggaatgatttctagccgggttgcttttctaatttatataaactttaattagctggaataattccgggtgcaatccgatgtaaacgaacaaggtctaatagtttcaagacctttaaccaaatcatatggcggggaagctgcgtccagtaataggttaacaaggcagccagctggggtgtagaactctgtctgctctcagctgcatacacatagactgtaatggtcaacaatttaagatctccttgagacattgtaaaatttatcggctgccagtcgaaaggcaacagcgaagctggcagctgaaatgcccgagaattttgtagcactcagcaaacggattttttaaacactcagtaagtcaataatgcctgtcgcatgtaacagcaggctattgtgggcatggcagctaaccgttatactaaaaaaaaa

SEQ ID NO: 13590 - DNA, 2819 bp, Zea Mays
ccgcaccccacccaaaacccctccttttccgctccagacacagcagcccctcttgtaccagtaaaccgtgctgctatcccccgctaccgctacccgccgcgctgctgcggctcgcctccctcctccccagtccccacgccccgccgccgccgccgccacctcctctcgctccctccttttaccccgagcttaagctcgcgcgtacctgcctacctatccgtaggagaggaagaggggacaaggcccggtcggtcggtcggtcggtcggggggctctcggatctcgccgctgcctccccgttcgttcgttcgttcgttgggatctcgcgccatggccgccgtcgcgccgcccccggcccccgcgccggcaccggttccggctcctgctcctgccaccgtccctgtcgcggatcaaaccacggatctgctgcagaagctgtcgctcgactcgcagcccaaggcggcggacgcaacacagcctgctgctgccaccgccaaaaagggcgccgcggcgagccagccgctgagcgtggcgatcccgccggagccgtccatcacgccggtgatccaagactttacggatcccaacctgttttatctaccagcgtattactacggaggctacgacagttccatgagcgagtgggatgattatccgaggtatctaaattcagatggagtggagattgccccagcggtatacggagatatttatggatatgggtatgctccttacggggcatactctcctgccacttccccagttccaacagttgatggtcagatgtttggtgcacagcattaccagtatccaactgcgtatttccagcctcctacaccagttccttctaccactcaaagtgacctacagtcttctaaaaatcctgaaaagccagcagctaaagcagatccagccaagactactaacggtgttcccaatggtactgctcacagtaacagtggaactgtaccccttgcgtcgagccaacaaaattcatcactgacgcctgatggaacttatagggcgcccttgctaggtggagttccttctgctggttacctggacacgacatatgggtatgacagcacaggggcacactttgcatggtatgatggctctgcttatgcaaatggacaacaaagagcaactacaactaaccattttccatcctcaacatttggtaatggttccccagcaaggtatcagaacaagagcaccaccacaccgcagatgggtatgcagaatagaagacctacaactacatcaccagctcctacttatcccaataggatgtaccctagctcccgaccgtacacccagtatgggaattcaataaaaactggccttccctacgggagcaacggttatgattccaggatatatgggcgatggggtcttggtatggataacaggtacaggcctaggggccgtaatggatactatggttatggcaacgagagtcaggatggaacaatcgagttaaacagaggtcctagatctggccgtttcaagaaccagaaattgtacggccatactgtcactattgctgtgaaagggcagagccttccttctggtgaaagcaaggatgatagtgccgtgcctgatagagcacagttcaatagagacgatttccctgttcagtatgatgctgcaaagttctttgtcattaaatcgtacagtgaggatgacatccacaagagtgtaaaatacaatgtgtgggcaagcacaaccaatggaaataagaagctcgatgctgcttatcaagaagctcagtcgaagggttctgcgtgccctatattcttgtttttctcagtgaatacaagtgggcagtttgttggtgttgctgaaatgacgggggctgtcgattttgagaaaaccctggggtattggcaacaggacaagtggaatggttccttctctgttaagtggcacattgtcaaggacgtgcctaacaacattctcaaacacatcatcctagagaacaacgagaacaagcctgtcacgaacagccgcgacactcaagagatacacctagaacaaggccttcagatgctcaagatattcaaggagcatgtcagcaagacgtccatcctggatgacttcgccttctatgagagtcgccagaagctgatgcaggataagaggtcgaaacagcagcaggtccaaaagcaggtctgggacagtaggacccccatttctgtcactggaagcgagcaacagcaggaagctgccaatgggaagcccaatccgtctgtaccaaacggtgtccctgcagaggtgaaggcggcgaaggcttctgcagagaacggcaccgccactccagctatttcctacgcggcaaaggtggcccaagcagcaacagagaaacctgtgctcgccaacggagtcgctaagaccggttagctggaccgcccaaccgatgctccatagctagccgcgagcgacggtcgacgtccccaagagctcgaccgaatcactgtacaagggaaactggtgaccaaccaaggcaggctgtggaactgggcaggcatggcgccctagagcgttgcggctccatctcgtcgctgctggagagcagctggctagctgttagcgttttccctagtctctctctctgttccccgtttcagtttgcttatagcccgaagacttttctgctgtagtattggaatgccagagacctttggccggacaagaggaatttgcgaaggccgtctggctgggtgtgttgcgtcgtcattggggtcgagtatggccggttgtgttcgtcgttatattgagtggatccgaatgaatgtgggttagattggagctttcaa

SEQ ID NO: 13591 - DNA, 1602 bp, Zea Mays
gtgctgcgatacttgtcgttgctgctgcctgctttttccccggtctacaaagacctcagctttcctacctccacttcttctttcttccaaagccttcgcctttttcctctcgtcttcctctctctcccccgctccaaatcccaccctctctctttctctctccacattctccctgctgtgcaccttgcagcagccttgggctgtggatcggaaatggcaatcgacgatgaatcgccgctcagagtcaacaccagaggcggcgccatgggaggaggggagcgtgacggcggggagaaccagcggtggccgccgtggctgaagccgctgctggggacgagcttcttcggccaatgcaagctgcacgcggacgcgcacaagagcgagtgcaacatgtactgcctcgactgcatgaacggcgcgctctgctcccagtgcctcgcctaccaccgcgaccaccacgccatccagatacggaggtcctcctaccacgacgtgatccgggtgtcggagatccagaaggtgctggacatcagcggcgtgcagacctacatcatcaacagcgcgcgcgtggtgttcctgaacgagcggccgcagccgaggcccggcaagggcgtcaccaacacctgcgaggtctgcgagcgcagcctcctcgacaccttccgcttctgctccctcggctgcaagatcgtcaggacctccggcgacttccgcatccggaagaagcacgccatcgtcgcaaagaagaagagggagaagaagcatgcgccgcagcagaagcagcacaggggcgcggcggactcggcggacgacgacgacgacgactcgtccaccagcaccagcggcggcagcgacaagagcagcgtggtgcagagcttcaccccgtcgaccccgccggcgacgaccgccaacagcttccgcgccgggaagcggcgcaagggcgtgccgcaccggtcgccgttcggcagcctcgtggtggagttctagacaaaaaaaaaggcgcgccgcccggtcgcgatggacgctcaccaaaaaaaaaacacacacacacagcggtacaccactgtagcatacgcacttcttctacataccattaccatctataggtgctgccggatcgaccgggctacatacataagtacatagccagcccaaaaataggagcaagcaataaccagggccccatttgcacgccgcccgcgcttctggacggacgaggacgagggggccggtgcaatgcggctcgtgcggggtacggttacttccacttccatatagcagttactgtgctgggtaacaatggtttgggtttggtgcctcactgctagcagttactcttgtcgtcgtcagcctcagctactactaagttttgcgagttttacctataggtgtttgctagttttttttaccagttgcttggtataccgtatacgcgagtagaatgtacatgtacgtatactgtcagagatgggggaatggtggtagggggtgtagctcctggtgtagtggtgttcatattcgtgtgttgccttgctggcctgtaataataataaaaataaaaaagggataaggatgctgctcctggatggtcttcgatgtgaaata

SEQ ID NO: 13592 - DNA, 5387 bp, Zea Mays
atggccgccactccggaccgagccaatgccgacctccgccatggcctctccgtcgacacccccctgccgccccagattgccagagagaagcaaggccttgatactgaaatacccctttctcctcagtggcttatgaaggtgggggaaaacaaggatcctgtttcacatggtatccgctcagatgtttcaaaaacatcaggggctggtgaagaccaaggctacaatacgaagaaaaaggatgttttcagggcttcagttcttgatggtgaaactgggcgtcgtgaccgctggcgcgatgatgaaagggaaccaaattcaacccatcggtggagtcgctggagggagacagataaggaacatggcgatgcacgcaaagcggaaagatggtcagatgacacctccaagcattctgtggatggacgtcgtgttccgcaggagcgctggggcgattccaataataaggatggcagttatgaccaacgacgtgagaataagtggactgcacgttggggttccaatgataaggagtctgaaaattggcgtgataggtggggggattcaggcaaagagggtgatgcttaccgtgaaaaaggtttatctcaccatgggaaggatgccaacagttatgaaaaggatgacaatatttctcgttcatggaaacctagttattccgcaggccgtgggcgtggagatttgccaaattatacttctcagacactgccgaaatcacctgctccttctggatatggtagggggaagctagacaatgattttgcaaagtttccaaacagtcgtggaaagttcacatctggtacaagtgcaatcagtagtggatcttcacgaccattccatcttggtcttctttctgacagacctggtggtatatcagatcgttcggcattcagatacagtaggctgaaattgcttgacatataccgaaattgtgatgtcactgattttaagttatctgttgattgtttggaggaactctctgtgttcatgcaagaggatgttttagaacctttagcactatctgctcctgttgctgaagaagcgaccattttaaaagctattgacaaaggggatatcgtaaacagtggtgtccatcaggcttctaaagatggttctgttggaaaagctggtagagaagaccagccaggaggtgtggaagtctcaggtcttgctggaaatactgatttggcagcaagaggggaaccaatgcatcctgcgacatctacttatgttgttccacaaaggtcacagtttattggagaacataaacttggaccatctgaatttgggcatcaaatacctaatttcttaaatcaagaatcaaaaactgttggcatgttgggttttgataactttgccagtccagtgcattctcatcctaatccagaaaacctctctctatactataaagatccacaaggtcaaattcaaggccctttttctggtgccgatattattggctggtttgagactggttattttggcattgatttgctggttcgtccagtgaatgcaccccatgatgttcctttcttaatgcttggggatgttatgcctcacctgcgagcaaaggtaaggcccccaccaggatttgccacttcaaagccaagtgatatgctagctccagagaccctacctacagggaagtttgtcagctctagcatgcaagcaggatcaactggcattggaatatttgacagtgggccaatcaggaaagataatgctgttgaggctcaaaatcgtttcctggagtcacttatgtccaatagtgcgcggaatccttcggcaggcactatctctataactggaggtatgaatgaacttgttagtactagctttggcaacatttctgtgcgcggaggtgagagcggggtcaatctgaactatcttttggcacagaaaggactgttggagagacaaaactctttgcaaaaccctgtttcatattggacaggagatgctccagcatcaaaagtacatcccatggctgatacatctcgccaatctttgcaatctcaaaatgttgatttactagccatgctgcaaccaaaggagaagcctcaagttcctactggtaattcgggtctgccactatgctccaattaccctgaagcaagtatcgttaatcccaacttgcatagtggagatcttgctcaaggggctcttaatatgcgtcaagatatgcagaactcccagaacattggtattggagttcaacaacacaacttaatgccacaaaaccgaccagctttggctcagttgccatctgagaagcttgctgagatgtctcaagatccacaactgttaaatatgattcgtcaagatctgcagaactcccagaacattggtattggatttcaacaacacaacttaatgccacaaaaccgaccagctttggctcagttgccacctgagaagcttgccgagatatctcaagatccacaaatgttaaatatgcttcagcagcaatatcttttgtcacaactacagttgcagtctcagacaccttttacacctcagcctccactctctatgttggacaagatgttattgctcaagcagcagcagcagcagcagcaactgcagcagcagcaacaacaactgcaacagcaactggagcagcaacaaaagctattgttgcagcagcaactgctctctcagatggtgcctcacgcgcatcctaatcaacacactgatgattcttatgcattgaagtatacttctgtgccatctgatgattctaccagtcttggttttagaagaatgcaagaggctattgaagtagatcagaaattttctgtccatggtatgcaagtgggtcaacaacctagtcagtcaattatgaattttagaaatatggatggtatagctttattgcaaaatcctgtaactgcactgccggtgccccatgaaactgctgtgggtgcacttccaaaagaggaccactctcgtcctggaatgtcggaagattttgcaaatgtcgacttacaattgaaatcaactatggtacactcaaagctggtggaagttgcagataggaacgagggttttaaatctcacgaagtggacactgcagcagaaaaaaataaaatgtctgaaaaggagttgaattctggatctactataatcatggggagtgcttctgatgaagctaagaatttgcatgaaccaccactagatccaaagtcagaaaatttatcttctgatatttctggtcaggttcaagagtcaaacctgtctgcagaagatacgcctcctggcatcacagcagctgtggcaactgaagtaaaagttactgatacacaggagaccaaaaaagcagaaaagaaaaggaagcaaaagaaaaaacaggctgctgcagatgctggcaaaggaacatcaaaggcggttgtagcccagcagcaaaggcaggaaactgaggttgacaattctgatattggtggtaataagcatgatttaacagatgatacagaggaactattttggggttcacctatcagagtgcaaaatgagattttaccctccaaaagttttccagaggaacatgacgctgacaaagctgaatcgcagtttagttctctatcatctgatcctcatagcatggcaagccagcgtgcatggaaacaacctactcaaggtctcaggcctaagtcactgctagaaatccaagctgaggaacaactgcgtgcacagaaaggattaactactgaaactgctaagccagcagcttcagttccttcaatttcttggagtggcatgtcaatatcttccgagcaacattatgggggttcaaatatatcattgggaagtatggaaagtgctgttgagagaaataaaagaagccagttgcatgatttgctggcagaagaagttctggcgaggtcaagcattgcagataatgagaataatgccaacgatgcatttttctctcctctgtcgcctgctgctgttcaggctgatgctcctgcccttgatgataatgacttcattgaggccaaggacaaaaagaacaaaaagaggtcagcaaaaacaaaagcttctactgtgaaggctccatcacctgttgtttcctttgatccaccagctatttcgatgccttctgaaaagggaaagtctgccaagcaagcacaacaggagttagaaatattgccagctccaccaagtggtccatcgtttggagattttgttctttggaagagtgatcagactagctctgtgcctgctccagcatggtctaatgactcagcaaaggtgcagaaacctttgtctttgagagatattcagagagaacaagaaaggagaaccgcatctatccagcaacaagcaccctcaccaactccagcaaaggtggccccgaaccaaagaagtcatgtgaatgcttcttcctggcaagcttctggaccacctccatcacaggcagttgcccctgtccaaatgagttccaatgctcccagtcattccaggtcaagtgctgaagatgatttgttttggggcccttctgagcactccaaacaagatacaaagcagtctgagtttccaagtctgttgagccaaagcagaagttccatgatgaaggatcattctgcactgaatcgtcaaaagtctcaggcaggcagattgccagttccttctgctgctactgcaaaccaatctggcaaagggaaagcagaggctacaaacaagcagactgaggcaatggacttcagagattggttggatagtgaatgggccaagcttactggaacaaatgatgtaagcttccttgagttctgcataaagcaatcaactaccgaagcggaaatactcctccatgagaacattggttcccttgaccgcaaccacgagttcatcgacaagttcctcaactacaaggccttcctgtcagcagatgtgatccacatggccttccaagctcccagcagccgtggtgacggtgcagggtgggcaaaccctgctgctgcagctagaggaggcacggtcatagacgcggagctggatggcggcgggaagaaaaaggggaagaaggggaagaaggtgagtgccgcagtgttggggttcaacgtggcgagcaaccgtataatgatgggcgagatccagaacgtggattaggaggatggcggcacaccaacaccaccgtgtatataacatagtttggcctttggttacatgccaccgaagtctcagggctcgagggaagctgggggtgctcggaatggcggtctggtctacctgtttttgccgagggtgggaaactgagcttagatacagggtcatgtgctggtgattttgggttcctgtaacaattggttaggatcctgtaacggacagaaatattttcttcaatagaaactcaccagatggattcaaaaaaataa

SEQ ID NO: 13593 - DNA, 77 bp, Zea Mays
gggtcatggaagtcgaaatccgctaaggagtgtgtaacaactcacctgccgaatcaactagccccgaaaatggatgg

SEQ ID NO: 13594 - DNA, 72 bp, Zea Mays
aaacgaggtaacgggaattgaaggccaagttttggggagacatatggacaacatgttatcataagtaaaagg

SEQ ID NO: 13595 - DNA, 573 bp, Zea Mays
  misc_feature (573)..(573): n is a, c, g, or t
ctggtttactaccggaggggcagggcaacatatatggaacaagtgagaagcggtgatgcaagtgctactgagtattttgagcttggagcagtcatgctacggagaaaattttatccagctgctatcaaatatctgcagcaagcaattgacaaatgggacagagacgagcaagatcttgcgcaggtctacaatgccctgggggtcagctacaagcgagagaacaaacttgacaaggcgattcagcagtttcagaaggccgtggagctccagccaggctatgtgacagcttggaacaacctgggtgacgcatatgagcagcagaaggacctgaaatcggctctcaaggccttcgaggaggtcctcctctttgatcccaacaacaaggttgcaaggccacgcgtcgatgacctcaggccgcgcgtgagcatgtacaagggtgtgcctgtaaaatccgaaaagcgatagctattcttttttggtggtaaatcatgcatctgtctagtccccagaatagcggttgtttatttttgaacggtagcatttgtaaacatgatgagatgtgtagtagcatgn

SEQ ID NO: 13596 - DNA, 3723 bp, Zea Mays
ttttagcagaagctgtgccctccgtctccctctcgagctctcgcactcctccgtcgtcctccaaaccctaggccagaccagagctgaagtcgagcggaagtccaaggcaccgccgcgaccccccatcctccgcacgacctggatctgacgcgcctccccctgccgccgtccgcctcacacctcctcgcggcggccgccgtgctcgggctcctaggcggcctcctactctacatgcttccccggaagcggggggtcgacgccggcgaggtccaggatttgcacaacaaggccccccgcgccgccccagcccaggacaaggacagggaggaggttgcggagatggccggcagggcgcccgagatcgatgaggacctccatagccgccagctcgccgtctatgggcgcgagaccatgaagcgcctcttcggctccaatgtcctcgtctctggactccagggactaggcgctgagatcgcaaaaaaccttgtccttgcgggtgtcaagtctgtaaccttacatgatgatggcaaagtcgagctatgggacttgtcaagcaatttcttcctctcagagaaggatattgggcaaaaccgtgctcatgcttgtgttccaaagctacaggagcttaacaatgctgtcatcatctctaccgtaactggtgatttgaccaaggaacaactttctaactttcaggctgtggtctttactgatatcagcatagaaaaagcagttgagtatgatgaatactgtcatagccaccagccgccaattgctttcattaagtccgaagtttgtggcctttttggcagtgttttctgtgactttggtcctgagttcactgttttggatgtcgatggcgaggaaccacatacaggaattgtggcatcaatcagcaacgacaatccagcacttgtttcttgtgtggatgatgaacgtctggagttccaggatggtgatctagttgttttctccgaagtgcatggaatgaccgaactcaatgatggaaaaccaagaaagattaagaatgcaaggccttattcttttactctagaagaagacaccacctcatatggcacttactttagaggtggtattgtcacacaggtgaagccaccaaaggttcttaaattcaaaaccttgaaggatgcaatcaaggagccaggagaatttctcatgagtgatttctccaagtttgaccggccacctcttctacatttggccttccaagctttggacaaatttaggtctgagttggcacgatttcctattgctgggtcagatgatgatgcacagaagctgatagaccttgctattagtattaacgaaactcttggtgatagtaagcttgaagaaattgacaagaagctcctgcagcatttcgccagtggttccagggctgttttgaatcctatggctgcaatgtttggcggtattgtaggccaggaggttgttaaagcatgctcagggaaattccatccactttaccagttcttctactttgattctgtcgaatctctgccagttgaaccgttggagcctagtgatttgaagccagagaacagtagacatgatgcacaaattagtgtctttggggctcagcttcaaaagaaactggagcagtcaaaaatcttcatggttggttctggggctcttggatgtgaatttttgaagaaccttgcgttaatgggtatttcttgcagtcaaaatgggaagctgactgtgacagatgatgatgttatagagaaaagcaatctcagtcgccagtttctcttccgtgactggaacattggacagcccaagtccacagttgctgcaactgccgctatggcaattaatcccgagcttcatgtggaggcccttcagaatagagcaagtcctgagactgaaaatgtgtttaatgatgccttttgggagagcttggatgctgttgttaatgcattggacaatgtcactgcaagaatgtacattgactctagatgtgtatatttccagaagccacttcttgaatcaggtactctgggtgccaagtgcaacacacagatggtcattcctcacttaacagaaaactatggggcatccagagatccaccagaaaagcaggcacctatgtgcactgtacattcatttcctcacaatattgatcactgcctgacatgggccagatctgagtttgagggtctacttgagaagactcccactgaagtaaatgcttttctgtcgaaccctggtggatatgcaaccacagcaagaactgctggtgatgcacaggctagagaccaacttgagcgagttattgaatgccttgagacagacaagtgtgagacattccaagattgtattacctgggcccggttgaagtttgaggattatttctccaaccgtgtaaagcagctgacattcacttttcctgaagacgcaatgactagctctggtgctcctttctggtctgctcctaagcggttcccgcgaccactggagttctcatcttctgactcaagtcaccttaacttcttgttggctgcttctatattaagggcagagacatttggaatacccatacctggttgggcgaaaaacccaaagaaactagctgaagctgtggacaaggtcattgttccggatttccatccaaaagagggtgttaagatagagacagatgagaaggctactagcctatcctctgcgtctgttgatgatgctgccgtcattgaagagcttattgcaaagctgcaagcaatttctaaaacattgtcaccaggattccgtatgaaccctatacagtttgagaaggatgatgataccaatttccatatggacttgattgctggttttgctaacatgcgggccaggaactacagcatccctgaagttgacaagttgaaggcgaagttcatagcgggaagaatcatcccggccatcgccacctcaactgcgatggccaccggccttgtctgcctggagctttacaaggtccttgctggtgggcacaaggttgaagactaccggaacacatttgcgaacctcgcaatccccctcttctccatggcggagcctgtgccgcccaagaccatgaagcaccaagacatgtcctggaccgtgtgggaccggtggaccgtaactggcaacatgacgctgagggagctcctggagtggctgaaggagaaggggttgaacgcgtacagcatatcctgcgggacctcgctgctgtacaactccatgttcccgagacacaaggagcggctggacaagaaggtggtggatgtggccagggaggtggccaaggtggaggtgccttcctaccgccgccatctggacgttgtggtggcctgtgaggatgacgatgacaatgacgtcgacatcccgcttgtgtctatttacttccggtaaagaggagggtgtcgctacctgtttacatggaacctgtctgtgcgatgtttatcagaaggatcgagtctataagttgcgcatgcaaccgagaactaggctgtgttcaatgtaaacacatactgatgagtctataagttggctgggaatcgtcgccgagatttgggttcaccgttatggaattcttggagcatataaaacatcgtgatagttattgcatgtcaatgtcactgctagatgttgttgtcctcatgcatgtatcggtgtgactcttattgtgcttgggtgcatttgcttcaatgcatgtgacgtgctctctttagatttcggaaactacag

SEQ ID NO: 13597 - DNA, 282 bp, Zea Mays
tttaggcatctgatccaacaactgcttctattgagtattgttgtgcaacagctgagggactggtaaaagagaaaaggctgtttgatgctgtaatttctcttgaggtgattgagcatgtcgccaatcctttggagttctgtgaatccctctcggctttgacaattcctaatggtgccactgtgatttccacaatcaaccgatcaatgcgagcatatgccactgcaatagttgctgctgaatatatcctcagatgggttagaatccagtaatggtcctagacgg

SEQ ID NO: 13598 - DNA, 139 bp, Zea Mays
tgatgatcgtgcaagtgatgtggtgtcaaccacaagatgcagttggtggacgacttgaagaatgatggatctaacatgtggatgctcgccaagcgagtgtcatctagcagacactatctgatgttgaattccaggcaag

SEQ ID NO: 13599 - DNA, 2848 bp, Zea Mays
cgcgcctctactagtactacaggctacagggctccgtgatgccggcggctctcgacccaggacagcggcttctctgttggcccaagtgcacgcgactgactgccggtgctggtgccttgaaatgcggcagccgttctacggccggcctcccgtccagatgaaggtgcagctggtggaacaggaaggctccaaggggatgggttcttccgggtgcgcggagatagtcgagctggcggacgacccgaaagctgctcgtcctgctgcgcatctgagagtgagggtcaagcccgtggggcaggaggatggggcgcggtcgtgctcgctggaggatgaccttgaccagctcatcaggtcggtcaacgtgcgcacgtcggcgagggcttctgggcagaggagcaccgatagatggcttattgggctcgggaagtcgccggtgtcgggctcagagattgtggagtccgtgagcctgaagcaggcccttaggaagatgtgcatctcccaggcgtcggaaatggcagccatgaagaggctgtcaaaaccgacaggggcgtccaccccttctgattctggggcgaccaagaagctatatggctctgttgcagttcaagccaacggggagcaagatgacaagagtaaggtgggcaacgtttatatgctgcctgagaaactggcaggaagttcgattggtaaggcaaatgaaatcagcaaggggcagagtaagagctcagccaagaagaatttgagatcagcatctcctaccgcagtcaaggttcgcaaaaccagaatccaagatgtgatcagtaacaagtcatcagaggcggttgaagatgtttctgtaggagcaacactgccaaggcaaaggaaggggaaatctgtgaaaacgtctagcccccgggctgttccggtcggtggctcacggctggtgaggccaatgtttcggaacaaaacctcgaccaaaaagaaggtcaaacctgaacctgctatagtgcccgcatcgcacaagcattgtgagacgaaaggtcctaagtctcacgctagtaaacagaaggagtcccttcaggatgaacccagaaccccagcaccagctaacaagaaggctgctgtcagctccactgttgatggatctgattttggcaccaaagggtgtggcactggtgtgatccatggcccgaaggttggtgagctgtcaagatcaaaggagaagggtgaatgctcccaaagctctaagagtagcattggtgattatagcaccagcaccagcatcagtgaggacagttatggcagcttcagtgctaacggaagcaggcctcacatgtcaaaggatgtgagatggggagccatcaggtgcatggctatccaacaagggagcttgggattgaagaacttcaagcttctcaaacaacttggttgtggggatattggcactgtttatttggctgagttagtgggatcagactgcatgttcgctttgaaggttatggacattgagtacctcataagcagaaagaaaatgctcagagcacaaactgagagggagatactgcaaatgctcgaccacccgttccttccaactctgtattctcatttcacgacggacaacctttcttgtctggtaatggagttttgccctggtggtgacctgcatgttcttaggcagaaacaacctaccaaaaccttttcggaagcagctgcaaggttttatgtcgctgaagtcctcttagccttggagtatctccatatgttgggggtcatttaccgtgatctgaagccagagaacatacttgttcgagaagatgggcacatcatgctctcagactttgatctgtctctgaggtgctcagtgagcccaatgcttgtgagaatatcatccgtaggcagagatgagcccagcaggccttctggtccttgtgcacaaagctgcattgatccgctgtgtatccagccatcctggagcaattcctcttgcttcacgcctcgtctggtttcgtcacgaaggcctagagccgagcttctgaagaaaccatcacttccacagctcgttgttgaacctacggaagcaagatcaaattcgtttgttgggacccatgaatatcttgccccagagattattcgaggagatggccatggtagttcagttgattggtggactcttggaatcttcctttacgaattactctatggcaagacaccattcaagggacctggcaatgaggaaacactctcaaatgtgatctcacagggcttgaagttccctgataatccagctgtaagcttccacgctcgagatctgatcagagggctgcttgtgaaagagccagagtaccggcttggctcgtcgagaggagccactgagattaagcggcatcccttctttgaaggcctgaactgggccttgatccggtggaccgcaccaccagagaccctgaagaacattgacactgcaccaacacctgtaacgacacgcaagaaaaaggaaggcaaatgtctggaattccggctgaatggtgacgacatcgagttcgagctcttttagttgtagctgtagtggcatcgctgttgtagtgtcaaggatatatcaaatatcatgataagctagcaagagtagtcttagtccctcttccctgcagttttctgttgaaagttagtcatcgttgggaagtaaggtaagattggctgttaagcctgtaactttatgccttgttaataccatcaaatattagaagacacggttgggaaattcctgggcatgtgcgagatgctgagatgcagctggcagaaagtgtacattgtgttgctggatggaacaatttgtgcctcgcttacttgatgatacagctgggagtcggcc

SEQ ID NO: 13600 - DNA, 821 bp, Zea Mays
cacagctgtaccaattgcagcattcttatcatcttatggcagcaaaagacccttttctacgccactgataaacttcaagggcttatttcaacgaatcaccagttgaggttgttaaggaacaagataaagagtttaataaactggcaactgatgccataattccttctatgcctggacatgtggttcaagcttttacattgctgaaatcaagcacagaggctcagagtgttgtcgcctcccttgcatcagatagaaatgtctgggatgcagtattgaagaatgagaaggttatggaattttataagactcaccagacaattcagacattccctgaggaagcagccacagcagagtcgcctgggaagtttgaagatgccacctctgaaaatgcatccaacagcgaactccccacgggctcaggcgcaagtttcgcagatttcgtggacaatgcgaagaagaaagtgatggatgtggtccacaatataaccgactttttcagggacttgttcaatgactcagccgaggcccagaccggagcaggcccttcagctgagaagggcttttctgcaacagagatggctgtgggaggatccttcatggctctgaccatagcggtcatcctagttgttctgttcaagagggcatgatagctcaagagtcatgggtaccttctgggacccatcgtgctttaaatctgtcgaaaattactcgtctgtcgtatggtcaataattccgaatgcaatgtatagcttgtccgtttctttggaaacagtacaataaaggatttatctaaagtatgctcctatacactgtagtttctc

SEQ ID NO: 13601 - DNA, 295 bp, Zea Mays
tacgttgaattaagccaacctgcagtcctagaaatcgggggacttgaccaacccactcacaatcacgtcttgcgagataatcatttacagtgacaacatgcactcctttcccactcaaagcatttaagtatgctggcagaatggccacaagagtcttcccctctccggtcttcatttcagcaatctcccccttgtgcagaaccataccaccaatcaactgcacatcaaagggccggaggcctagaactctcttggaagcctccctcacaacagcaaatgcttcctgcacaaatga

SEQ ID NO: 13602 - DNA, 2435 bp, Zea Mays
ctgcctgctccctacgcagctacgctttactcccttcccctgcttcgtcctcgtttctcctcgaacccacccagcagcgccttcttccttcttcccgcccaacctcggccatgcccgtagcggcgctccgtcctcccccggtcgctgtcggcgcgggacgccgcagcgcccgactccaggcgcggttcgccctccgcgcgagctccctcgaggcgtcggcggcagtgacggtgacagtgaacgggtctgcagaggccgcggtggagaggaaggagaaggtgcaggaggataaggacaacgagggactgccggtgaaggaggagcaggagagggggctggaggtcctctacgacgacggcttcggctccgtgaccgtcaaggactacttcgcggcggccaaggtcctgtgccgggacgacggtgggccgccgcgctggttctctcccgtcgagtgcggccacccggccgtggaccaagcgccgctgctgctcttcttgccaggaatggatggcgtcggcacgggactcatcctgcaccacaagtctttgggcaaagtgttcgaggttcggtgcttgcatataccagtcaatgatcgtacaccatttgaaggactagtacaaatcgttgaaaatttgatcaagcacgagcatgatttatccccggacagaccgatatatcttgtcggagattcatttggcggatccctggcactggcagtggcagctcgtaatccgcagattgatttggttctcatactagtaaacccagctacatcatttgcaaagactccattgcagccagtattgcctctactggaatcagtgccaagcgagtttcatgctacagtgccgtatcttctcagttttgtcatgggtgacccactgaagatggctgcagttagcattgaaaacaacctatctcctccagaaactctgcagaaattgtcagacagtctcacatcaatgcttcctttgctttcagaactgtctgatattataccaagggatactcttctatggaagctcaaacttctcaaggcaggagcagcctatgcaaattctcgtctccatgccgtgcaagccgaggttctacttcttgccagtggtaaggacaatcttctaccaagcggagaagaagcggatcgactcttcaaggcactgaaaaactgcagagttcgatacttcaaggacaatggccatacactactgctggaggatggcgtcaacctgttaactgtcataaaaggagcgaacatgtatcggcgtggaaggcaaagggattctgtaaccgattatctcccgcctactctaagtgaattcaggcaaacatttgatgtggatcacaggctgttccaccttgcactgagcccagtcatgatgtccaccctgaaggatgggaaaatcgtccgcgggcttgccggtgtccctgacaaaggcccagtcttgttcgtgggctaccacgcgctcatgggcattgagctgagtcctctgtacgaggagttcctgagggagaagaggacagtcgtccgcggcatggcgcacccgttcctgtttgggaaaaagttcgagtcgtcgcgccaggagacgtcccgtttcgacactgtttctatgtacggtggactgccggtgaccccgatcaatatgtacaggttgttccagaggaaccaatttgttctgctctaccccggcggcgttcgggaagctctgcacaggaagggtgaagagtataagttgttctggccagatcagccagaattcgtaaggatggcggcgcgctttggtgtaactatcataccctttgggtgtgttggagaagacgacgttctcgagttggttctggactacaacgatcagaagaacattcccgggctccgggaatggatacagtcgatcaacaaagaagccgagagagtgagggacagcgtaaaaggagaggatgggaaccaggacatgtacctgccagctcttctcccaaaagtgcctggccgattctactacctgttcgggcagccgattgagatgaaagggatgggcaaccttgtcagagataggaagagcgcgaacgaggtgtatctacgcatcaaatcgcaggtggaggagatcatgtcgtatctcaagaggaagagggaggaagacccttacaggagcctaccgcagcgtgcactgtaccaggcaacatggggcgcctccgctcaggtccccacttttgagccatgaagattgggagtagggaagggcgtctgcgagcggactgcaattctttgacaagatgcaatgcgttctcatttctgaggagatctccctccctcatacgctgattacatatacggactacggactagtataccgcaaatattgtacatttttaggaaaaatatgaaatgatgtttttaaacaaaaaaaacgcactcagcacattatcttaaaacagatgcg

SEQ ID NO: 13603 - DNA, 1989 bp, Zea Mays
cccgcgcggtcgtgagttcgtgactgcggaggaagtagcgcaggcgaaaaggctgcagcagtggacggcggcgaaccctagcctagctccgcgagtgcgttggcggtttgattcgatggccgtggcgtcgcggctcgcggtcacgcgtgtgtcgccggcggacggcgcgcgccccgcggcggcggcggggaggaggagtgggctcgcggtggttcggctcccgccgaccgacagcagggggagaaggaggaggcgcggcggggccgtcgcggccagccccccgacggaggaggtcgtgcagatgacggagccgctcaccaaggaggacctcgtcgcctacctcgtctccgggtgcaagcccaaggagaactggagaattggcacggagcatgaaaagtttggttttgaagtcgacacattacgccctataaaatatgatcagattcgtgacatactgaacgggctcgctgagagatttgattgggagaagataatggaaggaaacattgttatcggcctcaagcagggaaagcaaagcatctcactagaacctggaggccaatttgaacttagtggcgctcctctcgaaacgttacatcaaacttgtgctgaggtcaactcacatctatatcaggtcaaagcagttggagaagaaatgggaataggatttcttgggcttggctttcagccaaaatgggcactgagtgatataccaataatgccaaaggttaatcttgacttcagttcagaacaggatatgataaggaaatttcgtgctggcctcgcattgcagcctattgcaactgcaatatttgccaattctccctttaaagaaggaaaaccaaatggatttctcagcctaaggagccatatctggacagataccgataacaaccgtgcagggatgctcccttttgtctttgacaactcatttgggtttgagcaatatgtggattatgcattagatgtccccatgtattttgtgtaccgaaataataagtatattgactgcaccggaatgtcatttcgggattttatgcaaggaaagctccgacaagctcctggggagttgcctactcttaatgattgggagaaccatctaacaacaatttttcctgaggttaggttaaagagataccttgagatgagaggtgctgatggtggcccatggaggagattgtgtgcgctgcctgcattttgggttgggctgctgtacgatgaggaatcattacaaagcattttagacatgacttttgactggacacaggaggaaagagagatgctaagacataaggtaccgttgactggtctgaagacaccatttcgcgatggatatgttagagatttagccgaggaagttctaaaactggccaagaatggattggaaagaagaggatacaaggaggtcggtttccttagagaggttgacgaagtggtgaggacaggagtgacacctgccgagagacttctgcatctgtacgagacgaagtggcaacgcaacgtagaccatgttttcgagcacttgctatactgatgttgtagatgtaccctagtacaaaaatctcatctttgattcattcaacgccttgagtgggagggcacaggaacacagcttttggttaagttgctgaccgggggaacagctacccggtgctgcgtgcggtgcctacaaataacttcgctcgggacggatcactactctctagggagatggaacaaatcactgtttgtaccggccctttttgtttctgttttccttcagagatggagatgccgtattgaaaataagtccatcttctgtacgatgggaactgtctgttttccccccttctttcctttcagcattgttgggatgtttgtcccgtgttaacatgcaaaatcaattacgtgtacgataaataagctgatggtttgatccggaatctgcaattgcgcgtgccttttcccaccttgtttttagccaaaaatcactatggatgagactacagt

SEQ ID NO: 13604 - DNA, 2561 bp, Zea Mays
gagccgaagaggatgaccagtcagcaacagggttcacatctgaaagtaaagagaagggagtttctggtaacgatgctactatgggtccaaagcacacgcttccacctggtagtgttacctcttcagctgaattggcttctagcgttctgaaagggagcgaggattgggatgctgatgtaatggataagtattctattggaaaagaaggcaaatctaaaaatattgatccagttaggaaggatgattcagtagcaatcttagaacagttctttggcaatgttttatcgaaaagcggcagcaacctaccaacttatgttgagaaccagccattgaaaactgatgatgacatgatcacttctgtgccagaatcatccaaatttgctcattggtttcttgatgaagacttgaaacctgcagaagacttatcttcaaagagcctgctctccatgattgtcaaaaatgaaaatccaggtctagaaaatttaaaccatactcctttatctgatgctgctgcccagaatttatccccaagagcacctattgataaacttgattctgcatcagagcttatctcatttacatcctctacgcctgccaatggagttcttgaacaatgcatccattctgatgttccagaggcagttcctattatgacatgtgaggatcttgagcagacgatgttagcacaggttagcaatagcagctcaactcagataaatgctacaaaggagcaactgactgttatggatgaaccagttgccatgcagaaagtaactgtagataatcatgcatcacaacatcttctttcattgttgcaaaaaggaacagataataagggagcaccttccctgggtttccagagagaatcaactgatgaacctctgagtgttgacacaaatttaatggcaaatggtggaatatctggaagtgatccggttaacagtgttgaaaatgttcctacttctgggaaggacttgacattggaagcgttattcggggctgcatttatgaatgagctccactcgaaagatgcaccagtttctattcgaggagccacaactggtggtcctactgagtttgcagagatgggtaaaactctgttgtcatctagccatgaaggatactaccctgttgaacagaccgtacacttcaacaatactaaagatgctgctgtccgtagagaaccaggtattgagcattcagcagtacctggtctaagtcaggggagtgctagttttgacaagaaaggaatggaaattcatctgcctgaagaagataatttgtttaccatgagtgattctctgcttggtcaaaattctgatattttggcatcagtaggatccagcagggttgaagggctattgcctgaaaaggcacttgataacctcagctataggtttcaaagtcttgtgcctggtgatgcagaacacattcaagtatatggtcctgatgcacttggatctcatcctcgtgattctcagaatatgtatcatcttctacagggtaggcctcctatgatagcacctcaccctatgatggatcacattgttaataggaaacagccagctccatttgatatggcacagtcgatacaccatgattctcaccgttctttcccatctaatgtgaatcatatgcaacataatcttcatgggccaggggtccctcacttggaccctgctggacatattatgcgacaacacatgtccatgcctggaagatttcctccagaaggcttgccaagaggtgtccctccatctcagcctgtgcatcacatggctggttatagacctgaaatgggtaatgtaaataatttccatatgcaccctcgccagcccaactatggagaatttggattgatgatgccaggcccatcaggtccagaggtgaggggcaatcatccagaggcgttcgaaaggttgatccagatggagatgtcagccagatcgaagcaacagcaggtgcaccaccctgcaatggccgctggccgtgtgcctagtgggatgtacgggcacgagcttgatgcgaaattgagatacagatgatggatgcctggatgcttcactccgtacagaggacctggaggtgtggtttgttgtatgtgcgtggtcactctttgcccagactgctgtgtattatttctgctaacatggtttagcatcagccgtcggtcgcgactgattggaggcctgcctcacttgtagggttgtagcatgtacatctgaacgggtgatggaacggagtgggtctaagatctgtaggagcggaagtctaccgggaaaaggggttatggtgtgctgaatggaagacgtggcgtcgacgtcttagcagccacatgtgtaatgacgttttctgtctactgtttctgacgactatgcagtttccattttgtataagctctgttatgcaaaaggaaaaaaaaagaagaaaaaaaactgagtcagattaacagattggcgacagtgtccgcttgaccctatatcttcaacttgtttgaaaggaaatgaccacgcgtcatgccgagacgtttgtagctgatagcactgtttgagacgttttgc

SEQ ID NO: 13605 - DNA, 632 bp, Zea Mays
ttcagtgattattattagtatacatctgcactgacatgaagctgtactgctgggagcaaagaacgccgcaatagctggtactgtggttgcagttcccacgttggttggctgccgtgtccttccttgggctaaggcgaatctcaactacactgcacaagcactcattatatctgcagcctgtattgctggcttcttcatcactgctgacaaaaccattctacggaacgcacgacaaaacaccatcgggaagcttgacaagtcaacctgatgcagagatgtagctgaagctgaaaaggttctctggttgccgcggcggttgatagggtgtcttttgccccatatgcagtggcaccatttctcttcgtggacaagtaatttttgggtgtttggctattcaaaccagaggttgttctgtaatgacttgtctaactgatggacccaactattgtatccagtttactccgaatttgaatcagaataaaaggtggttctatatgttcgtagacatggcttagacccttgttctgaacattcacttgacctggaatttgtgatgctaaagaacggggattagcgatgtgatttctttctaattaccgaatagagactagacagagcaggttaatgttgga

SEQ ID NO: 13606 - DNA, 2102 bp, Zea Mays
tttttttttttttaagataaaggggattttgaacttgcaacactgcctgcgcttgttccagtgtttacttcagcatcaggtgaaactctacttttgcttgtgaagcatgcagatctcatcattaacaaggccacacaggaacatttgatatcacatattcttccaatgctggttcgggcttatgatgacaatgatccccggttacaggaagaagttctgcgtcgaacagtatcactgtctcgtcaacttgacaccaagctagtcaaacaggctgtgcttcctcgtgtacatggattagctctaaagacgacagttgccgcggtgcgcgtgaatgcgttgcgctgtttaggagatcttgtgccatccctggacaaagaaggtatattgggtatcttggagacggttcggcgttgcacagctgttgaccatactgcgccaactcttatgtgcacacttggtgttgctaatgcaatctataaacaatgcggtgtggagtttgctgcggaatatgtgattcctctcatcttcccattactcacagcacatcaactgaatgtacaacaatttgccaagtatatgctatttgtcaaggacattacaagcaagatcgaagagaagcgtggtgtgactgttacagataatgggaacacagaggtaaaagcatcaccttcattggcaaacgggatccattctgaacctatgccaggacaaataccagctgcaaagagcagccctccatgggatgaagactggggtccttctaagaaaaccggtgttccatctctctcagttgattctagtgcacagacaaagcaaccctcagtacacccttttgacttcagtactcaaacaaagcaatccacaccactcccctttgatttgagcacccgagcaaagcagccatcattagtttctcatgctacagcagctacaatcccacctgcgcaaccacaaccagtacaatctcttgtgcccagttcaggacctcaaacttctggctcatgtgcccctgttgacattgagtggcctcctcgaagaagctcgtcatccgacttcaatgcatccttgtctattagcaaggagaatgaatctggaaggctatctagcgacggacttgacgatattgatccttttgctgattggcccccaaaacctagcaatgttactagcattacagcaaccgagcatcgtccaagcataaatcaaaatatttctggatttagctcaggtaacatagggtttggtggcagcgggaattctatagggcaagcgaaaagcaaccaaatgagctggtcaaacacgcctaatctgatgggcatgaactcaactggcagctatttgaatcagggcagtgcagctctaggttttggaaatccaattggaggattgagcactggcctctccaatccaagcagttccagtacaggcctgagcatgatgcaaccaaaatctgattttggatcactgtccatgtctgccaataatgccgcaaatggcccacccagacttgcccctcctccatctacttcagttggaagagggcgtggtagaaatcaaggacaatcagcactctcccgagcatcaaggcctcctcattcgaactcgtcatcaggacaacaacctatcctggatttactttagtaagagaggcttgcctctattcttggcgatgacgattgtcaatgtgtacatcttcaaacctttgtaagaggttaccttctctcatgcgtagggttttgatttgggcattgaggctatcttcatattggtgacagaagaaatgtcgttgtgtatgtttctgtctaaaatcggctgtagcttgtagagttgatgaatatagttgacatgcttatctggactgtgaagttttgaatgtttacataatgtttcatgtgccttatatgtggtccctgcccattttctccccgctccccaacatcatgtaattcattagttaaggctcgtgttgtgtatacttagtctgtcgagtttaaggccaatcggcaattctgcttctatacagttgtttggttgctggtaggatcaccactgttatgttatgataccccacaactgtgtgaagtcgatcttcatgtttggtc

SEQ ID NO: 13607 - DNA, 1410 bp, Zea Mays
caacaacaaaaacaaactggatcgctgccgttggcgccgccaccgccgatgtagggtggagcactcagcgtgccgtcgtcgcatgcggcctcgaacatttacgtctggccgtgccggtgctgggaaggaaggggatcgaggggcagcagaccgcagagagacgacagccaccgaggcaattccaactttttaagagatcggagcgctcggttcggataggggcgactaggaggtgaaggcgggcgcgtcagccatggcggacgaggagcacccggagaggagggaggaggcctccgagcttgccccctttgatccaaccaagaagaagaagaagaagaaggttgtcatccaagagccttctgatgaagtggacaagcttgcagagaagacagaatcgctagcagttgcagaacctgctgaacttaacttcactggaatgaagaagaaaaagaagaagcaggtggatcttgattcatctattgatgaccttggagatggggaggacactcaaggtgatcaagttgtagaggaacaaggggacggtattgtgcttggaggtggccctacatatccttgggaaggaactgaccgggattataaatacgaggagctgttggacagagtgttcaacattcttcgtgagaacaacccagatcttgctggtgataggcggagaaccgttatgaggccacctcaagttcttagggagggaacaaagaagacagtttttgttaattttatggatttgtgtaaaacgatgcataggcaacctgagcatgtaatgatgtttttacttgccgaaatgggaacaagtgggtcacttgatgggcagcaaaggttggtgatcaagggaagatttgctcctaaaaactttgaagcaatcctgaggagatacatcaatgagtatgtcatctgcaatggatgcaagagccctgatactattttgtccaaagaaaatcgtctgttcttccttcgctgcgaacagtgtggatcttcacggtccgttgcaccaatcaaagctggattcgttgcgcaagttggtcggcggaaggcctaagcgcaaaccaaattggtcctttgcgctgcctgctctgttttggtcgtgtatttcttgttttttttcgtgtcatgttaatgcagctgaggttcggtttatgattgtcctatctttgtgtggctgaaatttgaggccataccaattcgacaatattacattattttgccggatggacattctgccgtgcaatgttgagagcaagatgtgtcaacagttacattttgtcttgcattcaaaagatccatcgaatgatggcgcagtcctgtggcggctggcgagtgtcactcatgcatcctgcctgataagcgactccctgcgatcgtaacacctggctattgtcaaacaaagtcacc

SEQ ID NO: 13608 - DNA, 3501 bp, Zea Mays
atggagctattgctttttggtggtggtgtttttgctgaacttcaatggctgattgccaggcaggagtactcccatagctcagtccttggaattcaagacaaccgagctcttaagcttccagtatgtgtcaactttaatctgcaaaacggcggcgcacaagaatgggctgacgagagcaggaggttatcattaagcaaagccggcaatagtaatggttccactcatctagggtctggtattttccatcatgaacccttggaagatttcaagagctccaaccaatctctattgcacagtgtaagacaaagaatggcaccaaattctcttgcgaataggcacgtcaacacggaattggcaaagcatcatgcgattaagcatgctgcagttgctgtgtcagcactgaccagtgttgttaatgatgaccttaaatcagtgaagaggcctaaggaatctgaagtggaggttcattggtctaatggccccaagtttcattctcatattccgaaaatctctgaagttgaaacaagcctgcgatttgatgaaaatgctacagatggctatgctaaagatgtgaatgaatgctcacctgaggagacagtacaaccctctcgaactagagcgccctcatcccaggagtctctagatgcacggaaggcactcagtaccatatatgacaaagttctggtggttgacaatgtcatgtcagctaggagtgttgttcaactgcttactacgaagtacagaaattatattcatgcatgtgacacagaggtagctaatattaatgttaaacaagagacaccagttggccatggaaaggtcacatgctttagcatttactctggcactaaaggtgctgaggctgattttggaaatggcaagacatgcatttgggtggatgtgctagatggtggaccagatgtactcatggagtttgtcccattttttgaggattcatcaatcaggaaggtttggcacaactatagttttgatagtcatgttatagagaactatggaattaaagttgctggatttcatgctgatacaatgcatcttgcacgactttgggattcttcaagaagaacagatggaggatattctcttgagggacttacaaatgatcatagggtcatgggtgttgttccaaaggaattacaaaagattgggaagagatcaatgaaaaccatctttggtcggaaaaaaataaagaaggatgggtcagaagggaagattactgcaattgagcctgttgaaattttacaaagagaagacagagaattgtggatctgctattcttcgttagattccatgagtaccttgaggctttatgagagcttgaaaagcaagcttgaaaggaagccctggacttttgacggttaccccagacccggaggttcattgtacgatttctacgaggagtattggtgtcctttcggtgctattcttgtaaaaatggaaacagctggaatgcttgttgaccgtgcttacctttcagagattgaaaaggttgctgttgcacagcgcgaatcagctgcagataaatttcggaagtgggcatctaagtattgccctgatgcaaaatacatgaatgttaatagtgacactcagattcgacaactcttcttcggtggtatagagaacatatacaaatctggtgattttttgccgaagagtaaagctattaaagtgcctaacaatgaaactgctgtttcagaaggcaagaaggttccaaagtatcgcacaattgaccttttcagcattgtggaagacctgaaaactgatatatttactgcaagtggttggccttcagttagtggggctgcattgagaaatttggctgggaaggttccatcagatcttgtttactcaacagatgatgtaaatgatgatgaatgtggtattcattctgaaatttcccattgtgatctagaagacacctcttcttatggtactgcatatgatgcatttgggggaggaaaggaaggaaaagaagcatgccatgccattgcagctttgtgtgagatctgttctattaactcgttaatatccaacttcattcttcctctacagggaaatcatatatcatgtaaggaagggcggattcactgttccttaaatatcaacacagagacaggacgtttatcggcaagggcaccaaatttacagaaccaacctgcacttgaaaaggataggtataaaatccgccaagcttttgttgcagctccagggaacactcttattgttgctgattatggtcagctggaactcaggatcttggcgcatcttgctgattgcaaaagcatgttagatgcttttaaagctggcggcgacttccattccaggacagccatgaacatgtatcagcatattcgtgaggctgttgaagaagagaaagtaattcttgagtggcatcctcaacccggtcaagagaaacctcctgtgccgttgttgaaggatgcttttggtgctgagaggaggaaagctaagatgctaaatttctccattgcatatgggaaaacggctcatgggcttgctcgtgattggaaggtttctgttaaggaagcaaaagatacactgaaactctggtatagcgatagaaaggaagttctggcttggcaaatgaagcagaaacagctagcacatgagaagcgtgaagtttatactttgcttgggcgatcacgccgttttccaaatatggctcatgcaacttctggccaaaggggtcacattgagcgtgctgctatcaatgctcctgtacagggcagtgcagctgatgttgctatgtgtgcaatgcttgagatagacaggaatactcgtcttaaggagcttggttggacgctactcttgcaggtgcatgatgaagtgatactggaagggccttcagagtctgcggagctggccaagtccatagttgttgagtgcatgtctaagcccttctatggcaccaatatcctgaaggtcgaccttgctgttgatgccaagtgtgcacagaattggtatgcggccaaatagacctgttaagtgtcccagaagggcgtcaattccttcggtgaaactcggtggattttgaactggtatctgctggctgctgctagtagcctagtgagctcatctccacgtggatgccatgcactgattatttcgctgttgatctggacagtgaggggtcagcactgagcagcgaaggcactgtacactattccgtattccctataggtcgggtagcttcaccttccacactccctgttaggatctctcgatcattcatgcctgatgtagttggtcgtcctggatagcagtgaagactaagcatgccgtgttcataagatttatttagcatgctgatgtgttgagttgctgaccagttctgctgacgtctaacactgttgcacgcactgcaacaatgttttgatcacaagagaatgtagttgattgtgagcgttcttaatctccttatttctgctgttgaactgtgcgtcttgttaattgtatcttctctaa

SEQ ID NO: 13609 - DNA, 1725 bp, Zea Mays
attggatgcgcgttggtgtgcactaatgtctcggaaaccaaaccatctactgatgatgcttgccaggaccaatcagtaccaccagcctctggttccgcaacaaccagtaacactggaagtatctcaccttcttccatagttggagaggagctaaaactagctttccaactgcgtagatttacttttagtgaactgaaatgtgccacgagaaacttccgacctgagagtcttcttggcgagggaggttttggctgtgtctttaaaggatggattgaggagaatggaactgctcctgttaagccaggcaccggattaactgttgctgtcaagacactcaaccatgatgggttgcaggggcataaagagtgggtggcagaagttgattttcttggaaaccttcagcatccacatctagtgaaattggttggctactgcattgaagatgaccagaggttgcttgtgtatgaatttatgccccgtggaagtttggagaatcatctttttagaaagtcattgcctctaccatgggccattagaatgaaaattgctcttggtgctgcgaaaggcctcgcttttcttcatgaagaagctgaaagaccagtaatctatcgggacttcaaaacctccaatattcttttagatgcggactataacgcaaaactctctgattttggacttgctaaagatggccctgagggtgataaaacacatgtgtcaactagggtcatgggaacatatggatatgctgcacctgaatatgtaatgacaggtcacctgacatcgaagagtgacgtatatagctttggagttgtactactagagatgatgactggtagaaggtcaatggacaagaacaggccaaacggagaacacaacctggttgaatgggcacgcccttatctgggagaaagacgcagattctataagcttgtagaccctcgtttggatgggaacttctccataaaaggcgcccagaagacggctcagctggcccatgcctgcctcagccgtgaccccaaggctaggcctctgatgagccaggtggtggaggtgctgaagcctctccagaacctcaaggacatggccagctcttcctactacttccagtccatgcaacatgagcgtcgcacagcacttgccaacccatatggcagtcaaagcatgaaagcgcagagcacctttgcgcggaacgggcagcagcccatgaggagcctctcgtatggccctcatgcttccccgtatcgccagtcgccaagacttgacagcaagcggcaatgagtcatggtgcttgtctgtcgaccataacatattttcaagactgaagttgtaaccagaactggtgtatgaactcagccatccaacaagcatctgagctatctattattgtggatgaagcagcaacattgattcgaatttgcatatcatctgcgagtgaatttttctctcttgttatcgcttacattttagctgtactgtctttacggctctagataccttgacttgaaaggtggaactaaacagggttttgatcggtctttgaaacaatgctcaggcagcaaatgcttggaatttgttccttcctggaaaccagcagtaggcaagtctgatatatgttacatagttgtcctaaggctgttcataatctatggtttcttgtcacaatatccaaatttgccacgtcacatattactttaaaaggtatatttgtcccaatacatagtatta

SEQ ID NO: 13610 - DNA, 90 bp, Zea Mays
attagcaaatgtctaatacagtcacaatgcatcctaaccatgacaaggaaattatcgcaactaatatatttaaccgttctacttatccac

SEQ ID NO: 13611 - DNA, 3651 bp, Zea Mays
ctccgctaccaccattccacaccaccgcgggtcctcccgccagcctcgagagaaccgcgcgccgcgcccccatcttttcccccaaaccctccgcgcgagcccgaggccccgagcgtcaggcaaggccgcacaccgccgccgcttcccctcatcatccgtctcctccccatccctttcccctcatccgcattcggtaggctgtggcgccagtgtccgcttcaggactggattggtcgtgggaagcaagaaccgcccgcccgcgcattagaaccctagcccccgccaatctaacagcgcaaagaatccggaaaacccccggcttttcggtctcccgagcccgggagatccatccttcgctgcgtcggagatgtcgtccgacatccgtaaatggttcatgaagccgcaggacaagagcgcggcggcatctggagccgccgggaagccctcggggtcggcggctgagaagaagcccgtgctcagcattccggagaagaagtcggcgccccccgcattggcgtcctgtgaccatgatacttccgctagaaggaagacaagcaaatattttgggtcaaaagcagaaaaggactcagatgtccaaatggcagacgcctctggggggaagagtgcggctaaaagaaaacttcagaaatgcaacgatgaagtcaaggaggacagcaagccttttccagcaaagaaaatgtttgatgatgaagaagatgacgattttgtggcacctgcaaagaagaaaactccagtgaagccaccaccttcaaaaaagcttaaagttgaatctaatgttgaagcccctgcaaagactactggtgttgatgatgctgaggatgaggacaggatggatgaagatgccaagaccccctctaaaggagctggaaggggaaggggaagaggaggaagaggaggagcaggagctgcccctgggggcagaggtagaggaggtgggagaggttttatgaattttggtgagaggaaagatcctcctcacaaaggagaaaaggaggtcccagagggtgcccctgactgtttatctggtctgacatttgtcataagtggtaccctcgacagtcttgaacgtgaggaagcaactgatctaattaagcgttatggtggccgtgtgactggctctattagtaaaaagacgagctacttattggccgacgaagacattggtggagtcaaatctaacaaagcaaaagatctgggtgttccattcttgactgaagatggtttatttgatttgatccgaaaatcaaagcctgcaaaggctcctgtagacaaacgtcaaaacaacaacagttctgaaaagcttcagaaatcacagacaaagagctctccagctaaagttgaaaaacgagccgaagcaagtgctgtaggcaaaagtattgcttcaaacagtaatgctgcaagtgcctccgctgacaaacaaaagcccaagattgttgaccgtggttctatgcaatggacagaaaaatatcggccaaaagttccaaatgacatagttggcaatcaatcaatggtcaaacaacttcatgattggttaaaaagttgggatgcactattccttcattctggccaaaagggtaagggaaagaaacaaactgacagtgcagccaaaaaggctgtgttgctgagtggacctcctggtatcggtaagactacaactgctaaagttgttagtcagatgcttggtttgcaggccattgaggtaaatgcgagtgatagccgtggtaaggcagactccaagatcgagaagggtgttggggggagtacatcaaattctatcaaagagcttatcaacaacgcgactctgaattatagtgacaatcggttaaaacatcccaaagctgtactagttatggatgaagttgatggtatgtctgctggagatagaggtggtgttgctgatcttattgctagcatcaagatatccaagatccctattatctgcatttgtaatgaccgttatagtcagaaattgaagaatcttgtgaattactgccttatgctcaacttcagaaagccaacaaaacaacagatgggtaaaagattgatggaaattgccaaaaaggaaggtattcaagctcaagagaatgcaatggaagagcttgctgaaagagtgcacggagatattcgcatggcactcaaccatttgcagtatatgagcctctcccagtctgtggtcaaatatgatgatataaaggagcgacttaatagcagttcaaaggatgaagatatttctccttttactgctgttgacaaactttttggtttcaatggcgggaggttaaggatggatgagagaatggattttggcatgagcgatcctgatttagttcccttgatcatccaggaaaattatatcaattatcggcctaacaccatcggcaaggatgaaagtggagttaaaagaatgaatgctttagcccgggctgctgaatctatagcggacggtgatcttgttaatgtacagataagaagatatcgacagtggcagctgtcacaagctgcttgttttgcttcatctatagtacctgccgctttgatgcatgggaacagagaaatccttgaagcaggtgagcgaaactttaataggtttggtggatggttgggtaagtactcgactactaacaaaaacagaaggctactggaagatgtccacagtcatattcttgcctcccagcaagcaaacttggacagggatgcattgaggttggattatcttactcttatcttgagagagctgactgacccactgaaaaaaatgtcaaaggatgaagctgttcaaaaggtggtagagtttatggatacatactctttaagccaggaagacttcgatacaattgttgaagtatccaaatttaagggtcatccaagtcctatggatgggattcaacctgctgttaaaagtgccttgacaaaggcatacaaacaaggaagtagttcccgtgttgttcgagcagcagatctaataaacattccaggcatgaaaaagcctttaaagaaacgagtggcggcgatcttggagccggtagaagagagcctacctgaagaaaatggactagcatcagctgaagatgatgaagatggttcttctgatgctgaaaataatgatgagcttgtgcctgctgactctacgccgaagctggacctgcaaagcgacaagaagaaaggaatccaagtgcagcttgacctgaagagcaatggggatggcccgcgcgggaagaaggcgcctgctgccaggtcaagagcaaccgggtcaggtgggaaggccgcggcgggaggaggttcggctgggaagaggaagaggtaaatgagacatttggcgcctgcccacagttggccggtggttagtttggacgcacagatcccttggtaaataaggagcaggggtggtaagcttcagagttttgctcatctaatggcacatgtaggcactaggctactgtgcctgctcccatattttctcccagggcacccatgtcttgctaccagaatttgtttgcacttaggctacttccaggttgtggcaatcgagagtttggtgttgtctgtttcatttagcgaatttgtcagtactctataccacgggtcgttggcgttgggtagggctcggtgaagatgaggacgaagctgggg

SEQ ID NO: 13612 - DNA, 2140 bp, Zea Mays
caacgccccaatcctccgtcctcggaaccaaacgacgccgtccggccgtccggccactcgtgcggatggcggagatcgccggcgacgaggccccaacacctcctaccatctccggcgaagtatccggagacccgcatacttctgccgctacccctgccggcagcagcaacaagccgccgttgcgcgcgacgaagcccggagtgaagcgcctcattctcaccgcctccgtcctcctctcctttctcgtcgggctgcccttcctgctgaagtccaccgagatccatcggtcgccgctgccttcggacgcaatcacggcactcgcccaccgcctccactccactccgccctcgttcccgtgcgccctccacgcggtcttcctccggtcggttcccggccgctctgacgatgcctccctgtaccgtcgtcttgagcggtcgatttcggcgcagctccagcttcttgcagccacttctaccgccggtaatgtctcggtatcagtcaccgttgagtcagctggtggctgctccagcagcagcggcagcgttggctcaggttggcagtgtggcactgtgagcagtgcagacctggtggttggcgatgaggtgttcgatgaattgctgcactcagctttaggcagcgtcggaggggatgggtctagggtttacactgttgtggttgtggagattgatgatgcagatggtatgagggttgtcgttgggaagcaccggcatgcttgggtggttggaaaagctgatgaggttaaggctgtctcagttattggcaaggtatttgccaagtatttcatgaatgggggtattgaggagggtgaggcaggcattgggaaaggcgagttcatgccagttggatcagatggcaatgtcgttctatcctttagcttgctgaatgctgatccaagtgattgggtgtatgattgggactttgaaaagattggtgagaagatgttgaatcctgtggttgaggcactgcgaccgattgcggaaatcaatatagaaagtcaggttttgtaccacactcctaagtcgtcctattcttattttgatgataaactgggtggcaatttccttagtatgggagacattcctttctttgtaaactcaaatgagtggcacttggatacatctatttcagctacaggacgatcaaaagttcttcaatttgttgtatacattccatctgcaagggaatgcccattatatttacaacttcctgatggtgggctttcaaaaaccaatgcatttatatcccctatgtggggaggtgttcttatctggaactcaccggactgttcacttggttccaagaaaactcatggtacccagaagaaaatgtcatctcaggaacttatggaggcactcgaaatatttgttggacaactaaggcagctgtttggtctaaaaccatcttatttctcacaagatatggacgttccaactaaatttctagttagtgaaaagggcttcacagaatgggagttagatttattatatcggcaccatgcacgttccaatctgctgtcatgcctcaccacattggagtctctatccagtctggtccactctctccctaggatgattgtcatggatgaaattggaagacaggttgagctttctcttgaagctgcaaatttagcacagggaaatgcaactctaggaataagtgactcttcagcagccatttttcgcaccagtttccttgcatgtgctgctggcggcaatcaaagagctgaaacgttacaaggcagagcgagcaaaatattcggcatttcttgcttcccaggcgacatcctcctgatctggtgatgattagcacggatttgcaccagaaaattctgaacgtttatatgaagctgatggccactattggtactgcacatagtggagactggagagtaagcaacactgcagcgtcacttgttctaatgctcacggaagtggttaggatgtccaggtgatgtcaggccgagagctatagtcgaaatctctaccaattgagcagttcttgtaacccagattttgttcctagatacctcatacgtactcacattgaagttttttttaaaaaaaaatatatatttagaaaggacagacattaagattccagatcgaagatgttgagatgg

SEQ ID NO: 13613 - DNA, 515 bp, Zea Mays
ggaaactgcaaaatttagggtttctttgcatctctcccgtcggctcctcccctcccaagtcccacctcacctctcctcctcgcgaagtatcggcggcggcgagcgcggcaggctagagcctcgttgctgaggaggggagatggcgggtatgggcgatatgccgatgaggcctgcgcggccgggcccgccgatgcagcaccgtggtccgcccccgatggcgcgcctccgccccgaaccaatcgaccgcgagaagacctgtcctctgctgctcagggttttcacaagggttgctggtcaccaccaaaatgaagagtttgcagtgagagggaaggaaccaaaggatgaagttcagatttacacatggaaggatgcgaccctccgcgagctcactgatcttgtgaaagaggttgctcttccagcaagaaaaaggaatgcaaggctttcttttgcatttgtatacccagacaagaatggtcgttttgttgtcagacagcatgtcttggtgggccgtcaaa

SEQ ID NO: 13614 - DNA, 373 bp, Zea Mays
aaccaacccctatccgccccccgtcttttcccttttctctaccctctatctacccaccgttcccgtctctccgccgcttccttggaagacgaagaaaccctcctccaccaccaacccgatccagctacatccgttgaggcccgtgcgtttcttccctgttctcccatcaatcgacctagccttacgccgaccaggggcttcctctaatcgatctggtgtctgttctgtggtattggtctgggtgcactccagggccaggagcagctagccgtcttcgttcgatccgttcgcaccccccaacgcggcaggaaggagcgtgatggccaagacgagctcgttcaagctggagcaccccctcgtacaaatttaggaa

SEQ ID NO: 13615 - DNA, 991 bp, Zea Mays
caagaagcaaataagaaggggatggactccgctactttggaattagggagtggcggagcggcggggcatcccggcagcggccttcgttgaggacgttgaggcctacctccgccaggtcgggctcgacgtcaattccgcgctcgcttttctccaggaaaggctgcagcagtacaaaatagtggagatgaagcttctagcacaacaaagggatcttcaggcaaagattcctgatatagagaagtgcttggatattgttacaacattacaagctaaaaaggatttgggcactcatagctgatttcgaattgtccgaggggatctactcccgtgcaaaaattgaggatactgactcggtgtgcctgtggttgggtgcaaatgtgatgctggagtactcttgcgatgaggccaatgccctcttgaagaaaaacttggaaaatgccaaggccagcttagaagtccttgttgctgatctccatttcctgcgagaccagcaaaccatcactcaggttacaattgctcgggtattcaactgggacgtgcaccatcggagaagcaaacaggccgtaaaagaaacctgattacttacatcacgaggccgaccaatgcgactgggactttttttttttgtaccttctgctacctctggcagattagcccgtcatagcaagcagtttgttgttgtatcggtttgttcagagttttacggtgtgggaacattagtagaaatgtcatttcactgccttcttttccccgctggatcgcatttcacaaaatatttccaccattcttgcagagaagccttgctatcgccaaactacttggaacattttgtcccgcctcggaactttaggacttttttccccgtgtttcttgcgtttttctagtaagaaaacgaactggttcatgtataattcctgcttttctaaaggggcttccttttttacatctgtagggctatactgcttgacaattggattttaccttgccatca

SEQ ID NO: 13616 - DNA, 2371 bp, Zea Mays
gccgcagcccagaaatatcaaagcccactttgaagacggcagcagccggagcgcggcagcgcctgtgctggctgccgcggccgcaccccgccgcaccctgcgaggcgatcaacaaccagcaaaaccctaaaccctagtggatgtttctagagccgccgtgcaccctcattcgtctcgcctgcactgtttctaaaatcaacccgtcccccacctcctcgccgcctcgcatcctttccccctccgcaagaaagaaagcgaagcaactctccgccgcctccattcctccacagcccacaccaaccaaacctctcgccgacaacagcctcggtccccgcgccaccatccgcaatcatgtaccgcgcggccgctagcctcgcctccaaggcgcggcaagccgggagcagctccgccgctcgccaggttggaagcaggcttgcctggagcaggaactatgctgccaaggacatcaagtttggtgttgaggcccgtgctctgatgttgaggggtgttgaggagttggcagacgctgtcaaagtgacaatgggtcctaaggggcgcaatgtggttattgagcaaagcttcggtgcaccgaaagtcacaaaggatggtgtgactgttgcgaagagcattgaatttaaggatagagtaaagaatgttggtgcgagccttgtgaaacaggttgctaatgcaactaatgacactgctggtgatggtaccacatgtgctactgttttgacaaaagcaatatttactgaggggtgcaaatctgttgcggctggaatgaatgcaatggatttaaggcgtggaatctcaatggctgttgatgctgttgtgaccaatctgaagggcatggccagaatgattagcacttcagaagaaattgcacaggtgggtacaatatcagcaaatggagaaagggaaattggtgagcttattgccaaggctatggagaaggttggcaaagagggtgtgatcactattgcggatggcaacaccctttataatgagcttgaagttgtggagggtatgaaacttgacagaggttacatctctccgtacttcattaccaactcaaaagcccagaaatgtgaactggaagacccattgatcttaattcatgacaagaaagtgacaaatatgcatgctgtggttaaggttttagaaatggctctaaagaaacaaaggcctctactgattgttgcagaagatgtggaaagtgaagcattaggtctgtgctgtcaaagctcctggttttggggaaaacaggaaggcaaacttacaggacctcgctatccttaccggaggagaggtaataactgaagagctaggaatgaaccttgagaatgttgagcctcacatgctgggttcatgcaaaaaggtgactgtctctaaggatgacactgttattcttgatggcgctggagacaaaaagtctattgaagagagggcagaccagattagatcagcagttgagaacagcacttcagattatgacaaggaaaagctccaggaacggttggcaaagctctctggaggtgttgctgttctgaagattggaggagccagcgaagcagaagttggtgagaagaaggatagagtgacagatgcactgaatgctactaaagctgctgttgaagagggcattgtaccaggtggtggtgttgctcttctctatgcatcgaaggagctcgataagttgcagacagcaaattttgatcagaagattggtgtgcaaatcattcagaatgctttgaagacacctgtacacaccattgcctccaatgctggggtggagggagcagtagttgtgggcaagcttttggagcaaggaaacactgaccttggttatgatgctgctaaagacgaatacgttgacatggtgaaggctggtatcattgatccgctaaaggtcatcagaactgcattggtggatgctgctagtgtgtcgtccctgatgaccaccacggaatccataattgtagagatccccaaggaagaggcaccggctccagcaatgggtggcatgggtggaatggattactaagtgtcaagcacacccacgatacaacaacatcaaagcagagatgacgaggtggttgtcaggaggatacaattttgaggctgcggacgtaggacctcaatatctccaagcaatagtggggggataataaacatgagcagtagttgtttgagatctgaagctgtagatcaagattggattctgacaccttgtgctgaaccaagtgtagtctgattattacacattttttggctgagtaaaatcggattgccgttctgttttgccagtgtcgcgactgtgcttgtgggcttgctttgcttttgataatcatagctttctgcattctgatgt

SEQ ID NO: 13617 - DNA, 2095 bp, Zea Mays
gtccgcccctgatccagagcgtggtttcggatctagacaagatttgggtagcagcaactgttttgctgcaatctgacaaagtggagggtttaagagtcgctgcttcttttatgtctgaacaatctttgctttatttgggattgctgggagagtattcttgcgcgacgaggaaaaggcacaagtttctgctccactgcatgcatcaagagcccatccggtttccttgttctgaggtgtcattcgctagtgctcagagccggcttggttttctcgaaagatcagcagccactcttgattcaggactttgtcacacctgatagcatctagttaatacatctttatccaagatggcactgcaaaacattggtgcttcaaacagggatgatgccttctacaggtacaagatgcccagaatgattaccaagatagaaggtcgtggtaatggtatcaagacaaatattgtgaacatggttgacatagcaaaagcacttgccaggcctgcttcctatacaaccaaatactttggatgtgagcttggtgcacagtccaaatttgatgagaagacagggatttccttggttaatggggctcatgatactgcaaagctggctggtctccttgaggtattcatcaagaagtatgtccagtgttatgggtgtgggaatcctgagactgagattctcatatcaaagactcagatgctatcactgaaatgtgcagcctgtgggtttgtctcagatgttgacatgagggacaagctcacaaccttcatcctgaaaaacccaccagaacagaagaagggaggaaaagacaagaagaaggccatgaggagagctgagaaggaacgcctgaaggaaggtgaggctgctgatgaggagcagaagaaactgaagaaggatgcaaagaagaagggtgcatcttccaaggagtctactgccaagggttcaaagaagaaggctactgctggtggctctgatgaggaccactcaacctctccaactcgcagccgtgatggtgaccatgcagctgcggacgaggaagaggatgatgatgatgtccagtggcagactgacacttctattgaggctgcgaagcagcgtatgcaggagcagctgagtgcagcaaccgctgaaatggtgatgctgtccactgaggagactgagaagaagaaacatgcaacccacaaagatggcactgctaatggttcagcaaaagaaatacctgatgaaaagcctgccgtcactaagcctagtccctataaagaactgattggagacatcaaggctagcctgggaagtgctcccacacctacccagctcaaggctatgctggcctcctcgacccttccttcccaggacgtgatgaatgctctcctcgaggctctctttgacggtgtgggcaagggatttgcaaaggaggtcgtgaagaacaagaagtaccttgcagttgctgtgccagatgagggtgcccagaccctgctggttcaagccatcgaggcttttggcagcaagtgcaaccccgaggcgctgaaggaggtcccagttgtcctgaaagccctgtacgacggagatatcctggaggaggaaaccgttgtggactggtacaacgctgctgtcgcagctggaaaggactcccaggtcgtcaagaatgccaagccgtttgtcgagtggctccagagcgccgagtctgacgacgaggatggcgatgaatgaagaggcgatgctgctctactgttcatggcttcacttgataatattaattcaataagtttattttgcttgtctggtgtcatcgatgtcagtcttcgtttggtgtcagtcggtctggtgtcgatgtctaaaaactgttattgtcgtgccgcgcagcataccctatgtggttggctgcgtttggtgtcagtccgttttgtgtttggatgtcacggtttattatgttcctgtgggctgccactatatattatagttgcttgggatgtgttttttataaccttttggggtgttgcactttcttattgcattgttttatagtattttaagggttgatgagattttatatcaaacttatatggaatccttatcatgtgttggtactggtg

SEQ ID NO: 13618 - DNA, 2247 bp, Zea Mays
gggagccctattctgtcctacttggatgcttccgtggatatacatatactggtctgagttgtcaagtccttgacctgatcatatcagttttgcttataaggatgggggtttacctcagtactccaaaaactgacaagctatctgaaaatggagaaaatgatagacttaagtttggtctttcatctatgcaaggatggcgagcaaccatggaagatgctcattcagcattgctagatcttgatagcgagacagcattctttggtgtttttgatggtcatggaggaagagtcgttgccaaattctgtgcaaaatatctgcatggtcaagtcctcaaaagcgaagcctattcaactggtgacctaggcactgctgtccatagagctttcttcagaatggatgaaatgatgcaaggacagagaggttggcgagaactatctgcacttggagacaaaataaacaagtttagtggtatgatagaaggattgatttggtctccaaggggcagtgattcaaataatcaacaagatgattgggcttcagaggagggacctcactctgactttgctgggccaacatgtgggagtacagcgtgtgtagcattaataagaaacacccaacttgttgtggcaaatgctggtgattcccgatgtgttatttcaaggggtgggaaggcatacaatttatcgagggaccacaaaccagagcttgcagctgagagagaaaggataatgaaagcagggggcttcatccatatgggacgagtaaatggaagtttaaacttgtcaagggcaattggagacgtggaattgaaacagaacaaattcctgcctcccgagaagcaaattgtgacggccaatcctgatatcaatgtcgtggagctctgcgatgatgacgactttgttgttgtagcatgtgatggcatttgggactgcatgtcaagccaacagctggtggattttatccacgagcgtataaacacggagagcagcctgtctgccgtgtgcgagagagtgctggacagatgcctggctccatcaacgatcgctggagacgggtgcgacaacatgaccatgatcctggtgcagttcaaaaaacctgtcgatcggaacaagaaggccgaagcagcagggcaatctgccagcaatgtggacgaagccaagagtcgtgttgctgaggagtgaagcatggctggcactcaccagggcgcaaccatttgctttcataaggcaggtgaaaaaaaggaacgaagaaacctgcagtgtaatagaatgaacatagagggcgctttctgtttgccgtgttccacaaggaagagagcaagttatagacctttccgagtgtacagtttatttggagggaagaaggataaagatgagaatggtgatgaggcgccatcgaaagcaggaatttttggaaatatgcaaaatctctatgaaactgttaagaaggcccaaatggttgtccaagttgaggctgtccgggtgcaaaaggagcttgcagcgactgagattgatggttattgtgaaggcgaactaatcaaggttacactttctggaaaccagcaacctattagagttgaaatcacagaagctgcgatggagttgggtgctgaaaaactttccgggttggtcaacgatgcttacaaggatgcacaccaacggagcgtccaggccatgaaagagaggatggctgacttggcgcagagcctgggaatgcctgcgggcctcggcgatggtctcaagtgatgccgcaattcgggaaagctttccaataatcctttttcctcaattttgtatgctagccgtgtgagtagtaagcataacccctccgcgacctctcataagaagtgtacttgtgagcacttgttttctttcagctttagctgccatttgctgttctgcgcacgcagatatttgcacattaacttcacgtctggtctacaaagttgcaagatgcgggccatgatcttttgggcatttttccaacaagttgttgggctggcccagttgtagcccttcgaagatgagacaaccaagcccatatatataacacacaccgaaagccttcagaatctgtcgtgtgtgaccaaggataaatcatggctttggtgaacagtgatttaacagcaaataaaacactaagtgggtgttcggtttgaggaatcactctatccaaaatgtggtggtgtatcatgggtcaattcctcaaatttggtgggatgacctattccttatattagtactaact

SEQ ID NO: 13619 - DNA, 75 bp, Zea Mays
acaagctcagataggcgtatgtcgttcaaaggtttcagaagactgcactggacccaccagtgctgctgcttttcg

SEQ ID NO: 13620 - DNA, 3213 bp, Zea Mays
cggcaatacttcatctgaatccataatgagagggtgcgatttctgcctgttttatcgcacactcccaatttgtgttgctagtttggcactatttctggtttagggttctagtctcgtcgtgtgagggcttgatctggtggccgacccatggtggaagggatggtagtggccgtgccgaatggggtgaaggcggatggcgccgccgccaccgccgccgccgctaaggcagattctcctaaatccgttctggaggacgagaaaatttctgaatccaagaatgggaacgcctccttagccacggagccagttaagcaaggggacgagacctcggacgattttgtggatgcaatgatgtcccttcctgttgaccatgaaatcgacagtgccgatgtgccccctgctgttgaggcagtcaaggacgaagaccagcttctggagcctgccaaggaggagaaatttgatgatttcctggatgcaggtttatctatacctattgatcttgaggccaagaatggtgatgtatccctgatcacagaagcaatgaaaaaggaagaagaacagctcgaggaggcgcggattaaggcagaggaagaagaggaagccaggaagagggaggaagttgcaaaacttgcttttgatcctgagtcgcggtatagcaagttagatgagctactgacgaagacacaactattttcagagttcctacttgagaaaatggataaaatcgccgatgaagttgttgaacctcaaggtgaagagtcaccagtagagaagaagaaaagacgtggccgaaagaggaaagctaatgccacaccacaatacaatgataaaaaggccaagacagcagtggcagccatgcttacaagatctcgtgaagatcgtcttgctgatgactctactctctcggaagaagaaaggttgaaaaaagagcaagccaatcttgtgcctttaatgactggtgggaagttgaagtcgtaccagatcaagggtgtaaagtggctaatttcattgtggcagaatgggctaaatgggatacttgctgaccaaatgggccttgggaaaacaatccagacaattggatttcttgctcacctgaagggcaaaggcatgcatggtccatacttgataattgctcctctttccactctctcaaattgggtgaatgagatctcgaggtttgttccatctgtttctagtatcatttatcatggagataaagtggcccgagctgagataagaagaaaatttatgcctaaaactgctggtcctgattttcctataatagtgacttcatatgagattgctatgttagatgcaaggtttcttgctcactataggtggacgtatgttgttgtggatgagggacatcggttgaaaaattctaagtgtaaactattgagggagatgaagcgcataccaatggctaacaagctccttttgactgggacacccctccagaacaatctggcagagctgtggtcactattgaacttcattttgcctgatatattctcatccaatgaggaatttgaatcatggtttgatttttctgcgaaaggaagtgaagaaccagaagaaagtgaagaaaaaagaagggttcatgttgtttcaaagcttcatgccattttgcgcccatttcttctgagacggatgaaggaggatgtagaacaaatgcttccacggaagaaagagataatcatttatgctaacatgactgaggttcagaagcgaatcctgtatcacttagttgagaaaacctttgatgtctacttgatgattatctctttcttcctgttgcgtagacctggcatcaagacaaagctaaatagtctctttattcaattgaggaagaactgcgcccatcctgatcttttggaagctgcatttggaacaacaagcctttatccacctgttaataagcttttagagcaatgtggcaaatttcagcttctggacaggctactaacttccctacttgcacgcaagcataaggttctaatattctcacaatggacaaaagttttggacattcttgagtattacctagattcaaaaggccttggggtttgcagaattgatggtagtgttaatttggaagagaggcggcggcagatagcagagtttaatgatttgaatagcagtctgaatgtctttattctgagcacacgggctggcggacttggtatcaaccttacttctgctgatacatgtatcctttatgacagtgactggaatcctcagatggatcagcaggccatggatcgatgccaccggattggtcaaacacgcccagtgcatgtatataggctggctacctcatattctgttgaggagcggatcatcaagaaagcttttgggaagttaaagctagagcatgtggtgataggcaagggacagtttgaacaagaaagagcaaagcctaacgctttagaggagggggagctgctggcgctgcttagggacgagcaggacgaggaagatcggatgatccagaccgacatcagcgacgaagacctcttgaagctgatggaccggagcgacctgtccggaccacctggtgctgccgatgccgctccactgatcccgctgaaaggccctggctgggaggtcgtggtcccaaccaagagcggtggcggtatgctctcgtcgctcaccagctgagcgatgccggcaccatgtttggggtgcccattttgctagtcactcatcatgtggacgatggggcgcttgttggccggtcgccgatcaggcggatattttgcatgtatgcccccctacaaactgttgatctgggtgttgagcctgcaacagtagggttaggttatttcctcccgtgtccgtgccagtgacacgcaagtcggattgagttatgctgtgaacttctgatgagtcgctgcaagctgcctttctgacttgagctttttgctgcttctgttgctgcgttctatgatgtagtaacagtagctgatggtttacaccaaagcggagatggatgccctctatgatgtagtccttgctatataacttgaacactgatgtgattttctgtagtgtcaactgccatgctttatcggttttagtgtccttgtcggcagaagcgttgcaccatttttgtgatttgtgtccgcgtgtatggtgccaccttgtggacgtctcttctgatgaaatagaaactgttgtgcgagaatgaatccaggacactgcattctttat

SEQ ID NO: 13621 - DNA, 438 bp, Zea Mays
ttctgatcatgggtgagcccatcaaagacaccagtccgctcgcgatcgccccgtgtgacgtcatactgaattcggctcatctgaagccgtcgtccagggcagcaaatttctgggcaacaaagccctagtcgtgtggccttagagactgccgcatcgcggataagtaattgtcgttgagcagagttctcgttggttaaagtccagtctagtaggaggcgcagagacccgtctgtatggtcgctgggagatctatcttgacctcctttttctgttctttttggtcttagttatcgtggttggattctatagcagccttgacaggcattcgaacaacaatgtttatggttatcctatccgctttggactcttaagcatgttttcccagtctttaaatattaagagatagtttggtaactatattttttcgagggattcata

SEQ ID NO: 13622 - DNA, 1016 bp, Zea Mays
ctggttggtgggaaacattggctttcagttaaggaaggactatattgttgttagcttctttttcctgactttggggcgctttgagataatctcgctatctggttctttcctgcttgcggaggatggtgatactcgcagcaggactggtggcttgagtgtcgcacttgcaggatctgatggccgagttcttggagggtgtgttgctggaatgcttatggctgcaactcctgttcaggttgtggtggctagctttatcgcagagggaaagaaatcaaagccagcggaagcacggaaggttgaaccgatggctgctcctccaccgcagatggctacctttgttccacctccgctggccaccagccctccatcggagggaacatccagcgcatcatctgatgactctggcagcccaatccaccacagtgcgatgccgttcagcaactccagccagcatcaacaccctcaccagcaccagcaccagcacatgccgcctgcctacgcatccgggggttggtccctctcagtgcaccagcagaataggcatgattctgacatgaagatgatgtcgaactaacagtgctcaacctaggcgtcccatttgttggttgggctggagaggaaggaagctgctgatggttggtactgccgctatgaaatggtcttcttgcgccgtctgtcctgatcagtgaccccgtgttgctctggtcaatgacggtgtgtctgctatagctaagatagctaggaaggattagagtttatgggctcacttgctgttgttcccctgggtaagattaatttaatttgaattagccgctgttgtaatgctgtagccagtgtcctgaagtcgcttatcagtcagtccctgacgcgagctgtgatggttgcctgatgagatcttcacctcctagtcctaggctagttaaaatatcatttctctagtactatgaatcatgaatttacttggatgcttcggtttgattcaggaatttgatcgtattatgtttcgttttgttctc

SEQ ID NO: 13623 - DNA, 1265 bp, Zea Mays
atcacatacagacaggcagcggcaaccaacccgatcacgttgcccccgcgcggctagacgcctagactagccccacgacctccacctcgaccagtctcgatcccgtggactcccgattgcctcctcagcaacttccatacccccagcgcggcggtgccggagcgagcagagcagccggagggcctgtcggatccgccgccgtcaagatgaatgacgccgatgtatccaagcagatccagcagatggtgcggttcatccgccaggaggccgacgagaaggccaacgagatctccgtctccgccgaggaggaattcaacattgagaagttgcagcttgttgaagctgagaaaaagaagatcaggcaagagtatgaacgcaaagagaagcaggttgaagtacgcaagaaaattgagtactctatgcagttgaatgcttctcgcatcaaagttcttcaagctcaggatgatctagttaacaaaatgaaagacgatgccatgaaggaacttctccttgtcagccacaaccaccatgaatacaagaaccttttgaaagacctaatcattcagggtttgctccgtttgaaagagccagcagtattgctccgttgccgcaaggatgatcaccatcatgtggaatcagtgctgcattcagcaaagcatgagtatgcatcaaaagcagatgtccatgaaccagagatatttgttgatcatgatgtatacctgccacctgccccaagccatcatgatgctcatggccagttttgctctggaggtattgtattggcttctcgagatggaaagattgtgtttgagagtacacttgacgcaagactagaagttgttttccgcaagaaattgccagagatccggaagcttctttttggccagactgcagcctaatcgactcatctgccgatggtacggctgcttctatgtaatggttgccggctgcacgcctgcactgcagccataaggaactccgcctgtttttgtcaaattgattgtttaaggtattcatcccctatgtacaaactacctattggttcattattgtcgccgagagcaccgactgtttgtactctgtttgctccgaggaataagaataaagcaccgccagactttccatcgcgaagctgaataaacgttgtaaatgcatttgttgcgctgaacattccgtttatggtttctccatgtgtatatttagttaatgtcggatgtggttcttatggaaaatagtttgtttgggctgtcataaaaaaaaaaaaa

SEQ ID NO: 13624 - DNA, 1390 bp, Zea Mays
cagtgctgctttcaaaacctccaaagcgtcatgcaaggattttcggcctagaggttccccatggcatcagttacttatattgatgatagccatgctgaggttattgatcctccaaagaatgaggaaatgctggatgccactgaacttgttggtgatcatattcagaattcaccaaaaccaaatgtggcaagctatggcaacgtgcgtgagctactggaatgccctgtgtgtttgagtgccatgtatcctccaattcatcagtgctccaacggacatactctgtgttctggatgcaagccaagggttcataatcgctgtccaacatgcaggcatgaactgggtaacataagatgccttgctctggaaaaggtggctgcatcactagagcttccatgcaagtaccagaactttgggtgcttgggcatatatccttactattgcaagctgaaacacgaatcgcaatgccaatacagaccatatacttgtccatatgctggatctgaatgcacggttgctggtgatattccgtatctagtaaatcacttgaaagatgaccataaggtcgacatgcacaatggaagcaccttcaatcatcgttatgtcaagtcaaatcctcatgaagtcgagaatgctacctggatgctcacggttttcagctgcttcggccagtacttctgcctgcacttcgaggctttccagctgggcatggcgcccgtgtacatcgccttcctccggttcatgggggacgacgctgaggccaagaactacagctacagcctggaggtcgggggcagcgggcgcaagatgacatggcagggcgtgcctcggagcatcagagacagccaccggaaggtccgggacagctacgacgggctcatcatccagcgcaacatggcgctcttcttctcgggtggcgacaggaaggagctcaagctgcgggtcaccgggaggatctggaaggagcagtgagtcgcgtgcatgcagtgcaggtgcaggcagcagctcgacgcatgcggcgttgcgtgtgttccttctccggtgttaccatgacctgaagcatggaatccaggaaccttgtagggtggtgtaggtggtagttggaatctttgagtcgtgggtggttcttgtgtcgttgtgtggtagtggtaccgactgatttagagaactggaggcaattctctcctttgctttgaacctgtcgagagctggtcatgatgggcacggctgtggactccatgaaatgtaaatgatgtatcccggctcactctgtctgtggatcagactcgctctctatcggcggaccacaattgttcctgagtttggccaatgagttaggtcccaaccattctctgctccagctggtacacgtagttttagtgagatctgtttg

SEQ ID NO: 13625 - DNA, 1067 bp, Zea Mays
ggtcccggactcccggttccggcctagaggatctcgttcccggccgtctgccgctcggtcctcacccgtcgccgtcgcccccctcccggtcccggcctcccggccttccaaatcgtcagcgcagggcgcacacgcttgcccgcgccgcccagccagcggcacacgcctgcccgcgccgcccagccgctctcccatagccgtcgcgccgtcccggccctccaagattcagattggtgttttgctggcaccatgtccagtccgtggagccctatgagtttggaggaagaggaagagatccaagagctcgatgccgaggagcagcaggacggtgagcagccgcagcagggtgatgggctgcagcaggggtccacagctgaagcaagggcacaacaaaccggaaagaaacgcgcaagatcagtggccaactcgtctactaagtctgaggcaaagataaaggtcgaggaaagtgcaccaggagctgcgacaggagtgattctgtctcttcgtgaaagtttacaggactgtaaacaaagccttgcatcctgccaggtggaacttgaagctgcaaaatcagaaattgagaagtggcattcagcatttcagagcattccagctgtaccttctggtaccagtccagatcctgtttcagtggtatcttacctcagtaacctgaagtcatcagaggaatcattgaaggagcagctggagaaagcaaagaaaagggaggcagcttttatagtaacatttgcaaaacgagagcaggagattgcagaactgaagtctgcagttagagatttaaaaacacaattaaggccaccgtcaatgcagacaaggagattgttgcttgatccagcaattcatgaggaatttacacgcttaaaaaatcttgtggaggagaaagagaaaaaaataaaggagctacaggacaacgttgctgctgtcaatttcactccatccagcaaactgggaaaaatgctgatggctaaatgcagaacattgcaagaggaaaacgaagagattggggcgatggcatcggaaggaaaagagatggacttgtaacagggcat

SEQ ID NO: 13626 - DNA, 498 bp, Zea Mays
cacacggtagcttcgcgccactggcttttcaaccaagcgcgatgaccaattgtgtgaatcaacggttcctctcgtactaggttgaattacaatcgcggcgcggtcatcagtagggtaaaactaacctgtctcacgacgtctaaacccagcttacgttcctatggtgggtggaacaacccaacacttggtgaattctgcttcacaatgataggaagacgccgacatcgaaggatcaaaaagcaacgtcgctatgaacgcttggctgccacaagccagttatccctgtggttaactttttctgacacctctagcttcaaactccgaaggtctaaaggatcgataggccacgctttcacggttcgtattcgtactggaaatcagaatcaaacgagcttttacccttttgttcccaacgagatattctgttctcggttgagctccattcttaagaacacctgcgttatcttttaacagatgtgccgccccaggcaacttccc

SEQ ID NO: 13627 - DNA, 999 bp, Zea Mays
cggagctaagtgggagattaggcaaccttcaagccgccaaatgccatgcgaggtggaattcagatgtgtttccctcagtttggatactctgggacattggagcgacatggatttgcaagaaacaggatatggtccctggatgatgagcagccaccactgaatcataatgataacggaagcaaagtttctgttgaccttattctaaagccatctgaagatgacctcaagtgctggccacattgttttgagttccgtctgagggcctctctttcaaaggatggggacttgtcattgatatcacgcatcaggaatgtcaatggcaagccattcagtttctcatttgcttatcacacatatctttctgtttctgacatcagtgaggtcaggattgaaggtctggagacacttgattatcttgacaaccttagccacaaagaacggtttacggaacaaggagatgccataacatttgagtcagaggtcgaccgagtctacgttagctccccaaatgtagtagcagttattgaccatgagaagaaacactcgtttgtcataagaaaggaaggacttcctgacgttgttgtgtggaatccatgggaaaagaaatcgaagaccatggtagacctcggcgacgaggagtacaagcagatgctttgcgttgatgcggctgctgtggagagagcaatctcgctgagaccaggggaggagtggactgggaagctggagctttctgcggttttatccactaactgcagcgaccatcttgatcatcctgtcagcatctagcgtttattcccattgtagtgctatatatttgcctcacaagagaagtatgggccccttttgtaaatgagatcaataggtagctctgttatcagttagcagctcgacttgatcctggaaccggcacaatttgtgacctgtttttttaatgtgagtattgaatgatagcagcgccttgcttcatgcataatgcacacaaaatggcaagatttatca

SEQ ID NO: 13628 - DNA, 714 bp, Zea Mays
cgggagcccaccaaaagctttcgtcttcagttcccaacacctgtattggtctattggagagagaaaaagggagagtggaggaagaacacgcgagctcgtaaaagtggcagggtgggggatgggatcccattagcgcagcgcaattaggcgcgccctcggctaaataaaagaagccaaaagaattgcgcgcggcaccggaaaggcgaggcctttgcgctcgcgcaccgtagaaatcgttaccggcaccgccaccacgcccactcgagcaagccgccgagcacccagcgagaacctcccactcctcccagtggctctctgtcctctcgcgccccctcgcgtcctcactgccacttgaaataccggtgggcacacgaccgctccagtgttcaactgctccgggctgtgatttggtgcgacttggtgttgttggtggtggtgctacacgtcttggcctctgcttcctcggagggattggagccgtttgaactcaggagcttgctgctggccatggtccaagggttaggggatggattgaggcgtggggggagaggagcgcagtagcttcctcttcttcttcttcttcggtgcgcgggtctgggctctcgggagcgagcatggcggcgggttgggattgcgacagaaatacttggccagctggtatattgaccttctggacatcaatttgcatattgttccttgttcttgagattacca

SEQ ID NO: 13629 - DNA, 104 bp, Zea Mays
tcactcttatatacatctatatctatacttatatctacatctataactatactacaagtgattctgtagctcctcactcttatatccatctatatatatactta

SEQ ID NO: 13630 - DNA, 2450 bp, Zea Mays
atttcacatggtcatgcgtgtttaccagttttatgtccgtccggcaaggctccagtaatcgttgctaagggcgggttctccggtctatttcctgattccagtgattttgcttatcggattcttgggaccattagctcccctgacacagtcatgtggtgtgatgttcggttgacaaaggatggcgatggtatctgcctaccgagcataaacatggataactgcacaatgatagacaatgtttttccagaagggaagaagacctacaatgttaatggtgtatctacggtgggatggttctccgtggactatacgagcactgatctgctgccaaacgtgacactgaagcaatcggtcctatctcgtacccctgtttatgatggttccatgttgataaattctgttgaaaatgttttcacctcatttaacgcctctgcagtttggttaaatgtccagcaagacagtttctacagccagtttaagcttagcatgcgaaactatatcctgtctttatcgaaacaattcattactgattacatctcatcgcctgaagtgaacttcctcaccagtatatctggaagagttagcaagaagacaaagcttgtgttccgctttcttgacgaaggctctattgagccatcgacaaaccagacatatgggtccatgttgaaaaatctaacatttgtcaagacttttgcctctggaatacttgttcccaaaagctatatctggcctgttacaccagataattacctactgccttatacttcagttgttgatgatgctcacaaagcggggctagaaatctatgctgctgattttgcaaatgactttactatcagctataactacagctttgatccattagcggaatatctttccttcattggtaacagtgccttctctgtcgatggtgtgttgactgatttcccgattactccttcagaagcagttggttgctttagtaacctgaacaacagcaagatcgaccatgctgtcctgttcaagtgaccaaagatggcatactgatatgcatgagttctgttgacctaatggatgttactactgttggaaaatcatcatttacttcgcaagtaactaccatcaacgatctgaaggctggtcctggagtcttcaccttcaaccttacttgggatgatatttctaagaacctacagcccatgatatcgaacccaatgagcacctataaactgtacagaaatcccagaaacaagaatgcaggaaatttcatgagattatcagactttttgacgtttgcaaagggaaaggatttgtcaggaatcatgataactgttgagcatgctgcattcatggcagagaagcttggatttggagtggtagacgcagtggtcaaagcacttgatgactctggttatagcaaacagactgcccagaatgttatgattcagtcaaccaacagctcggtgctaaagaagttcaagcaggaaaccaagtacagccttgtctacatgattgaagaaggtgtcagagatgccgcaccttcatcccttgcagacattaagaagtttgctaatgccgtctctgttagcaccacatctgttttaccacagacccattattatttgacaaaccagaccaataagcttgtcacgtcccttcagtctgcgggcctccaagtttacgtctatgtgctcatgaatgagtttgcatctcagccgaatgacttcttcgcagacgccacttcacagattaatgcttatgtgcaaggtgctaaggtggacgggatcatcactgatttccctgggactgctcacagatacaaattgaactcctgcacgagcatgggaaacagcgcaccactatttatgcagcctccgcaaccaggtagcctccttttaaccatggccccagatgtacagccaccagcagcggcgccaatgccgctcttgacggacgctgacgttgcagaaccagccctacctccagtcagtaacaccacaacagctgcatctccttcgcatgccgccctcagaatgcgaaccgatgtctcgatcctcatcgcattgctgatgctatgtgcttccctcctcatctgaaggtagtcctgcacaacatcatatgcggcgtggtgcattagagctgaggatttcacattgagctgctaatagcaattctttccaccatttatgtagcgatttttttttcttgttctgtccggtgttttgaaggatggatggatgttcagcttgatacctcaacggtgacacttgtgtgtgctgccgctgcctctaggtatattttggtacatatatgtggtgatacattgttcaggtcatcttttctactgccaaaccctggcccggagggcaaaaatattcactgcaaactgttgtaactgatgttaggcatacacaaattcatctcaaacataaacacaatcttattgatagtctagaacacccagagaaggt

SEQ ID NO: 13631 - DNA, 671 bp, Zea Mays
ccggtatttgggtgctttgcaacgattgcaacaaggtctcagaggtgaactttcacgtgattggccacaagtgcagccactgcagatcgtacaacacccgaacaacatcgcgccctgcagatttatccggaagcagctcaccttcaacagactcatccgacaacaacatatagagaagaaaccattgacagagccaatatgattgaagaaccggaggaggaaacattgtttcggggcgtgcgtgcttgccaaacttgaagactcccagccgtttattggccctcatcttgtctagattcagttcattccatgagtctttgctgttgtggcaacttccagcttgcgcatcgctgggtcaacaacccacatggccggcgtagctgtccctttgaatcttgttcgcagccgtgattttatcactgtggatgaaacgtaatcacatacttactgtaatctactatggttgaagatgtgtgcccccctgactcatgccttgtgtgcttgtgctgaactgtttatgaattcccatgctgttccgtaacactatattgccatttgtgtttccttatctgtcaagtaccgccaagtgtgcggtgaaattgtaattatttgcaatgaatagaatcttatatctatacctaataataaagactcaacatttctacggtgtt

SEQ ID NO: 13632 - DNA, 83 bp, Zea Mays
ttagcatcgtacgttgcccgaggaggggtacgatgcggcttcataccctagaggtatgaaggcagaggacatatgcattgcat

SEQ ID NO: 13633 - DNA, 687 bp, Zea Mays
cgtcttctcaccctcctccacagatttaccagtgatgatacgattcgtcgtcgtctcatcggccccttgggatctagaatggaacttggcgccaccactgccctgtaccctctgcaccgctgcaaaaccatttacctggtcaggcatgcccagggcattcacaacgtcgcaggcgagaaggacttcggcgcctacatgtcacatgaactgttcgatgctcagctcacccctttgggttggaaccaagtcgatggtctgcgggagcatgtgaagaaaagtgggcttgcagagaagattgaattggttattacttcccctttactgaggactatgcaaactgcagttggggtctttggtggtgaaaagtatactgatggtgtaaatgcacctccactaatggttgaaaatgctggacacagtggacgtccagctgtttcaagtttgaactgccccccatttattgcagttgaaacctgcagagagcacttgggtgtccatccatgtgacaagaggaggagcataacagaataccggcctctcttccctgccattgatttttcattgatagagaatgatggagatgttctttgggaaccagatgtgagagaaacaaatgaggctgtcgcattgaggggtatgaagtttatggactggtgcatactgtttcggtgcctctgtctgagtcct

SEQ ID NO: 13634 - DNA, 2487 bp, Zea Mays
cgtccctgccctgcatcgcaacttgctcacaggacacagccgataagcagcggccaaaacagaaagcgcgatttgtttgatcgcttcctcctccactaccactagctagcctgccgccgtccgccgtgcagtgtgcgagctccgcccgccggtgccggaggcagaggaggaaggtttgtcgcgacagatttggcaacagacgttgttatattgattggggatgtcaagttttaccttcacaagttccctcttctatcaaagagttcacgcctgcaaagattagttgcttcaatcaatgaggagaaaaatgacgaagtggatatctctgacatccctggtgggccttcagcatttgaaatatgtgctaagttctgctatggcatgattgtgacactcaatgcgtataatgtcctcgccgcccggtgcgcagccgagtacctagagatgttcgagaccattgacaaaggaaacctcatatacaagatcgatgtgtttctgacatcaagtgtgttccgcacctggaaggactcgatcatagttctacagagcacaaggtcactggtaccttggtgtgaggatttgaaagtgatcagccactgcatcgactctatcgcgtcgaaggcgtcgattgatccatcagaggttgagtggtcatacacttacaacagaaagaaactcccgtctgagaacggtatcgattcgcattggaatggtgtcaggatgcaacctatggtccctactgactggtgggtagaggacctctgtgagcttgaagtggactcgtacaagcgggtgatcatgagcatcaaggcaaagggaagcacgccagctgttgtcgtcggagaagcattgagggcctacgcgtaccgacggctgcttggctccctggaagacgctgtgagcaatggagttgattgcgcaaagcctcgtgcagttcttgacgctattgtatctctcttgcccgctgaggaaggctcggtgtcatgtggttttcttcttaagctgctgggagctgcatgtttgctggaatctggtgagtcgtcccatcgcagtaacttgatcaagagaataggcgcacagttggacggtgcttcagtttcagaccttctcattataccaccaaatactgatgaaaacgatacatacagcatagatctggtcatggcaatagtggaggaatttcatgtcgttacagaatagcgacagtggcaaggagaaatttcaagatgatgaagagatcgtggagactgagaaacgtggcatcggtttccagcacgtcaaagctgggcagttgcaaagctgatcgatggatatcttgctgaggttgccaaaggatcccaaccttcctcttccgaagctgaccgcgcttgctgaaatgggtgtcttccctaccccggccaacgcatgacggcctctaccgtgccattgacatgtatctgaaggagcaccccagcctgtcgaagagcgagaagaagaaactatgcgggctgatggactgcaagcagctgtcgcacgatgcgtgcatgcacgccgtgcagaacgagcgtctccccttgcgtgtggtcgtgcaggttctcttcttcgagcaggtccgggcgtctgtcgcctctgcgaggagtgacccttcttcagctgagcttccatctgccgttcgctcgcttcttcccagagagaacggtaactctgttggcagctccaggtcagctgccacgacgacaacggaggaggacggatgtggggtcccgacgtcgagtgacgtcaactcgttgaggtcaacaaggctcgccaacaacagcggcggaagcgagaggagcagtggcagcagcgacatcaacaggagcgccgcggggaggggggcaagggggattctgatgccgaagaagatgctgagcaagctctggtctgggaaaacgaacgccggtgagaacagcagctcagacacgtcgcagagccctgggtccgtcaacaacccggaggaggtgaagtccacgcagtcaaggatcacaaggcgctcggtatcctagtcgcggaggggtaaccgcggtcacagcctagttttgttcttgctcttgatttttgccttcactggagagtagtggcaatctaaaaaatgtggagttactggagtaggtttggtcattgatgatgttttcagccatgttccatgggaactttttacatacaaagaaagtataggttgttataattgatgtatttttgctggcaaaatcatagtgttttagtttgctttttacggccaccggccaagcccggcacgattaatttcaagggctgaagacagagtgaagtaaatgctttatgatgtgattggatttgttagagcaactataaagagactctctctagcctttctaattgttaagaataaaaatattggtaaaagaatatactttagtaactttttaaatggttatctaaatatagtcatctttagttctgaatttgtcgctagtcaaaaataaaaaa

SEQ ID NO: 13635 - DNA, 3778 bp, Zea Mays
ctctcaatcccccgcaccctctctccctgagcgctcgcgagcctgcggccaccaccgccgtctccacgccgcgcagatccgcccagccggttcggccccactcgagaatacgtgtacggacgcaggccccgcccacctcgccgaggactcgctcctgtgtcgtgcgcgccagcactaccggtggccgtgcgcggctgggccgtgccgattcgaccgaatccggtggaattcaccgtgccgtggtgtcaaatcggtgagctccgttgggttacgcgtgggtggaggctcgttcaggtctgggcggccgtaagtggcgccgggcatggttctagggtttggttttggtcttttggcgtgagggcatggcggatgggggccggatgaagggcgtacagagcgctggcggtggcgccggtgacgacgaagaggggaatgaggaggtgcgagaggagccggaactcgcgctgtcgctggggcggcgagtctggcacctcccgccgcggcaggaggccgctccccgctcacttaactggactccggttctgccggagtggaaccccgacgccgctgggagctcgcagggtgtggaaagggccttgggcggacaatccatctcttctcttgggttccatgacatgtttggtggtatcctagacgatccccaagcgggtggcagtatggaggttgggtggggcaagctgaacgaagaggatgaagacagagacctgcagaataaacggctcagagtacgacactttggcgaagaaaacccactgcattctggtgccagtgctactccctttggctctgaatcgtcatttttgcccatttctgatgaatgtgttcatttaaagctgtctcgtttcccagaacatgaattggaatttgggttgtcacttttcgcaaatgatggtagtgagagcccaagggatgccaataatgagcaagtcgatgatgcagaaaactccggtggaagaaattctgtggatgttggaataagaatggatctctccgatgatttcctgcacatgattttctctttcttggaccagaaggatttatgcagagcaggtgtgacctgtaaacagtggcgatctgctagtgtgcatgatgatttttggaagtgtttgaaatttgagaacactagcgtatcactggagaactttgttaatatttgccgtcattaccagagtgtcacagaactcaatttgcatggtgtcataaatgcagaaacactagttctggaagcaataatgtttttaaggcatctgaagacattaacaatgggcaagggacaactgggagaatcattttttcaagctttggctgagtgcccattattgactgctttaacagtaaacgatgcttctcttgggagtggcattcaagaagtaactgttaatcatgatggactgcgtgagcttcatattttgaagtgccgtgcacttagaatatctgtcagatgttcccaacttcaaatactgtctttgaggcgaacaggcatggctcatgtatcactgaactgtcctcagttgcttgagttggacttccaatcctgccataagctttctgacaatgcgattcgccaagctgctacagcttgcccattgttggcaaaactagacatgtcatcttgttcttgtgttactgatgagacattgcgtgacatagctagctcatgtccgagtctttctgttcttgatgcatcaaactgccccaacatttcatttgagtccgtgaggcttccaatgttaatagacttgagacttctaagttgtgaaggaatcacatctgcttcgatggctgcaatagcttatagccgtctgcttgaggcactacagcttgataattgcagcctgttgacatcagtgtctttggacttaccacatcttaagaatataagtctcgtgcacttacgcaaatttgctgatttgaatttgcgaagccctgtgctttcttacatcaaagtttccagatgttcggcactccatcgagttagcataacatcgactacacttcagaaattggttcttcaaaaacaagagagcttatccagtttgtcattgcaatgccacaacttgattgatgtggatcttactgagtgcgagtcattaacaaatgcggtttgtgaagtatttagtgatggaggtggttgccctatgctaagatcattgatccttgacaattgcgagaatttgagcattgtagaactgaacagcagttctttgtcctgcctctctcttgctggttgccgctcgatgacattgttaagactctcatgcccaaatctgcaacatgtcaatcttgatggctgtgatcaccttcaaagtgcagcattctgtccagtgggtctcgaatccctaaatctgggaatttgtccaaaactgagtgttcttcacattgaggctccaaatatgtctatattggagctgaagggttgtggtgtgctttccaaggcttccatcaattgccctcgcttgacttcgttggatgcctctttctgcaggcagcttgtggatgattctctgacttgtatgtcagaggcatgtcctatgattgaacatcttattctgtcatcatgcctatccattggcatcgatggattgtcctcattgcattgccttcataagctgaccttgcttgacctgtcttatacctttttggacaacttgaagcctgttttcaacagttgtctgcagttgaaggtgttaaaactttcagcttgcaagtacctcagtgactcatcattagatgccctctacagagagggtgctcttccattgcttgttgagctagatctgtcctactcgtccattggacagaatgcgatagaagatcttcttgcttgttgtactaatttggttaatgtgaacttgaatggatgtacaaactttcaagaattggtgtgtgggtcagatgatagcagttgtgtcgatatgccagttgacttttgtgcacctagttcagcaatcaagagtgaagagatcagtgagcgatctggtcgcctccttgaagttctcaattgtactgggtgccctaatatcaagaaagttgttattccttcaatagcgaactttctacatttgtccaaaattaatcttaatctttcgaccaacttgaaggaagtggatttgacatgtcccaatcttttaacgttaaacttgagcaactgtagctcactggaggtgctgaaagcttgattgccccaagattgtccaatctccagcttctgcggcaggaggccgctccccgctcacttaactggactccggttctgcaagagtggaaccccgacgccgctgggagctcgcagggtgtggaaagggccttgggcgggcaatccatctcttctcttgggttccatgacatgtttggtggtatcctagacgatccccaagcgggtggcagtatggaggttgggtggggcaagctgaacgaagaggatgaagacagagacctgcagaatacaaacatcaagtcaggacaagctctctccttagagctcttgtacatagtacccaagcattgccggtatattgcaaggcatggtatattaggagccaggggcaatgatatcttatttttccagtccattcatgttgctgaataagtatttttgtgaatctgttttgttgccggaggtaacaaaatatctgttcatgtttttttttctgtattccttggaagtgtaccgatggagctatatgctggtttatatgcatcaataatcttgtttggatatagaattttggaaccgctttgctaatgtcatctgagg

SEQ ID NO: 13636 - DNA, 1803 bp, Zea Mays
agtaatctagctgatttttatatatcctgtcatttagcaatgaattgaatattttagatggtagtgaaagcacctttctatatcacatacatctctagacatctattggaactctattccacggcattgctattcaacatatgtatatgtatatgttcgtctagtccaatcttcattagccccatagttttgcacatgggcaacgctagatgggcatcactagcctgacgattttgatcgaatcgtgccaggaatccaatgtctggtggctattctcagcagggctatcaccctcctcgtcctcagtcaaactggggcccgccttctgcgccaccccagcagtctggttatggttatatgcagcctggggcttatcctggggcaccgccacagtatggtgcacctcagcaaccttatggtagctatcccccaacatctggtggctatcagactgggtgggatcagtctcaaaaccagcaatctcatacaactccccctggtactgggtatgattattatagccagcagcagcaacctcaacaacaacaatctgcccctgggactgctgcttctactgatgccactagctacaattatggccagccttcaacatatgcttcacaaggatatgattctacctatactcagcatagtggtgggcagcaagcatatggacatgatggctactctggttaccagacccaaggccagcagcagggctactctcagcagactggttatgaccagcagggatatggtgcatctgcttatggatcagctgcgaactcgacccaggatgggtccagctatggtggtcctggtggggccacccaggcatctccggggcagcaaacttcaaccccagctgctggaagccaccctggctatgccagtcaaccgcctactagtgctgcagcaagctatccagttcaaggttcagctccatctggatatggtgctccaccaccccagcctggctatggcacccaacctccacagcaaggtggatatggtccgggcgcttatgggcagccttctccacacggcgagaaacctcctgcatcttcaccttatggacaagctccgcctcctggatctgctcagggtggttatgtgcagtatggttacagccaacctgcatacggtgcaccaccagcttaccctggtgcacccactgcaagccacccgggctatggccaacagcagtcttatggcgatgcttatggtagtggaagctatgggcagcctacagcctacactactgaagcagcagctcctgctgcatcccaggatcactctgccgcacctgccgcggcccctggaacaacagctgcgccagctcctgacaacaatgggggtgccaaaacttctgcggaaacttgatcttcaacagctaattgggaacaaactttttacaagcctctgttgtgtcgtttcctccactgttgcttaatattacacatctagtttaggctccacatctacaggttatatctttctgcctgttgttttgaccccatgaatcgctctttccgtgctgttgattagtactttgttgtttttttattgctggttagatgtttggactggtgatatatgtgtttgtgcggttactcttgttggactctaatgggtacctaccggcttggtctggacatatactgtcctatatttgtttttagcctccttttacattggttattatgtgtgctgtacaactgtcggacgtttccataagctggtgatagttatggatgaaaatttggtttcaatattgtctaagatgatcataaaaggtttaag

SEQ ID NO: 13637 - DNA, 1235 bp, Zea Mays
aaggccaagcacaggccctccctccctcccttccctgcatccgccactcccactctctccctccccacctcctcctcgtcccgttgaatcattcagcttttgaaactatttttttgtgctctcaaggcaaaagagcacacttaactcttccacgcctgtctctctctctctccctctccagtcacacacacactatctctgtccatcggccgatcggcggcatggccacgccattagctccagcgagctccttcattaccaggccactggcgctggcgctagtgctcgtcgcggccgcgctctgccgtccggcttcctgcgcagccgccgcggccgccgcggacaggatcacgcggctccccgggcagccggaggtgagcttcggccagtactccggctacgtcggcgtggacggcgacggcggcggcaagcgggccctgttctactacttcgtggaggccgatgcccccgaccctgcctccaagcctctcgtcctctggctcaacggcgggcctgggtgctcgtcgctgggcgtaggggccttctcagagaacgggccgttccggcctagtgggcaggtgctggtgaagaacgaatacagctggaacaaagaggccaatgtgatatacctggagacgccggctggcgttggctactcatactctgccgacgctgcctactaccagggcgtggatgacaagatgacagccatggacaacatggtgttcctgcaaaggtggctccaaaagttcccacagtacaggggcagggacctgtacatcgccggagaaagctacgcagggcactacatcccgcagctcgccgaggccatggtggagttcaacaacaaggaggagaggatcttcaacctcaaaggcgtcgccctgggcaacccggtgctggagttcgcgacggacttcaactcccgcgccgagtacttctggtcgcacggcctcatctccgacgccacgttccgcgccttcacctccgcctgcaactactcccgctacgtcgccgagtactacggcggcgcgctgtcgccgctgtgcgccagggtgatgaaccgggtgacgcgcgagaccagccgcttcgtcgacaagtacgacgtcacgctcgacgtcttcctctcgtccgtgctctcccagtccaagaccctctcgccgcacgtcgggcagcgggtcgacgtgtgcgtggaggacgagacggtgaggtacctcaaccggcgggacgtgcag

SEQ ID NO: 13638 - DNA, 2070 bp, Zea Mays
cgaaagaagaagaagaggccaccatactgatgaccagtcgatcacggcagaatctcgccaagatccgaaatcactggctggtgagcggcagcagagcccagacgtcagatcaaaaggctctcgcctcggcttggcagtcggcactccctctccaccgcgctgcaggggcgacgcaaggccgagcgctcctcgatccagatccaaggtaggagatggctctcacgagaattggcctcgccggcctcgcggtcatgggacagaaccttgccctcaacatcgcggagaaagggttccccatctcggtctacaacaggacaacctccaaggttgatgagaccgtgcagcgtgccaaggtcgaaggaaacctcccagtgtttggtttccacgaccccgcgtccttcgtgagctccatccagaagccccgtgtcgtcatcatgctcgtcaaggctggggcgccggtggaccagaccattgccacgctcgcggcgcaccttgatcagggggactgtatcgtcgatggtggcaacgagtggtacgagaacacggagaggagggagaaggcgatggaggagcgcgggctcctatatcttggcatgggcgtctccggaggagaggagggtgcccgcaatggcccgtccttgatgcccgggggctccttcgaggcatacaagtacattgaagatattcttctcaaggtggctgctcaggtacctgacagcggcccgtgcgtcacatatattggcaaaggtggatcaggcaacttcgtcaagatggttcacaatggaattgaatatggtgacatgcaacttatcgccgaggcttatgatgttctcaagtcggtgggtaagctcacaaacagcgagctgcatcaggtgttctctgagtggaacaagggtgagctcctcagtttcttgattgagatcacggccgacatctttggtatcaaggatgacaagggtgaaggctacctggtcgacaaggtcctggacaagaccgggatgaagggaactgggaaatggacagtccagcaggctgctgagctttctgtagctgctcctacaatcgaggcgtccttggactccaggttcctcagcggtctgaaggacgagcgcgttgaggcttccaaaatcttccaaggtgactactccactggcctaccggtggacaaggcacagctgatcgaggacgtgaggcaagctctatatgcctccaagatctgcagttacgcgcagggcatgaacatcatcaaggccaagagctcagagaaaggatggggcctcaaccttggtgagctagcgaggatctggaagggagggtgcatcatccgtgccatcttcctcgaccgcatcaagaaggcgtacgataggaaccctaaccttgccaacctcctcgttgaccccgagttcgcccaggagatcatagacaggcaagctgcctggcgcagggttgtctgccttgccatcaacaatggcgttagcaccccaggcatgtctgcaagtctggcctacttcgactcgtaccgcagggataggcttcccgccaacctggtgcaggctcagagagactacttcggcgctcacacgtacgagagggttgacatgcctggttctttccacaccgagtggttcaagattgcgcgcaactccaagatctgaacatggcctcgtgtttgcatatgccagtatgccaccgtgtcgagtaatcaatcatattactgcttgcagggaggaactgtgtttgatttttattttccatgcgcaatgcttaatttaggtcaggaagtccaaagtctctcccattgttttcctgtaagagctaagcagtaccagatggagaaccttatatttgctggaacatgaataaaagcatttgacatgcttgtgtttagttctctgtcggccatgcattatattttcctttccccttgacagaaattctctcctgtactgaagtgttggctactagtactaatttttccagtccctgcacaatccaaactccacctgatgggcaactttgcagtggcttagcatttggtgtcatctcacgaatgctcatgctgcccgttta

SEQ ID NO: 13639 - DNA, 1630 bp, Zea Mays
attttatagtgtaaaatttagagtccattgtcacccctccgtatacagctattactaatttgttgctgtattgatcatagcatgttttgacctcaggctatgcatgaataattgttctgaatcttgtgcatgttttgacctccagcagagatgcttagtgtgctggaaagtgcaataaagcgagactacttatcatctaactttgaaacgacaactgagttgcttaattcaagcacacaagattttgctactcagaattcggctggaggttctggatctgccactgcacttccatgggttcctgacactactgctgctgtagccttgagattgttagacttggatgcttccatctcatacacccttcatccaaagttgggttcaaataaggagcaagaatctggagatttcatgaaacttccaccgagatatccttctatgaataagggcaaacaagaaatagaacagttcaggcctattggttttgatcaacaggatggaacgttgctacctaacagcaatggtcgtagaggtcggggaaggggaggtagaggaggcagcaggggaggtagatctcgtggtcatggtggtagggttcccagaggtattggcagctcttccaggattcagttcagggatgacaatagtatgctctatgggagagccccacgaaagaatgcacgtggtggccgcggccgtggacgtggacgtggacgtggacttcgaactgttagacctcggcaaccatccgagctcagtgccagatcaattccaaaggcaaacctattgggcagttttagcatgttaagtaagacaaatcacactggcactacgcattctcccgagagctcaggtgcagaagagtgggcctttgagaggagggaatatgtgaaggatgatgagaacaatttggtctctcaatccgatgagtctgaggaaaatgtcgaacctatgaatgaggaatatggtgagcatatttcaggctatccaagagacaattccgactccagacccgtacagatgatgggtgatgggagcgacgataatgatgaggatgctgaaggagatgagggtgaggaagatggagaggactatgaagctgaagatcctggtgatgaggatgatgacgttgagatggatggggatgatgatgtcgaggtggatgaggatgatgacattgagatggatggggatgatgacattgaagatgatgatgacgacgacggtggagatggagcagccaacggagatgaggatggaggtggtacatcatcatattcttcagagtatagtgaatgatgagtgattgaagttgtgcaggcttgtggtaaatgatgtaacagaggctttggtgggctcaccaacgctaatgctgacttgaaaaactatttaggaggttgccagttctaaactgtcttgtgtggcttgttattagatagaagccactcaacattagaagatcggccttgtgtgtatacatacataccaattatcaaaagttgaaaatgagggtcgatcagctgtctgttttatgttcagctacttttttcattgttatatattgggagcgttctctttaagacggttgacatatttctaaactcactctcaattttgattttgtagcaag

SEQ ID NO: 13640 - DNA, 113 bp, Zea Mays
agacatccacagagtctattacataaccattgtctttaacataactatcaaagtgcggagaaacgaaacgtaaatgataagcctacacaggcagctgactgggggtttgccac

SEQ ID NO: 13641 - DNA, 1503 bp, Zea Mays
gtgcccccctccggccaccctcggccccacgcctccatggtcaccgccacgacaaccccgccgcaatgctggcgagggctccccgccttggcccgggcacctccacccctctcctctcctcttcggccgcgtgccgtagcggctgcggctcccatctatcctctcaggcgccgcatcgctattactacaaccagaggaaggcgaggcacactggactgttcccccaggtgtacgctggaaaccgccggccctggcttctaccctctggggctctacgaggaggggtctaattctctgtcgcggtctcccctgtctaccttctttggtatcatggcgccggtatttgggagctccagcggcggtggtgcaagtagggagaaggcgtccgggcgaggagcagcagctgcaattgaggatagctccattgacattggtgacttcttcaagggccctctacctgggaagttcctgaagctccttggttttttggccttgtctcggcttggtgtgtatatacctttgggtggggtcaaccgagaagcttttgctgggaaccttgaccagaacagcctgctgggcactttagattctttctctggtggaggcattggccggcttggaatttgctcccttggcattgtaccatttatcaatgcacagattgtgtttcaactccttgcgcaactctacccaaaattgcaagaccttcagcggaaagaaggggaagcaggaagaaagaaggttcttcagtatacaagatatgcttctgttggatttgcaattgttcaggccattggacaagttctttatctccgtccctatgtgaatgatttcagcacagaatgggttctaacatctgtgacattattgacacttggatcggtctttactactttcattggtgaaagaatatctgatctgaaacttggaaatggaacatcacttcttatatttacaagtataatatcatatttgcctgcatcatttgggaggacagttgcgcaggcatttcaagatgggaattatgttggacttctcacaatcatattgtcattcttactattagtccttgggattgtctatgttcaagaagctgagcgcaaaatacccctcaattatgcttctcgttacagcagtcgaactggggaacttcagcgatctgcatatttaccatttaaggtcaacagttctggagtcatgcctatcatattttctacatcttcactggctttgcctggtactttggcacggttttctggcttagactttcttaagaaggctgccatagcccttaatccaggaggtgctctctatcttccaactaatgtattacttatagccttcttcaactattattacacgtttctccagttagatcctgatgatcttagtgaacaattgaagcggcaaggtgcttcgataccacttgttagaccaggaaaaagtacagctgcttatattaaaacaaaacaagatcatggaggagatcggagatcatacaca

SEQ ID NO: 13642 - DNA, 591 bp, Zea Mays
caaactgatagcctgtccccacatgtcaagcactcaagcagcccttcctgtgctggtactagttgtcgctgctgccctgttgcggcgacgactccgtgactcctagtccctacccagatcggcgcccgacgcaaggccgagcaggcgatggccgcagcggcgtcaatggggcacccttacgcgccagccgagctggaccttccgggtttcgtgccgctgaagctgtcccaggtcgagatcctcgtgtcctacctcggcgcctccgtcttcgttttcctcgccgtctggctcgtctccggaagatgtgtcagattatccaagaccgaccgtctgctcatgtgctggtgggcattcacagggttgacccacataatgatcgaggggcccttcgtcttcactcctgatttcttcaagaaggagaaccccaatttctttgatgaagtttggaaagagtatagtaagggagactctaggtatgttgctagggacactgcaactgttacggtcgaagggatcaccgctgtattggaaggccctgcatcactacttgctgtggctcgctcttcatgctagagaatcaccctcttttca

SEQ ID NO: 13643 - DNA, 2164 bp, Zea Mays
tcttgcaaccgaaggaaccaaaccaggcggccaagccgcggacccccgcatccccggtgcggcgcagcggttcctgcctcgtgcacgtctgtataacccgacggagcgggcgcccgaggacgacgagggaggaaggcagccagtcagccagaggaacctagagccagtcccgtcccgtccatcagccgccacaccacaaacacccaccactctgctctcgcccgcttgctttctctcccccgctccagcttatggcggaggcggcgccagcagccggcggcggcatcggggacatcctcgccacgagcgatcgggacttcctcgtccgcaactccggcgagcaggtgaagatcagcagcgttgaggcgagccctgtggccatctacttctccgcctcatggtgcccgccatgcaggaggttcacgcccaagcttattgaagtatacgaaaaactggcctcacagggcaagagcttcgaggtcgtctttgcttcggccgatcgcaatgaggaagctttcaatgaatactttgcaaagatgccatggttggctgtccccttttctgacagtgaaggccgtgaggcccttgatggccagttcaaggtctctggtatcccacacctggtcatccttgatgcaaaaactggtgaagtttacactgaagatggtgttgaattcgtgagtgagtatggcgtggaggcttaccctttcacaccagatcggatcaatgaactgaaggaacaggaaaaggcagaaaaggagaatcaaactattcaaagcgtgcttggcacatctactcgagactatctcatttcaaacaagggagacaaggtacccatctctgagcttgaggggaagtatgttggtctttgctttgtggtggatggctttccaccactcgctgaattcactgaggtgcttgctaagatctatgagaaactcaaagaagtgggagagaaatttgaagttgtagctgtatccttggacagtgaagagtcatcatttaatgagagttttgcaaagatgccttggcttgcaattcctcaaggtgacattaagtgtcagacgctggttcgttactttgagcttagttctcttccaacactagttctgattggccctgatgggaagacactgaacaacaatgtcgccgacataattgacgaccatggttttgaggcatgggagggcttccccttcagtgctgagaagctggaaattcttgctgagaaggcaaagattaaagctgcatcacagaccttggagtccattctaatcagtggtcatttagactttgtcattggaaaagatggtgcaaaggttcctgtatcagaacttgttgggaagactgtccttgtttacttctcagcaaaatggtgcccaccatgccgtgccttcctgcccacacttgtcaaggagtacaacaagatcaaagagaagaacagtgattttgagatcgtcttcatctctagtgacgaggatcagagctcattcgatgattttttctctgaaatgccatggcttgctgtaccctgggaagatgaaaggaaagcatcgctgaagaaaaccttcaagatccgtggaatcccttcacttgtcgccatcggacctactgggcagacagtcagcagggacgcaaagtcccagctgatgatccacggtgctgatgctttcccattcaccgaggagagacttgaggagctacagaagaagctggatgagatggcgaaggggtggcctcagaagctgaagcatgagctgcatgacgagcacgaacttgtcctgctgcgccgtggtacgtaccgctgtgatggttgtaacgagatgggcagcagctggtcctacaggtgcgacgagtgtgactttgacctgcaccccaagtgcgcgttgggtgaggaaaagatgggcgaggaagcccctgctgggtatgtgtgcgagggaggcgtgtgcaggaaggcctaatctgaatgctgtgaaggatgacaataatcgtgagatggctgtgttttgatgtaaggtttttcggccgttgatgtttgtgtgttaataaatagtagttgcaggagcaaatgtgtgtatgcaaggctatgtgagtattgtgtccgatcaaagtaatgtggttttgctgcatggtatttctggtcttaagcatgtaatgttggtgg

SEQ ID NO: 13644 - DNA, 1864 bp, Zea Mays
ccaaagcagcaaaggacgtcaatcaatgagcaaatacatcgaattgcgcgaaggcaaagcgtccaagcaaccacttctgctctgcatcccgtctgggcctctgcatttgcttggctgctgctcccttctcccaccgaccaactcgatcccgcgccatggatcgcgccgaccccgcgcggggccgccttgccgtgctctcctcccacctccgtggtgcaggggccgaggaggcggcggggctggagaggtcgccggtatccgcgccggcgcccgggccccgcgccggcgcgcttgccgtggtggacgggaggaccgggaagcggcacgaggtcaaggtctccgaagacggcaccgtgcgcgccaccgacttcaagaagattaccactggaaaggacgacaagggtcttaagatttatgatcctggttaccttaacactgcccctgttcgctcgtccatctgctacatcgatggagatgagggaatccttcgctataggggttatccaatcgaagaattggctgaaagcagctcgtttgttgaggtggcctaccttttaatgtatgggaacttgcctactcagagtcaattggcaggctgggaatttgctatttctcagcattctgctgttccccaaggactgttggatatcatacaatcaatgccccatgatgctcaccccatgggtgttcttgccagtgctatgagcaccctttctgtctttcatccagatgcaaaccctgctctacaaggtcaagatctttataaatcgaagcaggtgagggataaacaaattgtgcgagtacttgggaaggcaccaacaatagcagctgctgcctacttgagattagcaggaagacctcccgtccttcctttaaatactctatcttattcagagaacttcttgtacatgctggactctttgggtgacagaacatataaaccaaatcctcgacttgctcgagctctagatattctttttattctgcatgctgaacatgaaatgaactgctccactgctgctgttaggcaccttgcttcaagtggtgtggatgtatttactgctctttctggtggtgttggagctctatatggtcctctgcatggcggcgcaaacgaggcagtacttaaaatgttaaatgagattggaagcatggaaaatattccagatttcattgtaggagtgaagaacaggaagaggaagatgtccggttttgggcaccgtgtgtataaaaactatgaccctcgtgctaaagtcataaggaaattggcagatgaggtgttctcaattgttggacgggatccacttattgaggtggccattgccctagaaaaggcagcgctgtcagacgaatattttatcaagaggaagctgtatccaaatgtggatttctactctgggctaatttatagggcaatgggattccctacagaattttttcctgtgctgtttgctattcctcgcatgggtggctggctagcgcattggaaagagtcactcgatgatcctgacactaagattataaggccccaacaggtatacaccggcttctggcttaggcactatacccccgtcagagaacgagtgctatcaagccagagtgaggaacttggtcaggttgccacctcaaacgcaactaggcgccgccgtgctggttctgccctgtagaagctgcagcgtataaacgcaccggcatactcaataaacatcgaccacttttgtgcttgaaaaggccacaaatgctttttagcttggttggagttgtaggccttttgttgtcgagtatataggcaataatgcagtgagaacaccacaccgttacaatgtaaaactgtcacgaggcatcacttgctggtgtaaaaaga

SEQ ID NO: 13645 - DNA, 4086 bp, Zea Mays
taggcgagggatcacggccgcgcccgcgcaagcggcaaggcaaacccttgtgttggtccagccgcccctcgccccgccgcaccaatcccccaccccatcccaacgctatccgctgccctcgccgcgcccccctcctcttccacctcgtccgccaccctccccaatccatcacatcccaccctaccccaccggccctgccgccgccgaggaggaggtgtccccacccccgtccgcagaggcagcagggatctctaccgggcatggagctggcgctcgcctccgcgaagccctcgcctcgggcggcgggggccttcccgccacttatcttctcgccgcttaaaccattcccgctcctccgcttcccgccgcggaggaccgcagcggcggcgctgcggctccggctccggctccgcgcggctgccgctgacgcgggcgagacttcccctggcgaggaggtgttcggcgcgcggcgggagctaacgggcatccagccgctggtggaggcgctgccgcccgcagcgcggacggcggcggaactggccgtcgccgcggcagccgtggcggcgggatacggcatcgggctccgcgcgggtggcgggtcgcgcgccgtggcggtggcgggggcggcagtgctctgcgcggccagcgtggcgggagcagctgcggtgaactccgtggtcccagaggtcgccgccgtggggctgcacaattacgtcgcgggccacgacgaccccaccaacctggacaacggcgaggtggaggcaatcgcgaagaaatatggagttagcacacaggatgacgccttcaaagcagagctctgtgacttgtatgccaggtatctttactcagtacttcctccaggagatgaagatctcaaaggtacagaggttcaggcaattataaaatttaaaagtgctcttgggcttgatgatgtagatgctgctaacatgcacatggagattggtagacgcatatacagagagaggttggaaacgagtgatcgtgatgctgacatggaacaaagacgggcatttcagaagttaatttatgtgtccaatcttgtctttggagatgcatctgtattcctacttccttggaaacgtctgtttggggtgactgattctcagattgacattgctatgagggaaaatgccaagaatttatactcggtgcagctcaagtctattggaagaggtcttgacataggcacactcattgaagtaaggagagcacaacttgcatataaactttctgatgagattgctgctgagatgttccgtgagcacgcgaagcagctagttcaagaaaacatttcatcagcattagacatcttgaagtcacgtattccggatagtctaactcaggctgtggaagaagtgaatattgtaattaaatttaatagtttgcttacaacattaagcaaacaccctgaagctgataattttgctcgtggtcttggccctatttcattagctggagaggatgatcacgataggagagctgatgatttcaagatactctataaggcctatgctacagaagtactttcagatggaattgtggatgataagaagcttttcccctctgaatgaactgagaaacatatttggactggggaagcgggaagcagaaggaatcttatctgatgccaaagctcacatatacagaaggacacttgctaaatcatttaacactgaattagcttcagtccatagcaaagcagcatttctccaaactctttgcgaaaagttacagtttgatcctgaactggctagtaagatgcatgaagaaatttacagacagaagcttcagcagtttgtaactgatggagagctgagcaaggaggaagtggaagctctgatggcattccaagtgcgtctctgcatccctcaagaaactgtggacgctgcacatactgagatttgtgggcaactgttcgaaaaggttgtcaaagaagccattgcatctgttgacggatataatgctgatagacgtgaggctgttaggaaggcagcacaaagtctaaacctgaaaacggaggctgtcatgacgatctttagtaaagcagtacggaagttattcttgagctacattcagagagcaaaagaagctggaaaccgcattgaaactgcaaaagaactgaagaagttaatttccttcaacatagttgttgttaccgagcttttagctgacattaaaggagaactatctccagttgctgaaactgaagcatcaagtgcagcttcagaatctgaaggagaggatggtgaacatgaatgggaatcattggatacactgaggaagactagacctgataaagagctcaaagaaaagctgagaaagtcaagccagaaagagataactctcaaggatgacattccattgagggatagggctgagctgtatgaaacgtacctgatgttctgcatcactggggagacgactaatgtatcatttggaacagctatctctacaaagaaagatgattcagagtttttaatgctaaagcaattgggtgacatacttggtttaactcgcaaagaagctcaagatgttcacattaagtttgcagagaaagcttttgtgcaacaggcggaagtaattcttgctgatgggaaattaacagaggctaaggctgaccagcttgctaagattcaaaagcaggtcggtttgcctactgaacatgcacagaaaatcattaagggtattacaacgacaaagttatcttctgcaattgaagcctctgttgctcggggtcagatcggtatacagcaggtccgaggattgaaggaagcaaacttccaactagatagcttgattgcggagccgcagcgagaaagcatttataggaaaactgttgaagagctcttttcttcaggatattgcaaaggttaggttggagaactcccttgtccaggctattgcgttgcttcggcagaagaagagagatgatgtgctttcatctctgaatgacatgctcgcatgtgatgctgcggtccctgcatcacgacccttgtcatggcccacaccaggagagctagatgatctatttgccatctacctgaagagcattcctaagcctgagaagctatcaaggttgcagtacctgctcggcattagcaacgagaaggctaacgagatgcagtacgcagcctcggagggatcgctgccggttgcagctgaagagaaagaggagttggcgttctaggaagggagacagttttgttagggtagccaccggagttgaggtcccttgccaaggaacgaacgaacttggtgcctgtggcggacagctgctattgtagctaggcgcatacatgtttttggaaaaggaaatcgacgtgtaacactgacatatttattgcatgtctatctgtatagacaagtcaataacaccgacgctgttaggctgttgcattccaccaggccacactggaagcgttttgttttctggttcattgtttctcttttggtttaagaatgtattacagctatgactgccacccttgcttataacctggatttgttgttaacctacctggagtgcttaagggcccgttcggttctaaagaaccaaaaccacaacctaaggttgaggatgacattgaaacacatcctcaaaagcccaaggaaatgcaatcaaagaaaagggcaaaattagctgcaaagaggataagaaaactgcaagaagaggagaagcgcttgaaagagaaggaattcgagatggcttttttcagggaattttggcctgataatgtgtaaggcagaaacttcaacacttgacaatgtagctgctgactttgcctgatatagtggatgtataggcttgcaaaacgcttggcctacaaaatgttaccccattcattccgtggatgatttcacacatgatttgtggctagggttggcacaaagctgttcatccatgtagtggacaaatctagtgtagaattgcccatgctatgtgatcttgtaatttttatacattataaatcttgtttttttttgttcatataactgtgctcaatattttgccttgccaatgcaaagatttaaatctaggctcagaaaccaggcaatagttcacta

SEQ ID NO: 13646 - DNA, 126 bp, Zea Mays
tacctcatcagaaagtttatatgcaagttgtgctctccttacttcaatgagtgtgcctatgtcaagacctaaaccgagagcattttgtgatttcagaatgttcttgagatgcaataagagatatat

SEQ ID NO: 13647 - DNA, 123 bp, Zea Mays
tgctagcctcgtcttcacccgattcttgggatttcttgatgacacacggatcgacgacgatcaggagggtgacatatatagagctgtattcgcgacgcgatgacgaacgacgctaaccggcgg

SEQ ID NO: 13648 - DNA, 1504 bp, Zea Mays
atagaatgaatataaacattttctagaggaagctaagaaacgtgatcataggatattagggaaagcacaggaactcttctttttccatgaacttagccctggaagctgcttcttccttccacatggtgctaggatatataacaaactgatggacttcatgcgacaacagtacagagatagaggataccaagaggtgttgagcccaaatatttacaatatgcaactatgggaaacttctggacacgccgcaaactataaggagaacatgtttgtttttgagatcgagaaacaggaatttggacttaagccaatgaattgtccaggacactgtctaatgtttgctaatagggttcggtcgtacagagagttgcctcttcgcatggctgattttggagtgcttcatagaaatgagcttagtggtgctcttacaggtttgacacgtgttagaagattccagcaggatgatgctcatatcttctgcagagaagaccaaatcaaggatgaagttaaggctgttttggaattcatcaattatgtttatgagatatttggcttcaaatatgagttggagttgtctacgagaccagagaagtatctaggtgaagttgaaacttggaacaaagctgagcaacaattgacagaagctttaaatgagtttgggaagccatggaagattaatgaaggggatggtgctttctacggcccaaaaattgatattggtgtgtttgatgcccttaagaggaaatttcagtgtgcaaccctacagctggattttcagctgcccattcggttcaagctggcttattctgctgaggatgaagccaaaattgaaaggcctgtgatgatacacagggcaatcctaggttcggttgaaaggatgcttgccattcttttggagcattacaatggtaaatggcccttatggctaagccctcgccaggccattgtttgctcggtatcttctggttcagtggaatatgcgaaacaggttcttgccactctacatgaagctggttttcatgttgatattgacgcgagtgacaggacaatacaaaagaaggtacgggaagctcaactggcccaattcaactacattcttgtcgtaggtgcacaagaggccgagactggaaatatatgcgttagggtaagagacaatgctgacctggtcacaacgagtgtagatggcttcatcacacgtttgagggaggaaatcgcagccttcaaatgattttgatgctgcataatttcctactactcgtttgtgattttgacgagtttttagtgaccagcatcgagttcctcgtgttactgttcttgtttgtatgaagctaaaaggttgtctttttgttattaattacagatgcgaagttaaatactgccgctagtaaaaaaatatgcttgttgacttccagtgatttacgttactgttggacagtgtcttcagttttcgccctctcttaccacccaccatgttgaccaaaatcattttgtggttgcgatttta

SEQ ID NO: 13649 - DNA, 677 bp, Zea Mays
cccacacgtcatcctcccctaaaccctccgccaccttttcccgaaagccctgccctttttatgccagcccgaaccatccgggtccggggcatcggcattcagcacagcagccacctcttaccacgccccacggcaccaccccaacgtgatggcggtgagcaacaacatcacggcatgcgtgacgctgctggcgctgatctgcgcggtgcccgtgatcgcgtcgggggtgtggttcgcgtcggcgcagggcgaggagtgcgcgcgcctggcgcggtggcccgtggccatcctgggcgggctgctcctgctggccgcgctggcgggcttcgtgggcgcgtactggaaccggcgcggcctgcttgccttctacctcttcgccatggcgtcgctcgtcgtgctcctcatcgcgctcctcgccttcgccttcgccgtcacccgcgggtccggcgcctaccccgtgctcggccgcgcctacgacgactaccgcctcgacggcttctccatgtggctccgcgggtacgtctccgacgaccccgggcgctgggacaaggtcagggcctgcctcgccgtctccgacacctgcaagaagctcgcgcgccaggccgccttcaccagcgcagaccagttctatcagtcgcacctctccccgctccaggtcttacttatcgatgaccgac

SEQ ID NO: 13650 - DNA, 933 bp, Zea Mays
ctgatgagagaagtccgttgaaatcaatgagctgaagcaaaaggtgtctgaactcatggaaatcaaagctcaacttgaggatcgcaatcaaaagctactggaggaaagtacatatgcaaaaggattggcttcagctgctggtgtcgaattgaaggcattgtcagaagaagtgaccaaactgatgaaccaaaatgagaagcttgcgaccgagttgtcatcgctgagaagtccaactccagctccacgcagattcaacaatggaccaagaggtactaggagggaaagcatgagtaggcgagaaccagctagcagacgagacacgaatgcaagccatgaaagggaaaaggctctagaggcattgcttatggagaaggagcaaaaggaagcagagctccaaaggaaagtcgaggagtcaaagcagaaggaagccttcctggaaagtgagcttgccaacatgtgggttctagtagcaaaactgaagaagtcccagggttatgaccatgaggatctggaggccaaacatgatggctcgtgacctcttcagtttagatatctatcggcttggcttgcgtgtgggttttctgtatgtaaggttttggtattcgttttttctcttagcatgaattagtgtctcattctgtatattctccgcgtgttaaatatgccagtagtgccttgcctgactgtgcctagagctttcgatggatgctagagcggcattttgggttcttcaggcacataatctggatttgaagaaacagtgagcaagtgtttggaaatctgacgggtttctgatgcccactcaaatatctaacatgtattagcctgcccatcctgctcaggataacaaatgtgaatatgccctgaagtgtgagctacattgtattagaacactttcgttttcaacatcttcaatactgcttattgtatgcc

SEQ ID NO: 13651 - DNA, 315 bp, Zea Mays
caaattgcaactaccctctcagtgctgcctgctgtttaaatcggatatgcagtgccctggagcagaagtggaacatccaatgaggaacttttgacaagcatgggaatcttgttttattatatacatcttacatgtacttccctctgcttatgtacaatgtttgaaagttaaaaccaaatgtttcagtgtggcattatgacgtgttttagacatcaattcatggctttaaactggtttgttcagagtcattttagcaaaaactgagtgttctgcatgccaaacttcggttaactcaaacattggtgtcagatctta

SEQ ID NO: 13652 - DNA, 75 bp, Zea Mays
agataagagagggcagctgggaacccacaaatatcccacttgaggataggctcaaacaggtctaacacttgatat

SEQ ID NO: 13653 - DNA, 109 bp, Zea Mays
actccttttcctagtaccacatttgtcccaacgatgcgctggatcagcaatgtatatcagaccgatgtacgttggccactgtgactcgtcaagaaatggctcaaaacga

SEQ ID NO: 13654 - DNA, 922 bp, Zea Mays
attttctccatataatggatttacagtaaaggtttgttactatggccagcattatcattgttttgccttcaaggatggacgatgggtcatgtatgatgaccagacagtcaaggttgtaggtagttggggtgatgtgctcgtgatgtgtgaaaagggtcacttgcaaccccaagtgcttttctttgagtctgcaaattaatcattcttcagagtcgtaaagtgttgtgcagtggttaacatgccctcaaatatagggtttttacctgtggccgtgaagattagaaatagagtagcaaattcgttttgagcgggggtatagagtagcaaattcaacagctgcgttggtctctgagctttggtcgagcccctcgtaataagtagtcacctgaggattaaaggagagctgtttacccctctgtttttttaacctttggtatacttgctgaacttcggatccttcatctgccaatgagatttcactgccgatcaagttggtggggacgcattcgacatgaactgccatccaacaattctagccggatctgcctaaagctcttcattatgcaccagttatgtatagaattttgtgcttacaatgaggtgacaggtataggagtgtgactgttttgaggccagaaggtttagagaatggaaggaaatggaattgttggtgcggtgtgtatctgtggagtactgtttgaaaagaggaacgatatctggaatacggtagactttgagaaatctgtagtacacgagtctatgtaaacagggactcgatgagattatgtgagatgagtatagcgatgaataccagactccttatcactactgtttttatagttaaattcttattttttttatttagctaaagattgcgcgcctaagatataaaagaaaccgttgaagtgacaaaagactcaga

SEQ ID NO: 13655 - DNA, 751 bp, Zea Mays
tccgtaggttcttcagagctggaggcccggaagatgaggtaccctacgacaggcactgaggggctcctcatgggcattcttgttgaaggaactagtggtgcagcaaaacttttgcgggctaatggaatcacacttctcaaagtgcgtgaggaggcagcgaatgtgcttgggaaatcagaaatgttttactttagtcccatgcatccaccattgacagaagctgcacagcgagcccttgattgggctgtcaatgaaaaattgaaatcaggtgaggatggagaagtaaatgccaatcatttgctactggggatatggtcagatgacgagtcagctggtcataaaatcctgtattcgctcggatttgacgatgtgaaagccagtttactggccaaaacggctgacgaggaggctgcaatgagtcctagatagcaaagggagcacctaatctgttattcaacttacaagagatgtgttagggtcaacttacaagcgattgccatgccggtgcctgtaaaaacgttgcggtttgtttgccacggtgaatgcttgtgttcctttctcagctggatttgtgatcagctcatagaaaaagaaaaaaaacttgtagggtccagtgggcctgacgagcccttcaaattttttgttcaatttgcagcctgaatcctaacaggcgagaatttcatgtgaactgtgatattacacagaactcttagtttctagagactaattttagtccttccattttatttca

SEQ ID NO: 13656 - DNA, 821 bp, Zea Mays
ttaccgaatggagttaatatcccttgttttctggggttacaacattggaacacgattggtcgatgagttcttagcaaagtcaaatgtatcaaggtgtgttgacttcaaggagactgccgatgttattgcgaagcttggcttcaaaatgttcttgggtgtgactgcaactgtgaccaattgggatgttgagggtacaagttgcagtattgtcctcgaagacaaccctcttgttgattttgttgagctccctgacacttgccaaggccttcagtattgcaatttgttaagcggagttattaggggggcattggaaatgacggaggtgacatgggtacgagacatgcttcgcggggatgatgcctatgagatgcgggtgaaacttatcaagcaagtcccggaggaatacccctacaaggatgatgactagttctatctcattggaagatacaggacgcctgtttgcttgtttggattttttcacattgttgtcgttgacggattctagttctgctataacctgatgccatacgaggaaggtgtggattatattttatactcgccgtgtgtattgcttatgtattgtagttgtagaaatcatacatgatcttccatgagttgaggctttgaattatagtctgctgaattcagagcattagctacgcaaactgtgtttcctagaaatgaagtattttctagttgagggtctctgccctttctctggtgtgcttcggccgttgggaccggccttctccatttccctggaaaggtgataagagcctggtttgttattagtattttttcctaattaagttttatttcct

SEQ ID NO: 13657 - DNA, 1800 bp, Zea Mays
tacactatctccatgtatctctgtacatgtcaattaaaaatctgctccagcagtggaaggttcaggtgtaagtggcgttctttatgctgtggaacctaaggatgcatgcagtccattgagagcgaaagcgattcaaggctctgtctcaccttttgcgttgattataagaggcggttgccaatttgatgacaaaattagaaatgcacagaatgctggattcaaggctgctgtagtatataataatgaagataatgacatccttgtttcaatggctggaagctcgcttggtgtccagatatatgcagtgttcatctctaaggcatcaggggaggagctgaagaaatattcaggccaaactgatgcagagttatggataataccaacatatgagaactcagcttggccaatcatggcaatttcattcgtatcactgcttgctatgtctgctatcctagttgcatgtttctttgcgaggagacaccagatcagacgggacagggcaagacttccccgagctcaggagtcccatggaatgagcagtcaattagttaaggcaataccaagccttattttcacaaaagtgcaagaagacaactgtacatcagcaacatgcgccatttgcttggaagactacagtgttggagaaaagataagagtgctaccttgtcgacacaagttccatgcggcttgtgtggacctatggctcacctcatggagaacattctgccctgtatgcaagcgggacgcaagtgctggaacgtcagacccccctgtatcagagtctacccctttgctttcatcatccgccacacgcttgccggaatcaactgtgttggcttccttgcggtctacagcagcagcgtctccccccaggacgatcagccggcatcctttgttgcggtcaatatcccgcaattactctgtttcaggttccagtatccttcgcacccccgactctaggtttgatgcaaactcatctatctgcacaagtggaagcaacttggaccttgcaaatgtaccatccccatggtctggcacttggcaccgtgcgtctgctcactctttgtgcaggggctacttgtccccaccgatcggcatcaggaatacctcagcacatgtctcgcgttctgccaatggatctcccagtcgttacgtaggctcatcacgcatgtcccatggatcttcagggcagcagcatcctcacctgaggcactgcacattgtcaggcccgagcctgttcaccatggtgccccagtcaccgcaacagaaccagttgcagcatggtggatactcggaaacaaatctgtcggctgccgcatcggctcaatcattccgtcagctctacctgcagcattgccctgattctgacacgtcgtctcagtcacttccagggtgctgatctcttgctgcaatattcactgattcttgcgcccatgagaaatcttgcctggtgctgaattgacatgtggattttgagctcgtcagcatagttcaccatgatgataaaaaaaagagaaagaagtttggagtagttttacatgtggaaacaaaactgcttgtaagaagagagaatgtgcagccccagagtgtgagcaattttacatgcttgagtgtacaggggtttggagtagtcttggacttgcttattttgaggcatgtattgcagtcataggttacttctgctcaatagtttatgtgttgcctctgtctggtttctcaagcgtttagcttttaccgatactagaaaaggaggcgcgcttcgcggcgccctacctccattagtcaaatgcaataacaaac

SEQ ID NO: 13658 - DNA, 146 bp, Zea Mays
ctcggcacggatatctcggctctcgcatcgatgaagaacgtagcaaaatgcgatacctggtgtgaattgcagaatcccgcgaaccatcgagtttttgaacgcaagttgcgcccgaagccttctggcggagggcacgtctgcctggg

SEQ ID NO: 13659 - DNA, 4374 bp, Zea Mays
tggctttgtttctcgggtgcgacatggaggtcttaaattcgcggctgatgttttccatgacctacacgagcaagttatagctacatctgctaggggtcgcaaggtgctgactcgagtacagaacatcgaagcagcacttccatctctcgaaaaggctgtgaagaatcagaagagtcacatacattttgcctatgttccgggctctgattggcacactcagcttcaaaatgagcaaaatcacctgctagcgactgatctgcctcgttttatgatggattcgtatgaagaatgccgagatccgccacggctttaccttcttgataaatttgacaatgctggtgcgggggcttgtgtaaagagatattctgatccatcttatttcaagaaagcatgggatacgatgagagcagataagaatgctaatgtacaaagagaaaagagatcacagaaaattaagagaaaaggatcacgactaagggaaccatatcatggacaagccatgcctaggcataggggcactgaatttcagcgatcacttactgctggccaacttgttaacagcaggcagtttgcatctcccagcaacgatggtcagggtatctcagagcataagtctacacctgatgcaagatctaatcctgacaatatgagcagatcttcttctcttagttcgaagacacaactgagttcagtagaacaagctatcgatacaaaaccttctgcagtttctcatgagaatggccatgggaagtcattggatactaagttgcacaagcctggtggtctgccttcgcccgtactgcttaacagcaccactgtggatgatcatagtgaccatttgaagcaaggttccccgccagatggtatggttgctagatcaccttatgttaaatgggatgaaaagactgcaattatcatgtctacaagttctatctactgtgacgatgttgttatggatgaggttgaagatgcagaacctacttgtattagctctgtgcagaaagaaactgaccataaggtaatggatacattgcaccagcaagatgccttacttaaaaagacaaaatcactgttagtgccatcagtcttgaaccaccatgatgacattccaggagaagccgacaactacatggatgcacttaatacacttgaatctgagacagaaacagaatctgaatttcaaactaaaaatcgggtgccagcaccttccttcaaagctgaagcccctcaagtgggggcaattgacaatattgttccacagtgtcttgattcctctgctgctgactttattgacacatgtcaagaatctgatattatttgtacttctgaaagagcaattgattttcccagtttgtcaaatgcagattctcttgaggtttcacaactagaactttcagattatacgtctgtaagcccctataaagagtcatctgtcatcactaatatccacgagagtggtgcagagggtgctcgtggagatccttgtgagattatagagcctctgcaggtccattcagccatacttgccaatgatggttcccctgtttgcaatgaaataccaaagagtaagccagatgatgatcttgggtattttcaagagattcctcaaccaggtttctccacctgtatggttattccatcaaacaaagagtctgctgttgccaacaaaaaccttgaaggtgacgcaaaaagtgatgatgatcttattgatggtaccgctgataatgttgtatcgggacctaagattgccaacatggtagttgatgaggtgggtttcaagatggcacctgctaatagaagttcacctggtgacccctctgatgactcatgtgtcattcctgaaagtaggcctcaggattatgctgtaaagagctatgagggagttggtgattgtggtgtgactgaagtgtctaagttatgtagtgagcctcttaacaaaccatcagataatatatgtgcaactcaagatgttcctacaaatacctctactatgtctgctggtgccagtgaagtgtctagttcgtggagtgagcctgttaccgaactaatcgatgacagatgtgcaactcaaggtgttccagcaaatgcctctaccacgtctactgttgtaccatctgttaaactctggacaaatgctgggctctttggacttgaaccatccaaacctccagtatttggtaatggtccaagggaggatactccacctggttttaaagaagctcaaccagtccattcaactgaattcacagaagtgcactgttcaaagccaactgaatcagcagctgtagatgtcccaaatggaaacacatccattaccagcagctttgtggaaaagcttgttggtattcgtcctggttctgcaaacctcaatagctcaggggcaaatcaatcagcagccagaatacctgatccaattcatagtcatacagatgggcactcagatttttcgtcatcctttgagcacaataacatgactggcaaacatacttcaataagcgaacttctagaatttgaggggagtgctgatactggcaccaaaatatactcaactgacatgagaaataacgctgtgtctgcatcaagcttttcaagcattgcacaaaggtttcttgctaatacacttcagagaagaacttccaaatatactgatcttcctatgtcttctgagagggcaaatgctgatacaagtgcaaaatctgaatctactctaaatcctgttgtagaaccaagtgaagcggtatttgcagaggaaactaagtttgagaacaaaacagaaaatggaatggatggattgtccaaaacatcaatattttctagccgccattactctgagaaatcgtctccgccacttgagtacatgaaaatatcttttcaccctatgagcgcatttgagatgtcaaagctgaacctagatttctgtgatggaaatattcatgaaatttctgatgatatgatgttaccgacatttcagttactttcagagtcttccattccacagccaggcagtggttctgagtctgaagatgacacctttggtaggtcatatagttattcttcatatgatgatctgagtccccggctatattcaaactctgaggcatgggatcaagatgatggaactggactggaggaacatgagttatatgatgattcaaatcagataggatcctcaacagcacctttatctagctacatgggattcgagcagatgaacttatctgacatgaagtcagatatttcacttgcaaacattggggatcagaatgtaataggcactttacaatcctgtactgttgaagaacttccaaactttgatacattgatgtccagaagtgatgatcaaaatggtgaaacccccattccacataatctggggaatatgacaccagatgaagatcagttgccaccaccacctcctctccccccaatgcagtggaggatgacaagacaaacaacttcactagaagaggaaacttgcattacaactaaagatatgcttagaaaaacttctagcctaccacatatacacacctctgcccaggaagaacactgtcctccaactgcaccattggatctacaagggcatgctggggaagtgggtgtccagaaaactggtggggtacgagaaattactaatcctcctagtatcatcgatataaaatcaagtttgcttcagcagatcagggataagtcagagcagctgaagcttaatggacatgaaaggtcaaaaaaagcagtaggcggtgacattaaaagcttagacgaaagggaggagttgcttcagcaaatcaggagcaagaccttcaatttaagacgcacaaacgcatctaaggcagatggctcatcacaatctacagccagttccaacgttgcagcaattttggagaaagccaacgctatccggcaggctgtggccagtgatgagggtggcgatgatgatacatggagtgatatatgaccacctaattgcagacgttcatggtagtcttttcctgtatattaagctattacaagatgaagtgattaaatgtgaataccatccttttcttcattgtaattagattttgcaggtcttgttttgtaccttccttagttcatattagtgaatcctaccgtaggtcgctgtggtcgtggaaatgtcagagcatttccacattatgtaaatgcatctttattatttatttatgatagtgagaacagctgaatagctgataaaaataagcatactaatctatctttttatcattgtattgattttttttgcaatgataataagatggagcatgatgttgcaaaaggttgtccttttagctgctatcaagtaaaatatttctaaagcgataggtctgcattaccttgccaagtcacgttttc

SEQ ID NO: 13660 - DNA, 1091 bp, Zea Mays
gtaagcgtcttggaaaaagtttaaaaccacaaatcttgttttacgtgacctggtggtatcaagtatctcaactgtatggcatattctttgaggtaaagaagaagtttgagacagctcttggtgttcttaaaaaggaaaagatcactattgatccagatgacccagcggcagtttctcgttatgcccaagtcatgaagactgtaagggaaaaggcggatcttctctctgattctcaaaggattaaatataccattgagaccttcaccaagggcatccctgatgcacggacttacttgaatactcttcaacagctcagaataaagagtggtcttatagatcatcttggaattgagcctttgatgatggaagctcttgagaagattgagaaggacattaagaaaccacttttgaggagcgacaagaagaacatggccaccctcttggcagagtttgacaagattaacaaaaagcttggctttcggaaggaggatcttcccaagatcgaggaagagcttgaattggaaattgccaaaagtgagctgactgaacttaagaaggaatgcgttgaagcaatggagactcaactcaagagggaggagtttcaagatgaggagatgcctgatgtcaggaaattggacatcagaaacttcctgtaggcctgatcgacgataatctttgaggcccaacgcacctctggttttggtttcaagttgatcggtgctccacacctatgaatgctgctccttccctttttgtaataaaagaaactgcacggttgggtatgagttggattaaatcttgcctttctgttgttctggactcttgtggctgcagcaacaatgggatgtccttgtgttatagcatatgaactcgttacgaggcattcaggaaaatggtgatacctggtatttaacctttattttggtactcagtttggagagcaaagatccatttgttttattatgtcatttatttttgcaccttgtaaaggaatttgtttctgttgtatcaaccctccctaaagacccacatcttcgattaatgaagagtaaaatataccggctgtctctaaatttatgacacaacgccat

SEQ ID NO: 13661 - DNA, 1234 bp, Zea Mays
gttggaatgtctattgacccaaagctgcttctgtcaaacttcccaatgatctctatgatattgggtctcttgataattggaaagacattgttggttacatttgtgggcagggtatttggggtttctactatagctgccattcgtgttggtctcttgcttgcgcctggtggtgagtttgcttttgttgcctttggagaagctgtcaaccagggtcttctatcacctcaattatcatcgttactgtttttagtcgttggcatttcaatggctctgacaccatggttagctgctggagggcagtttctggcatcaaaatttgagcagcatgatgtgaggagtttattgcctgtggaaagtgagactgacgatttgcacgaccatattattatattaggctttggacgtgttgggcagatcgttgcgcaactcctgtcagagcggttaattccttttgttgcccttgatgttagaagtgatcgggttgcagttgggcgtgcacttgaccttccggtatattttggggatgctggaagcagagaggtactgcacaaagttggagctgaaagagcttgtgctgctgcaattactttggatacccctggtgcaaactatagagctgtctgggcattgaacaaatatttcccaaatgtgaagacatttgttagagcacatgatgttgatcatggtgttaatttggagaaagctggtgcaacagcgttgtgtgctacgtcaggaaattctcttggctatgggttttccagagttatgtccaaatcgaagtctatcagctccgatgatgaaagcgaaacagtggatggcgcactagcaatttgaagacgattagataaaatgggatcccttgatagtactagatcgattgcactgttagtagataagcttgttgcatgtagaaaaatggaataaaaattaatgcaagagctgtcacaaaaatcggcgtgcaattttgtatgttagagtacttatatatttcttctctcccccaaaaaaattgtttgcatacaactcttcacaaagaaaaataatacactctagcagtgcacgtgaaaatgagacccttgtaagcagggaagaaaatagatgtcagaatgctgaatacttcccatgcttgctcaaaggagcatatggtacagtcaggccagttggacggttgggacctggctttgggtatgtttagtacaatttttgggtgtgtttgggacagttttttaaagag

SEQ ID NO: 13662 - DNA, 104 bp, Zea Mays
atacctcattgaaatcccttttcgttatctcccttcatggcatgtggtttcttgaccgtgtgggaagaataaaaatcagagatatggggccaagttgggaagag

SEQ ID NO: 13663 - DNA, 1688 bp, Zea Mays
ctttgaagtactgaacaatgcatgggatgcagttattcctatgtctgcagctgcaatggctttgcctccgctttccattcgaggtgatctgggcattatatctacagctgttggtagatacactccttcgttgttgaaatcattcatacaaatgggaccgcaaggagctctgggcgctacgaaacttctacgtccattcaaagaaattgttgattcgctggagctgaaaaatccatttgttcgtaactggatcgatcttctgtgctttctacttgctggagttaaatctgatggtgctctttctgcagaaatggtttatatgtttgcagaatggtacaaaccaggatgcttgcttgagtaccctctgggtggaactggagcaataatagatgcccttgtgagcggtattgaaaaatttggtggcagacttgctcttcgttctcatgttgaaaagatcttaatagagaatggtcgagcagttggtgtcaagctacaaagtggacaagttatccgtgcaaagaaagcggttgttagcaatgcatctatgtgggacactttggatctgttaccacccgatgctgtcccaaaatcatatgaagatagagtgaaagcaactccacaatgtgaatcgtttatgcatctccaccttggttttgatgcagagaatgctagagaggaccttgggatccatcacattgtggttgatgattggaacaaaggagttgatggtgaacaaaatgttgttttgatatccgttcccagtgttcttagcaaggacctggcaccgcccggaaagcacattcttcatgcatatactccagggacagaacctttcagtttgtgggagggactggacaggaaaagtgcagaatatcgaagactgaaggaagaacgttctgaggtgatgtggaaagctgtggagcttgctctcggcccaaaatttagccgcgaaaaatgcgacgtgaaattggtcgggacaccgctaacgcacaggagatttctccgaaggaacaggggaacctatggtccagccataaaagccggagaagccactttccctgggcaagcaacaccgatcccccagctcttttgctgcggtgactcgacctttccagggatcggagtgccggcagttgcggccagcggcgcgattgtggcgaacacgctggttccggtgtcgcagcattcagagctccttgacgctgttggaatctgagtggcagatacgtccgtcggtcctgaacgataatcaaagattttcccactgctgttggaaaaagatcgtatggctgaatggagaagaagacgacgacgacgaccgatacagtagagttttctagtcagaacggagactgggaaaatatgttgtacagtatattatttactacgactgcatgaagcttgtgctgcttctgacaaattggtcgcctcgttcgcctgcatgctccttgtattgttctaccgaaagctctgtggcgcatgcaggccttttgtcggacattttttttttctggtatacggaggaaggaccatgtgcttgtttgtacaactctagtcgcagtttgctgaagtccttgaacgacggcaacaaatgccagctgcgctgtcttttcattggagggcagcactggcctggttgttgtttattattattattattattattattattattattattattatta

SEQ ID NO: 13664 - DNA, 1067 bp, Zea Mays
atctcctctccgttctcaccaccgacaggggcgtctgtctcctccccgctgccataaacgcaggctcacgcggacgcctccctcccgtgccaagcgcccaagaccaaacccaccagcacagcaccaattcaaccgcgacccaacccaccgccccgcaccccattcccgcaccctcctcccccagatctccggccgcgacgacgccatgacggccaagggcggcgccacgccgtcccccggcggcgcgggcccccgcggcggggaacggccgcctcttcaccgtcgggctggtcaccgcctggtactcctccaacatcggcgtgctcctgctcaacaagtacctcctcagcaactacggcttcaagtaccccatcttcctcaccatgtgccacatgtccgcctgcgccctgctctcctacgccgccatcgcctggctgcgcgtcgtgcccatgcagctcgtgcgctcccgcgtccagctcgccaagatcgccgcgctcagcctcgtcttctgcggctccgtcgtctccggcaacgtctcgctgcgctacctccccgtctccttcaaccaggcggtcggcgccaccacgcctttcttcaccgccgtcttcgcctacatcatgaccgtcaagcgcgagtcctgggtcacctacctcaccctcgtgcccgtcgtcaccggagtcatcatcgccagcggcggcgagcctagctttcatctgtttggattcatcatgtgcataggagcaactgcagcaagggcgttgaagacagtattgcaaggaattcttctgtcttccgatggggagaagcttaattctatgaatctgttgttgtacatggctccaatcgctgttatcttcttgcttcctgcaactatctttatggaggataatgttgtcggcgttacaattgagcttgcaaagaaggatttcacgattgtttggttgcttttgttcaattcttgcttgtcgtattttgtcaatttgaccaatttcttggtgaccaagcatactagtgcactgactctacagatgcataagcatcagactactctatcttggttttgttga

SEQ ID NO: 13665 - DNA, 2033 bp, Zea Mays
tcgatccggatctggatgtggcgatcgtgaaggcgactaaccacgtggagtgcccgcctaaggagcgacacctgcgcagggttgttgcagcgacgtccatcaccaggcctcgggcagatgtcgcctactgcatccacgcgcttgcccgccgtcttgccaagacccgcaactggatcgttgctctaaaagcacttgtagtgatccatagacttcttcgcgagggtgatcctacatttcgagaagagcttctcaactttacacagaggggacggatcctgcaactttcaaactttaaggatgactccagtccaattgcttgggattgttctgcctgggtgcgcacatatggtttgtatttggaggaaaggttggaatgcttcagagttctgaaatatgatgtcgaagctgagcgcttgtccaaacaaggtcaaggtcctgaaaagggtcacagtagaacgagagagttggattcacaggatctgttagagcagctgccagcattgcagcagttactgtaccgacttgttggatgtcggcctgaaggagctgcaaataataactacttggtgcaatatgctcttgctttggtgctaaaagaaagctttaaaatttattgtgcaataaatgatggaatcataaacctcgttgataagttttttgagatgccaagacatgatgcacttaaagctcttgaaatctacagaagggctggccaacaggctgggaatctatctgatttctacgagaattgccggggattagaacttgctaggaattttcagtttcccactctgagggagccaccacaaacatttcttgctactatggaggactatgtgaaggaggctccacgcatggtcccagttcgagaacccctggaacttcctgagaggctgcttcttacatacaaacctgaagaatcagaggaaattcttgagcctgctcctgttgaagaggaaaaagtaccagttgaagaacctgttcttgtaccacctgttactgaagttgtttcacctcctcccaaggctgaggtgcccgatactggtgacttactgggcttagatgatacaaatcctgctgtatcagctatagaggaaagcaatgctcttgccttggctattgttccaacagatggcgcttcaacaactggtaacactgcatttcaagataaggggtttgatcctacaggatgggaacttgcccttgttactgcaccaagcaatacaacttcatctacttctgttggtcaattgggtggtggactcgacaagctcattttggagagcctttatgatgatggggcctacaggcagaggcaacaacaacagctgtatggttcagcagctcctaatccattcatggcaaatgatcctttcgcgatgtcgaaccaagttgctcctccaccatcagttcaaatggctgccatgtctcagcagcatcagcaaatcccaacgatgatgcaaccaaatccctttggaccacctatgcatccacaggtgagcatggcccctgcaacaaacaatccctttctggatgctggcttcggggcattcccagcggcgaacaacggccatcagcaacacaacccatttggcagtgcccaacttctgtaggtcacttagtcacaagagcaaatttgtgccccagcagatgcgatttttgtgtgattatatcatgcattgtgctggacctttcttgcatgtgacgcgtgtattatgttatggcttcaccacacggagagctgtgcctatgtcgtgacccaactcttgttgtaaagaaattagtcacctgtgtaacatccaatatatgtcaataaacagtaggcagtgttattacatctataaacaaaagaacagtggtatgtaggaaattcttaatattgtttattccattgctttttatcttcttggaaagctgttccgttgttgtttgattgccactcttttgcatgcattgtgattgatcatcatgtgctcattcgaatattctaagccaataatggagcgttgctgtagctactacctttatatttt

SEQ ID NO: 13666 - DNA, 1116 bp, Zea Mays
ctccaaccgtccgtgatggatcagtcctcgagtggtggcacagcgttcagcaaaagcgtctggacggtgaaggagtatgtcggcggcggcgactccccatacgtcaccctgtactaccacagcttcgacggagagcaaggtttccccgggaacctcgacgcgtacgtgacgtaccgggtgtcgggcccgtacacgctgggcgtgcacatgagcgcgacggcgctggacagggcgacgccggtgaacctgctgctgcacgcgtactggaacctgggcgggcagggcagcggggacgtcctgggccacgagctccggctgcacgcgtcgcggtacgccgtgctggacgaggagctcctgccttcgtcggggcgcgtcgcgcccgtcgccggcacgccgctggacttccggacgcccacgcccatcggcgcgcgcatccgccaggtcacgggcgggaaggtcgtcgggtacgacgccaactacgtcgtcgacggggaagggatgcggcccgtggcgcaggtccgggacggcgcgtccggcagggcggtggagctgtgggcgaaccaggccaccgtgcagctctacaccgggaactggctcaaccacacccaggggaagggcggcggggtgtacgaccagtacgccgggttcacgctggagaccatggggtacgtggacgcagtgaaccaccccgagttcccgtctcagaccctgttgcccggacaggagtacaagcacgacatggtcttcaagttctcgttctagcaggtgcatggtttggtttgatgtacaacgttcgttattggtgtttgagacgtacctaggcgaatactgagggtttgatcagctgccctgcaacaacagagtcagtggatttttttaaaacacacaaactatgcattaatcaatgacgcaacagatcactgtccaaaatatttttcgtttcctgaaaattttcaccaagagaaacaaccaaaggaatcaaaaagaaaagaaaaaaagggtaaaggtacaaacgttagccctcctgtcctgcgacacctcaggtacaaacatgtatgtaccacctccctagcgtgtgctgtatataccatgccatgcatgcggtctttagaactt

SEQ ID NO: 13667 - DNA, 1142 bp, Zea Mays
tttttttttggaaaaaaaacgaaaaaaaaacagggcgccctcacggcgaactcccacctcctatcgcccctcacctctcctttctctctctagccccgcacaaatctctcctcccctctcgccctcgccgcattgcccgccgacgaccccccggcccccgccggatagagaggaggaggagcggcgcggctgcgggagagccgggcggcggcggcggagcgggcttcatgtgcgacctagtggcccgcacgggccggcatcagcagcggtacgaggatggccgtcggctagtggccggatgcataccatttaggtatagagctaacaatgatgaaacctctggtgacaaaactaagaaactcgtggaagttctcatgataaattcccaaagcggacctggtcttttgtttccaaagggaggatgggagaatgatgaaactgttgaagaggcagcagctcgagaagctatagaagaagctggagttcgaggtgatatagtgcattttctggggctctatgacttcaaaagcaagacgcatcaagatgcgtgctgccctgagggtatgtgcagagctgcagtgtttgcgctgcatgtaaaggaagagctggcctcatggcctgagcagagcacccgacagaggacctggctcacggtccctgaagctgcatcaagttgccgataccagtggatgcaagaggccttgctgacaggcttctctgactggcacgacaagtggagcagaggcggcggcggcacaaactgtgacccggcctaactgctgacaggcccatctgcagtcgtccaatttgttcatctcctctctttccctaggcccccaaccttgcagaatgcaataatacagtgtacttgtcttgatgctgggttggtcattgacatgttatcttagttgtagtgggacgaggtacatctcatcaagacgagaattctcacaacttttaagtgtcaattctcgtgccctattatttctcggtttcatccgctgtcgtcgcggtgctgcagcctgcaggcacgcgccgcacgcattttgtaactccgctcctgattctggagatgcatatgctatatgtatgaactggtataactttgaaatcaaaagttgccactgttgactcgagtcgcc

SEQ ID NO: 13668 - DNA, 664 bp, Zea Mays
ggataatagatgcaagctttacccctgcatttttgtagagaggaagttcatgactacctgaaaagcctttgccctgatctccacattactggaggtgaatatgatgagtatgctcgatacccagagactaagacacttacaattggtcagtttaagcttgggctgtgccatggtcatcaggttgttccatggggcgacctggactccctggcgatgctccagcggcagctggacgtggacatcctggtgaccgggcacagccatcagttcaaggcatataagcacgagggaggcgtggtgatcaaccctggctctgccacgggcgcctacagcagcatcacttacgacgtgaacccaagctttgtgctgatggacatcgaaggactccgtgtggtggtgtacgtctacgagctgattgacggcgaggtgaaggtggacaagatcgacttcaagaaagcagcgacgatgcaagcctagcactactatccttccacggtgtgattggtttcaagacacgtctaggttctgtttttttttctcttcttgattcagagctccctcaacactctctttctaccacttgtgctaacctgttcatgtgcaaataactagtcaggtttggaagtttactatttttacagttttgaaataatactatagtatt

SEQ ID NO: 13669 - DNA, 3560 bp, Zea Mays
gttttcatccctacttggaggaaatgaggaattaggtagaggggaagcatctgctatcattttgttttcttcgaagtaatccaagaaaagttgcttccagatgtcaactgcaaaagtgttagatcctgcttttcaaggggctggccaaaaagttgggacagaaatatggcggattgaagattttaagccagttccgctgccaaaatctgattatggtaaattctactgtggagattcatacatagttctgcagacgacctgtactaaaggtggtgcctatctatatgatatccacttctggattgggaaagattcgagtcaagatgaagctgggactgcagcaatcaagacagttgaacttgatgccatccttgggggtcgtgcaatccaacatagggaactccaaggttatgaatctgacaaattcttgtcatacttcaagccttgcattatacctttggagggtggtttcgcctctgggttcaaaaagcctgaagaggagaagtttgaaacacggttgtatatttgcagagggaagagagctattcgggttaaagaggttcccttcgcccggtcatcattaaaccatgatgatgtgtttgtcttagatgctgaaaataagatataccagtttaatggtgctaactccaatatccaagaaagggccaaagcgttggaagtaatccaacatttaaaggagaagtaccatgggggtgtttgcgatgttgcgatcgttgatgatgggaaattacaggcagagtcagactctggtgaattctgggtcctttttggaggttttgcaccaattgggaaaaaaaccgtgagtgatgatgatgttgtacttgaaactacagcaccaaggctgtacagcatcaatgatggccaattgaagctggaagaaacagctcttacaaaagccgtgcttgaaaataccaaatgtttcttacttgactgtggggctgaaatatatgtatgggttggccgggtaacacaaatggaggatagaaaatctgccactaaagcagttgaggaatttcttattaatcaaaagcgtccaaagacaacgagggtaactcaagtgattcaaggttatgagagtcatgctttcaagtccaagtttgaatcatggccagtgggtaatgctactgggagccctggcgcagaggaagggcggggaaaagttgcagctttattgaagcaacaaggtgttgatctcaaaggagctgcaaaaagcaccactccagtaaatgaggaagttcctcctttgcttgaaggcggtggaaagcttgaggtatggtgtgttgatggcaacgctaagactgctctgccaaaagaggatattggaaagttttacagtggagactgttatatcattctctatacgtatcattcgggcgacaagaaagaagaatactatctcagctactggattgggaaggatagcttggtggacgatcaagtgtcggcatctcaaataactaatacagtgtggaattcattgaaaggacggccagttctgggtcgtatataccaagggaaggagccaccacagtttgttgcacttttccagcccatgattatcttgaagggtggaattggatctggatacaagaagctcatagaagaaaagggtgcgacgggtgagacttatactactgaaggcatagctctaattcgagtatctgggacatctatccacaacaacaagactcttcaagtcgatacggtggcaacatctttaagctcaatggagtgtttcatactgcaatctggaaatgctatgtttacatggtttggcaattctagcacatatgagcaacagcagtgggcagcaaaagttgctgaatttttgaagcctggcgttgcagtgaagcactgcaaggaggggacagagagttcaggtttctggtttgctcttggaggaaaacagagttatacaaataaaaatgctcctcaggatattattactagagagcctcacttgtatgcattctcattcaagaacgggagactggaggtaactgagatcttcaacttttcccaagatgatttgttaactgaagacatgatgatacttgacacacatggtgaggttttcatttggattggtcagtgcgtggaatcaaaagagaaacagaaggcatttgatattggccagaaatacgtggagcatgcaaattctattgatgatctttctccatatgcaccactatataaagttatggaagggaatgagccatgcttcttcaagacatatttctcttgggataacacaaaatctttggttcatggaaattccttccagaagaaactctcactgctttttggattgcgttctgagggtgcatctaggagctctggtaatggtggaccaactcaaagggcatctgcattagcagctctatcatctgcattcaatccatcgtctcaacaaaggctctctaatgagaggcctaaaagcacaggcgatggacccactcaacgcgcctcagcactggctgccctatctaatgcattcaattcatccttaaaacccaaaacaccacctccatctcgctcaggtcaaggttcccaaagagcagctgccgtagctgcactatcctctgtgctgactgctgagcaatctggatcttcagaaaatctacgagccaaagctagcagcacaggagataagactgatgtcgataggcctgtcataactccagctggaccatctggtccatcttctcctcagtctgaagctggggagtccaatgtgtttcgccaggaaaaagatgctgcagtagatggggcaccatctgacactgatggagcagtggctgagacccgagaggaagaaacgacagagaatgttggtgaagcgacatttagctatgaccgcttgatatctaaatctaccgatccagtccgtgggatagattacaaacgcagagaggcatacttatctgatagtgagttccaaagtgtttttggcatgaccaaggatgcattctaccgacagccaaattggaagcaagaactacagaagcgaaaagcagatctcttctaaagagaacacgccttgtctcaagcgcctgctagaaaatgcgaccctctcgtcgtgaatggtcggtcccatgagagtaagtctcaatatattgctggttatttctgaggacgggctactggtggctttgctcggttgttttttttttgcaaccaattttataggccgattcttttatttgtacatggcctgggttgtgctgcttgcgaggtcctaagatgctcatagctttgtgttgtgactgtccatatgtgtatatcgttttttttcatcagtttgttacgtatgggcatatcctggtaggttgtcaattgtattgtcattcagatgtattgcacacgaaatacttgtgctgtctgtttgttgttgatggttggcagttgttttgtttgggatttgaaacacttgattggatttctctgcccgcacaagttttcgtgtggctttgcattcccccctcccttttcatagacaagcaacatgcaatgcttgtgacctgtcaagagaacataac

SEQ ID NO: 13670 - DNA, 1268 bp, Zea Mays
cacatgtatggtggaacattctgcagatatttcattgcatccatactcttatggagattaaggttgcatgttgatttgttgccacctagcttcaaacatctgcagtttggccgatttcttaaaaatggttttctgctacttgcacgagttattgccgcaacttgttgtgtgacactatccgcttcaatggccgcacggctaggttcaactccaatggctgcattccagatctgcttgcaaacctggttggcttgctcacttcttgccgatggattggcttttgctggacaagccatacttgcaagtgcatttgctcgtaaggactatccgaaggccaccgccacagcttctcgtatcttgcagctggccttggtcttgggacttctcctaagcatacttcttggtgttggtctgcgcatagggtccagattatttacatccgatcagggtgtactgcatcatatctacataggaataccgtttgtctgccttactcaaccaatcaacgctctggcttttgtttttgatggtatcaattacggagcatcagatttcggatatgctgcctactcaatggtccttgttgccgttgtcagtatcatttgcatcctcactcttgaaagttatggcgggtttattggaatctggatagctctggtgatctacatgagcctccggatgtttgctggattttggaggatagggacggcacaagggccctgggcttatcttcgcggctgaacatagaggcagagctagtaacctgactcaccagcacgacgagcacatggtttattattgttcacggaagtggcagtccttgatgtggtctcgtaaatatgccatacggactcagggtctttttggtttgctacctaacttgtcatactttgcctaacttttctgcttaaggttagttcttcaattcggacaactaaccttaggcaaagtgtgacgcagttagccacgagccaaacagtccctcagttcgtcaaacttaggtctgtgagtttggcggatgtgtaggcactcacatcgttaaacaaatctgttgtactggcctagattgtgacagatgcaaaattatgtcatggttggctactatgcgtagcagggctgcaatacatgtttccatcaggaaggctgtcacaagtttaacacacttgttgtaccaaggcgtgtgaactatagctattttttctgtcctaggacaaactgtgccacgacgtgttgtagctatttttctgtcccgtattcatatgagcaga

SEQ ID NO: 13671 - DNA, 2518 bp, Zea Mays
gcgtcgcataggcgtccagacgctcggataattctaggcgccttgctcgcctaggcgccgcttaggcgttaagatggagctggcggcaaagggacttggggcaaactaattgagactgatgcagaggcatgccttgatcgaaatgatccaaattatgacagtggtgaggagccatatgagttagttgaggcccctgtttcaaccccactagaagactacaagaaatctgttgtccctttaattgaggaatatttcagcaatggggatgtaaaattagctgcttctgatcttaaagagttgggtcatgatggtttccactgttactttgtcaagaagcttgtttccacagcaatggataggcatgacaaggagaaagagatggcatcagtgcttctgtcgtatctttatggcaacgtggtcagttcaactcaaattaggctgggatttgtgctgctattagaggctgttgatgacttggctgttgacatacctgatgtggttgatgtgctcgcccttttcattgcacgtgcagttgttgatgacattctgccacctgctttcctcagcaatgcaaaagtgagtctgtcaggatcttcaaagggtatgcaggttgtacaaattgcagagaaaagctatctttcagcaccccaccatgcagagttaattgagcgacgatggggtggttcaacccacatcacagtagaagaggtgaagaggaggattgctgatcttctgaaggaatacatcagaaatggtgatacagctgaggcttgtaggtgcattagagaattggcagtgccgtttttccatcatgaggtggtgaagcgagctcttactcttggaatggagagtccagctgctgaagctcttattgtcaagcttctgaaggaagcatctgaagaatgtttagtaagctctagtcagatgatgaaaggattccaccgtgttgctgagagtcttgatgatctcattcttgacataccatctgcaaagtctgaatttcagttgttggtatcaaaagccatttctgagggatggttagattcttcctatgtgaactcaggtgtcaacggaagcgttgaagacgatgaacatgagaagctggctaggtacaagagggaggctgtatccataatacacgaatactttttctctgatgatacaacagaggtcatccgtagtgtcaaagagcttggttatccggaatacaatccgatcttcgtcaagaagctcataacaattgctatggaccgcaagaacagggagaaagaaatggcatcggttcttctcccttcattaagcatggagctgttctcgtctgaagacatcgccaagggatttgtaatgctccttgaatctgcagaagacaccgcgctggacatattggatgcctcagatgagctgggactgttcctagccagggctgtgattgatgacgttctcgcacctctaaacttggatgagattagcagcaagcttccaccaaactgcagtggggctgaaacattgaacatggcacgctcccttgcgtcggcccgtcatgccggtgagaggcttctgaggtgctggggcggtggaaccggatgggctgtggaggatgccaaggacaagataacaaagctcctggaggagtatgagagtggaggcgatgtaggggaggcatgcaactgcatccgtgagctgggtatgtctttcttcaaccatgaagttgtcaagaaggcgctcgtgatggcaatggagaagaagaacgagaggaccctgaacctgctgcaggagtgctttggtgaagggatcataaccatcaaccagatgaccaaggggttctcaagggtcagggatgggctcgacgatctggctctcgacattcctgatgccagggagaagttcctttcctatgtgcagcgcgcgaagaagagtggatggctcctgcctgggttcggtgtggcatcttcggcttgaacagctgggcagaagagaagtacgaagctgaagcggctcagcaaacccagtttggatgtgtgttttcgtcgttcgtggttgcccttgcgcctaggttagcggagcgagcccttcctggttgcggtggtggtggcttgtgtaggtctcgcatctgacatgttcatgctgttcttgtttcatttcatttaactctccatagaccctttttttttacatcaagctaaaacagagaagagaaaaaaaagaccatgttgtaaaagttctcccatgctccgcctgcattgcggccggttttttcatcctcatttagctgcaatcgtgcgttcctgccctctcatggccgccgtagctgtttttctatgccattggatgcttggattgtgattgctagtttgttactcttttattctttgtggaaatggtgtggcctggtgaatgcctggattgctagcatgcaccgccggccgcccggcactgtatctttcgatgctttctttgttttatgatgcgacgaatgctcatggacttggatttcagagactatggcatgggctttttc

SEQ ID NO: 13672 - DNA, 1344 bp, Zea Mays
cggccttgaataaacgcactttgtcgagagaaagcaaggattgaggctcaggtgaaggctgctgaagcagctgcacaacaaaagtttgaggaagaaatgagggtgaagcgagagcaggaaagggaagcagcacggctggcagtacgcatggtacaacctgcttgcggttttctgacctgcaagtttatatgcttgatggtatgaagggataaatctcctcttgtgcagatgaagaagactgttgatattgacaacagtgacttcctaaaggagctggagaacttcagcaaaacgtggcagtcgaatccacctggcaaattaatcgtggattttattgatggggacttgccaccggggttagggagccctctggagaggcttggcctgttcatgaagaacgatctcgaggatgaggtggaacaggaagtcgaggacagcgcatcaccctcgatggacgttgacatgaggaaagatttagcagggcatgaaatgcaagacagcatatcacccgtgaaggtcattggcacgaaggatgacttccagggagcggacattaacacgaggaaagatttccaggaagacgcagcagggcatgaaatgcaagactgcatatcagccgtgaaggttattggcacgaaggatgacttccagggagctgtagggcatgaaatggcgaacagcctatcaccatccactttcgttgacacaaagaaatattccgaagggacagaacatgagatggtggatagcatatcgcctttgatggatcctaacaccgaggaaggggagatcagctgctgacgttagctacacttgtcatccacatcatttgttgagttcgtgaggcagacatccttgctgggttgttggattaggcgacatcataagcagagtgacgaagaaacgctattcccctctggttgtgtcgtagaacaatgtggagaacatgtgtcagccgaactgagtagtggttttggctttgttgcggttttttttcctgtcgtggtcttgtcagtcgggcactccgctgtatgctgggttacctgagctcgtcagctggatgacctgtataaaaacatgatgaaattagggaggggttaatttagtgctagtatatattgtaggtgtaggactgtaggagcttatggtggagccggctgcagcacacaagctatagcattgttctcagatttggtcagcgcgccgtagtaccttgttactgtattcattctaaaacttgaataaaatgatgccagtcgcacaagttactgtaggagtagctatgacatgttatttgaaatactgtgttcggtttattcgatgaaagtgacgcttcctgagttc

SEQ ID NO: 13673 - DNA, 1108 bp, Zea Mays
caaggcttgcgtgttctcaccccttgcgttctcttctgttctctctctctcacacaaggtctcaccctccctgtatccctctgaccctctcggcggcgactgggcgacagccgctgtctcactacgcctggtgcccaggtatctctgccggcgacgagcacctgccaggggtatgggaatggaggtcgttggtgctgaagcagcaccagcagagatcaaagtatctgatgatgtgaatctattccaagagaaggaaagcaaagcaactgctaaagaacgtgaggaggcagctgtttttggttcagagacaactaccaatgtcactgatctggcacctccaacggatgtgaaggatgagtggcctgaacctaagcaaacttatgccttctacttcatcaaggtccgctcatttgaggatcctaaactgagggcaaaactcgagcaagctgacaaagaattccagaagaagatccaagctcgttctaaacttatcgaggcagtaagagccaagaaggcagagcgctccagtattatcgcggagctgaagccattgagcgctgagaacaagcaatataatggagttgtgaatgagaagataaaggagatggagcctcttcggaacagcttgggcaagtttcgtgaggaaaacaatgccatgagagcacagagtgcaggtttatgctcttctatcgaagaccttgacctaacgatcaagatgctgaatgatcgcatcgtacatgagagcatacctttatctgaggagaagcgtctggtgaaagaaattaaagaccttgaaaaaaccagatcgaaagtcatctctaatgctgctaacagggctaaactgcaaggtacagtggttgaaaaagaggctatacaggaccaggtcaaaatcattggggagggcattgatgaaataaagaaagaaagacaggctgtaagatctaagattaaggtcctggaggatgagctaaaacttgttgatgctgagattgcatcgcttcaagaagatttagatgcagcaactgccagaaaggacaaggcatatgaattgttgcaagaattgagagcaggtcgcgatgcgaaacgatactattcttctgtatttgat

SEQ ID NO: 13674 - DNA, 134 bp, Zea Mays
tcgaacgcgagatttacaaggttgaggaccctgtggtgaaggaatccgcaggagccctctttgaccggatgtggggcccccacggtcgggaggtggtcagggagcggtccgacacggcgaggggtcaggtaatg

SEQ ID NO: 13675 - DNA, 1056 bp, Zea Mays
cagttcagctacatcagtcaatccacacacgacaccccgcacagccacacgcggccgcgctgggaacgagacttggtcgcagtcgctcccggctcacggctccttgctgcacgccgtatgctgtcgcccgcaccacaagtccacgaccagcactcccttcatagacccccctccggcgaatccctcaccaatccagcgttcacacgtccttcttgcttcagtccactccaaggttaggtggacaatatgtcaagctctaaccagatgtgttctgatggcaagtttgggagaggtcctcgggagcttagtggtgctgtggacttaattagtcgctacaagctgctgaatcatcatagtttcttttgcaagaagcctttgccattggcaatttcagatacaaattaccttaacaatgttgtgggtgacacagaaattcgtaagggggaagggatggagttggaccaactctttcagaactcatgttcaagtgagaagactgcttacattcagccatttgacatggaaacactaggacaagcatttcagctgcgagaaactgcaccagtagacttgccttctgctgaaaaaggtacaccaaccatatctgggaaatccaaggtcaagtccaaggataaagtgaagaaacataagaaacacaaagagaaagatagagacaaggagaaggagcagaagaaacacaaacatcggcataaagatcggagtaaagataaagataaagataaggacaaagacaaagaaaagaaaaaggacaagagtgggaatcatgatttaggtggtgatcattccaagaaacatgagaagaagagaaagcaagaagtaactggaagttcagcaaatgtccaaaatcacaagaaaacacaaaagcacaaaattcagtgaaatttatgatggacttcgttaattgtcagcagtgcatgtttctattttagttcaactccatttatgttgttaatgagtggctctgaagtgttccttttccatatcttttctggcaaaggcgtgcagccaggggcacaacccactcagcgagggtga

SEQ ID NO: 13676 - DNA, 799 bp, Zea Mays
cggggttgttgatttcagccctaccagatcaaatttgatgaagggattgttggtacaccacagttgaccgactccattgtgctaccagagaagtttgagttatttggacagaacatcgacctgagtccactgaaaggcatattttcttccatcgaaaatgcagcatcctcggttgcaaagaccatatctgagcagcctccgctcaaaataccgatcaggacaaacaatgctgaatcgtggttgcttacgacataccttgacgaagagctcaggatctccagaggcgatggcagcagcatctttgtgctgttcaaggagggaagtactcttctatactgagatccaaatcccgagtccatgatcgttgaagctgaaccgtgaagtagttatactgcttatgcttttctttcttatagtaatatgctccgtctcaaaataagtcaatttctagaatcacttaaagtcaaattatcttaagtttgaccaattttataggaaaggcaccatcgtctatgtctctatgacaccaaatgagtacattatgaaaaatattttatggtgcattagtgacactaattcagtgccatgctctttttatgaatttggtcaaacttaaaaatagtttgatttaagataactctgagaaattgatttattttgggacagagagaatgtttctgggttgtcttgtaaatacagttcttgtcattagagtatatgatgactaggaccggtttaatccgaattatataaactctctatatatcagcgaaccccttttttatagttaactgatcgc

SEQ ID NO: 13677 - DNA, 1259 bp, Zea Mays
gagatcgtcttcctgatattatctctattttaggctttcatcaaggattccaagtttacgcagcaggagcttccagcttgcaagccgattcttactccaaaatgggttatttcagtatttgttcttgttggtgtgatttttgtcccgatcggtattgtttcgctgcgagcttcacatcaagttgtcgagatcgttgatcggtatgatgacgcatgcatccctgctaatgtcactgagaagcttgcttacatccagaatgatagtataccaaaaacctgcacaagaaatctgacgattacaaaggatatgaaacaaccgatttttgtatattatcagctggataacttttaccagaatcataggaggtatgtcaagagccgtaacgacgcacaactaagagataaaagtaaggcgagtgacactaccaattgtgatcccgaggccaaaacagtagatggaaagccaattgtgccttgcggtcttattgcatggagcctgttcaatgatacatataccctcatccacaacaataaaaccttgagagtggacaagaaagacatctcttggaagagtgacagagaccacaagtttgggagtgatgtcttccccacgaacttccagaaaggacctcttcaaggtggaaaaatacttaatccaaaaatcccgttgagtgaacaagaggaccttattgtttggatgcggactgcagcgcttccaacattcagaaagctgtatggtaggatacatgttgatctcaaggaaaacgatacaattacagttcagttggagaacaactacaacacctatagcttcagtggcaagaagaagctggtgctttctactgcaacctggattggtggaaagaacgattttctgggccttgcatatctcactgttggtggaatctgcttcgttttggcatttgcattcaccttgctatacttgataaaaccaaggaaaatgggagataacaactacttgtcatggaacagacccactttaggtcgctgatatggttttgaagttaaatgtttacacggacaacaaattcatttatggttcagatgtatcttgtaccacatcgaatttttattcatgagcattggtgtagaatacatacagagtaggcatgtgtatacgtgcgacaactttggatccatccttgcacagattgtacattaaactgaaacagatagctttatgttctccaaaattgtataatcagaagttaatgtcagtttcgatgctttgctcttctt

SEQ ID NO: 13678 - DNA, 92 bp, Zea Mays
ctcaatagaagaaacaaacgagtaattctcacaaaaatttgctaaacgtgagcgagtggttactcccttgctaatatcacctagaatctgat

SEQ ID NO: 13679 - DNA, 215 bp, Zea Mays
agggctacggtccccctcctcgtcgtcgccagctaggctgggctatctgagcgcggcggcggcggcaacgcacatcggatgccgcgggaagggaaggaagaagggttcaggcggccgattgggggcggaattgctccctcggcgactgcgaggggaaggaggggtactcggcggggttgctgacgtcgtcgcacgcccgtgaggaggaagcagaa

SEQ ID NO: 13680 - DNA, 1087 bp, Zea Mays
gcagcttaaccacatacatatctatattcaaactacattgtataaatattacaatctacaatgtaaagcgatataaaatggtgttttagtgatcatatatgtatattgtacagttcactcatattgatcgtcaaaaacactttttgcgttgttttgtactataaattatattgtttgtatagtgtattttaaatattagtatcattacgagtaatctggttcttaccgtctctaatccggagtccctacccccgacctcgcgatcgcagttcgggttgccatatatacatacaacaacacccggtcccaaagaaaggccacacacagccgcactcgcacagccgccaccaccacctggtccacgtcgccggcggcaatgtgggcccacctggccgtggcgctgttcgtggcgttagccgtggctcccccggcccgcggctccgacgtgccttcgttcccgctgtcgcaggcgcagtccccgtccaactcctcgtccccgtccaacgccgcctcgcggccgtgccacctggacctctcggccgagctcttcggcggggtagccgcggcgtgcggcgccggcgggggcccgggctcgctggaccgcggccgctgctgcccggtcctggcggcctggctcttcgcggcgcacgcgcgcaccgcgctgtccgtgcccccggcgcctccaccctcggcgctagcgggggacgagggaatggggcccgacggcggcgacgacgggcccatggtaccgtacgacaaccagaggtgtgtcgacgcgctgggcgccgcgctggagcggcgcggggtggcgctgccccggcccaacgcgacgtgcgacacggtgctctgcttctgcggcatccggctccaccagatcggctcgctccgctgccccgctgcgttcgccgtcaaagctggcgccgcggccaggaacgccacgcccaccgccgcggtgaaggccctggagaagagctgccgcaacgcctcctacgccggctgctcgcgatgcgtgcagtccctgcaaaagaactccatcgcggcacgctctctccctccgcgggtgtttcgagggctggctgcatcgtgg

SEQ ID NO: 13681 - DNA, 872 bp, Zea Mays
tacctcttttggtgagagatgagcttgaacaattattggatgacgacgatgacatggctgatctttatttgtctagaaagttggctggggcatcttcccctgtcagtggttctggtggaccaaattggttccctgcctccccaactattggttcaaaaatatcaagagcaagcagagccagtgcagctactgtgcatggaaatgagaatgatgttgaagagctagagatgttgctggaggcatatttcatgcaagttgatggcacattaaacaaattgacaacgttgagagagtacatcgatgacacggaagattacatcaatatccagctagagttattcttgagttctggtaccgtctgtctgtcgctgtactcattagttgctggagtctttggtatgaatattccgtatacctggaatgacggccacggatacatcttcaaatgggtggttcttgtatcagggcttttttgtgcctttatatttgtctccattgttgcttacgcacgacacaaggggctcgtcggatcctgaatagctgaaataaccgcgtacttgcttccctcaactgtaaatttgagccagtgagcatcgactttgcggggtgattcatctgttgtaccaaattcggtagtatcaaattggggatgttgaataggaactgtaataggaaaaagttaatgcaaaagaaatatgttatgattgcccccggttttataaagtttgcaccgaaagattcaaacaaatatgttattaaccaggtgcctctttctgaaatgattttcatagctatgcacaagtccatgcatcatctttttttttttgaaattttgcctgcattatctttgaattttcgtttagtacgtgtta

SEQ ID NO: 13682 - DNA, 2114 bp, Zea Mays
gtagctgcacgaggcacgagctgatttaattgatcggcgttacatcatggtaggtgacttctctgaggacaaccgatctgggatcaatcactcgttgcaccggatcagcgctatccggaaccggaaagctcaaatcataggcctcacttgccgtgttggtcgagctatatctggcagtgcagagatgatccgggaccttgtggtgagtggtggttcaatattggtgattggacctcctggagttgggaaaaccactctgatcagggaaatagctagaattttggcagatgaaggtaagaaacgtgtgatcatagtggacacatctaatgaaataggaggtgatggggatgtacctcactctggcattggacgtgctaggagaatgcaagttcccaaagttactatgcagcacaacgtaatgatcgaagcagttgaaaatcacatgccggaagtaattgttatcgatgagattggtacagaacttgaggcaatggcagctaccactattgctcagagaggtgttcaactagttggaactgctcatggtgtgacaatcgagagcataattaaaaatccttgtttgcaaatgctcgttggagggattgagagtgtgactcttggtgatgaggaagcaaaaaagcggaaggtgcagaaaaccattctcgagagaaaaggacccccaacatttttatgcgctgttgagatgatatcgaaaactgaatgtcgagttcatcacaggttagatgccacagtggatgctattcttgcagggaagcctcctaagtttgaagctcgcaagatgcataataagtctaccgagtttgaaatgccgttggtgatacctgatagagagtatgaaatagaatcactgccactctatcaggaagttatggtcacgaggtcattatcatcagatggcaacttcagcgatgattttgctgcatccaggcaaacaaaaagcaagagtatgccatcagaagataattttggtgataattttgtttatacaaggaaagcaaaagggaataaacctgtgcatggaaagtctctagtccaagtatacacataccagatttcagaagctgatattttacaagtagcaacaatgatgggatttgatgatgaactagatgtaacagatgacattggagcagctgatgtgattcttgcatcgagttctgaaatgaagcagaatccttggattcataatgttgccaaataccacaagcttcccatatttgttgtcaagactaatacgatggctcaaatagttaaggctatcagaatgattgttggaagggacaacacatcatcaagtaagcagcctgaggttatggagggagagatagagattgaggatgatgctccgaaacgtaagccatctttggaggaaattgatgccttggaggaggctcgtcttgcaatcgagtacatcgttattccaggtggggagccagttgagctcctcccaagatgttcagaaatagttgctcggcagctggagctcgtagagagctaccagctacttgctgaaacctttggaagtgactccaattctaggttacagattctccccatgaaaataaccaagaggggttctagtaaagacaatggagcatcaaagcccactaaacaaaccggatcagatttgatcgtcagtgagaatggtggtggctcaagtttttctcggctgccatttctgccaaagtgatcgtctagatcttctgatcaccactgtcgaaaatgtacatcattcctctctcttgttgttcattgtacaacattgtgcagtgttgtaaatagtgtgtcgaatgttgaagaagcgaaagagcaaaagctaactgcaattgccttccattcttttgctggaataaaatccgttcatttctggtgtcagccaggtcagctcacatgctcatgtggaaaaaaattgcacgcggccgtgccgcacgaggccgccggtgcggcccggcaccgattaacgacgcgtggatattcaacggcatctgtatctcatggataaagcctcggacgtatacgcagctcggctaagcctcggacgtatacgcggcttggcttacagaacggctcgctttaccatcgttgcttccata

SEQ ID NO: 13683 - DNA, 2105 bp, Zea Mays
gttgaggaataggaagaattctaattccggcggagcaaaagtttctgaaagttcggatatagttacatttgctgatgtggctggagtagatgaggcaaaagaagagcttgaagaaattgtggagttcttaaggaacccagaaagatatatcccattcataagttgctctgctagtgaatttgttgagctatatgtaggcatgggagcagctcgagtacgtgacctatttgctaaggccaaaaaggaatcgccatcgattatttttatcgatgagattgatgccgttgcaaaaagccgtgatagtcgatatcgcattgtcagtaatgatgaacgtgagcagacattaaaccaattgctcacggaaatggatggctttgataccaactcggctgtcattgtattgggggcaacaaatcgagctgatgttttggatcctgcccttaggcgccctgggagatttgaccgtgtggttatggttgaagctcctgataggtttggaagagaatcaattctaaaagttcatgtgaaaagaagagagcttccactgagtaaagatgtagatctagccaatattgctgcaatgacaactggttttactgggtaaaatttattttatcaatttcttgaccttgtagagatttcaaattgacatgtcaaaaaaacttatactgtacagagcagaccttgcaaacttggtaaacgaagctgctctgttggctgggcgattaaataaagaaatagtggaaaaggttgacttcatccgtgcggttgagcgatctatagcagggatagagaaaaagcatgcaaaattgaagggtaatgaaaaagctgttgttgcgcggcatgaagtaggtcatgcactcgtgggaactgctgtagcaaacctccttcctggacagccacgtgtggagaaattgagtatattgccaagatctggaggtgcattaggcttcacgtacacccctcccgtcacagaggatagatatttactctttgttgatgaactacgtggccgtttagtaacactactgggtgggagggcagcagaggaagttgttttagcaggacgggtttcgactggtgcacttgatgacataagacgtgctactgacatggcctacaaagctgtagcagaatacggtcttagtcagcgcatcgggccaatatcacttgctacactgtcaaatggtggtttagatgactctggtggctctccatggggaaaggaccagggacatctagttgatctcgttcagagggaagtaaaagcgcttttacagtcgtcactggaagtagctctttcagttattcgtgctaatcctgcagttttggaaggcctcggagcatacttagaagagaaagaaaaggttgaaggcgaggagcttcaagagtggctaaaatcggttgttgcatcaaaagagttgacctcttttatcagaggacagcaagagcaagttcttcagctggaagcaggctcctagcgtcaggagtatgcaccgggctcttaaaattaattacttaacaaaagtgactcagcaattagaacatacaatatgagacacaaggtatgcaatggaaaccttcatatactgggaagagacctgtggccatgtgtggtgggttgtatgaacccccacccattcatgctaagacaaaccgggtctgctaagacaaactggtcggatgcccaccctttgttcggtgaatcatgagatcgagccctatacgagaattcaggaaaaaaaaagaaaatctacatgcccgagtgaccatgtaaatatctatcattgcagttcctgaacccttgactacaaaaaaagaaatccagagatgattcatattgagctgtaacattgtacgatcaacctcaggaatattgtaagtgattcagcttcacatgttgttccatagattaggtcggtgttacacatgtaaaagattcttttttggcaatatattcttgtactcaccctattggaagttgttttcctctatataccatcctagaaatgatcaataggataatgcttatacggactatggttcctgtattgagaattgttcttcagaaatcagaatagtgatcgctttttgaaagaataaaa

SEQ ID NO: 13684 - DNA, 76 bp, Zea Mays
ggcgggtaggattggggaggaggcgaccagatggagacgagccgtgaggaggtctgcggatggaggcataaaaggg

SEQ ID NO: 13685 - DNA, 101 bp, Zea Mays
ggtacttgatccctctacctaaccatcagttagatagctccatcctcttgatgagcagacactggagtagacttctcttcagaatctccttcttagcactc

SEQ ID NO: 13686 - DNA, 392 bp, Zea Mays
tgcactactccaccggcgctccacatgccaagcgtggcggcgacggcgagcgtggtcaccgcgtacttgtcctcgatcctgtcccactcctttttcaacgcgtcgacgaactcggtcagctcctcgttggcagcctgaggcgccgccggctcccccgcggccatggccaccacgtccctcgccagccgcttgtacaaggacgacgcggcccgggtctggccctgcgcggcgaggctgaggccgggcagcggcggcagcgcgggcagccccagcctgacggagcgtgctgcaaccttgccgccgcccttggtgacggcggggctcgccgcgcccgtggcagcaggggcggcaggtgccatggtgtggtgtcctgcacgacgcgcgcgcagtga

SEQ ID NO: 13687 - DNA, 1800 bp, Zea Mays
catattactctctcttttttctctggtgcatagtatatatacgtcgattgctgaagctcctgctgacatcaacgtcactacgaatagctcctttgtgctggcggcagataggacatatcgaagggaccctttgaatggcttcaggaaatacccgggcggctggaatatcagtgaagtgcactatttcgcttccgtcggatatacagccattccgctgttcgccattgctctcgtgtggtttgtgatctttttcctggttatgcttgggatttgctgccgtcattgctgttgcccgcatcacacctacaagtattcacgaacagcatatgctctatcattgatacttctaatactgttcacatgtgctgcaattgctggatgtgctatgttatacgatggccagggaaaattccacaagagcacaacaactactctgaagtttgttgttagccaggcaaactatactgttgacaaccttaggaacctatctgatagtttgtctgctgcaaagaaggtcgacatagcacagtcctttttgctgcctcctaatgtgcaaaatgagataaatgaaattcaaggaaagctgaactcatcagctactgatcttgctattaaaacaacagataatgccgcgaagatcaaaaaggtgctaaacagagtgcggcttgctttagttgtcattgcagctgtgatgcttcttctggcatttgttggcttcttgttatccatctttggtctggaattccttgtctctgtcttggttattattggatggatattggttactggaacgtttatcctgtgtggtgtatttcttcttctgcacaatgtcgtttcagatacttgcgttgcaatggaagagtgggttgctcatccgacagaacacacagccctggacgaggttatcccctgcgtggagcctgccacggcgaacgaatccctgtacagaagcaggcaggtgacgttcgagctggtgaacgtggtgaaccaggtgatcaccaacgtgtcgaacaggaacttccccccgcagctgacgcctttgtactacaaccagtcggggccactgatgcctctgctctgcaaccccttcacgcctgatctgagggaccgcaactgcagcagaggagaggttaccttggacaacgcaacccaggtgtggaagaagtacgagtgccagagcaccaccgtctcaggaggagccgagatctgcgcgacggtggggcgtgtgacccccagcatctacgggcagatgaccgcgggcgtgacggtgagccaggggctgtaccagtacgggcctttcctcatccagctgcaggactgcaccttcgtgcgcgacaccttcacgaccatcaaccagggctactgcccggggctggagcgctacagcaagtgggtgtacgtgggcctggtgatggtctcgttggcggtgatgctgtcgctcatcttctgggtgatctacgccagggagcggcggcaccgcgtgtacagcaagcagcaccagccgtacccggtggaggacaagccggcggcgacggtcccgggcgcttgaattgatatggcccgcccgttccagtgctccggcctactcccgtgccgctgtgcatactgtactccgcgcgctagttgggttttacgtggtggtgtaggtggatgatgtaccctggattgttgttcgtttgcttggtgttgctgtatgtttgctgattttaagttgttgtgcattctcgtactgacggtagctggacaatgaattgattgtgttgggattggttattattaggtgttcttcagttcgtttct

SEQ ID NO: 13688 - DNA, 804 bp, Zea Mays
ctgcaactcgagttatttttctgacactatcatcactaatttaatgctagcgtaggcaatgaagcacggaacctatagctgacctagcgagctgatcggctctactcccttctcttgttcctttcttctctccgggctcacctaccggatcatcctccatggccaccctcgccttgccgccgaccaccaaggctgccggccaggacgccacccaggaaagcctagcagagtgaaacgttggccaatgtagaaactgcagtggaggtcgtggagcatgtcgccgaggtgacggagaagttggctgcagatgcggccagttccctgccagagaacggatccctgcacaaggttgccgtggaggtggagtgcgttgctgaagcggtggataaggatgcacatgaggttgaagcagtcatcgataaggttgaggaggtgagcgagaagatcgatgctacagtggaaccggtcatcgaagagcttgagaaggacctgataccgaaccccagatcctctagtggatcagatgcccagaaatgacagttcatgtaaattgggagggaaagctggcgtgtgcgtgtccctggctgtctgtaaatttgtaaatctctcttcgttgtttcctaatgccctatgcgtgtaaactgtaaatacaactaagatacctcatgaactgcaacgacgccacggaatagtaagacgtggtacatgattgtgtcattgtgtgtgtgtggctgtgcgtgctcgaatctggacatctgattgtcaaaagtactggcaacatttacttgcaaaccaaacgccatg

SEQ ID NO: 13689 - DNA, 2345 bp, Zea Mays
tcaatccgtcaaaatgttgaactgtaaagtgaactattatttgatttctaaactgagggatgacattcaaaagcttcaagcttctgaggctgaaataaaggcactatctttcaattatgctgcaatgttgaaggaaaaagaggagcaactgggaaaacttcgtgaagaaaatgggtctcttaaaagaagcttggagagctgtaaggcagtttcagccaattctaatggcactttggaaagatcacctagagtgcaaaggaatgcagttcaggaaaattcattgaatctcaccaagcagaacggatatggtggtggttcttctcacagtacccagacaaatggtctgcatccaatggcaggttatcagaagggaagtatatcggaggaagagagatcatcctttactaccaagcaggctagtcttgaaaatgaaatcaaacaattgaaacagcagctcagcaataattctgagaaagaaactgaaattaggaggaggctagaagatgaaaccaagcggagtgaatttcttcagcagcaactaaatgagctcaagatggacaaagagaggatgacaactagcatggaagagctacaaaaggaactgagtgagaagaaatcagagtttagacgtgttcaggatgagcaaagcaaaagggacaaggagcacgtctcggacggatctcttcagagcctaagaaatatgttgatggctttacagaaggagaactctagcctaaagatagagaaagtcaagcttgatgcagatctcaagagtatgaagagtacctcacaaaaaactgttgacagtacattagatgctaacaagatttctgacttggaaaaggttaagaaagagatggactctttgaaaagagcattacaggatgcttctcgtgagagagacaaagcagtgcaggatctggctcggctgaagcagcatttgttagataaggatcttgaagaccaagaaaagatggatgaagatagtaaactcattgaagagttgcgggtagtatgcgagcagcaaagggctcatataatgcagttagagagggctttaaaggtcgagatggcaaagcaggaggagaacaaaaaggtcataagtgaagagcaccagaggtcaaatgaacaaatagaaaatttgaactacaagcttgcaagctgtatgagtgcacttgaatcaaaaaatgtggagctgctaaatcttcagactgcccttggacagtactatgctgagagtgaagccaaggaccgacttggaggtgatttagctgttgctagggaagaactgtctaaattgtcagagtcattaaaggtggcaaatcaaaccattgagatttcaagaagggaaaaggaagatatggctaccaaactttcacaagcagagaggatgttggcagatgggaaacgatccatgcagaagcttgaggatgacaattcaagattgcgaagagcgctagaacaaagcatgacaactgtgaataggatgtcactagattcagataactccgttgacaggcgcattgtgataaaactgctagtcacctacttccaacgaaatcacagcaaagaggttctggatctcatggtgcgcatgcttggcttctccgaggaagacaagcaaaggattggctttgcacaaagtaatgctggtaggggtgtcgttcgtggtgttttgggtctcccgggacgcctagttggaggaatcgttggtggaggtccatctggcaaatctactcaatcgtcccaggatagccagtccttcgcggacctatgggtggacttcctgctcaaggagacggaagaaagggagaaacgggaagcctcagaagctgcaaggcaatcacagcaagagagccacaccaccaccggtccaagtacatcgtcgagtatccaacagccatcacagcacaacccctcaaacgttgcacctggcccatccacaatgccacacaccgcttgggtctcccagaatcggaatcctcaacagttccgctagcatcatcatgctcgtccgtgctggctccatccccaagaccacctctaagatgatactcgacgatgccaattttctttttatggagtagaaatcaagtgcacactgtacagtatcggatacctttttgttgtgctgggagtgatcccgcatgcggacgccaaggctatttgttccattcgttgacaatgcgatgatgatagtagtagattcaaaaattggcctccttcctggagcatgtaaagagatcgatatgtaaaatggattcctaccctcgacaacagatggaggtaaaatgggagttggttatacgtatgttttgaagtaagaattttgatctgcatccaaa

SEQ ID NO: 13690 - DNA, 901 bp, Zea Mays
ttgaaaagtcgcctagcaattcccgaaatccccaaaagtcgcccttcccccaaccctatccaaccgaatccagcggcggcggcggcggcggcggctatggcggcggttatgaacgccgatgtggaggtggtcgacttcgacctagacgacgacgacctcatggacgaggatgccgggccggatccagcgccggcccccacctcgcgtctccgctccaccatcgcgggcgacgacgcgccgcgtaggaccaagggccgcggcttccgcgaggaccccaactcctctgcgccccgcgattcgcgctttggcgcggggggacgcgccgacctcgactcgctcggcggcccgggacccatccaatcaattgaaggatggattgtgttggtcactggagttcatgaagaagctcaagaagatgacctccaaaatgctttccaagaatttgggcaggtcaaaaacctgcatttgaatttggaccgtcgtaccggatttgtcaaggggtacgctttgattgaatatgagaagtttgaagaagctcaggctgcaataaaagaactggatggagctgagctttatgaacaaaaaatgagtgttgattgggcctttagcagtggccctgctaagcgcagatttactcggaaaagatcaccaccaagggctcgttcaaggaccccacccaggagaaggcactgatgtttccccagcaagtcatgaattactatgcgtgatgtagtgaaaaaagtctggggatttcaattctcaaatgttagcctggtgtatgtgtatccggctttgagttgatggacacatggagttacttagccgcttaccattacgtttggcatgccagttggagactattgtaagcgatgattttttttttttttgagcaaccacaaca

SEQ ID NO: 13691 - DNA, 1804 bp, Zea Mays
tgcctatgccggctgctgcttcgtcttccctgccgccgtccgtgaacggttgcggcgccacacctcgtcgccgtctcctcctccgtgacctttcttctcggcgatgctgctacgaaggctacgggcctacttgggacagcgacgacgaatacgacaacttcatacgcaagatgaacccgccaaggatcgtcatcgacaacgagtcctcggcggaggccacaattgtaagggtagatagcgcgaatgaatacgggatattgctggaagtgatccaggtcatgattgatctcaaccttgtcataggcaaggcatatataacctcggatggtggatggttcatggatgtcttcaatgtgaccgataaggaagggaagaagatcaaagatgaggcaaccctcacacagatcgaagactacatcagaaagtccttgggcgcagattcaagatacattccttcccgccggagatcggtagacgtcgccgccgcagctgaccacaacatcatcgaactgacagggacagacaggccaggactgctctctgaggtcagcgctgtgctcaccagcctcaagtgcaacgtggtcagcgccgagatctggacccacaacacccgagccgcggccgtgatgcgggtcactgacgaggacactgggctggcggtcacggacgccgagaggctggagaggatcagggagaagctgtcgtacctgttccgtggaggcaatctctctcgaggtgccacagtgtcgtcgaggactgccaccacgcacaccgagagaaggctgcaccagatgatgctcgacgatggcgactacgagcagctccagcggcaagctccaggacagtctcagaggcctaacgtcaccgtgaggaactggaacgacaaggactactcggtggtgaccatcagatgcaaggacaggtccaagcttctgttcgacacggtctgcactctgacggacttgcagtacgttgttttccacgcgaacatcgatgccaaggacaatcaggcttaccaggaattctatgtaaggcatgtgaatggatcgccaatgaacactgaaaccgagaggttgcgagtcatccaatgcctggaagcagccatcgaacggagggtatctgagggtgtgaagcttgagctgtgcaccaacgacaaggtcgggctgctatccgaggtcacccgcatcttccgcgagaacagcctgacggttacgagggcggaggtgaccacgcggggcaggatggccgtgaacacgttctacgtgcgcggctccgcgggagaggccgtcgaccagaaggcgatcgactccatcagggaggccataggccacagcctccaggtgaaaggccaggccgagccaccggagccgcagaagaaagagtcccccacgtggttcctcttcgccaacctgtttcgcccgaggtcgctctacagctttgggttcatgcgctgatcgagccgtcgcttccaagaaccgctgcccgtgcagtaagttcaccaccgttcacgaagcaatccaggacatggggggatcttcttcagaaggtggaaaagccttcgttgtgtcctagcagtgcaggtttggcatgtaggtagagcatggcatgggtggtgttcatatatatatctgccgtcgtcgtcatcagcatcatcatctgtgtcatcatcatcagcgtctgtaaatatgacagcatttgaccatttgtacatataacgtgtaaactaaaggacgtaaatataagctgtacagaatatagttaaattccagatttgttgcgacgtcgtaaaagccggcgccttttt

SEQ ID NO: 13692 - DNA, 76 bp, Zea Mays
ccacttctctctcctttgtctactccttgcccgtgaccacgactccaatgagccataggggctacacacatcggcc

SEQ ID NO: 13693 - DNA, 908 bp, Zea Mays
catcaagatatgcggggatgtccatggtcagtattcagaccttcttcgattatttgagtatggtggctatccaccagatgcaaattatctgttcctcggtgactatgttgatagggggaaacagagcatagaaacaatatgccttctcttggcatacaagataaagtacccagaaaacttctttcttctcaggggaaaccatgaatgcgcctcaatcaaccgaatatatgggttttttgatgagtgtaagaggagattcaatgttcgtatctggaagatattcaccgagtgttttaactgcctcccagtggctgcgcttattgatgacaagatcttttgcatgcatggagggttgtctcctgagctaaagagcatggaccaaatacgtaacatttctcgtcctgtggatgttcctgatgttggtctcctatgtgatctgttatggtcggaccctgataaggagattgataggtggggtgagaatgacaggggtgtttcctacacctttggagctgacgtagttgccgagtttcttcagaaacatgatctagatttgatctgcagggcccaccaggtcgtagaggatggttatgaatttttcgcaaaacgccagcttgtaacaatattctcagcaccgaactactgtggagagttcgacaatgctggtgcactgatgagcattgacaactccctagtatgctcgttccagatactcaagccttctgagaagaaaggaaaagcaggaaatgggaacatgccaaagcccggtacacctcccaggaagataaaaataagtgttacccatatttagccaggttctcgctatcaatctgcatttgcgaagttgtgattaagtgctcccccaaacttgtgtatcccattttctaagaacaaaggacattctcttt

SEQ ID NO: 13694 - DNA, 106 bp, Zea Mays
caaaaacgtgagcagctcagtgcggtggggagcagcgatggcttgtcgtgtacgacgctgcagagaaacgaagaccgagctaagctcgacgcctgacgaagcactg

SEQ ID NO: 13695 - DNA, 600 bp, Zea Mays
atggggttctccggggtgatcttgaagccctggagagcctgcatcgccaccatggactggccgtcgtcctcgaactccacaaaggcaatgcctggtttggcttcgatcatccggacttcccggaagccgggatactgctggaacaggatctggagcatcatgctcgtggtctggtctggcaagttctggatgaagaggatgttgttcggaggagcagggagagtgagcaatagagtatggggagatagtgagaatgagcatgagctcctactcagtgggggagatgaagggggtgcggtgttggtgttgaatgtgactgctgcgaggcgggggctggtgtcacaatgggatggagcaggagcgagtcaagcagaatcgaggggggccacattggcgaagactcagctgggacgtgcggccgtaggggtgggtggtggccgaagggaggaggatgacgacgagggcgccggggcggtgatacgggcacacctgctctccgacttcaaggccgcggtgcgtgcaggaaaagtactggtgtccgacccgtcgtctggaagcgctggtggtttgtttggtaaatggggaatggacaatactctg

SEQ ID NO: 13696 - DNA, 76 bp, Zea Mays
taacattctttctatttaacttggcctagaaacggctcaaaacaaggcctatcttggcccattagggttaaaccct

SEQ ID NO: 13697 - DNA, 1393 bp, Zea Mays
cctactgtcatacgttttgaaaaaaaaaacagagttacacagcccactttcattttaggtgcattgtttatttcctagaaagagatcacatttagggtaccattggagcgttttgttgtccatgtgttcaacttcttcatgcggtgacaaacctgtcctttcaaggtaatgtacatggtttgggagtggaagccttgcagatgctcactcagatggtgctcagcaatgaagaagagctcaagatcaaatatttcaaggatgactccctgaacagactttgcccagttgatgtttttttgaaggcaatgctggatgttccatttgtgttcaagagagtagatgccatgctttacattgccagcttctatttggagatcaatcggctgagaatgtcgtatgctactcttgagggggcttgccaggagatgagaagcagcaggctgttccacaaagtccttgaggctgttgtgaatttcggcaatttcatgagcaccaattcggggtctccaagttcaaaaggcttggagccaaacactgttctgaagatagctgatgtgaaaggagctgatgggaaggctgctctcatgcagttcattgtccaggaaattgtgaaacctgaaggatatgatgtgatgcagcatggttcaggtgcatgcaagatgagcacaaacactctgcagtgtgatgccgagtgcaggaagcatggccttgaggttgttgccaaacttgcagcccagctgagcaacaccaagaaagccgcctccattgacataaaaaggctgagccaaagcgtgtcagagcttggaatggggcttgggaaggtccacgacgtggtgaggctgaacagcatggttacatctgttgatagcgctcggcgtttccacaatagcatgagcacatttctaaggcacgcccgaggaggagatcctgaagctccagtcccaggagagcatctgcttgtcatcagtgaaggagatggcggagtggttttattggggagtcagtcaacgatgaagctcacatgttcagaatctttgctggagtgaaggagttcctagctatgctcgatcatatctgcaaggaggctggggaggtgagcagcaacaattgggtcggcgcgacaacggcgagctggatggctgcacccatggggatgatgccttaagccgctggagctgtcttggcaaaatctgtagctaccctttttgtagaatatttcatatcaagctatttggactagtatggttcctagtattagcagtagatgagaacgatgttatggtatgttaagccgaagcctctctctatataaatatatctggataatgtatgctggacacccgtctattgtaaagtttactgttactggtaatggggttttgccgtccttttc

SEQ ID NO: 13698 - DNA, 1259 bp, Zea Mays
cgataaatcactcgttattatttttaccgtctgtacttggcgacccgactatgtacgaggagttctggcgcggcacaggagatagcgcctcgatcttcatccctggttggcaaacaatgagctacttctccgacctcggcggcatctgttggttcctggagcctggattcgagcgcgaggtgcggcgtctccacaggctcgtggggaatgccgttgtagacgggtaccatgtgctcgtcgggacaggctccactcagctctttcaggccgtgctgtacgcgctctcacctgcaagtgacggcacacccatgaacgtcgtctcaccggcaccgtactactcgtcttacccatctgtgaccaactatctaaactctgcgctctaccgttgggctggtgatgccaatacatttgatggcgacacatgtattgagctcgtctgctccccaaacaaccctgatggtggcctccggaagcctgtcatcaaatccaagtctagcaagcctgtttatgacttcgcctactactggccgcagtacacacccatcaccgaggcagctgcccatgacatcatgctgttcaccgtctccaaatgcaccggccatgccggcaccaggctggggtgggcattggtgaaggatactaaggtggctcagaagatgatcaagtttatagagctcaacacaatcggtgtatccaaggactctcaacttcgtgccgctaagattatcggggcaatatgtaatggctatgagccggtaccatcctctgcttttccaatgagactgtcaccgccaatcctccatttgcatggcttcgctacaacaaggatgatattgaagatctggaggccttcctactcgagaaaaagattatcactcgaggtggcacaaggtttggagtggatgcaagggctgtcagagttagtatggttgacacagaccaagccttcaatgtgttcatcaatcgtctggccacaatgaagtgaaatttcagtgcaaattaataaagcactttgtggctactacaaggatgaccgcgttctagatggaacaatcgatgctttggaaagcttaataatgttttatgttgttgaataattccgtgtgttttcgggtatgttgtgtaatactcaatgtcaaatcctatgcttaatcgatgttgtggtccatcctgttatcagcatggccaattatatatggatgaccgtcactgctcagtctttactcctaattacatggcaagtgtttaatggtgcttca

SEQ ID NO: 13699 - DNA, 67 bp, Zea Mays
tgttgtccagatgctgtcccaaaagttgggcatcgggttctcgtcacctcgcctgtactcgtatcaa

SEQ ID NO: 13700 - DNA, 3598 bp, Zea Mays
caaccgctccccaccgccagccggatctcctgagaggcgacgccgcgactgccggacggcaaccctgctcctccgccggtgccctcccgcacgatgagccgcagcgggcctcgccgcggcatcttcgatggcctccccatcccggccgacaaatcctacctcaaggaaagcctgtcgcggatcgacgagagctgggcggccgcgcggttcgactcgctgccgcacgtcgtgcacatcctcacctccaaggaccgcgagggcgagatccagttcctcaaagagcagagcgacctcatcgaggacgtcgtggacgaggtcgtgcacgcctaccaccacggcttcaacaaggccatccagaactactcccagatcctgcggctgttcagcgagtctgcagagagcattaccggactcaagggggagatggaggaggcgaagaagctgcttggcaggaagaataagcacctcggccagttgtggtaccgctccctcacactgcgccatgtgctatcccttttggatcaggtcgaggatgttgccaaggttcctgctcgaattgaaaacttaatggcagagaagcagctgtatgctgcagtgcaattgcaagtccaatcagttctgatactagaacgagaaggccttcaagcggtaggtgctcttcaagatgttcgttctgatctaacaaagctgcgaggagtactattttacaaaattttggaagagttacatgcccatttgtacaacaatggcgaatatagctctgcagttttaagtatggttgacagtgagcaagcaccgacttctacagctactgggcgattggtaaacagcatgcaacctctttcaaggagaactagatcaattaaaggtgacaaccacattggtgggccagtagatgggtttccaaaagttagttctgttgatggaggctcttcgtttgatggcccagatgataatagcttagatatgagtgaaagtgatggacacactcgaaaggattcgaaaagtttttctcatgaaatcccaatttttctttcctatgctacaccagatgagtttcttgaatcaatgataaaggcagatgctccccttaatgtgaagtacctgagaacattggtacaatgcttatccatgcttggaaaggttgcagctgcaggagctgtgatatgccaacgagtacgccctacaatccatgatgttatcacttcaaagattaaagcatgttctgaagacgcttcaaaatccagtatgggcaaagctgcaaaaacgaatgatgtgttgcattcaaatggacccactccccggtttcaaatgttcacacagaaaacaaagagtggcgcatctgtaatggcagcccaactagttgtcagtcccatttcgccgactatggcacccactggagatgctcagcgtgcagctactcaacttcttagatcaatatttgaatgtcttgtagagatacttgagaaccatattattgttggagagcttcttgaacaaaaatcaacatctgaggttgataatgtaaacacacctcatattgcaaatggggatgcaagctggaatccagactctgaatctttccaagctactggtggtttcagtgttgcattctctctatcagtcgtgcagagtgagtgccagcaacttctgtgtgaaattttgcgggcaactccagaagctgctactgctgacgcagctgtccagacagctaggcttgcaaataaggatccagtgaaggaaaagagggatggatcagaaggcctttcttttgccttccgcattactgatgcagcaaccccagcgtcaaatgaaggtcaaggatggcgaagaaattccaatgtgcctcaagaagggtatggaacagcaagtgtcatacctgaccaaggaattttcctagccgcgtctgtttaccgtcctgtttttgagtttatgaataaaatagggttgatgttgcctcagaagtactcacaacttgggagtgatggcttattggcttttgtgaataactttctgaaggagcacttcttgccagcaatatttgtagattaccgaaaatgcgttcagcaggccatatctagtccagcagcatttagaccacgtgtacatgcaacatcagcatatagttcatcggtggaacttggacgccctgtgcttcaagggcttctcgccattgatataatagccaaagaggttcttggatgggttcaattgatgccaaactatgcgactgagcttgtggagtatgtacgcacatttttagaacgtgctcatgagagatgtcgtgcatcatatatggaggctgtccttgaaaagcaaagttatattctcctttcaaggaatgacattgagagtttaatgcgcctggaaccagcaaacatttctttgcaaaattctactggtgaacatgataacaatgcaacaggtgcagaggcagtcgaagtagagattgaactaagtgatctcttattagatatgtgcccaataaaacaggaaaacttgatccatgacgaccagaaactgatattgttggcttctcttagtgactcattggaatatttagcagattcagttgaaaggcttggggaatcattcataagtccaccaaccacttcagagagcataaatcatagccatggtcgacatgcccgctcatctagtgcaattccaaaaagtctcgcgtctctggctaatgagtacagaaggttagctgttgattgtgtcagagtattgagattggaaatgcagctagaggcgatataccacatgcaggaaatgaccaaaagagaatacgtcgaagatcaagatgctgaagatcctgatgactttattatctcccttacaactcagattgcacgacgggatgaagaaatggctccttatatcacggaatcagaaaggaattacatatttggtgggatttccagtgttgctgctaatgcatcaataaaggcacttgctcaaatgaagtcaataaacttgttaggagtccagcaaatatgcaggaattcgatagctctggaacaggctcttgcagccataccttcaatagatagtgaagcagtccaacagcgattggatcgcgttcgaacgttctatgagttgttaaatttgccttttgagtctttgcttggattcatcgcagaacatgaatatttgttttctgctaaagaatacctgagtgttctaaaggtcaatgtgccgggtagagaaatacctgcggatgctgaacgacgcatctcacagattttgggtcactagatctaatcagacacaatggtgctatttttgactggttatgccttatgtgggctttggctaccaaatggttctccacctgtttccatggcggtgtttgtgtagatttagctggtttttgctatttagtaattttgtttccttttgtatttcacgtgatatattcttttgtatgtcttatcagttatcattgattgtaaatttgtagtgttccggataaaattttcattattgattattgtaaatgtgttatctgtctggatgcgatatttaataagctcatcagattcagtgtcctgtatggtgcacagacgagttgccaaaaaaaaaaacaagatcg

SEQ ID NO: 13701 - DNA, 1867 bp, Zea Mays
atgaccaagtttcagtttaatcttctcctccagcgggtcggcctgtccgcactctcccccgggatggaagatatcaactttgaagcttggtggagtagatcggctgaggttactcctaaggaccttagagatggccttaactctttggtggttcttggggcttggactatctggaggcaccgtaatgactgtgttttcaatggtgctcagccttctatagctagattgcttacctcagccagtgatgagttcaatatgtggtgttttgcgggggccaaaggaaattatgttatgcctaatgtttcctttgatgctgtgatcattattgttcaggttgcacaagtgcgggtagctgctgcagaatcatcaatccagattgtctatctatctgtaaacgataaagttgaattggatataaaatatgctgatgaattaggttatattttcaacgaagctcatggagtagtccctgtaaagattgagacaaattatccagatgttgtttcggttctcatgccaagagattttaatggtacatatgacacacgtgaacgttttgttcttcaggcgagaagtcatggaacagctcttgtaaggctccacacaaacaatgtccctaacaaagtggatttcataatggtatccgtaggagcacaaatatatcctagggatgtgatccttcattctggccagcacctgaacttcactgttatcggagacagtatggacatgtgtggacatggtcactggttaagtagcaatgggaagatcgtccacatcaatcgggtaactggtgaagcacaagcacgtagtgaaggtgtagcggaagtaatcttcaaaggttcaaattttaagctgcaaacaactatcactgttctcaaggtgaaccagatagttgttgatgctcctgcggagacactgactaatgcagctggcctgccggatggatacatgttttctgtgagatttagtgattcaattgagcacagtattggatcctctgcgagcccaattaatgtcccctttgaatgcaaggttgacccttcttttgttgggtttgttgagccatggactgagcatgccacaaagaaatcctactgcctgtttcatccatattcacctgcacaactgttgcccgtgaagttggaccctaatgaaggaactttacacattttagttcgtgcaaatctaaaggaagacccaaaggtgaccggatctgcacatgctctttttgtcaaagggttttacataaaagaacctgggaaattaaatctgactccaagttgcaatcatagtgtcattactatcgatggaaatactgatattgagttgttctggaatgctaaagatttactcagagtcagtcgtgttgacacaaatgagaacaatggtgttcttagtcgagttgtttaccgggttgaagcgctaaaaaggctatcgttctctgacaaggttactatcgttcttcctgccactggtcaaactgaagaagttgaagtcagctacgatacaggagaggaggcagagtcaccatcatcatggggcctaaccacaactgctgttatgctcacatgcatcattgtgacaatagtcactgttgcacttttcattaagttgctgcagagacctatcagacaggcaccatcagggagcatgacagcatccacaccagcacgagcaccagcagccgatcccgcagccatggctgatcctgcatccccggctaatgccattgaacacccggtttggaacgatgtggatcgagtctgaaacctcgcctcctgtggattgagacccatgccggggttcgaaccccacgatgagctgattgtctttgcttggaatgattccaacccaaacccgtgcc

SEQ ID NO: 13702 - DNA, 94 bp, Zea Mays
cgggcccactcgccgatcaaccagtaggatggccaccgagacgacgaccgccccggcgccaccggacgaccctcctcatcctcctctggcggag

SEQ ID NO: 13703 - DNA, 3651 bp, Zea Mays
cgaggctgcgtctctcgaagtccaaaacgccccgccctggaaccctaaccctacctttcctctcccgccaccgcccgccccaatggcgaagccgatgaagtacgacgatgaggaggagatctcgtcctccgccgaggaggaggaccagtccgacgccgccggctccgtatctggcgaggaaggggatgacgacgacgaggatgctgcggcgccgcccgcggaggaagctgagggcgaggggcagcaggaggaggaggtcgacgaggaagagatcgaagccgtcactaccggcgctggagctgaggacgaggaggacgccggtgccgttaccgccgctgaaggcgacgacgagtcccagtccaccgaggacgacgagcccgtcgcgagggacaaggacgatgacgacgagactgatgcagtggttgggaagcgagagaaagcaaggctaaaagaactccagaagatgaagaaacataaaatccaagaaatattagatactcaaaatgccgccattgatgctgacatgaacaataaagggaagggacggttgaagtaccttcttcagcagacagaaatatttgctcactttgcaaaaggaagtcagtccaacgagaaaaagccacgcgggaggggacgccatgcatcaaagatgactgaagaagaggaagatgaagaatacctcaaagaggaagaagatgcccttgctggtgcagggggaacacgtttagtttcacagccttcatgcatcaagggaaagatgcgtgattatcaattagctggacttaattggcttatacgattgtatgagaatggtatcaatgggatattagctgatgagatgggacttgggaaaacacttcaaactatttcattgctgggctatctgcatgagttcagaggtataactggtcctcacatggtggttgcgccgaagtccacccttggcaactggatgaaggaaatccaacgtttttgccctatcctacgtgctgtgaagttcttgggcaatccagaagagcggaaccatataagggacgatttgctacagcctggaaaatttgatgtgtgcgtgactagttttgaaatggcaatcaaagaaaaatctgcgttgaggcgcttcagttggcgctacataattattgatgaagctcaccggataaaaaatgagaattctcttctatcgaagactatgaggatttacaacactaattatcgtctcctcatcacaggcactccactccagaataatctccatgagctctgggctctcctcaatttcttgctccctgaaatatttagctctgcggaaacctttgatgaatggtttcaaatttctggggaaaatgatcaacaggaggtggtccagcagcttcataaggttcttcgcccatttcttcttaggaggctcaagtctgatgtagaaaagggtctacctccgaagaaggaaaccatacttaaagttggaatgtctcagatgcaaaagcagtactatcgcgctctgcttcagaaggatttggaggttattaatgccggtggtgaacgcaagcgattgcttaacattgccatgcagctgcgcaagtgctgcaaccatccatatttgttccaaggagctgaacctggcccaccctacacaactggtgaacatctagttgagaatgcaggaaaaatggttctactagataaattgctgcccaagctaaaggagcgtgattccagagtcctaattttttcacagatgaccaggcttttggatatcttggaagattatcttatgtatagaggttatcagtattgtcgaattgacggaaatacaggtggagaagatcgtgatgcatccattgaagccttcaataagccaggaagtgaaaagtttgttttcttactttcaactagggcaggtggccttggtatcaacttggccactgctgatgttgtggttctttatgacagcgattggaatccacaagctgatctgcaagctcaggaccgtgcacataggataggtcaaaagaaagaagttcaagtgttccgcttttgcactgagataatgcaaacgaaattacagtacactatcgaggaaaaggtgattgagagagcatataagaagctagcattggatgctttagttattcagcaaggacgattggcagagcagaaaactgtcaataaggatgaccttctgcaaatggtgcggtttggtgctgaaatggttttcagttctaaggacagcacaataactgatgaggacattgaccgtattatagctaaaggagaggagacaacagctgaacttgatgcaaaaatgaaaaagttcacagaggacgccattaaatttaagatggatgataatgccgaactgtatgattttgatgatgagaaggatgaaaacaaggttgatttcaagaaacttgttagtgataactggatcgagccacctagaagagaaaggaagagaaactactctgagtctgattactttaagcaagcgcttcgccaaggtgcaccagcgaagcctagggagccaaggattccaagaatgccgcacttgcatgatttccagtttttcaataaccaaaggctaaatgaattgtacgaaaaggaagtgcggtacctcatgcaagcaaaccagaagaaagataccattgatggtgaagacgaagatcaattggagcctttaacagcagaggagcaggaagagaaggagcagttattagaagagggttttgcatcatggacaaggagagacttcaacacatttattcgtgcatgtgagaaatatggtcgcaatgatattaaaagtatatcctctgaaatggagggtaagacagaagaggaagttcaacgctatgctaaagttttcaaggagagatacaaggagctgactgattatgatagaattataaaaaatattgaaaggggggaagcaagaatatcccgcaaggatgagattatgaaggctattgggaagaagttagaccgctacaagaacccatggttagagttgaaaattcaatatggccaaaataaagggaagttctataatgaggaatgtgaccgctttatgctttgcatggtgcacaaacttggatatgggaactgggatgaactgaaagctgccttccgtatgtctcccttattccgatttgattggtttgtgaagtccagaactacccaagagttggctaggcggtgtgatactcttatcagactggttgaaaaggaaaatcaagaatatgatgagcaagagaggcaggcaaggaaggagaaaaggcttgctaagaatacgactccaacaaagagagcagcactaaggaattcagagggtgagagtgctccgttgagctcattcaagaggcgacggcagtctcttatggacgattatgtgggctcgggaaggcgaaagagagggtgatgtgatgtttgacatcctgcctttggagctctcagcgagatgcagtctctgcaatgctttaagcccgtacgtgctgtgcttagtttcttgtgcactgctgtagattcggacttcgcaattgcaactgttgctacacttttgttcactttttcatcgtggccctaacactcattccaaattataagattagagattttaacttaacactagagttcgatcaaatttatgcaataaaataa

SEQ ID NO: 13704 - DNA, 874 bp, Zea Mays
atccacgtgctagaagcctagagccgtgaacttgctttgttctggattaaagcacatgcacagttttgatccaccatatgcgcacaatggggttaaaccagataatgtcctcataacacagaggaagcagtctcatctagcaattttgatggattttgagagtgctggtccagcaagaaagactattagatcacaagctgaagctttgcagttacaggaatgggcttcagagcactgttcttctcattaccgtgcccccgaactatgggagtgtccaagtcatgctgacattgatgagaggacagatatatggtctttgggatgcactttgtatgctatgatgtatggaaagtctccatttgattatgagcttgatgagtcttctggtgaaagcttgcacagtgttattaaaaatgtacagattaaatggcctgaagaagcgggatctacataccctgattccctccgccagtttataacttggatgctgcagccacatcccgcagttcgtcctcatattgatgatatcataattcatgttgataaacttgtcatgaagtactctaattaaccgctacaccaagccgcttctccaccagaaaaaagaatcattattatgtaagtctacacgattcattagcaaaatgtgatatgtatgttccttgatagctattactgtattaaacgagaaaaggacattctgctgtagtcttcaaccattcgtggactcgccattgttcatgagtatgttatctatagatgttttttttgtatgcccgacagtgttaccgggttaataaatgatacagtacctcttttatagttataatggtgccctcattgtgttgttcatggtgctatacgatcctgcata

SEQ ID NO: 13705 - DNA, 149 bp, Zea Mays
taccactggtgtccgcacgtttgccggacctcttccttgggcactaaaatctgtatggccgttatccattttattgcgattgtcagcagagatgtctggatgaccagtcacagcagctagctctggtggcaaatctgggtcataatcct

SEQ ID NO: 13706 - DNA, 117 bp, Zea Mays
agcacaagccttattggtaagctgaaaaacagcttcacaccttcatttcatttcaataatcgtctgcaagactaaaccacttatcttatccttcccttcctgttgtctttgatgcag

SEQ ID NO: 13707 - DNA, 3194 bp, Zea Mays
cacactgcagagccccctcttgttcgcgtccgaaccagattccccgtcccctctagggttacgcccactctcccccgccgctccggcgatgtcgtcggagcctctacccgcggagtcacccgaggcgcccgcttccgcctctggctccccttcgaaggacgccgtcggcactgaggtcggcgccgctgcggggtccccggaaacgaacacgctctgggtgggcaacctgccctcgcacgtgaccgagggcgatttgttggcgctgtttgggccgcacggcgcgctcgattgcgcccttgcacgagccggatctcgcagctacgcgttcgtcctcttccgttccccagccgaggctcgcgaagccgtcgaggccacccggggtgaaaaggtcaagggggccgccatgcgcaccgagttcgcgcggccggctagagctgttagaaatctgtgggttggtggcattagcccatcgatttcaaaggaggagcttgagggggagtttctgaagttcggaaaagttgaaggtgttgcattctcccaagatcagacttcagcatacatagattttgagaagcttgaagacgcaatttctgctcacagatccttgaatggaaaaatgctaggtggcaaggaattgtgtgttgatttccagaggtccaagggaagagcggaatggtcagaagctagcagcttcaatggtagagtaccagggccagtgggtgataagagaggcagtggccctctgaagagttctgctggagtgcggatgcgagaggcacagcctaccaatgttctctgggttggttttccaggttcttatagagtcattgatgaggaggcacttaagcatgccatgtcagtattcggtgtcgttacgaagataaaagttttccagacaaggcagtatgcttttgttgagtttgcaaatgttgcggaagcttgtaatgctaagatgaatctagatggtcatcttttcaatgatcccaggattcagattcttttctcaaacagtgggcttgcaccaaacaaattggacaacccaacatcggttgctggatttcctagttcagaaatctattccagtgatggtcgtctaggccctggtattggcagtggaactttgcaagggtatgatccaccaagaggaggaagaacaagatattacgattatgcgggtatgcctactccaggtggtatcctttcacaacctgaaccatttgatccaagagaagcaaaaagaatgaggcttgctgctggtgctgacccttacgatgtaagggcaggcagcacaggtctttattctgctggataccgtcatcagggcagttctgtgcacgctgagggaagctcaagtcctgttattcgagtccggggcacagtgcatcgtacatcatacattgagcactgttggcgtggcagtattgccaaaggtggatcccctgtttgtcgtgctcgttgtttgcctataacaaagggcagtgacatacctttaccggatgttatgaattgctcagctcggactggattggatatgctggcgaagcactacgcagatgccactggatttgacattgtctttttcttgccagatagtgaagatgactttgtttcttatactgagttcttgcgttacctgggctcaaaaagtcgggcaggggttgtaaaagttgatgcagggactacattatttttggttccaccatcagatttcctaacaaatgtgttacaagttgatggtccagagcgcctttatggtgtggtattacacattccacaaatctctgctgctgctgcactgaggccacagttaactgggaccgaacaacaaccttactatgatgaaaggggaactctgcctacttcacaaagaaagtatagtatcatttctcctaatgacagtggccaccttgatgctgattatcggacatctttgcatgaggattcaatgcatcggttggggcatattcctggaaggcctcgggtggatgaaggacaagcagttcaaccagctcttgcaggttttcctgctaatcaagcagctgggctgcaagtacaatcttcactcaagcctgacattatggctacattagcaaaacttctgcctagtgtgcaatcgtcaccgctggtaagtggtcagatgaatgccatagacagaacatcgcagatacaggatccatccatgctttcaaaagtatggaatcctgaaaaccaagttactgcttcaaattcatcctttgggcaaatggctaatgttcagcatccaggacagcagtttagtggccaagcttcagctgctcatttgacaaactatgggaacatggtgagtgctcaggagcgctcaatacaacatactgcttacaaccctgaagttactttgaacttgccaccaccacctccacttccaacaataccacacagttctgctacattacagtctcaaggtggccacagtttgccctcacagacaaaccagcaactgtatcagccagagcagtattatgtgccccaaaacaactatggtccattagttccagttagccattctaaccttcaaatcagcaacactaacaaccccacccttaccatcccacaagtgaaccctggacctccaacaaataatcagattgggaatttggcccagccacagcattctatgccactgcatgttgatagagcaagtcaggatttctcttctcaggggcaacaacaaaatcgtggtcctggtgctgcacaagctcccgaggaggataaaagcaagaagtaccaggcgacactccagttagctcaaaacctactgcttcagttacagcagcgtggatctggaaatcaatcctgagacctaattattgcttcaggtaccctcgtctcgtctcagctggtcgcaaacaactgaaaatatatatcccaactcgacggcttcgcctccactctacaatcgaagcggcccatggtgtgtcagctcgttggcctacacctacttgccccagttctcccttttcaaggacatacattaccagaaaacgatttctttttctcctttttattttatcgtgtatttgatatggataatccggcctgaattttgtactcgtttgttagtatggcctcgtgttatgttgttatttactctgaaaccatatgttattgtgtacggtgccgtggttccaacacaagggaagcttgttcagagaccc

SEQ ID NO: 13708 - DNA, 939 bp, Zea Mays
gaaaattgttgggattaaagtcctgcattgttcctgagagccattgagctctctattctatctgaatactacgggcgtgaaatcgcagcatatgacattcagaccacccgctgtgatctctatggtcaggagaagaattacagtgaaagggccatgctcatttatgatggtttgcattatgatgctctcgctatgtctccggctgaaggtgcacctgaagaatttgaccagacaatcttccccgttaatcatgaccgttccattggtccagcagaaggccttgccctcaacttagtgagggaggcgcaaaggaagaggagctacactgacactgcaaacttcactctgcgctgcggggtgtgccagatcggcgtcatcggtcaacaggaggctgtggaacatgcgcaagccactggccacgtcaacttccaagaatacaaatgacagtacaagatcagactgttgtgctgtaaacttgaccatcatttggttccaactgatattctcctcccgttggatatggttggcgctacattgtatcacagtgtaattcttacggggcaaacagaataatggtcaccttcgttctggacaatgtctatcttgcctgccaatgtcggttgaaattgaaagagcctacaatccattgtcgttctacatgccagaagaggtttgttggcccatgggccggatctatattgggcggtgtggcccggctgtatcatatctggtttatctattaggctttattcggttatttcaattctatgtggattggagtgtattggaatgtattgagatgtattttgacttgttatggatttaaaccgactcaataccattcaatccacatggtttaacggtgaaacgaacaagtccttaacgattttttttttcaaaattcttctggggctccaccattgctagtaggctagtagc

SEQ ID NO: 13709 - DNA, 1670 bp, Zea Mays
aaggcataatcctgccttgcttatgctcggcagcagagcttcactgcacaggaagtgctggtgatgtgctcgaagacgatcccgttgggaggctcaaggtgtatgtctacgagttgccgaccaagtacaacaagaagatggtggctaaagactctaggtgtctcagccacatgtttgccgcggagatcttcatgcaccgcttcctactgtctagcgcgatccggactttaaatccagaagtagccgattggttctatactccggtatacaccacgtgtgatctcacaccgtggggtcatcccttgcccttcaagtcaccacggataatgcggagcgcgattcagttcatttccaaccggtggccatactggaacaggacagagggagcagaccacttctttgtcgtgccacatgactttggcgcatgcttccactaccaggaagagaaggccatcgagcggggcgtccttccgttgcttcgccgtgctacactggtccagacttttgggcagaaggatcatgtctgcctgaaggaaggctccatcaccatcccgccatatgctcctcctcagaagatgaaaacccacctcgttcccccagggacccctaggtcgatcttcgtgtatttccgcggtttattctatgacactgcaaatgatcctgagggtggttactatgcaaggggcgcccgtgcatcagtctgggagaacttcaagaacaacccgctcttcgacatctcaacggaccacccacccacgtactacgaggacatgcagcgtgccgtcttctgcctgtgcccgctgggctgggccccgtggagcccccgtctggtggaggcggtggtgttcggctgcatcccggtgatcatcgccgacgacatcgtccttcccttcgcggacgcgatcccgtgggaggagatcggtgtcttcgtggccgaggacgacgtcccgaggctggacaccatcctgacgtccataccgatggaggtgatcctccggaagcagaggctgctcgcgaatccgtccatgaagcaggccatgctgttcccgcagcccgcccaggctggggacgccttccaccagatcctgaacgggctggcgcggaagctgccgcacggtgaggacgtgttcctcaagcccgggcagaaggtgctcaactggaccgagggcccccgcggcgacctgaagccatggtaggtgtactggaaaaaaatgccatggcaccgtcagcgtgtccgctgttcttgtgtacgctacacagcacaaccagatgggaagctgatcgacgacgaggacgatgagtactcccatgtcactgatgtaaatgtaaagcgtcttccagcccaccaggcactgtgcttcttcaggcgacgtgtctggtttgcttgtgttgtgtctgttctgaactttactttagcgttaacctattaacgatcggagatcatgtaatttatggctgttgtattctccctatagtatcaaggacatgtttgattagtttagtctagggactaaaatttagttaggagactaaagtttactccctactctatttagttgtagggactaaaaatattcagagcatattaaatgaatcataagaagaataaaatatcccttagcattctcgtgtaattagtgtaactgaaataaataacggacaaaaaaaaa

SEQ ID NO: 13710 - DNA, 696 bp, Zea Mays
ggccttccagcacacgctagcggactctcggatgagagggggctgttcgccgattgggtagggggcaaatttgcggcgcgcgttggccagcgcgttggccagcccactgcgggatctgggcatccggcgacggcggcccgagcgacgcctctactgaagggaagccagggagggaggagcgacacagcgtctggcaaaagggcaatccggcggttggctggctcgccggcgcggcttcccctccgtagatcctaaaccctaaacgccatcgccaaagccttcgtcagccagtcctccaaggcacaggaaagttgagggaagcacgggtggtatttggagttttgtgcagataagaccaccacgcatccaatccatccctgtcttctcttcccacttcccagtccccaatcgcgttctcttccttggcgacatggcggccgccaccggctacagcgacgccccaaccgacgagcaactgctggcgtacgctgagctgcccaaacatggccgcgacatggcggaggtgttcgccgtgcgcatccccgccaccgtcggaggaaacctgccgccccgtggcagcatcgttttctacggcggccactgctgcagcgatttcatttacagctggagtccactggaagaggaagaagacacctcgaagcaaatctgcgacagccaggcaggacagcaagtgat

SEQ ID NO: 13711 - DNA, 2899 bp, Zea Mays
ttttaatgtgtttcttgattagactgtaaagatttgattgccacatacaggaattgtggcatcaatcagcaacgacaatccagcacttgtttcttgtgtggatgatgaacgtctggagttccaggatggtgatctagttgttttctccgaagtgcatggaatgaccgaactcaatgatggaaaaccaagaaagattaagaatgcaaggccttattcttttactctagaagaagacaccacctcatatggcacttactttagaggtggtattgtcacacaggtgaagccaccaaaggttcttaaattcaaaaccttgaaggatgcaatcaaggagccaggagaatttctcatgagtgatttctccaagtttgaccggccacctcttctacatttggccttccaagctttggacaaatttaggtctgagttggcacgatttcctattgctgggtcagatgatgatgcacagaagctgatagaccttgctattagtattaacgaaactcttggtgatagtaagcttgaagaaattgacaagaagctcctgcagcatttcgccagtggttccagggctgttttgaatcctatggctgcaatgtttggcggtattgtaggccaggaggttgttaaagcatgctcagggaaattccatccactttaccagttcttctactttgattctgtcgaatctctgccagttgaaccgttggagcctagtgatttgaagccagagaacagtagacatgatgcacaaattagtgtctttggggctcagcttcaaaagaaactggagcagtcaaaaatcttcatggttggttctggggctcttggatgtgaatttttgaagaaccttgcgttaatgggtatttcttgcagtcaaaatgggaagctgactgtgacagatgatgatgttatagagaaaagcaatctcagtcgccagtttctcttccgtgactggaacattggacagcccaagtccacagttgctgcaactgccgctatggcaattaatcccgagcttcatgtggaggcccttcagaatagagcaagtcctgagactgaaaatgtgtttaatgatgccttttgggagagcttggatgctgttgttaatgcattggacaatgtcactgcaagaatgtacattgactctagatgtgtatatttccagaagccacttcttgaatcaggtactctgggtgccaagtgcaacacacagatggtcattcctcacttaacagaaaactatggggcatccagagatccaccagaaaagcaggcacctatgtgcactgtacattcatttcctcacaatattgatcactgcctgacatgggccagatctgagtttgagggtctacttgagaagactcccactgaagtaaatgcttttctgtcgaaccctggtggatatgcaaccacagcaagaactgctggtgatgcacaggctagagaccaacttgagcgagttattgaatgccttgagacagacaagtgtgagacattccaagattgtattacctgggcccggttgaagtttgaggattatttctccaaccgtgtaaagcagctgacattcacttttcctgaagacgcaatgactagctctggtgctcctttctggtctgctcctaagcggttcccgcgaccactggagttctcatcttctgactcaagtcaccttaacttcttgttggctgcttctatattaagggcagagacatttggaatacccatacctggttgggcgaaaaacccaaagaaactagctgaagctgtggacaaggtcattgttccggatttccatccaaaagagggtgttaagatagagacagatgagaaggctactagcctatcctctgcgtctgttgatgatgctgccgtcattgaagagcttattgcaaagctgcaagcaatttctaaaacattgtcaccaggattccgtatgaaccctatacagtttgagaaggatgatgataccaatttccatatggacttgattgctggttttgctaacatgcgggccaggaactacagcatccctgaagttgacaagttgaaggcgaagttcatagcgggaagaatcatcccggccatcgccacctcaactgcgatggccaccggccttgtctgcctggagctttacaaggtccttgctggtgggcacaaggttgaagactaccggaacacatttgcgaacctcgcaatccccctcttctccatggcggagcctgtgccgcccaagaccatgaagcaccaagacatgtcctggaccgtgtgggaccggtggaccgtaactggcaacatgacgctgagggagctcctggagtggctgaaggagaaggggttgaacgcgtacagcatatcctgcgggacctcgctgctgtacaactccatgttcccgagacacaaggagcggctggacaagaaggtggtggatgtggccagggaggtggccaaggtggaggtgccttcctaccgccgccatctggacgttgtggtggcctgtgaggatgacgatgacaatgacgtcgacatcccgcttgtgtctatttacttccggtaaagaggagggtgtcgctacctgtttacatggaacctgtctgtgcgatgtttatcagaaggatcgagtctataagttgcgcatgcaaccgagaactaggctgtgttcaatgtaaacacatactgatgagtctataagttggctgggaatcgtcgccgagatttgggttcaccgttatggaattcttggagcatataaaacatcgtgatagttattgcatgtcaatgtcactgctagatgttgttgtcctcatgcatgtatcggtgtgactcttattgtgcttgggtgcatttgcttcaatgcatgtgacgtgctctctttagatttcggaaactacag

SEQ ID NO: 13712 - DNA, 2207 bp, Zea Mays
tctttttctcgcctctcctcgctcctcgccatttctctctcttcccctccgcttcgcccaccgcccgctccgaaatctgcgcgccgacgccgccggctgcccgtggagagcctcgaattagagcgcgttccgtcgagaggttttcaagcaactatgtttgagtttggttgatatgatactcattcacgttggggatgcagaccccccctctgtgggggttgattgaagaagttaactgtacacttaggagaacttgtgtcctactgaaagtttcttggtttcgaggctcttgagctaccaagcatgtcagattcaaatgtgaagtggattgatgggctccagttcacatcattgtactggcctccacccctcgatgcggagcagaagcaggcacaaattttggcatatgtcgagtactttggccagtttacagctgacaccgatcaattccctgaagacatagctcagctcattcaaagttcctatccatcaaaagaaaatcgcttggtagatgaagtattggcaacttttgttcttcatcatccggagcatggtcatgcagttgcacatccaattctttcacgcatcatagatgggacgctgtgctatgatagacatggtcccccattcagttccttcatctctttattcagccataattctgagcaagagtactcagagcagtgggccttggcctgtggagaaattcttagggtcttaactcactacaataggccaatattcaaagttgagcgccaacatactgaagctgaatgtagcagcacatctgatcaggcaacatctagtgattccacagataagagatctaataattctccaggaaatgaatctgactggaagccattgaggccactaaccccgtggatcactgacatattgctagccgcacctttgggcattcgaagtgactattttcgatggtgtggcggtgtaatgggaaaatatgctgctggtggagagttgaagcctccaactactggccgagaaggacttgcagccttggattgctagagatgacgaacaaggtcagaagatgtggagagtcaaccagcgtatagtgaagcttatagctgagcttatgaggaaccatgacagccctgaagcgttggtgatactcgctagtgcctccgaccttctacttcgtgctaccgatggaatgctcgtcgatggtgaagcttgtactttgccacagcttgagcttctggaagtgaccgctcgggctgtccatcttatcatcgaatggggagattcaggtttatcagttgcagatggtctttcaaatctgctgaaggcatgccccgtcttcatctgccttcgttctcactcattcaaacgccacccatgcatccttcgtaactcagcaggttaactgaatattgtgatctgcagtgccgtctatcaaccaccatccgctgcctttctcacccaagtgcacacgtgcgcgcactcagcatgtctgtcctccgcgacatcctgagcaacggatccgtgaaccccaacaagacaatccaaggggaacagcagcggaacggcatccagagcccgtcctaccggtgcctggccgcaggcatcatcaactggcaagcggacgtcgagaggtgcatagagtgggaagcccacagccgccgcgccactgggctgacgctcgccttcctcagtgccgcagcgaaggagctcggctgccctctcccgtcatgacaaggccattcctggatctgacatcggcttccaattgacggtcagtgctggcacagctgctgcagggtccgcgagtaggacggctctaatctctccatcacgtgttattatctggtgtttccataatgcgatttgatttcaatttggcgttagatgttgtacacgtgtatttaactgcttgagttgtacgtaatttgtatacttgtaactttgtttaataatatggctattactcaagaagcggaacatatcttatcctttttatatgctgctgctagatccgttcaacgtgagtgccatgcaaatgtccacgaaatgtttagtatttgttagggggaaaaggtctcggtggaaggtaaaataatttctaactgttattcaggataaatgatttaacgtggtttgaattattacaaccttcgtcccttaaccttcatcagactattttgtcagatggcatcgctttgtctaatcagcggagaaccaag

SEQ ID NO: 13713 - DNA, 1234 bp, Zea Mays
tccggtgcccactcacgcgacggacgcgtgtttccagccttccaggcgcctctgctgcctgcgcctgcgcgcgtcgtgaaggcgtgaacggcagctcggctcggcgcaggccccccgcccgcgccggcatcgcgtcgcggccgccgcgcgagccccatgctgcgttgctgccgcacgacacgtcacttcggctgcggcgtggttgtgtggactcctctcgctcctggccctcgccggcgctgcgtcggctgcggatggggcggagggtgagtgggagccgctgatacggatgccgacggcgaaggggagtgacgctgcttctgctccggctgctgaggatgatgaagtggggacgaggtgggccgtgctcgtcgccggatccttcggttatgggaactaccggcaccaggccgatgtgtgccatgcgtaccagatactgcagaagggaggagtgaagaaggagaacattgtggtgttcatgtatgatgatattgcccacaacattctgaaccctaggcctggagttatcattaaccatcctaaaggagcaaatgtttatgatggtgttccaaaggattacacaggtgatcaggtcactactgaaaacttctttgctgtcctcttgggcaatagaagtgctaccactggagggagtaagaaggtatgccgaacctgccatatctgtatgctggtgacttcatcaaggtcttgaaaaagaagcatgcttccaatagctactcaaaaatggttatatatgttgaagcatgtgaaagtggcagtatctttgaggggttaatgcctgaagatctaaatatttatgtcacaacagcctcaaatccagttgaaaatagttggggaacttactgccctgggatggaaccatcaccccctcctgagtacattacctgtttaggtgatttgtacagtgtttcttggatggaagacagtgaaacccacaatctaaagaaggaaaccatcaaggatcagtatgaagtggtgaaaacaagaacctcaaactcaaataagtacaaagagggttctcatgttatggagtatggtgataagaccttcaaggatgagaagctttccttttatcaaggttttgatcctgctaatgccaacattgcaaacatgctgctttggccaggcccaaagggtgcagtcaatcaaagagatgctgatcttctcttcatgtggaagaggagaagattggaggaagaactagctttctaat

SEQ ID NO: 13714 - DNA, 2209 bp, Zea Mays
ttttttaaaaaaaagctgtttgttttgcagtagtagccatacttgttgcattggtggcatctagtccaacgaaaggctggagtggccgcagtttgagtctacttgacccaacttatgcaagcaagtacatccccatcattgctagtgtcagtgaacaccaacctcctacctggccctcgtattttatggacattaatgtgttggccttcctgattcctgctgggattatttcatgcttcttgcctctgtctgacgcaagctccttcatggtcttgtacttagtcactgcagtttatttttctggagtaatggtacggcttatgcttgtccttgctcctgctgcgtgcattttatctgggattgctctatctgaagttttcagtgtgctcacacgatccattaaattgcagctgtcaaaattatttgatgatagccctacttcttcaggtgacagtagcccagagagttctacaaattcaacaaaaaatgaaaataggaatgaaaaacacgaaatagctccaaaggaaaaaacatcaaagaagaaccggaagaaggagaaagaagtggcagagagtgttcctgtaaagcctaaaaaggaaaataggcttttggttctgccttttgaattatctgttatgggtattttattgctcatcgtattaggtggtttctatgtggtccattgtgtatgggcggcagctgaagcgtactccgcgccttcaattgtgttgacatctcgttcacgagatgggttgcatgtttttgatgatttccgtgaagcttacgcatggctgagccataacacagatgttgatgacaaggttgcttcctggtgggactatggttaccaaacaactgcaatggccaacagaactgtgattgtagacaataacacctggaacaacactcatatagcaacagttggtacagcaatgtcgtccccagaaaaagcagcttgggaaatcttcaattctttagatgtcaaatatgtgcttgttgtctttggaggacttgttggataccctagcgatgatatcaataagttcctttggatggtacgaataggaggtggtgtgttccctcacattaaggagccagattatcttagggatggtcaatatcgcgttgatgctcaagccactccaactatgctgaattgcctcatgtacaagctttgttactacaggtttgtggagactgatggaaaaggctttgacagagtaagaggatatgaaataggaaagaagcatttcaagctaacacattttgaggaggtatttacaacccaccattggatggtccgcatatataaactgaaaccccagaagaacagggttcgaggcaagctgaagaagttgaaggccagtgccaaaactagtcccacacttgcggcagggcgaaagaacccgtggcaataggtgaagttaccaatagtgccatttacctgatactttgttggtagatcaagtgcgctaggttggtgaaccagaaaactacagaactagattagagatctggactattgtattggaccctcgttatatgttctcccaaccggccgggtgctgatgaaatttttgatagaccagaggagtttatcaatcccatgggtttgagattggatggcggcgataattttctagtgacaggggttgtttaagactacctgttacttgctgttttgtgtaacctacaatttttcttacaaggtacttctctactggggtgatagtgagttcaggacatcgtgagcactgagcactgaggctatatccactatccagcaaagaaggcaaaatgcaaaatagggtatcgcacggcactttagcacaatggcatgtctctaatagggtatgcattaggaggtaaaatgcatatgagaggggatatgcaaaatacagtattgatttgcatatgcatgatctgttggaggaatctatactatatgttttttttgtaaaataaaaaaatataatcgtgtcgggccgggccagcactacgtgccgaggctacagcctaaacatggcacgacgtttttggctcttgcaagcattaggtcgtttctcagaccacattggcgcaatggattccatgatgtttgaggttgctgaattagatggagcaataatgatttgtcacactaacagtaaaatgaaagattatttgttggttttaaacgttagtaattgctatgaagtagcataattta

SEQ ID NO: 13715 - DNA, 2669 bp, Zea Mays
aacagtgtcgccactcgccacagagcgctccatcaacacgaccgccggtataaacgcagcccccctccggcctccaccaaggccaacattgctcaggctgctcccaactcccatcctccccctcccggagtacgaagtactagaaagagagcggctttcctctaagaatggcgggtggcggcgccggcgacgacgacgtggtggtggtgagctgcggcggcagaggcggcggcgaccccggcgcatacgccgcggtgctcaagaggaagctcgacctgtactgcgccgccgtcgccaaatccatggaagctaaatcacaagaacattcgttgggctaccccaactcacaagcttcagatgcttcgcaattgatttctcaagcttcctttgatggtatttatgacctctcataactgagtgcatgtcagtctatcaaccaacttggggtaaacatgcaggcaggaagatttcgaaggaagtagtgccttaggatggcaggatgtggtctggtttaaaagcatgttagatgccaaatcctattcagttcaccatctccccgctgatcattccaatagggcattagatgcaaacctcacttatcctagtacacttgattaccagccttggtttgagtactgtgagtgtgaagtgtgaaccattcactagagtctacaggttagtcttccatgataattacgtgcacaagatccgatctcaccagcagtttcagtaggataggttagctgatgctcaaggaatccaggtgagtagaaatatcaattccggattacctttgtggtgtggttgaggttgatgtgccggctcattgataattctggaggaatgatctaaactatgagcaatgttggtgagatcagatataaggatgaaaaatgaagtctgatactgcttcagttatactgaacagtcatgtcaactctgttggtgagctgcactgggcatgcaactctggcaccagttttgcactctggcagtgtgaagatatgatgcatgtgtggttcagaaaatatataggccttttttgtgacatttgaaccgttggacttattttactgtactgttttggtttcttccattctacacacaggtgacatagatggggcaagcctagttacaaactctaatgtcatagaagatgatgattttcaaggcaagccaaccaacagtggcacatcaaaggaactgtcagacgatgatggtgaccttgaagagaatactgaccccgctaacgccaagaagatgaggagttaaatttcggtgttgtgatcagaatggtgtcaaaccgggaatcggctaggcgatcaagaaagaggaagcaagcacacttgaccgatcttgaatcacaggtttccaggttaacgtctgagaatgcatctttgctgaagcgactggctgatatgactcagaaatacaaggacgcttccgttgacaataaaaatctaacagttgatgttgagactatgaggagaaaggttcgttcgtcttgaatgcatcacagacctttttcttcttttttttgttgtacgagaactcttaactgcatccatttatcgatcataacatttttactgggctctgtgtatactcaccgtaatcaacgtttacatctctctagatggctgcaaagggcagtgaaagtaatatgattgttcatagttcttattttagaacctgcaagttcagttttagtttctaatggtttttaactgcacacaaaaggtatggcagcattttcatttgattttctgaaattctgcataccttctacaagtgtgataggaataatttagttccttggttttgttttcttgcagtatcatttcagaaattttatttccttgtattatatatatatatatatttaaagaataacagtgttctcttacaggtgtgaggagttgtaaaacgaaacaaaacattaaaagcgcacataccatgccgcaatgcgccaagtgtgtgtcccattaagcctgtggggtgttgcccttgccttgccttgtggatgggctgctctatctcaaatgataccgagaggagtccaaacagaatactaccatacaaacatttcttaatgcttgtgtgtgaacatagccgaggaagctgtcaggaggctaactgggatcaccctcatgctaccgaccgcttttgagaagcccacgagcagcgcgcccctgtcatcatgtccatctgatgcagcttctgcttctgcttctgccgccattgaagacagcgtgaagcatttcctccaggcgccacttgaaaacagtgggatcatcccaaacgcagcagtttttcagaccaagccagcttctctgcaccgtgttgctagcctggagaacctgcagaagaggatcgtcggggatgcaatgtattccgagaccgcgtcaacgacattctcagatcctgaagctcttgccgataggtaaaggttgctcctgtcctgtgatgaacagccgtgtgatgctctagcggcctaagtgcttctggtaatggaagttgtagcacccatgcgcctgggtggggtctacacagtgatttgtacactattttgaaggttaataataattgttgagaaatgatctcatccctttgtacctatataagtaaagtattccattaataaagagaatagagttttcactcttcat

SEQ ID NO: 13716 - DNA, 1633 bp, Zea Mays
atctgcacttccggtcgctatctgagtttaaaattgactgtgtagacatggtttgcccgtgagatttaggccgatgtgtgccatgcgtaccagatactgcagaagggaggagtgaagaaggagaacattgtggtgttcatgtatgatgatattgcccacaacattctgaaccctaggcctggagttatcattaaccatcctaaaggagcaaatgtttatgatggtgttccaaaggattacacaggtgatcaggtcactactgaaaacttctttgctgtcctcttgggcaatagaagtgctaccactggagggagtaagaaggtgatagacagcaaacctaatgaccacatcttcatctattactcagatcatgggggtcctggagttcttggtatgccgaacctgccatatctgtatgctggtgacttcatcaaggtcttgaaaaagaagcatgcttccaatagctactcaaaaatggttatatatgttgaagcatgtgaaagtggcagtatctttgaggggttaatgcctgaagatctaaatatttatgtcacaacagcctcaaatccagttgaaaatagttggggaacttactgccctgggatggaaccatcaccccctcctgagtacattacctgtttaggtgatttgtacagtgtttcttggatggaagacagtgaaacccacaatctaaagaaggaaaccatcaaggatcagtatgaagtggtgaaaacaagaacctcaaactcaaataagtacaaagagggttctcatgttatggagtatggtgataagaccttcaaggatgagaagctttccttttatcaaggttttgatcctgctaatgccaacattgcaaacatgctgctttggccaggcccaaagggtgcagtcaatcaaagagatgctgatcttctcttcatgtggaagaggtacgagcagttaaatggggggaccgaagagaagctgagggctctcatagagattaaagaaactgttcagcacaggaagcatcttgacagcagtatcgatttcgttgggaggctcgtcttcggatttgagaaagggccttcgatgcttgaggctgttagaacctctggtcaaccattagtcgatgactgggactgtttgaagaggatggtgcggattttcgagtcccagtgtggttcacttactcagtacggcatgaagtacatgagagcgtttgcaaacatctgcaacagtggtatatctgagatgaaaatgagggagtcgagcatcagcgcttgcagcagctacaactcggcgaggtggagcccgatggctcggggacacagtgcttgatggtaaagatcaaatagcaaagccccccgaggtctgctgccccatgtccctgtgagcgagctcgtatcatctggggactgtggacccatcgacggttgtacatatcatgcacttgtgctcgtgcctatgtaaagtagtaataccaactcaactctgatcttcatccaagtaccgaaatgattaaaagatcagatgtgaatgctgttgcgatgggtgatcgcaagtaggccataatcagtggaccgaaaatgatgacccaaatcaaggtagtgctcctctgatcgatagcccaaatctattgctaacaaaa

SEQ ID NO: 13717 - DNA, 2022 bp, Zea Mays
aaacctagttcccttccacacctgctctgctctttaataattgacatcatatctgcaattgaatttgacaaatctggtgaccatcttgccactggggataaaggaggacgtgtggttttatttgaaaggacagatgttcgggataatgccagccagagagaactggagagacaagatgttccagttactagacacccagagttccgctacaaaactgaatttcagagtcatgaacctgagtttgactacctcaaaagtttggaaatagaggaaaagatcaacaggatcaagtggtgccagacagccaacaatgctctctcccttttgtctacaaatgataaaacaataaaatactggaaggttcaagagaagaaagtaaaacgatttgcagtcatgaatttggacagttcccaaagtgcaggaagtagtaccactgctattgcaagtaccagtagttctaaggcacctcttccaaatggtggatgctctgatatgcttggttgcctgaataatgatctcacatttcctcctggaggctacccatcactgcgtttgccagttgttaccagtctagaagcaaaccctgttgctagatgtcgacgtgtatttgctcatgctcacgattaccatataaattctatttcaaataatagtgatggtgagacattcatatcagcagatgatctccgaataaatttatggaacttggaaataaacagccagagctttaacattgttgatgtgaagcctacaaacatggaagatctaacagaggtgattacatgtgcggagttccatccatcccattgtaatacactggcctatagtagttcaaagggttctatccgacttattgatctgcgtcaatcagcactgtgtgacaaccattcaaaaatatttgaggaacatgaagcacctggatcaagatccttctttacagaaattattgcatcaatttctgatataaagttttcaaggaatggcaaatatattcttagccgtgattatatgacgctcaagctatgggatctaaacatgaattcaggccctgtttcaaccttccaagtccatgaacatttaagacctaagctctgtgatctgtacgagaatgactcaattttcgacaagtttgagtgctgtcttagtggggatggacttcgtgttgcaactggttcttatggtaatatatttcgtgttttcggtcgtcctccgggaagcatagaggcaacaactttggaagcaagtaggaacccaatgaggcgtcagattgcaaatccagcaaggcccacacggacactaacttcttttgcccgtggtgttcggagaggtggagaaaatcaaggcgttgatgctaatgggaattcactcgacttctcaacgaagctgctccacctcgcatggcacccgaccgagaattctattgcatgtgctgctgcaaatagcttgtatatgtattatgcgtagagaatgccctacagaaaatttgttttttttgtggcttgctctcggcgaaggcccagggcccttcaactgcaaccagagagatggtgcaggacattgttgtcagttcaccccttggggccagaagccgctgatgtccacaagatcaccaatgctgtgctaacagactgcgccctgttgattctttagtacatgtgtaaattataattctaaacatgggaagttttgatccaaatattcaatcgtggcagttgtattgggagtcggtggaagggacatatcgaagataaaattctgtattggatttgcaggacatgcattgcaatggtgtagtatgactggcaatccttatcatgtaataccacctagacagggataatgttgtttaatgtcagaaaatgatagatatttcccagttattgtcgttactcatcatagttatccttctattagttgtactgttaaaataaggcagcaccgttataattgtgctttttctttttctgaatgccttttgtacactgaggttttcgcaagaaaggaattcacggaattaatgca

SEQ ID NO: 13718 - DNA, 1175 bp, Zea Mays
ataaaaagaggttatcaaactagcccttcaaatggggcaaaaaggcaatgttctttgaccaccgagcaaaccccagcctccgttactctccttcctcttggctcgcctcggctcccgtcgtccccttccttgagatctctaggatacgagcgcattcgcatcgcttcgcctccgccgcggcctggggagatggcgggtttgggaaaggcgatgtacgcggtgggattctggatccgggagaccggtcaggccctcgatcgcctcggctgccgcctgcagggcaagtacttcttccacgagcagatttcaaggcatcgcaccatcatgaacatctttgacaaaaccccacatgttcatagggatgcatttgttgctccaagtgcatcccttattggtgatgttcaagtcgggcaaggagcttccatttggtatgggtgcgtcttaagaggggacgcaaacaacatacaaattggatctgggaccaatatacaagacaattctcttgtgcatgtggctaaatctaatctaagtgggaaagtctttccaacaatcattggcaataatgtcacaataggtcacagtgctgtgttacaaggatgcacggttgaggatgaagcttttgttggcatgggggcaaccctattagatggtgtcgttgttggaaagcatgggatggtagctgcaggatcccttgtaagacagaatactaggatcccttgtggagaggtatggggagggaaccctgccaaatttctgaggaagctcacagatgacgagatcgcatttatcacggaatcagcttccaactattccaatctgtccaaggtgcatgctgccgagaatgccaagcctcttgaaaagattgagtttgagaaggtgttgcgcaagaagtttgctcaccaggatgaggagtatgattcctccatcggcatcactcgagggtccccaccggagctgacatccccaaatccagcccaataaacctctgtttttgtttctgttttctctttgacgccttaattattttgtattggacagcgctggattttgaccgggccatagttccatgacttaggtggtttatgtttacttttcctccccaataatcttgggtcgagcgatgttataaagctggtaacatggactgaattacatacttccattacctttgatgg

SEQ ID NO: 13719 - DNA, 761 bp, Zea Mays
aagcaatcaactaattgatttgttagtttcaatttttaataggaatctctcgacaacattaatctattttcgataattacagtcatgtcattcttcctgttggccccggtaaccttacttacagaaggtgttaaagttagtccagcagttttgcagtctgctggtttgaacttgaaacagatatacacaaggtcattgattgctgcatgctgcttccatgcataccaacaggtgtcatacatgatcctcgccagggtatccccagtcacacattcagtgggcaattgcgtcaagcgtgtggtggtcattgtgacctcggttctgttcttcaggacccctgtttctcccatcaactcactcggtaccgggatcgctcttgctggagttttcctatactcgcaattgaagaggcttaagcccaagcccaaggctgcttgatcatagacctttgcaggtccatccaatagaacttttgaagttatgctatgccattggaatgattagtgagtgccgtagttagaatgatgtttaaagaagagctaccacttcagcagataatttgtgacttgcttgcattttttggacggatttgttcgtgtattaataattttgcagtgacgatacttctgttgtgctgtttataatcttctgaaactgaactgagttgttgcattggactatcttcaatcgtgacactaatttaatagagtagacacgaaaaaaaatactttggtggaaaggtaatatttggaattatgttt

SEQ ID NO: 13720 - DNA, 1252 bp, Zea Mays
aacttggccccaaatcgtggagtggaaaccctactcgtccccttccgcatcgccgcccaattcccccacccaattcccactctccgctcgacagatccatacatgatgggagaggccaaggagaacgacgtttatgaggaggagctcctggactacgaggaggacgacgacaagacggtcgatggctccgctgctaagcccaccggagaggtcgcaaagaagggctacgtcgggatccacagttccggtttcagagacttcctgctcaagccagagctgctccgtgctatccaggattgtggttttgagcatccttccgaagtgcaacacgagtgtatccctcaagccattcttggaatggatgtcatctgtcaagctaaatctgggatggggaaaactgctgtttttgtcctttcatccctccaacaaattgaccctgttgcgggtcaggtagcagcacttgtactgtgccacacaagggaactggcttatcagatatgccacgaatttgagaggttcagcaaatatcttactgaagttaaagttgctgtcttctatggaggtgttcacatcaggaagcataaagatttgttgaagaatgaatgccctcatattgtggttggcacgcctggtaggatacttgctcttgccagggataaggatctctccttgaagaatgtgaggcacttcattcttgatgaatgtgacaaaatgctggaatcacttgacatgcggagagatgttcaggagatcttcaaaatgactcctcatgataagcaagtcatgatgttttcagcaacgctcagcaaggagatccgtcctgtatgcaagaaatttatgcaagatccgatggaaatatatgttgatgatgaggcaaagttgaccctccatggtcttgtacagcactatataaaacttagcgaggcagagaagaaccggaaactgaatgatctcttggacgctcttgatttcaaccaagttgtgatattcgtgaagagtgttagcagagctgccgaactgaataagttactttgtgaatgcaacttcccatcaatctgcattcattctggaatgactcaggaagaaaggctaacaagatataagaacttcaaggaaggccacaagagaattcttgtggctacagatttagttggcaggggcattgacattgagcgtgtcaacattgtgataaactatgacatgccagactcagctgatacttatttgcacaggtgttcctaatggtctccct

SEQ ID NO: 13721 - DNA, 859 bp, Zea Mays
tactatagcatacatcagaaagaccagatttttgtgtgtaaagatttgcgagcaccattcactttttcatcagtgtgaaattaaaacacttcaagcatgagctctcaccgtgtgaagtggaatgaggacaatttgtatgaaattgagtcaaacaaaccggtgaggcagaagataacagagccaaagacaccatatcacccaagatagatgatgatggatcattgtcgccaacacgtcctttcgacaaatgtcttgatgagactgtccaggctgaagctatcttaacagccttaaatggtgtggcttcttcaagcattagcatttcaaaggatgatggttggggatcgtcagatgatgatacagatgccatagatcaagatgctgaccctgaagctgacacgacaaggttgagtttcaaggagcatcgccgtgcccactacgatgagtaccgcaaggttaaggagctgatgaggactggatcccttactgctgaggaggccgatgaggataacagagctgccaccagctccgaagacaaaggtgtggggaaaggagggccgaatgataacatgaagccctcgcctcaaacatgaggagttcatatgaaggttctgattcctctgttatttattgtatcattgtatgcaatacagttgttactcttgttttgttttgagatgctggtgtgccaaaatggatttgatgaccgataattttattggtgttggctacctggtcgaatggtcgtcgctccattttgttggtgacttaacaatttcaattgagaaaatatgtttcaaaccgagcaaactgcttgatgctgaaatcagttattcgccaagagtgaatcttcctatca

SEQ ID NO: 13722 - DNA, 405 bp, Zea Mays
cagaccccgggatgctcatgtatgttcaacctcttccagaagggcgagccaatggctctcaagcataatggctctttgtatgctcatgtttacttcgcccgttcgggttatcctgtggaccctacagatccaaaatatgagcagaaatcttcgtttgggaggacccatcctgttgtggcattcttgccaaaatcaaaagctggtaaaaagaagagcttgcttggagattcagaagagcctgaagagaaagcaccgcataataaggagaataaagaatatgaggataaagatgagggtctgactgaatatatatcttattttggaatggtggtatctatagtagagttgtggaggctaaggcccctatggcaattgtgattcctgtaagggggtctttgctaataa

SEQ ID NO: 13723 - DNA, 1087 bp, Zea Mays
tgacattgtcgcaatagacaatagtcgctgaagggatcgaggtgctgataatctggtaccaatagaattggccctcaaaattgcaagtaagattaaagcgggagaacgctttgcagtgtatgtagtgataccaatgtggccggaaggagtccctactgcagcatctgtgcaagaaatccttttctttcaggcccagacaatggagatgatgtataaaataattgcagatgagctcaaggcaacggacaataaggatatgcaccctgaagattacttgaacttcttttgtcttggaaatcgggaagaaccaccatctaatggtagtccagaatcagagaaatctacagataaaagtgcagcggccttagcttcgaaatatcgacggttcatgatctatgttcacgcaaaagggatgattgtggatgatgaatatgtcattctgggttcagcaaacatcaaccagagatccctggctggttctagagatactgagatcgcaatgggtgcataccagcctcattatgcatggtctacaaagaatggacatcctcacggccaggtatatgggtacagaacgtctctgtgggcagagcaccttggaacggttgatgatcgcttcaaggatccttcgagtttggagtgtgtaaggtttgtgaatcaaatagctgtagagaactggcaaaggtttacagcagaagaaatgagtacgttacaagggcacctcctcaagtacccagttaaggtggaggctgatggtaagatcagcccactgtcagaccaggagtgctttcctgatgttgggggcaagattctgggagctccaacttcacttcctgattcactgactatgtagtgttattacataaaaaaacttctttcagagttgaactttgtaattgtctaaaattggcgggtttatcgcagaacttgtactatatctgtaatcatcgatagttggcgcagggaaagttcaagatgttagtggtgctaagttttcccagcgtttgtaaatgaaccatatgataggatcctagacaatgcttccatttccattatgattatacaacagttttcaacatttttgctc

SEQ ID NO: 13724 - DNA, 175 bp, Zea Mays
agaccagttcatgtagtggaggatccgtgggaatggttgacatatgcaagggttaagtactacatatgtcgtaaggttggagatccccaactgggtattaatcgattcggatcgtcgttacttctcggatatgaagactagatcgctgcccttcatcgtagataacaagcaaaac

SEQ ID NO: 13725 - DNA, 920 bp, Zea Mays
agacagtctagaaccgatttggatttatggtttacgcacaaatatcagacaggccaaacatttttcagggcttaccgggaagccggtcaggcgtagtactttttcaggctgtttgaagagctcgccatttaatctcaatggaagccaagtttttccgtttcctgaagctcgttggggtcggcttcaaagcgaggtcagagagccaaggccgtgagttgttccttaaactgggcttcagccatgaggtgcagttcaccgctcctccagctgtccgtgtcttctgcttcaaacccaacataatctgctgcaccggcatcgataaggacagggtgcaccagttcgccggcgccatccggagctctaaggctccagaggtgtacaaggggaaggggatcctgtacattgacgaggttatcaagctgaagcccggaaagaagcgaaaaaataagtgacgatccgaaggcgttacaactttgtctctgtcttttaaccccatgcttcgcatttgtagtgatctggatctggggtctgctgtgttgtgttgtgtacttgcgttgtgctacacagatcaccattatcttacctttacctcagctgcatgtaggaccatgagtgggaataagttaccagtttgttgatatgagctggaacgttgctttgcgaattggattggattaccgagtgggatgttttgtttcaaacttgaagtctttcaatagattgttgcaaatcaagtgtgaactgtgaacatgacccgagaactgaagctaggactgcttgggcacccaatacccaaatttaaaccattatccatcttattagatcgtatagataatttctatgtatatatctggccaaactatcctgtacggctgtacaaagtagccgctcatgaaaattgtactccagctgtttcaaaa

SEQ ID NO: 13726 - DNA, 86 bp, Zea Mays
agcgcagattctgcgcttagttgtccacacgggagtcactggtaggtggtgatgacgaagtggtggtggggatcaggaggaggaga

SEQ ID NO: 13727 - DNA, 1798 bp, Zea Mays
ttcctgtctggctcgtcgtctctttatagattcagacagagcaagaaaaacgaggcctgatttcttgcagggcgtgcggcggcagcgcatgcgggagcccaggaatcctcgcatcccgacatccgatttctctccctctccctcccttcccttcctctgcttccggggaggaggagaggaaagagacgaagggcgcgccgggaaggaggaccaggaggggaggcacacaacgcttcctcttgcacgcgggagtcctcaagcctcctccttggccttggctccaattcggggtgccataacacgacctctgccggcggccggccaccggcacccatgtcgcccttctacctcgctcgcggtgcttccaagctagtgagaaggattacctcggagacatcagtcgagctcaagattctctctgaaaaatggcggcttctcctcgctggcgtcatttttcagtacattcatggtttggccgctcatggggttcattatttgcaccggccggggcccacccttcaagatcttggcttcatgattcttccggagcttgggaaagaaaggggttacatcagtgagacattgtttacgttcatcttcctcgcctttgtgttgtggacatttcatcctttcatccttcagactaaacgcttctacactgttctgatatggcgcagggtacttgcattcttatgtgtttctcagtttcttcgaataataacattctatgcaacacagcttccaggacctaattatcattgtcgagagggctcacatctggctagattaccaccaccccagaatgcagctgaggtcttcctgattaatttcccaagaggagtgatttatggatgtggtgacttgatattttcatcccacatgattttcaccctagtttttgtcattacataccagaaatatggaagcatgaggttttgtaagatgcttgcttggtgcgtggctattgttcagagtcttcttattgtatcttctcgcaagcattacagcgttgatgttgttgttgcatggtatacggtgaatttggtggtcttttttgtggataagaagcttacagaacttcctgatcgatcggtggggtccacatcaatacttcctctgagtgcaaaggataaagataccaagttgaaagaagaaaatacgagattgctgaatggtaactctatggattcagctgatcggagaccacgaacacaaatgaatggaaagcaaattgataatgaaagccaagttgatagtgaaactgtgaaagcatgatatactctgatggagggggttttgtttgctaaaagctgttcagacagctaaggccctgttcgtttgttacggattgatggatcggaacgattcctaatcggattgctttagtttatataaacctcagctggaacgattccggggattgcttctctagtttatataaatctcaacgggaacgattctggatgtaattctacacaaacgaacaaggcccaaagaagaaatatgggatgccacgcgctttggtgcctagctccttgatgacttgatgacatagctacgaaggaaatagctttacatctcgctgttctaggcagcagaagttttgtttgcactttgcaaaactgtatatccttctcagctgtctcattgtaacccattctttttctggtttctttcctttattttccagcttggagttcagattctttctttatattaactgtgaatagatagtacacatctgaggttctttgcatgcgaacagtattcgtatagtcaatataaaattgtccttata

SEQ ID NO: 13728 - DNA, 1848 bp, Zea Mays
cagggagaaaataaaccacgaatcggataatgctggtggacccagctgccacctgccatttgggcccccgatgcttgaaacacccgccgcgggccgcgtcggcgtcggcatccgtcgccacaaaactctcctcgcaagcgtcgccgccccgcacagatcaaccgctcgaaatttgggggaagcaagcgagagcagcagcaagcctcatcgggaagtggagagatggaggcggcgggtcgcctccccctcctcatcgtctcctccctcctcctgctcctctcgccggagcggccggcggaggccgcgccgcggcgaatccagccgctcgccaccgccgcgctgagccgcctctacgacacctccaactacggcaggctgcagctcaacaacggcctcgcgctcactccgcagatggggtggaacagctggaatttcttcgcctgcaacatcaacgagacggtcatccgcgagacagctgacgccctggtgtccacgggactggctgcgctgggctacaacttcgtcaatatcgatgattgctggtcatacgtgaaacgtggaaagcaggatcaattgctgcctgatccaaagactttcccttcaggcatcaaagcccttgcagattatgtgcatggaaaaggtctgaaacttggtatatactctgatgctgggaaatttacttgccaagttcgacctggatcactcggtcatgaaaatgacgatgctgcgatctttgcttcatggggtattgattacctgaagtatgataactgctacaatttgggaattaagcctcagaaaagatatcctcctatgcgagatgctcttaattcaactgggcgccaaatattctactctttgtgtgaatggggacagtatgatccagccttatgggctggcaaagtgggcaatagttggcgtacaactgacgacataacggatacatggaaaagcatgacagacattgctgataagaacaacaagtgggcatcatatgctggacctggtggttggaatgatatgctggaagtaggcaatggtggcatgaccttagcagagtatcgctcacattttagcatatgggctctcatgaaggcccctctattaattggctgtgatgtcagaaacatgacttctgaaacaatggaaatactgagcaacaaagaagtaattcaagtaaaccaagatcctcttggagttcaaggaagaaaaattttaggacaaggaaaatatggatgccgtgaggtgtgggctggtcccttgtctgggaatcggcttgttgttgctctgtggaaccgttgttcagatactgctaacgttacaatgaaactgccagcagtaggccttgatgggtatgctgcctattctgttagggatctgtggaagcacgaaactatatcggaaaatgtcgtaggaacttttggcgctcaagttgacgtgcatgacaccaatatgtacatcttttctcctgcaaccattgtcgcttcggtttgatcaggaccggtggatccaagatgacagcaccgctatgattcaaggatatgtcacgacaacaagggccttcgtttttcctgctgcattctgttccacccgagtgcagaagtccacttcgtgcagaactgtctcagtgatgtttgtatttctcacggaatagctctatttatctcaagattgagcaagctcgaggcttactcggtgtaccggcgttgtatccttggggcatccaagatcttgtacgatttgaaacagtctgaaccaatgatgtaaaacaagatagtgaaaatacaacttcacaaattgcagccgtacaagcagcacttgtacaagcactctttttttctgttcaca

SEQ ID NO: 13729 - DNA, 1792 bp, Zea Mays
ggacccaactgcaaacgtggcctgcaaatatctcgtgacctgcgcgggcggaggggacccgcagcccaggccctggtggacccggggcgccagtcccagtccagtccctcactgtggactcctcgcgtgccccgccgcccttaaatcccccggcagcagcgtgctgcctcgtgtctcacccctccggacgaaatctgacccgggccacactccgctgctccgccatggcgatccgctccaaggcctggatctcgctgttgctcgcgctggccgtcgcgctctccgcccgggcggaggaggagcccgccgccgccgcggagggcgaggccgtgctcaccctcgacgtcgacagcttcgacgaggccgtcgccaagcaccccttcatggtcgtcgagttctacgccccctggtgtgggcactgcaagaaacttgctccagagtatgagaatgcggccaaggcacttagcaagcatgacccaccgattgttctcgctaaggttgatgctaacgaggagaagaacaggccgcttgctaccaagtacgagatccaagggttcccaaccatcaagatattcagggaccaggggaagaacattcaggaatacaagggccctagggaggctgatggcattgtggattacttgaagaagcaggttggccctgcgtccaaggagatcaagtcaccagaagatgcgacggcccttatcgatgacaagaagatctacattgttggtatcttcgctgaattcagcggcaccgaatttacaaacttcatggaggtcgcagagaagctgaggtctgactacgactttggccacactttgcatgccaaccacctcccacgtggtgatgcagcagtggaacggccattggtcaggctgctgaagccatttgatgagcttgttgttgacagcaaggattttgatgtcgctgcactgatgaagtttattgatgctagcaccatccctagagttgtcacttttgacaagaaccctgacaaccacccatacctcatgaaattcttccaaagctcagcccccaaggctatgctgtttttgaacttctccaccggaccttttgattctttcaagtctgcctactctgctgccgcggaggaattcaaggacaaggaaatcaagttccttattggtgacatcgaagccagccagggtgccttccagtactttggcctgaaagaggaccagacaccccttatcctcatccaggatggtgactccaagaagttcttgaaggttcacgttgaggctgaccagatcgtcgcttggttgaaggagtactttgatggcaaattgacgccgttcaggaagtctgagcctattcctgaggtcaacaatgagcctgttaaggtggttgtcgctgacaacgtccacgacttcgtcttcaaatctggcaaaaatgtccttattgaattctatgccccctggtgcggacactgcaagaagctggcgcccatcttggacgaggcagccaccactctccagagcgacgaggaagtcgtgattgctaagatggacgcgactgccaatgacgttcccagtgagtttgacgtccaaggctacccgaccttgtacttcgtgaccccgagcgggaaggtgacatcctacgacagcggcaggacggcggacgacatcgtcgacttcatcaagaagagcaaggagaccgcaggcgccgccaccaccaccaccacccaggcgccaccggcatccgagaaggcagccgccgccgagcccgtcaaggacgagcttaggggattggagcgttggagggcgat

SEQ ID NO: 13730 - DNA, 218 bp, Zea Mays
atatttattttgcaacagacccttgcccacacgcacatttcatcaaacaccaaggctgcagtaggtagaaaaaggggagcaagaacatgggaccagtaaggaatcttaccgctgctgttgcacacccatagggattaacgacgcggacggagatgtcgcgctatggctggctcgccagcatcgcctcgtgatgggtcgcgcccacactagtggcacct

SEQ ID NO: 13731 - DNA, 2365 bp, Zea Mays
acatcatcgccccccttccccgcggccccaccaaatagagaggcccagacaccgaggggaaaaaggagagagagtacacaggtgacagccgctgcaccgagggcacagagggacagctagacagggactgccagcggcgtaggcggtgtgggggatggagcgcgagatggcggacgcgcccgccgcggcgatccccgccgccgagccgctcgcggcggtggcggaggaaggggagggggaggcggccgccgaggcagtggggtccaccctcaccatggagcgcgtcgccgccgcgaagaagttcatcgagagccactaccgctcgcagatgaagaacatccaagagcgcaaggagaggcgctttagattggagagacagctagcttcttctcaagttcccaaggaacaacaaatcaatttaatgaaagatcttgagaggaaggaaactgaatacatgcgacttaaaaggcacaaaatttgtgttgatgattttgagctgctcactattattgggagaggtgcttttggagaggttcgattgtgtcgagagaggacctcaggcaacatttatgcaatgaaaaaactcaagaagtctgatatggttgtcaggggccaagtggaacatgttagagctgaaagaaacttgttggccgaagttgctagtcatcactgcattgtgaagctttactattctttccaagacactgagtatctttaccttattatggagtacctccctggtggtgatatcatgacccttctcatgagagaggataccttgactgaacatgtggcacgattctacgttgctgagactattcttgctatcgaatccatccataaacataactacatccacagagatattaagcctgataatttgcttctagataagaatggtcacatgaagctgtcagattttgggctgtgtaagccaattgattgttcaaagctctcaactttgaatgaagatgaacccatgagtgatgacaacttgagggaatcaatggatattgatagttctttgtctgatacagcaaatggtagaagatggagaagtcaacacgaacagcttcagcactggcagatgaacaggagaaaactggcattctcaactgttggaacaccggattatattgctccagaggttcttctaaagaagggatatggaatggaatgcgattggtggtctctgggcgcgatcatgtatgagatgctagttgggtatccaccattttatgctgatgatccaataactacatgcagaaagattgtgcactggagaaaccatttgaagtttcctgaggatgcaaagttgtcaaatgaagcaagagatctcattagccgattattatgtgatgttgaccacaggatcggcagtgcaggggcagatcaaataaaggcacatccttggttccgaggagttgcatgggataaactttatgaaatggaagcagcatttaagcctcaagtaaatgatgaactggacacacagaatttcatgaaattcgaggaattggaaaatcctccagccaaaacaggctctggaccttcaaggaagacgatgctgaactccaaagatctgagctttgtggggtatacgtacaaaaacttcgatgcggtgaaagcaataaaaatttcagatctgcaaaggaattcatctctaacaaggccttccattggttcaatattcggtccaccaggcatggattctcccatggaaccaaacgggaggggcacacatatgcacacagtttcatctggtgatccaatgattccctaacctgcagtgctgtttgtcctcggcaaatttctgaactaaatcagcatgcaaacgcctggatgatgtggctccagctggataacctgctcatttttagccaggtttctgctttctcaatcgtgggcaagcggtttgtagaaatccaccagagtttctagttgtaaaatagtattccacggactttaacaaaggtcccatgtactaagggctcatcatcagacaccgggacagtttttttctggagaaattgcaccttgcggctggctgcccaggttggtagagcaaattgcggccttctcttgtggcagttcccggtccgctaacatttgatcagggaagggaaataagatggtgttgttgcggcaggaattctcatgggggggagttagtgttgttgtttgatatgtatcaggaattttcacatttgtagtagggtttctgttagcatattttagaaacatcctttttgcagagttgctatttctcattgatgtatggaaaacaacataatttggagatcgaagctcgatctaacttttatgctgcatatctgatctagattacatcaaacatgattcatcc

SEQ ID NO: 13732 - DNA, 697 bp, Zea Mays
attctgaatttctcaccgtctaactgtaggtgcagctgtgatctcccaacgccatttcacggttcttcgtcaaccgtcatcgctttctccccctcccccgtctcttctccctcgagggaataagcccgccgcgtgaagcttcttcttgcatccgagtgcggaatcacctccaatctgcccctcgggccgccggcgccgatggagaagatgtgcagagggaggagaagaacgtggagaaagccatcagggaggctgccaagcgcaatgacatgggatctgcaaaggctcttgctaaggaacttgtaagatcaagacgtgctgttaatcgtctttatgagaacaaggctcaactaaattcagtatcaatgcaccttggagaaattgtcgcaactgcaagaacagtgggtcatctgtccaaaagcactgaagtgatgaaaattgttaacaatctaatgaaagctccagagttggctaccacgatgcaagaatttagcaaagaaatgaccaaggcaggtgtgatggaagagatggtgaacgaggcagttgattcagctttggactctgaggacatggaggaggaaatcgaagaggaggttgacaaggttcttgcttcagtagctggggagactgcctcccagctaccagatgctgccagaacacagaagatacatgaggcttcaacaagcagggttctttg

SEQ ID NO: 13733 - DNA, 1258 bp, Zea Mays
tatagaggttgaatagaggatgctgattaattaatgaaaaacaaatcactgaaagctacggtgctcaataatgagctcaccatagtagcttctgaaattgttaattttgactctgaattgccacactacaaaactgaaggtggggtgtacagagacccagcagatgataggcacattttttcaccaaccattatgtgggtggaagctttggatgtgctgcttgagaagctaaaaccaaagatcaacttcggtaaggtagtggctgtttctgggagtgggcagcaacatggcagtgtttattggaaaaagggcagccatgctgtgttatcctccttggatgctagtaaaagcttgttatcgcaactaaaggatgcattttctacaatgaactcaccattatggatggatagtagcacaacaaagcaatgcagagaaatagagaacgcagttggaggtgcactggagttagcaaaactcacaggatctcgtgcgtatgaaagattcactggcccccagataaggaagatctatcagacagagcctgatgtttatgaagataccgagagaatatctttggtgagctcgttcatggcatctatccttgttggaagctatgcaagtattgatgaaactgatggtgcggggatgaacttgatggatatcaagcaaaggatctggtcaaagtctgctttagaggcaactgctcctggacttgaagcaaagcttggaaatctagcaccagcatattcagctgctggtcgaattgctccttattttgtagaaaggtttcagtttgataagaactgtttggtcattcagtggtctggagataatcctaatagccttgcaggtttaactctgaatacccctggtgatcttgccattagccttggtactagtgatacagtattcgggataacaacagaagctaaaccaagccttgaaggacatgttttccccaatcctgttgagcctaatggttatatggtcatgctatgctacaaaaatggctccttgaccagagaagatgtacgaaatcgctgtgcagacaaatcatgggacgtttttaacagctatctggagaaaacgccccctctaaatggtgggaagataggattctactacaaagaccatgagatcctccctccacttccagtgggtttccatcggtacactgtcgaaaacctcaacgacgtctcatcagacgctctgttggagcgtgaagtggaagaacttgacccaccgtccgaggtttgcg

SEQ ID NO: 13734 - DNA, 967 bp, Zea Mays
cgggttctgtctgtcctgctgtgctccttcctaaatcagcaaatcctatcttgtccgctgcccccgccgccccgcggttgggtcgtgtcgtgtccccacctcgtcttcgttctgctcctaccaattccagtcccagccatccgcccgcccaactatggcggcaacggctctgctactccccagcctcgcggcgctcacggacacgccgcgccgcgcccacaggttgctgcagccgcagctccagctccagcgcggctcccttgtctctcggtccctccggcctccgcggcgtcggcggctcgcggtctcggccgtgcaagagacgaaggagggggaggccaagacggccgacgagataaccgagaagtacgggctcgagttcggcctctggaaggtgttcagctccaaggaggaagagggaggcgaggggaagaagtcgcggacggaccaggccaaggaactcctggccaagtacggcggcgcgtacctggccacctccatctcgctctccatcgtctccttcactctatgctacctcctcgtcagcgccggcgtcgacgtgcaggacctgctcgcgaaggtcgggatcgtgacaggggaaaccggagggaaggtcgggaccttcgcgttggcctacgccgcgcacaaggccgcgtcgccgatcaggttcccgccgacggtggcactgacgccggtggtggccagctggattggcaagatcaggaagggcggcgactgatgcgccgccactcaagcggaaaagatacagcaatgtgcaaacccaatgctcttcacaataaaaatggtgcaattaaagggatagaaagaaatcaagatgcaatttaagagcgtgtatgtaatgtactaatgtagaactggagttctgatttctgaattgtgtgattcttctacgaaatattaaggcttgatgttctcagttaactgatgagtgatgattatggaatgc

SEQ ID NO: 13735 - DNA, 342 bp, Zea Mays
gccacccccaatcaccaatcgaagtatgaatgagataattgacaagtacaacacgcattctaaaaacctggggaaaacagaacagccttcgctggacttgaacttagagcatagcaaatatgcaaatttgaatgagcaacttgcggaagcaagccttcgactcaggcagatgagaggtgaagagcttgagggattgaatgttgaagaactccagcaattggagaagaacctggaatctggtctgcatagggtgcttcaaacaaaggatcaacaattcttggaacagatcaatgacctcgaacgtaagtggagatccttttttttttgcaccggaactacaga

SEQ ID NO: 13736 - DNA, 3158 bp, Zea Mays
gcagcgcagtccatccatccacgcacacgcgcacccgtccctctcggcgcccctctcccccctcctccactccgctgctgcctgcttgcctcctccttgccgccgcgaccgcgaccgccgttcgctgtcgaggccagaggagaggagtggtcaagtccgaggccacctgcccaggctcagacctcccccgccacaacgcgagccgcatcgcctcgtctcctccacgccatacacgcccgccttcccttccccggcgaccaggacccctcgcccgcggcgccagcgagctcccccggccagtcgtaggcctcccggagctcagcacgcacgcaggtgggtccagtgaggcctggttgtgcgcgttcctgcgggcgtcgtcggggcagatccatggaactcagccgcccgcagcgcggatagtactgcacttgtgcaccagccaccagcggatcgccaggactgcccacctgctgctgcttgtgtcgctagccatttttcgggcgtctggcttggaggatatggccgcggcgatggacgcgcccaaccctggagcggctgctggcccaggaatgcctagtgacgccctgtaccaggagctgtggcatgcgtgtgctggcccgttggtcacagtacctagacaaggcgagcgtgtctattacttccctcagggccatatggagcagctcgaggcgtctgcacaccaccagcagcttgatcagtacttaccgatgttcgatctaccacccaagatcctatgcagagtagtcaacgtggaactacgggccgaagctgattcagatgaagtttatgctcaaattatgttgcagccagaagctgatcaaaatgaactcaccagcctggacgctgaaccacaagaacgtgaaaaatgcactgcccattccttctgcaagacactgacagcttcagatacgagcactcacggcgggttttctgttcttcggaggcatgctgaggaatgtcttcctcagctggacatgtctcaaaatccaccttgccaagaactggttgccaaagatctccatggcactgaatggcattttcggcacatttttcgagggcaacccaagaggcatctccttaccaccggctggagtgtctttgttagctcaaaaagattggtttctggggatgcattcatcttcatgagaggtgaaaatggtgagctacgggttggtgtaaggaggctcatgagacaagtaaatagcatgccgtcatctgtcatatcaagccacagcatgcatcttggagtattggccacagcctcccatgccatctccactggaaccctcttttctgttttctacaaaccaaaactagtcgctctgattttattgtgagtgtgaacaagtaccttgaagctaagaagcagaaaatatctgttggaatgaggtttaagatgagatttgaaggtgatgatgctcctgaaagaaggttcagcggaacaatcattggcatcgggagtttgccggcaatgtcaaaatctctgtgggcagattctgactggagatctctaaaggttcaatgggatgaaccttcatccattcttcgtccagatagaatctcaccatgggaagtggagccactggatgcagctaatccacaatcccctcaacctccactaagggctaagcgtccacgacccccagcttcaccttgtatggtttcggaactgccttcaggttttggactctggaaatccccaattgaatcatcctgtacactctcattttcggaacctcaacgggctcgagagttatttccttcaatccccacgtcaaccttgtcatcttcatcaaatgtcagttttaattcaaagaatgagccgtccatgctaaccagtcagttctactggtcagcaaggcatacaagagctgactcctgcgctgctagcaccaacacagtcgtaattgaaaagaagcaagagccaagttctggtggttgtagattgtttggaattaatatatgctcagctgaggaagaagtattacctgaggttactgctccaggtgttggttatgagcagactgctgcctctgtagagttgaactcggataagctctcacagccatctgatgtcaacaattctgatgccctagcagctagcagtgaacgttcacctcttgaatcccaaagccggcaagtgaggagctgtaccaaggtaattatgcaaggaatggcagtaggaagggctgtagacctgacaaagcttagtggctacagcgatctttgccagaagctggaggagatgtttgacatccagggggagctgggttccacactaaagaaatggcgggtcattttcactgatgatgaggatgacatgatgcttgttggagatgatccttgggatgagttttgcaggatggtgaaaaggatttacatttacacatacgaggaggcaaagaagctgacatccaagtcaaagttaccggttagcagtgacagcagcaagctgagcgctgcgaactcactgtctgaatgactatgaacaaaaactgcagagtgctaacgtccctctaattttgttatttccatcatttgattatgggggtgaatgctcacggttgctccgtgggctgaagttgtggttggcattcaactgccttgagttttggaggcttttggactgccttgccagcatgagcctcctggaagaggcaccctggcatctgcgtgccatttcccatttgttcgtgccgtttggtaggagtatccattggcttatttagcaggtccctggtttgaagaaagaagcggtcagctgcaagatggacggtgccttgcctcttcttcgactacttagctagtaattaggactatgtatgtaatgaatgtatatagtgccattaagacgcccatgccctggtattgaggtcccggcatttgtatgaatcaattgttcggaaattgttacctttagcagcaacgaacctgagggtgtagggtggccaggtgggagaagttgtatgtttctttcagtaacaatctttgtgcaagtgatctgtatatagtctactgttttaataagcaatgttgtgcaacttgcgctcctacaccctacagtacagtggggcttttcttgtgcttactgttcgcttgatgactgtctacatttggctgtgcctttttgttgcccg

SEQ ID NO: 13737 - DNA, 2688 bp, Zea Mays
cgagggggatcgaaccctaacctagagggcataattatataggatctgaacacttactccttgggctacttcgtgagggtgaaggtgttgctgctcgtgtgcttgaaagccttggtgctgatccaaacaacatccgtacccaggtcataagaatggttggggaaagcacagaagctgttggggctggagttggtggaggaagcagtggccagaagatgcccacacttgaagaatacggtactaatttgacgaaattagcggaagagggcaaattggacccagttgttggtagacaggatcagattgagcgcgttacccagattttaggcaggaggacaaagaacaacccctgcttaattggagagcctggtgttggaaagactgctattgctgaggggcttgctcaacgtatttccaatggtgatgttcccgaaacaattgaaggaaagaaggttattactcttgacatgggcctccttgttgctggaaccaaataccgtggagagtttgaagagagattaaagaaacttatggaggaaattaagcaaaatgaagatattattctctttattgatgaagtgcacacactgattggagcaggtgcagcagaaggtgcgattgatgctgctaatattttgaagccagctcttgcaagaggtgaactgcagtgcattggtgccacaacactggatgagtataggaagcatatagagaaagatcctgccttggaaagaaggtttcaaccagttaaggttcctgagcctactgttgatgaaacaatacagatcttaagagggctccgtgagagatatgaactccatcacaaactgcgatacacagatgatgctttaattgctgctgcacagctgtcttatcagtatatcagtgatcgtttcctgcctgacaaggccattgacttgattgatgaagctggatcccgtgttaggctgaggcatgcccagctccctgatgaagccaaagagctggacaaagagctgcgacagataaccaagcagaaaaacgaggctgtacgcggccaggattttgagaaggctggtgaattaagggaccgagaaatggaactgaaggctcaaattacggccattattgacaagagcaaggaaatgattaaagcagagactgaatctggtgatgtcggtcctcttgttactgaggcagatattcaacatattgtctcctcttggactggaattcctgtggagaaagtgtcgtctgatgagtctgaccgtctcctaaagatggaagagacactgcatacacgtatcattggccaggacgaggctgtcaaagctattagccgtgctatccgccgtgctcgtgttggcctgaagaatccaaataggccaattgccagcttcatattctctggaccaactggagttggcaaatcagagctagcaaaggctctggcagcctactactttggctcagaggaggctatgattaggcttgacatgagtgagttcatggagagacatactgtctccaagcttattggatcacctccaggttatgttgggtacactgagggaggccaactaactgaagcagtccgtcgccgcccatacacagttgttctctttgatgagattgagaaggcacatcctgatgttttcaacatgatgcttcagatattagaagatgggcgattaactgatagcaaggggcgcacagttgacttcaaaaacacactattgatcatgacatctaatgtgggaagcagtgtcattgagaaaggaggccgcaagatcgggtttgaccttgactatgatgagaaagacaccagctataacaggatcaagagcctggtgaccgaggagttgaagcagtatttccggccagagttcttgaacagattggatgagatgattgtattccggcagctgactaaattggaggtgaaggagattgctgacattatgctgaaagaagtgtttgacaggctgaaggccaaggagattaatctccaggtcacggagaagttccgagatagagttgttgacgaaggttataacccgagctatggtgccagacctttgcggcgtgctatcatgaggcttctggaggatagtctggcagagaagatgctggctggtgaggtgaaagaaggtgactctgccatcgttgatgtggattcagatggcaaggtgatagtcctgaatggtggtagcggtgttgctgagccactggaacctgctctcagtacctaaccgaggtcaaaatcatcattggtccgaaatatggccttctttacaagtcagctgggtttctcgtgatggtaaaaactagactgacattacttggccgcccattagttgctttatctttcgtttattttcttttttgttggaagtgaggcagtagggttgctatggaaatgaatagatggagaagcatttagcagacatataatatatgctagacttttgagttgccttgttttgggaagaaacttggaattttcagtttgatgcacttgtattattattaggccttggtagcaacaagatacggatgtcgtctctacgtttgctgttgtacttcagtgtaacttgcctcccgaatgtatgagtattatttatcaagtcccaaataacagtgacggattgctacattctgttttttttgtttgtggatctgaaaattggaattcttagcttatctcca

SEQ ID NO: 13738 - DNA, 1787 bp, Zea Mays
cacgcccaccccctcttcttcccatctcaactctctcccttcctccctctctctccagcgcacaaggatcttttcttcgggcagggacggccaaggaagcgcccgcggagagagatgatgctggcgatcctagcgaggcggcgtgccgcggaggccgtgctgcggcggccgcaggcggccttgtccgcctggagggcgtacgcggcggcgggcgaggagagcgatgtggtggtggtgggtggcgggcccggagggtacgtggcggcgatcaaggccgcgcagctggggctcaagaccacctgcatcgagaagaggggcaccctcggcgggacctgtctcaacgtcggatgcattccatccaaggctcttctgcattcatcacatatgtaccatgaagcaaagagttcttttgcacatcatggagtaaagttttcaaatctggaagtggacctcccagccatgatggctcagaaagacaaagctgtggcaggactaacaaaaggaattgaagggctctttaaaaagaacaaggaataacaattgatgagaagaaagttgtttcatctactggtgcactgtgcttgtcagagatcccgaagaaactggtggtaattggagcaggttatattggccttgagatgggttcagtctggaaccgccttggttcagaggtcactgttgttgaatttgcgccagatatagtaccatcaatggatggcgaagtcaggaagcagttccaacgcatgctagaaaaacaaaagttcaagttcatgctcaagacaaaggttgttgggtgtgataccagtggagatggcgtaaagctgacacttgagcctgcagctggtggtgagcagaacatccttgaagcagatgttgtccttgtctctgctggcagaaccccatttacttctgggattgggcttgaaactcttggcgttgagacagataaagctggcaggatccttgttgataagcgcttcatgaccaatgtgaagggagtctatgcaattggggatgcgatccctggtcccatgcttgcccataaagctgaagaggatggtgtcgcttgcgtagagttcattgctggaaaggaaggccatgttgactatgacacagttcctggtgtggtttatacgcatccagaagttgcatctgttggcaagactgaggagcaggtgacggctctaggaattccctatcgtgtgggcaagtttccacttttggctaacagtcgtgcgaaggccattgatgatgctgaaggggtagttaaggtgatcgcggagaaggaaaccgataagattctaggtgtgcacataatggcacccaatgctggtgaaatcatccatgaagctgtcatcgccttgcagtatggagcatccagtgaggatgttgctcgaacatgccacgcacaccctaccgtgagcgaggccctcaaggaggcttgcttgcaaaccttcgataaagcaatccacatataatttctcattttctatttccttgccatccaaacttttggctcaacaagatccaaagtttatggtaattttgggcctgttggaacagaaggcctccagttgtccttttgttttgttggcaataatgtgaattctttgagttgcccacatcttatagtcgtttatgcttcattggcatggcatatccatccaaattccaaaataatgttctgatactatgttttactgtgtatgcccatgaaccattgatggatacatttcggacgttccagtatggccgtgttcgtgccttgatttctttttctactgttg

SEQ ID NO: 13739 - DNA, 412 bp, Zea Mays
  misc_feature (412)..(412): n is a, c, g, or t
gttagctatgctcaactgtttggtctacaatgccctgggggtcagctacaagcgagagaacaaacttgacaaggcgattcagcagtttcagaaggccgtggagctccagccaggctatgtgacagcttggaacaacctgggtgacgcatatgagcagcagaaggacctgaaatcggctctcaaggccttcgaggaggtcctcctctttgatcccaacaacaaggttgcaaggccacgcgtcgatgacctcaggccgcgcgtgagcatgtacaagggtgtgcctgtaaaatccgaaaagcgatagctattcttttttggtggtaaatcatgcatctgtctagtccccagaatagcggttgtttatttttgaacggtagcatttgtaaacatgatgagatgtgtagtagcatgn

SEQ ID NO: 13740 - DNA, 1856 bp, Zea Mays
cgccacacaaccaccaactcgcgatccatcgatttgcagaacaccacccaacagccagaccatcactcgatcggtagacatggataaggcctacatcgccgccctctccgccgccgccctcttcttgctccactacctcctgggccgccgggccggcggcgagggcaaggccaaggccaagggctcgcggcggcggctcccgccgagccctccggcgatcccgttcctgggccacctccacctcgtcaaggccccgttccacggggcgctggcccgcctcgcggcgcgccacggcccggtgttctccatgcgcctggggacccggcgcgccgtggtcgtgtcgtcgccggactgcgccagggagtgcttcacggagcacgacgtgaacttcgcgaaccggccgctgttcccgtcgatgcggctggcgtccttcgacggcgccatgctctccgtgtccagctacggcccgtactggcgcaacctgcgccgcgtcgccgccgtgcagctcctctccgcgcaccgcgtcgggtgcatggcccccgccatcgaagcgcaggtgcgcgccatggtgcggaggatggaccgcgccgccgcggccggcggcggcggcgtcgcgcgcgtccagctcaagcggcggctgttcgagctctccctcagcgtgctcatggagaccatcgcgcacaccaagacgtcccgcgccgaggccgacgccgactcggacatgtcgaccgaggcccacgagttcaagcagatcgtcgacgagctcgtgccgtacatcggcacggccaaccgctgggactacctgccggtgctgcgctggttcgacgtgttcggcgtgaggaacaagatcctcgacgccgtgggcagaagggacgcgttcctggggcggctcatcgacggggagcggcggaggctggacgctggcgacgagagcgaaagtaagagcatgattgcggtgctgctcactctgcagaagtccgagccagaggtctacactgacactgtgatcactgctctttgcgcgaacctattcggcgccggaacggagaccacgtccaccacgacggaatgggccatgtcactgctgctgaaccaccgggaggcgctcaagaaggcgcaggccgagatcgacgcggcggtgggcacctcccgcctggtgaccgcggacgacgtgccccacctcacctacctgcagtgcatcgtcgacgagacgctgcgcctgcacccggccgcgccgctgctgctgccgcacgagtccgccgcggactgcacggtcggcggctacgacgtgccgcgcggcacgatgctgctggtcaacgtgcacgcggtccacagggaccccgcggtgtgggaggacccggacaggttcgtgccggagcggttcgagggcgccggcggcaaggccgaggggcgcctgctgatgccgttcgggatggggcgacgctcgcgctgcggaccgtcgggctggtgcttgccacgctgctccagtgcttcgactgggacacggttgatggagctgaggttgacatgacggagagcggcgggctgaccatgccccgggccgtcccgttggaggccatgtgcaagcctcgtgcagctatgtgcgatgttcttcgggagctctaatattctggcacatcctaggttctcgctctataggtgaaagtttcatatgtagtttcgtagaagtatgcatgtctgatggtctgcgctgaactaagtacattatcatctagtacaaaatatcgtacatatacccgcatatatgtaaacaactagtactcaattagtactagtcgttgtttcccagcgtgctttagcaaatttaatcttcggcgaacgagaaatttgctatt

SEQ ID NO: 13741 - DNA, 147 bp, Zea Mays
gtaaacgagcactcggatgcccgatttcacgagcgatccgacgacgttgatggtcgggatctgcaggttgagcagctcgtactcgagaacgttgtgtagtgtaggagaaccgaaacattgcaatgttagtttcacgttcagagttca

SEQ ID NO: 13742 - DNA, 797 bp, Zea Mays
atggggcagaggttgctttggatgctgtgctaagccaactccaataatagcagtagacgagccttccaagcggttgaggatccaggggcgatcagtaaggaaggctagcctctcggaggacttttggagcacgagtgcgcatgagatggagaacagcgggatccaatcgcagaggagcatgtcttcgatcagcacgttggctcagtccagcgatcagcatacggcaggaagtagcagcaacccgaatgagtttatgaatcaaggtcttatgctctggaaccagaccagacaacagtgggttggaagcaaaaaacgccactctagatctcaacagcctcgagaaccaaagttgagttggaacacaacgtatgaaagtctgctaggaagcaataagccattctcccaaccgatacctcttggcgaaatggtagatttgcttgtggacgcttgggagcaagaaggcctttatgattaggcctgtggagttcattatttgactcggattaatcgcttaatgcagaagctctaggttctcaagcgttatattttctgagcacaatggtgtaccatggatgtatcatgaaacatggcagcatccttatattaagcaattgtaatatattattcctgtcaagcttatgagaacattggatgacattgtacctggtgtttttatatgaaaactttgggtgatctaggcaactggattaaaacaaaaaaggggcatgccttgttgtaaactgagccatgggaagtgaaattaattgaaaacagaagaaatgtgaagttattgcccg

SEQ ID NO: 13743 - DNA, 741 bp, Zea Mays
ggatggtatcctaatagagggaactggagatttgacaactgctctcctactaggatggagtaataaatatcctgatagcctcgagaaagcagcagaactggcagtttccagtttgcaggcacttctgaaaagaactgtggaagactataaaatggccggcttcgacccatcgaccagcagcttagagatccggttgatccaaagccaggacgagatccgaaacccaactgttacatgcaaggctgtgaagtatggaagctgaatccatagtacccccactgacaaaggtgccaacaataatgagcagtgcctgcaccgccgataagcgggtgcacctacttccatgactcttggtcctcagttttgggatgctgattctgttacaccttagctccaaaatgagaaacaatcatatttctgaaaaaagggttatagacttatagggttatattcaggctgtgcgattgctgcagtctttgggaatgcgtggtggcctgagtgagattgtaaatggtccttatcattgttgtcttcctcgttgtgttgttgttgttgctgctcccgctgagttgtggtggttggttggaaactctaggtatgctttgtttgaggcacattacgaacatatggtgttgagatgtgctcataatgcttattatgataagtgattattgaaaagatagttataatttaatattgaccttagtgtgagtgtagtgttgtgcaacatgtcttttgagt

SEQ ID NO: 13744 - DNA, 661 bp, Zea Mays
gagggacgtgccatccattatcacattgcagatgatctgggcaatgtgcaagatggcacagtgggacactcctttacattcaatggcagcaacttggaggagcttgcccacaagttgcaggaagagactggcctggataatatcatcatatgcacacgcagccctatcaacgggaagctcactcctctccgtctgcaactgccaccaaacaatgcagctatgcatattgtgctcgtccaggagtcctcaaaggtggctagatcatttgcacggccgtacggttcataaatcacaaacatttggcgaagacacggggggccttgagttctggtggattgtgcttgtgcgtgtcgctcgaagcccgtacatcattggatcaggtcatgccggttgtgcggtcacgctgggtgtcagaagcaacctagcttaaacctcattcgtgcacatgtaaaaggagcaccccccccccccaccacccacacacacacacacagtatagttaaaaccagcggagattcatcgcgtgatatgtggagagatgtgttccattgattaatttatactagttgagattctggccctgtatcttatatcattggttttgtattagttggtcaatagaatttgtactccgtgctgcgagccggctggttcttccccc

SEQ ID NO: 13745 - DNA, 1100 bp, Zea Mays
gaaaaggggggaaaagaaaaaaagaaaaagttcccgtcttcggtcttcccaaacccccaacatccatgatccatctcatcgacaccccctccgctctccttatcccttccattcgcccaaacccccgccgccgtgacccctgccagcccgcggccttcccctcgttctaggcttcaactgccggcctcgtgtcttctgggcaagtgaagagagagatggcgtcgccaataccgcgcgagtgggtcgggctgcagcagtttcctccggccacccagaccgagctgcacgagctcctcggcaagctcaaggaggaggatgtgagcacattgacaattctggtgatggggaaaggcggagtggggaagtcatctactgttaactccatcgtcggggagaggatcgccactgtcagcgctttccagtctgagggtctgagaccgatgatgtggtcgcgcacaagggcagggttcaccttgaacattatcgacactcctgggcttattgaaggtggatacattaatgagcaggctgttgacatcattaagagaatggatacacttgatggacaggttataagagccatcaccaattcatttggaaaagatatttggcgaagatcattggttgtgttgacccatgctcaactctcaccacctgatggaatcgagtataatgatttctttacaagaaggtcagaggcacttttgcgatacttccggatggaactccgtgggttccaaaactgatgaaagaaattactgttgttatctcaaacgggagcaagcccattcatgttgatcagaagttaattgatggtccaaaccctaacaatcgctggaagatgttcataccaattatacttgctgtggagtacttcttggtagtaaaaggaatccggagggcgatccatgcagatatcgcaaatgggaaggtggatgactgggagcagcgttaccgggacttggttggaagcagggaccctgtggagcagaaaggttctaccacccggaaccgcaaagcctaagttggtgtagcagaaatgattttattcgtgctgaatttccatggctggggtatcaaaatctatcctcactgggccg

SEQ ID NO: 13746 - DNA, 979 bp, Zea Mays
ccgcgcagtgacgatccggacgcgaactcgtatcaaattcgcatatgggcagccgtcctataagaggcgtcgagtccgccggcgcatgtcaaccccaccgcagcacagcgccggcaaccgccgccatcgatcgatcgcccggaaactgacctctaccgatgtctggagccggcgaggaggataagaagcccgcggagggcggcgcccacatcaaccttaaggatggcaatgaggtgttctttcgcataaagaggtccacccagctgaagaagctgatgaacgcctattgcgaccgccagtctgtggacatgaatgccattgcattcctgtttgatggccgcaggcttcgcggcgagcagacccctgatgagctggagatggaggacggcgacgagatcgacgccatgcttcaccagaccggaggcagcgttcctagcaccacctaaaagcagcagctgcggagcctcgttttgctctccgccctgcgtagtactaaacaaaagggaaaaagtctttttaaggaacttgtgatgctctggctccttgtgccattgctgagggacatccttagcctttatttagtggtatggtttggtactttgttctgtcatcactcgtttatctatccctaatacatgccgccatgtttgtacttccaatgacgcgccgatcatttgctttgttttgtctgctcgaagtctatgcttttcaggccatctctttgggcctgtttggttttgtctcctgatccttacgttttgtgcactaagttgatggatcccttttggctgattcagtttgtataattccagccggtgatttgcagctgcctgattgttttttagttaaaatctcctcatatttaaaataagtgttacattaaagtaagttaaattgatgggtagtttatcatggctttaatgcctaccgttttctactttttcacagctgcatcaatctaaacatttgtctttaatcc

SEQ ID NO: 13747 - DNA, 721 bp, Zea Mays
acaaagcttgatgattacgctcgatgcaaatgtcatcttcatatatcctggaagcaagagaaggactactgcaaagttcaccgacaaagcacaagctgttatcagaaagcaggaatactacagaacctgaagagagtgagttgtcaccggcaagcatccaaaacaagcatggagtatctgaagcgccgtcattccaagaactaacttctgaccctgtgcctaatgttgaggctgacaagcatcctatctcaagtactgaggcagaaatagttgacaagtctgtaattcaagaagagttggtgatgaaaactgaggccaagagtttacccactgaggaatctaaccctgaccctgcggatgatgatgatgaaaaagaagtagatgattggctacaggatgtcgactctgtgcccagcaaaactggcaacaatactgcagttggggaggaggaagatgtatccttcagtgatctagaggatgactgaggggctgttattgagccaaccagctatcagtttactgttagacggtagcttcatgaagtgaagaacacttgctctgtggctttaccacttcactgcctggttcttccgattgcagtagcagaatcacgtaacaatgtccctcgggaacatgatacatcatcatacatgtaatctcaaggatgaactctgcatgctaaagcttatgaggcgttgagcaggatctgttgcactcacgc

SEQ ID NO: 13748 - DNA, 2011 bp, Zea Mays
aggcaagttgctgttgatacatggggaacgattgatgtactagtaaataatgcaggaatcacacgggacacattgttgatgagaatgaagaaatcacagtggcaagatgtgattgatttgaatcttacaggcgttttcctttgcacgcaggctgcaacaaaagtaatgatgaagaagaaaaagggaagaattatcaatatagcatcggttgttggtcttactggtaatgctggacaagctaattatgctgctgccaaggctggggttattgggttcacaaaaacagttgctagggagtatgccagcagaaatattaatgcaaacgttatcgctcctggatttattgcttcagatatgactgctgaacttggtgaagagttagagaagaaaattctgtcaactattcctttagggcgctatggtcggccagaggatgtagcaggcctggtggaattcttagccctcagccctgctgcaagctacatcactggacaggtcctcaccatcgatggaggaatggtaatcggtttgtggtatagtacagtttgtttcgaagggagagttgatactagaaatttgcacacgtatagttagcttaatttctttgcgattggccgattgctccaaacatgttattggaacgctctttccctgagtcttcgtttccgtttcccttataaagtcttataaagtgtttggtttgatgaatcactctattcaaaattcaaaatgaaacggtatatcatggatttattccttaaatttggtgggataactccattccacatattagtactaaacaactaactatgaagaatgaggtggtgatggattaactcactccattctacaaaccaaacaaaaaatgagggagaagatgatggactacatcattcctcaaaccaaacactccagtactgtcgagcctcggctcaacttctgtttctgggacggagtacataccatgagcaacggtcacacaaatataatgaacagcaaacatctagtttagaagaatacaaagaaaagttgccaccaaatatgaacgccaatacgaattgccagtcaaaccaatttagccatttatggaaatggaggaatacatcgtacttccgacccacagcaaatgtccatacaaaccaaaaattaaaacacagccgatgatatgctaagcgcagcatctcacagttctgacctaggccttgatagcatacttcctcatggggaagtacttctcacgcttcttttccctctcggtcttcagagagagctgcaggacagacagagcaaaatgtcaggccatctatgattaaaaaaccaacacaaaagagcaatcactcaaagaaatatgccatgcaatttcaaatgtcacttggacacgtgtcaaacattcagaaactgattgtataccaccattttgtgcgatgtcatagtcatagcaattgaaagatgacaggcctgtttggttcgttatctaacttgccataattcgactaacttttttttgcctaaggttaatgattcaatttggccagctaaccttatgcaagttgtggcacagttagccaggaaccaaacaggcccaacaactggctaatgcttgcatacaccttataatcctaaaacctaaacctgggctgcaaatattagtgctctttcagacttgagctctgcatggagagggttatcaggtatcttgcaaatgcttaatatcatatatgatcagattgacgaaaaaacattaacaacaaacacttcaccttgattttgcacaacaatgagaagtaacattattcagatcacatagtcagtcatcaaacattactcactttctacagttgcatccgtacgcaaaatatattggctcataaagctaagaggaatttcaaaaaaatatcattcgttgctctattaatgcttcatccagcaatgaacataacttatataccacttattgacacgagccaataaaatcacatcttgatgacacagcacactatcagaatttgaa

SEQ ID NO: 13749 - DNA, 632 bp, Zea Mays
ctaaggtctgactccttttctttgcctaactgttcattcgacatgataataacttctttaaaattagatcaaagctagtgatcattgctaacaactgtcctccgcttcggaagtctgaaattgagtactatgctatgctggctaaggtgacagtccaccacttccatggaaacaatgttgaccttggaacagcctgtggaaaatacttccgtgtctgctgcctcagcattatcgatcctggtgattctgatatcatcaagactacaccgggcgagcagtaaggatgccacaacagctgtactcggcatctgaattcttagtagctgatgattttgatgtacttgtcttttatcgtgttccgtcagaatttatagagttcttggcaacattgtgtggattgaacatttcgttccagacatttgctaattgttgaatggatctcttgccggatgtgctcggattacagcatttagtcccccactgctcaaaattgcactattctctgttgtgtcaaatttgtatcttgtttactgttggtacacgatgctgctttaaacatggtacctcgggcaggacagtcttgtcttaagtcatcggtattgtgatagtaaattttacatattcaagtcgta

SEQ ID NO: 13750 - DNA, 1668 bp, Zea Mays
gtgggcctacgtctcggttatcttcctggacggagagacaggggattaggggaaggccgaggcgaggcagcatccagcaatccgccacgctcgtcgctcgcccggtcgccccctccacccactgccgcttcaactctctcgctccctgtcttctccaaaaccctaaccgccgacggcgatgctctcgacggcttcggtgccctccacctcgttcgccgccgctttcctctcctcccgcgctcgccgccggcgccgcgccccctggctgcggtccgtcgccgcagccgccacgtccggggtgggggacggagaggtggagaggttcgctaccagcagctccatcaccgactacctccgctaccgccgccccgagcttggctgtgccggaggggcaggcggaggcgggctgccaggcggggagctgcagacggcggtggtgcgcttcaagaagcggttcccgtggtcgcttctccaccccttcctccacgttgatttggtttctacagtccacattgcagacaaagaatactttgatagactgcagcgagagcttgaagattacgattgtgtcctgtatgaaatggttacaactcgggagaatttgagcaatccgaaaggtccaatggctgctaagaagatgaaatcttcacgcagaggatttagtattattggtttcatacagaaacaaatggctcgggtcctttcgttggattatcagttagactgtcttgattatggcaatgagaaatggcaacatgctgaccttgactatgaaacattcaaacagcttcagagtgaaagaggtgaaagtattctcacgtttgccatagacatgacactgaaatcaaccaaagccttggtgcagccaagtaacatgccagatggccttaacttttggaggtcgaagttactatgggcctcgcgtgtgctaccaatgccacttgttgggctactcgtcatcactgggctgtgtctgccagtggaaaagcaagatgggtttccagagctggaggcattgtccaggctagattttggagctgcactgaagattttcttggcaaagcaactgacatctgaattcacagctgtgcctacacccgttgaggagaaatcagttatcattggggagaggaacagagttgctgccgagaagatccaggaagcaataaacggtgggtacaagagaatagcggtcctctacggcggcggacacatgccagacctgggaagacgccttcgagaagagctggacatggtcccggccgatgtgcagtgggtcaccgcgtggtcaataagaagccgggagatagacagcgaatccctccccttgttgaagacgctggctgaggcttcaggctggcctttgaatagatacgagacgctcgccctgctcatcttctcttcggttctcgcggtggatctttggttctgggaactcttctttggcaccgcggttaattgtgcatctctggctggttcctggattggccagctagcttagcggcacactactatatatagaaatggcagtataaagaaaaatagaacccccccagtttagttttgatttgtccagctgttgctggagtactgcagcaaaccattgtagataagacacttcatttcgatcaaagttgaaacgagattgactgctttctctaaaaaaaa

SEQ ID NO: 13751 - DNA, 759 bp, Zea Mays
ataaaagctttattgcctgacatagcagctaccctacttagaggattttgttttatggtgaaccatacaaagcgggatctgcacaacttcctaattcgcaaactatatagagagaacctgctcaatgaattgatgagggaaactgatgaagtacttatgagaaggcagcgtatccaagaaatgcttgaaattcttgaacaggcacataggacacttgaggaattcccctttgaagttgataagcttgagaagggctacaaccttactgaacatgcaactggcctgtcaaaaatccatggagtcagcggggacagcacaaatgtcatttacacatcctcccctaattgctactctccacatcgagcgtctcatatggtcctatagagcagcatgtaccagtcaccaatggagcttacctttccgcaacagtggtatgtacctgttgccaatggagcttgcctttccacaccagtgttacgcgttaccgatggagcttgcctttccgcagcagtgtatggtagtcaccaaatgacctttgatcccaattcttgaggtttttaagcaatgagcttgagagttacctgtaaattctagttttgctagggagcaaactgctttctagtagaaagctatttgctggtagagaactttaattgtgtattcttgaaattgtcacagccgacatcaatgcggtagtgaatatgggcaacaaggtagttgtatagggctatatccaacataccaatttgccctagttat

SEQ ID NO: 13752 - DNA, 143 bp, Zea Mays
aaaaaactttggatccccatgattgagaagctggaaaaaagattagctgggtggcagggtagattcctgagtcttggtggtagacttactctgctaaatagttgcctttctaatgttcctttatatatgctttcgatctatcc

SEQ ID NO: 13753 - DNA, 120 bp, Zea Mays
taggcgacaagtccttactcgactttcctacgactgttgccactgctaacagacaccatcgcaaacagagaatgcgtcgtacgcctgcgtctgctgaacgagcatgtgccaacaatggtt

SEQ ID NO: 13754 - DNA, 232 bp, Zea Mays
ccgtgcgacgcggggctggatctcagtggatcgtggcagcaaggccactctgccacttacaatgcccccgtcgcgttttaagtcgtctgcaaaggattcagcacgccgcccgttgggaagggagcttcgaggcggcccgccgcggcgcgtcggccgggcgggctgagccaatggcacgggcccttggggcgcgaacgccctaacgtgggtcggggcgggcggcgagcagagg

SEQ ID NO: 13755 - DNA, 566 bp, Zea Mays
aaacaggcttggcaagatagagtcaagcagaaacattgtgaaaccagtgagaagctgaagctctcacattcagctcaacctgaaaacaagccagtgaaggggcttgaatttttttcggaaagcaccatggaacagaaagtagctgactccaaaccaattgcggtgacagtcgacgctgagaagcctgagaaaaccgctgctgtaatgggcaccacagtgcacaggtctatcaggttctcatatcggaaggcaggccttgctttgtgatcaaatcctctccgcttgagatgcacgtggccttcctggttgctttttcttttttggcaacaaccttcctggttgctttgtgtgatggtcagaaaacatagaagaataacctgcaactggagtgacagaatttcttttccccgcagtagacaggtgtgcgttatttggttggaattatctccagtccactatcaattttttttccttggattttgattcattttatgtttcgatttgttgccttatatactgtaaagtcattggaaagaataaataaaacacgaatgttttttgtcaaa

SEQ ID NO: 13756 - DNA, 620 bp, Zea Mays
gaatagattgctgaagttagaagctgacaataacaatgcaacataaagggcgggttaggcatgatgaagacattctgttccaagcgtgaactgctcgagtttgcttattatcatggaggcggctgtagttctcttttccaccgcgacctcttttttttcctaaggaacgtacattgtcatttttggaagcttctgaaagcatggcgtgcgcgtgaactatggatgtatgagtcactccgaagctaaactgtttgagtactatgctaagctgaggagctgcattcacatcatgtggtggagcgcgagggaggcttctttatcggacagcctcacttgtcaccgacgcaatcaggcacccccccaagccgtggactacgctgggtttggctttggcatgagaacgaccgctgtgtttgtcataagtcatatcgtaactagagaaacaagtagctttataatcacaatgtatcaccatcctacagaactatggatgcgtcttgtacataggccggataaagcgcttctatgttcccgagcgtcttttctttaccatgattccaaagtgtgtttttttccccttagtattaagaagaaaaataaggaggtagaagaaagtctga

SEQ ID NO: 13757 - DNA, 793 bp, Zea Mays
catttatcttcaacgcacagatgggagtttgagattacatcaaagaataaggcatatgcagagtgtcttcaacagagagaggaataaatttggacgaggttatgaaagctggagggagaatggccctcctcgtggctacaattacatccctcgggatgattggtattggcagaccgatacttctcactcagaacataaaaataggcggacgtacacaccggcaggacctagggtttatcctatgtcgcatcactatgcagttctaggtcttgacagatcacgagcgacaccatatacagatgcagaagtgaagactgcttttagaacaaaagcgatggaagtgcatcctgaccaaaatcaaaatgatagagatgctgcagaagagaagttcaaggaggttgtcaagtcttacgaagcaattaaatcggagagaaaaaacggtgtaagttgatgcaaacttccagtgtggtcggatcaagtggtaaagactgggaccggatcacgcgggaatcagttgtgccttgtatatgtaatcaattgttgccggcagcttgataaaatggttcttctgttgctgttgaggacctgtagcacgagttccatttatgagcttgggcgatgtagatttggataggttcaaaagatgtgctttttgttcatttagccactaacttgacgtgctcccatcatactttgggtcaaatggggttgggccaaaaaaggtcgaaatttttttttggatcatactgtgctagcccaaagattaaaaacagtggtctaggttgactctaaa

SEQ ID NO: 13758 - DNA, 1029 bp, Zea Mays
gcaacaagatctcacggctcctcgcgtaggaaagatgacggggcagagccagaagttgatccagaaagggaccagaggactgtatttgctttccagctatctctgaaggcagacgaaagagatgtttatgagttcttctcaagggctgggaaggttcgtgatgttcgtcttatcatggaccgaaactcaagacgttctaaaggagttgggtacattgagttttacgatgttatgtctgttccaatggcaattgctttgtctggtcaaccgctgcttggacaagcagtgatggttaagccatctgaggctgaaaagaacttagttcagtcaaatgcgacatcaggtggtgcggcttcaggtggagcaagaaagttgtatgttggcaatcttcactcaaatattactgaagaccaattaagacaggtatttgaaccatttgggcaagtggagcttgtacagcttcctctagatgcaatgactggactgtgcaaaggttatggctttattcagtttgcccggcttgaagatgcaaaagctgcacagagtttgaatgggcagcttgatattgccggcagagttattaaggtttcagctgttactgatcatgtgggagtgcaagctagtggagctactactggagatctagatgatgatgaaggtggaggcttggcgctaaatgcaagctccagagctgctctaatgctcaaattggacaggagtggtacagcaaccagcttaactggtggtattggtgctgctggagtggctgtaccagctacttcagttattggggcagcaggagctgcttctcttctgtcaccaacagtttctgctgttggatcagttcctggggcacctgtgcttcctattaccgctcagaatgtgatcatgtccacacctacagaattcttgttgcttaaaaacatgtttgacccatcattggagagatgatgtccaagatgaatgttccaagtttggtgcagtgaagcatatttttgttgacaaatattgctatattttcccaaaact

SEQ ID NO: 13759 - DNA, 1135 bp, Zea Mays
acaatcccaaagcgaactgtaagttgaaacgaagggaatacatgttacaacgcagtgttttgtcaatttttaataaattgtttattggcaggtatgtagaaaacttactcatgaattggattcgtctgaattctagctaacagacaatcagcagctagatcaaaagaaagaaaggctcgttatatgacagaccttgagcggaaggtccaaactcttcagactgaagccaccaccctgtcagctcaacttacactatttcagagggacacgaccggactttctacagaaaatgcagagcttaagataaggttacaggccatggagcaacaagctcaactccgtgatgctctgaatgatgcactaaagcaggagttggagaggcttaaacatgctactggtgagatgaccaattccagcgaggcatataacatgagattccaacatgttccatacaactcttccttcttcccgctttcccagcaaaatgcatccccacaccttggtagcacccagctgccactgccgttccacccaccccatcccaacgtgccaaaccaccagatggtgtcccaccgaaacactctcccggacataatgcagcaagagtctctcggacggctgcagggtttggacattgggaaggggccactggttgtgaagttagagagcagctcgatctctgcaagtgaaagcagcagcaccttctaacgaggcctacaagtgaaaacccaccgtttcagtaggttccattgttcatagtagcctgacatccttgtgctgcttcctgctctgtaagcccatttgttatttaattcattcaattagttgaaattatacgctgtcgcactggctgatcaatcatgttgtagaatggtccatgaacccttcaattctgtttgttttgggttcgtttcctgtttctgtgactggtatcatcagggcatttgggttttggagtgaaattctctggtggtactttgttgttgttttagctatgttgcttcatggatcctctctttggaacacacatatgtattctcgtgcaatttgttgaggccctgtacattgtgtgctggcaagctatgcgtacaccctaatttatgaaatgttatcgcattgagggattttaatcacc

SEQ ID NO: 13760 - DNA, 1237 bp, Zea Mays
attcctttcatcctctggggatcatggatctgctgtacaaggactaccagacagaccacaagttcaccctcactacctacagctccaatggcgttgctgtcactgctactagcacaaagaaagctgacctgatcttcagtgagatccattcacagataaagaacaagaacatgaccgtagatgtgaaagcaaactcagagtcaaatatcattactacagttactgtcaatgagattgcaacaccaggactgaagactatcttaagctttgctgttcctgatcagagatctggaaaggttgagcttcagtatttgcatgattatgctggagttaatgcaagcgttagtctgacagccaatcctgtagccaacctctctgctgcctttggcactaaggctctcgcagttggtgcagaaatctcatttgattctgccactgggaacttcaccaaatacaatgctggattgatgttcactcatgaagaccttatcgcatcccttaatatgaacaacaagggagacaaccttactggagcttactaccacaaggtgagcgaattgacaaacacagctgttggggcagagcttacccacagtttctcgaccaatgaaaacaccctcacctttggcgggcagcacactctggacccactaaccgtcttgaaggcacgcatcaacaactcgggcaaagccagcgtcctgatccagcatgagtggaggccaaagtcgctggtcaccatctcggctgaggtcgatacaaagaccattgagaagagctcgaaggttggaattgctgtggccctcaagccctgattgattatcaagactattttttcttctaaggtcctagcatgactgtttgggtcatatcaggtcagctggggaaaacaaaactgttggggttaccggcatcttttggtcgttgcagtctgttgatttcatgaactgcgaaatgtttcattgaggaaatttttgggtcatctgcttagcgctctgttaaatgagcaacttccaaaataattcgagcccagtagaattctgaacttgtttacaatggttgatggtgacattgtcaattgaggtaggggtggttcagttttctaactgcgttttttggaccggtttgtttcatcttttttctgacaagcttttctaataatctaagaatttatctgtggagaatatggttgtgagaagaattagagcatcatgagaattatgtgcagagtaagatgaag

SEQ ID NO: 13761 - DNA, 121 bp, Zea Mays
gcttgtcccacctaagtgccgtgcttcattctctgcggcaaacctcaaatcactcaaataaaaatcataataaccgaggcccgaggctagtcttcattctcgtatcccgaggcggctttct

SEQ ID NO: 13762 - DNA, 1216 bp, Zea Mays
cttatggccttctatagatgtatagggatgcagctggactttaaaagtatgagcttgtagtaattgcctactcaattgaactgtttgctgatgcattggtaaagaaagcatatgataactggatgtatgtcattgaatatgatggcaaaggtctattgaaccttaaaccaaagaaaaaggctgcatccactggtcaagctgagacgcatgcttctgcgggtggttcgacttcgtatcaacaacacctctcctcaacgagcatgccagggtcatcaccatcaggtggaactgattccgtagggtatggtgtcgaccaatcagcaacacatctatctcaactccagagttcatccaccaatctccagacgccatacgatgacacattttcgttcctaccacctaacctgctgacagggtctgcaaacgatgccatgggtctggaactgggccagttgcaccaagtaatttctcagggccagccaattcagccagcaaacgtgggatacgttgactggcccaggaaccgcgacagccagtacgccgacgacttcacagaggacattcgcgtgaagagccaccagatgctcgagagcgaggacatgcagcagctgctgagggtcttcagcatgggtggagcctccgggagtttgtcagacgacacgttcaacttccagccctacatgccctctcccttgcccaaccccgggttcgaaagcgagcgcagccattcatccggcaaagctgtcgtcggctggctcaagatcaaggcggcaatgaggtgggggatcttcgtcaggaagaaagctgccgagagacgggcgcagctcgtcgagctggaggattagcgtcgtcgtggctttacaacggtcaaggctgcgttgtaaattactagtagtcatctgtgcccccacataccctcttgataccccattgaaacaggtttctgaaactgttctgaaatgtacaacgagtagttctgctatcttgtacagattacagaattctccttgcttgcttgtgttagtggtgtaacatagctctgctaagtttgacacatgactggaccagcttgtgtatctttattttttcccttccctagctcttcagtgcagaatataccgttacagtgcgaattaatccagagattgtgtgtgtgttgctttttctatggtattgcaaaaacactcttgctagaaacattcaggtctagtttggg

SEQ ID NO: 13763 - DNA, 1230 bp, Zea Mays
ccgcaagggcaacatcgtaacttcactgcacaccctatcctccctcgccttcgcctagattcctatctccaccgcgttcgggttcctcccaacacctgcaccgcagaaccaaaccctagctgcgcttcctcctccagatcccggcgccccggccccatggccgccctcgtttctagctccagcttctccgcccgccgtccctccgctctctagctccggatcgcacgcgcacgtaaagacatggagcccgcagccgaggacgccgcagccgctgcgccggactcgtgggagacggccgacatagacgggcccatgagtcggctcatcctctccgcgcgacgcgtgtcctcttcgccggacttcgctgacgaccaggacccgccccagccgccgcccacactgcagccgcagggcgcgccttcggctccctcagatgcgcgcgaggatgtggtagcccaggtcgatcagttcctacgagaggccctcgagaagccaagggagaggctttctgtgctaagaatggagcaagaaattttgaagttcattcatgaccctagtcgtacagagtatgaattcaatggccttccaacttcgtatctgcgtcttgctgcacatcgcctggcgcagcattacttcctgcagtccattgccataccagacaacagtttgcctgatggaactggttcacgtatcatcctccgtaagacaacattcgactgccgactgcctgctgtccgccttgcagatattccagttaacctgccacaagaagacatctctgtggcgaaagtagctattaaacagaggcctcaaaagaatttacatggcatgaacagctcaagtgctcactcttctagagacaacctccaaaaaagcgtcgaagaaagaaaagaggaatacaacaaggcacgagcgcggatatttaacaacagcaatagcagtactgctactgatgagagatcagctgaggaagtgactttacccagtactcttcacaggtccacttccttggagttgaactcaagcaatagaataggtcaaggggctgaaattactcttgagaggagcttgactaccacttcagctagcagcaggtcaaatagaagcaagattgataaggagcctgcagtcaatagaaacaagcagaacaatagggttgcaattttcagagatcgtgagtcagagcgcaaggatcctgattatgacagaagctatgacagtctttttaac

SEQ ID NO: 13764 - DNA, 2126 bp, Zea Mays
ttccaccacccaacctgaaaacgccattcgaggactcgacccaggccagtccttcagatctcccctcccttcctgtccttctctattatagcaagcaaagcgccactcgcaatcgcaacccaccaccctcaggtcaggcctcgctcagatctctccgccctcgtcccccctcacaccccaaaccctcggcccgcctctctcgtcaacgccgcccgacgagagcgatggcggcctcgccggccgcggccgcggcactcctcatcctcttcgccctcggggcggccggcggagtggcggccgacggctccgaccaccggtacaagatgtacgagcccgtcccgctctacgccaacaaggtcggccccttccacaatcccagtgagacatatcgttacttcgacctgcccttctgctctcctgagaaagtgaaggagaagagcgaggcccttggcgaggtcctcaatggggatcggctagttgatgcgccttacaagcttgatttccgttcggaagttgagtccaaggcggtttgctcaaagaagcttaccaaagaggatgtagtgaagttccggaatgcagtagcgaaggactactacttccagatgtactatgatgatctcccactgtggggcttcattggtaaagttgagaagggaggcaaggccgatccgagcgagtggaagtactacctgtacaggcacatcatcttcgatatcctgtacaacaacgaccgggtgattgaaatcaatgtgcacactgatcagagtgctttggttgacctgacggaggataaggagacaaatgtggatttcctgtactcagtcaagtggaaggagacaccaacaccatttgagaagaggatggagaagtactccagctcctccaacatgccgcaccacctggaggttcattggttctcaattataaactcttgtgttactgtcctcctcctcacagggttccttgcaacaatcctcatgcgagtattgaagaatgattttgtcaagtatgcccatgatgaggaagcagctgatgaccaggaagagtctggatggaagtatattcatggtgacgtcttccggttcccaaagaataagtcgctattttccgctgctcttggcacaggaactcaattatttgcactcacaacctttatatttcttcttgcacttgttggagtattctacccttacaaccgtggtgcactatttactgcattggttgtcatctatgcactcacttcaggaattgctggatacgttgctacctctttttattctcagctggaggggacaaactgggtgaggaacttgctattgacaggatgcctgttctgtggacctctcttactgacattttgcttcttgaacactgttgctattgcttatagtgcaacagcagcactgccctttggcactatctgtgtcattgtgctcatctggaccttggtcacgtttcctttgcttgttttgggtggtattgctggtaaaaacagcaaaagtgagttccaagctccttgccgtaccacaaaataccccagggagattcctccacttccctggtaccggagaaccattccacagatggctatggctgggttcttgcctttcagcgccatatacattgagctatactacatctttgctagtgtttggggccacaggatctacacaatctacagcattctgtttattgtcttcatcatcctccttattgtcaccgcgttcatcactgttgcactgacatacttccagcttgctgctgaagaccatgagtggtggtggaggtcattcctttgcggaggatcaactgggtttttcgtgtacggctactgcctgtactactactatgcgcgatccgacatgtctggcttcatgcagacatctttcttctttggctacatggcctgcatctgctatgcattcttcttgatgctcgggatggtgggcttccgcgccgccctgttctttgtccgccacatatacaaatcaatcaagtgtgaatgagctgttgctggggagacgaagagcagcagagttgtacccgtttttggtgccccaccgagaggtcccagatatagaaaagcttacacgcgtcgaagacccgggtaactgtcaggaaaacga

SEQ ID NO: 13765 - DNA, 1697 bp, Zea Mays
caagaaaataaggtcgaagcacataagaggccagtgtggtcacgtagaaaaccagaggaaagaggtaaaagtaaaatatccagcagtacaagtggcttctcccacagcaaagtagagagttcatcgacgaatttgcaaactcctatggaacctgtacagactcctcaatatgcactgttccaggatagcaagaagataggagaagttcagcatgctaatcagtttatgtttcctggatatgggtatcctcctgcatatccatttcctaccattccgttagtgtcaaacattcaagctgaaggctatcagacaaaaccagctggcacaagctaccgaacttcggaagattacctaaaacagtcaagttccacagaaatgtcacaagatataccatcaagaccactaacaatgacaccacaagaaaagatagaaaagcttaggcgccggcaacaaatgcaagcactgatagctattcagcaacaacagcaacagtttggtcaacagggtcctggcagtgacacaatggtgtctcaagcatacacccctggtaacaaaaatccggattccttagggagttcaattgtcatagatgaaaacacaaataaggttatttcgcctgagatgattccaactgaccatgaccgggttcacaagagttctgcaatttcagatgatccctttatagaggaaaaaatatattatcagctacaagatgctcttggcaagttggataccaaaactcgactatgcattcgagatagtttgcttcgtttggtccatagtgcaacagagagaaagattgatggtgataggagcactaacaagactaataaagatgaagatgaagcttcggaagacgcatctactaggaaaacaaggtctccaaacaaggaagcagaaacaaccactaatccaattgatcgtatagtggcccatttgctgttccacagacattgctccaaggttgcaaaagcaacaaaagaaataatatcgtcaatccccttgactctagaacctgagccgaaggtacccttgggaactcctagggttccatcaaaagatcaacgagatgagcaagaaattgtgttgcaaccatcacaataatgtgagatgtgctagaagataaggttttactcaatttgagtaaacttatttgcatttagttagcctatgaatctaatgtcgtccttctaacgagtatacacatgctgattaatcaactgttcaggataaaaagttatgcaaatccagtgatgatggcagtcttatgatcgcctgtggccctggagatcgcttgtgtaatatgtagccatttcaacattgtaggatccttttattttcatcctgtaagaacatctcagattgtataggaacctacgattttgtgccgagccgtaaaaagagcaaaccttggctctggacataaggcgtgtttaggagcaagaggattaaagcaaaccttggctcttggctctggacataaggcgtgtttgggagcaagaggattaaagttgattgaaggggctaaaatccttttctattcaatttaaaatagtaagagagattttagtcctttcaatctttttatgatgcgtttggttgcaatgataagacgagacgagatgagataatccttcaaataatgttgtttggtttagggtcaaaggttgagataggattatctcagtgttgttcca

SEQ ID NO: 13766 - DNA, 1719 bp, Zea Mays
tctggacgcgggaattcagaacgaattcggatattagctccatacgggctgtgatacagttgcaatggcatctgtaactgatgagacagctaagattgagggtttgacatctgctgcagcctttgtggagggtggcattcaggacgcatgtgatgatgcatgcagcatttgccttgaggctttctgtgagagtgacccttctgcattgactggctgcaaacatgagttccatctccaatgcattcttgaatggtgccagagaagttcacagtgcccaatgtgttggcagcctattactatgaaggatcctaccagtcaggagctgcttgaggcagtagagcgtgagaggaatataagaactaatcaaactcggaacacaactatatttcatcatcctgctcttggggattttgagctgcagcatctgcctgttggtaatgatgctgagcttgaagagcgtatactgcagcatctagctgctgctgctgcaatgggaagggcacaccatcttggaagaagggaggggcacaggggacgatctggctctcatggtcgtccacatttcctagttttctctacacaaccaaattcaccttctgctggcacaatctcttcatcttctgctcatatggagggagaaaatgattcaaatcctgccacacctagagctagcgagtcatctccacgagctattcgcattggagaagtgggaaaccaaagtcctgggatgcttacctacgatgctgaacaggatgctgtcgtttcttccggaaatagcactcctgtatcgagtcctaggttttttaacaggagacactccactggacagtcaactccagacagggctgggccatcggatattcagtctttctcagactccctgaagtcccgcttaaatgccgtctctatgaagtacaaagaatctattacaaagagtactcgagggtggaaggagagattgttttcacgtaattcatccgtggcggatcttggttctgaagtgagaagagaagttaatgctggaattgcgtccgtatcacggatgatggagcgtctggaaactagaggaaatagcagaacaagtgatagcccggcagcatccacttctgaagttccctctgctacagaatcaagcaatgaaagggttacagagagcaactctgctgctgctgctgctggtggtggtactaccactacgggtaccagcgctagcaacgcctccgccccttgtgttgcgacatccggttcaaattaggacatgtttgtgagcctggcggcagagcagaagtgcagtaacatgatgccgtcatttttttctcaaccactgcataaacggctgcaaggggaaaaaaaccaaacggtgatttgatgtattggctcgataaaatggtggtgcgtgtggcctaggagaagtcggatttcatcttctgttttcgtctctttgtaaaaaaaatcgtctgagggcagatgtttaccggtataaataacggatatgtcatcttcatagtacgtggatcagttataaatatgattggaacagcaaagcttgctgctgttataaagttgtaccgtggcacgatttcctgttctgttctgtgtgggtgaattgatggattttgctgtacacaagatatgcatctttccaggtctcatgcctatgtatacatatacatattacacgaacctaccttgaatccatatctctgaaacttgtttgtg

SEQ ID NO: 13767 - DNA, 144 bp, Zea Mays
atacctcattttggaaaccatccttctagcgcgccccctccgaaactccaaagatattatcctcactacaggggcggatccagtgaaggacatgggtgtactgtgtacaaatgtacacccggtaatgaattgatgatataattt

SEQ ID NO: 13768 - DNA, 1702 bp, Zea Mays
agtttgttcaatagtaggattttgtatggggaccaatgctataatcatctgatacacttcccagtgataaacaaaatcaagtttcttgagcaatatggagaagtaagcatgttagatataaaaggggcagatgcaagtaaagttattcttgttgttggaataatgactcttcattcttttggagaaggctctggtgtgggtgtttcctttgctggctcaaaagggttctctcagggtcttctagttactatagctatagcagtgcacaacataccagaaggcttagcagtaagcatggttctcgcgtctagaggggtgtccccccaaaaggcaatgatgtggagtatcattacatctttaccacagccaattgttgctgttcctgcattcctctgtgccgatgcattccagaaggtgcttcccttttgtactggtttcgcagcagggtgcatgatatggattgttatagcggaggttcttcctgacgcttttaaggaagcaactccatctcaagtagcttctgctggaacactcgctgttgctttcatggaaacattaagtacggtgcttctgggatttacagatggcaacaatgtggaagacgcatcaggcttcttagtatcacttgtgtttggactcggtccacttatcggtggaattatactcgtcacattctctcttgggttcagcatgccgcaccctcttctcaccggtgtcgcatccggcatagctttccgtctcgcggcatggagacctgtgcagctcctaatgacctcaaaaatgggtctcttcaccaccctcttcctcctcatcggaggttccctggcctaccacgccgccacatcaagcatcctccggttgttcaatcgcaaaaggtcttccgtgaacgtgatcgcgtcatcctccggcctctctctcagtgccctcacagtgcagtcccttcttgcctgtggcgccgtattccttcacgcatatgctgaagggcttgcgctcggtgtcgcggctcgcaaggcctatggcctcggccgctacatggttctcccagcctccctccacggtcttccacgtggcgctgccgcggcgagctgcgtgtatggtgccacagatagctggcgtggagcccttgccgctgccgctttgacagggctcgcagcgccgagcgccgccatcagtgcaatccttgcgaagatcgactatgatgggcttgactactggatggtcatagcgtgcggggctctgatccccagctttggccgcgtcttcaggcgctcactgcggttggacgtgcggaagagcgtcgttggcctgctggtaggtgttgccttcgcctccgtgtgcttgatgtcgactagattcatctgtctgcacactccttactgtaactcggctccagaagccgtcacataactttgttgctgccccgtgctgttgtaaaacacatgtaatactagtgtaatggcgatacaaaaggaggatgtggaagggttacgttgcgtcgaagagatctcttacggcgatacaacaaagggaaatggatgttgaacagaatttgcctttttcttgctgtcacttgtgtaaaattattcccaaacattgcctgaacgatagcccattcagccgttaacctcagtcccatttgatcattttctcctttgaaaaaggctcgtttttttcccagctcctgtcgccagaccgaacatat

SEQ ID NO: 13769 - DNA, 1551 bp, Zea Mays
gttccttgacaactagttctactgtattgctcttacaaaccaaacaaacaccaagacaactagtttactgtcttccctcctcccaaatcccaaaacctgatcccagctccgccgccgagcaaaaccctaggggcttcctataacgccgccgccgcgatggacgacagcctctacgacgagttcggaaactacataggcccagagctcgccgactccgacgctgatgatgactccgacgccgccggcgcctcaccgtcctccaccgcgtcccgctcgccgtcccccgcggcgcgctccccgtcgggctccccctcccgccctgcggcgctcatggacgtcgacgaagacgagggcgacccgtcccagcaggccgtggtgctcgccgaggacaagaagtactatcccaccgccgaggaggtgtacgggcctggcgtggaggcgctcgtcatggacgaggacgagcagccgctcgagatgcccatcatcgcgccaccacgcgtcgtgaagttcgaggagaggcaggtctccatcaaggctgtgccaatgtcgcttgttctcgaggggggaaacggtaagtcatacctgtgcaatatcatggacacgcccgggcatgtcaacttctctgatgagatgactgcggcacttcgacttgcggatggggctgtgctcattgttgatgctgccgagggagtaatggttaatactgagagggcaattcgtcatgcaatccaagaaaggcttcccatagttgttgtgattaacaaggttgacagattgataacagaactaaagctgcccccaaatgatgcatatttcaagctgcggcatactctagaggcaattaacgatcttatctcatcgtgttctactacagtaggtggcactcagctggtggatcctattgctggaaacgtatgttttgcaagtggtgctgctggctggtcttttaccttacagtcttttgcgcatctttacttaaagattcatggggttcaatttgaccatgagaaatttgcatctcgcctatggggagacctgtattttcaccctgattctagaacctttaaaaagaagccgccaaaggaaggagctaacagatcatttgttgagtttatccttgagcctctgtacaaaatttatagtctggttgttggtgagcaaaaggggaatgtggaatcaaagcttgctgaattgggtgtcacactgagcaatgcagcttataagctaaatgttagacctttgctgcggttagcttgccgctcaatttttggcactggtactggttttactgatatgttagtgaaacatatcccctcggtgaaggatgctgctgcaaggaagatagaccacatatacactggaccacaagattcctctattgtagatgccatgaaaaaatgtgatcccaatggaccccttatggttaacgtaacaaaactatatccaaagtctgattgcagtgtctttgatgtcttcggacgagtttatagtagcacgatacagactggacagtccgtgagggtccttggagaaggctatctgacgaatcct

SEQ ID NO: 13770 - DNA, 1336 bp, Zea Mays
gctcttcagcctggggttccagataagcacctttggagattctctagcaatgtgtatcattgatcatcaagctcttccccgcctcctgaatttattgacacagaaccacaagaaaagcattaagaaagaggcatgctggacgatttcaaatattactgctggaaacaaagatcagatacaggctgtcataagtgctggtattatcgctcctttgttgcaactgcttcaaggagcagagtttgatatcaagaaggaggctgcttgggccatctcaaacgctacctctggtggttcccatgagcaaatcaagtacttggtgtctgagggctgcatcgtgccgctgtgcgaccttcttgtttgccctgatccgagaattgtaacagtttgtctggagggtcttgagaatattcttaaagtaggggagcacgacaagaccatgggcgcaacaggtgacattaatgttttcgctcagatgattgacgacgcggaaggcctggaaaaaatcgagaacctacagagccatgataataatgaaatctatgaaaaggctgtgaagcttcttgagacttactggatggaggaggaagatgatgcaatggctactgctggggaagctgctcctgctgtttttgactttagccaaggtggcaaccctcctggtggtggtttgaacctcaactgaatacagtatttgaccaaaagggtgttaattccctcatgacaacctagtctggtcgattccatgtgggataatggtttgtggttggtccagtaaattcgagatttcaagggagatgggttagcattattcccaagctgtcatggatatcagtatcgcagggtctgtaacaggaccataatcgtcgaacatgagtctgggtttttgagcaggctactctctagggtttgcgtcatttatgttttatatctggctactgtatagcctgagtctaattatctgcaatgccgtaggacattcctgagtggtttggttttgaggttcctcaggaatggtctgcgttgcaggttgtccagagttgtaaaccttcaagtggtttgagtatattgctcggccttgctttactacggtcgatccaacctgttggaggccaaatgacttataaaaagctgttggcagctgcattgttggcggttggtgataaaatttgtagggaaaaataaggcgaaggttttgacttttgaagccaaattcaatttcgagttccacgcagtaacggaggctgatacaatgccctttacaactcaaatacaacaaatttccgctcaacagttatgtgttttttttgacatttacaaagcaatacctcggtccaat

SEQ ID NO: 13771 - DNA, 482 bp, Zea Mays
ggcaaggaccagctggaggtggtaggagaagacatcgacatcccctgcctcgtcaattcgctgcgcaagaaggtctgccgctccgccggcatcgtcgtggtggaggaagtcaaggacaaggcgaaggtggaggaggagaagaagaagaaggaagaggaggagaagaagaagaaggccaaggagttgcaagaagcgatccagaagcactgcccgccgccgccgttctacggcggcccgccgtttctctgcgaggaacagacaacaggctgccacatcatgtgaagctgatggattctggcccgccgtttaaatatatacgtatactagtcagtacccgtgcgttgcaacgggaacatataataccatgataacttatatacaaaatgtgtcttatattgttataagaaaatatttcataatccatttgtgatcctagccatacataaattttgttattttaatttagttgtttcactactaca

SEQ ID NO: 13772 - DNA, 2295 bp, Zea Mays
gtccacgtgcgccgcacacgcgggaaaggggactctacaacacgcatcgccccgagccgagccctctcgcttcccttttataccccttgccacgcgcattcccctctccactgccagctccggtccgcagagggagggaggaggacgccagttgccactgccgcgccgctcccgcctccctctctccatccgacgagctcgagaagccaccatgatctccgcgcgcaccgccgcagcttcccccgcctccctgtggaagcggggaggacaaagtgagggcggcggcagttgcgacggatgtcggacctacaggaacactttgcggagggccgcagcagcgaaggtgcgtgccttgccgtcgagggcggtggaggcggtcaaaatgggctccgccgcggaggtggagcaggaggaggcggaggtagccgcggccgcggacggcgtcgtcgtcgaggaccactacggcgaggacagcgccaccgaggagctgcccatcatgccctgggccttctccgtcgcaagcggttacaccctcttgagggatccacatcacaacaagggtcttgctttcacggagaaggagagggatgcacaccacttgcgtgggctgcttcctcctgcagttgttcctcaagaactccaaattaagaagatcatgcacaacctgcggcagtaccaggtccctttgcagcgctatatggccatgatggaccttcaggagaggaacgagaggcttttctacaagcttttaattgataacgtggaggagctgcttcctgtggtttatacaccaactgtaggtgaggcctgccagaagtatgggtccatctttcgacaaccacagggtctgtatgtcagcttgagggacaaggggaaggtcctagaagttctaaggaactggccacataggaacattcaagttatctgtgttactgatggtgagcgaatcttgggacttggagatttgggttctcagggaatgggaattcctgtaggcaaacttgctctatacactgctcttggaggagttcgtccatcagcttgtttgcctatcacaatcgatgttggcacaaataatgagaaactgcttaatgatgagttttacattggactccggcaaaaacgtgcaactggcgaggagtatcatgagcttatggaagagttcatggctgctgttaagcaaatctacggcgagaaagtcctcattcagtttgaggacttcgcgaatcataatgcttttaatttgcttgcaaaatatagcaagagccatcttgttttcaatgatgacatccagggcacagcatcagtggtccttgcaggtttgttagcagcactcaaggtgtgggcacatgagcatgagcccttgacaaccttgtacgatgctgttcagtccatcaaacctacagttctgattgggacgtctggagttggaagaacattcacaaaagaagttgttgaggccatggcttccttcaatgagaggcctatcatcttttcactgtcaaatccaacctctcattctgaatgtactgctgaagaagcatataactggactcagggtcgtgtaatatttgccagtggcagtccatttgaccctgtggagtacgatgggaaggtttttgtacctggacagtcgaacaacgcctacattttccctggatttggcctcggtcttgttatctctggagccatccgtgtccacgaggacatgcttcttgccgcctcggaagcactagctgctcaggccacacaggagaacttcgacaagggatcaatcttcccgcccttcaccaacattagaaagatctctgcgcgcattgccgcagccgtggctgcaaaagcttatgaactcggtttggcgacccgtctgcctcccccaagggacctggtgaaatatgcacagagctgcatgtacactcctgtctaccgtaactaccggtagtgctgctgggatcaattctgcagtaataaaatatgtcgacgcagatgatcctgcaatgttgtagtttattttttcatttgttggccctgctgctgaccacctttgtggctgctagacactgtacctgtctatgcatatatgatactggaacatttggcgcgctgtgggcgtccctgtcatgagatcaattgcagaaataaaatgcaatttagatttgagcaccaaaataaaaatagtaataatacacaagtgaggcaagcatatgttgaatctgatttgcttcaccttcgattagagatgacaatgagtaaatattcaccttcgattagagatgacaatgagtaaatacccgt

SEQ ID NO: 13773 - DNA, 182 bp, Zea Mays
acattccttacttcaaatagtatagagtttaaatagaggttattacaataccggggtacaagctcgagagagccagaatataaagcgcagtaggaaaatgtactagcccaagccacaggcagaactgggtgcagacacagccctctcaatcaagcatagcagaaaagaagtctccggctgct

SEQ ID NO: 13774 - DNA, 107 bp, Zea Mays
accttaacagctttggttgcatttgcacagtttaagaccttcccgtcacttcgttgtgcacaaatgccgtacatggaacagtaaccttctgctggtacaaccctaca

SEQ ID NO: 13775 - DNA, 94 bp, Zea Mays
tacacgctactctcgccatctctccactcccattgtgtggtggcctttttggtattggtccgaccgaggcaaagcttacccatgatgaggcata

SEQ ID NO: 13776 - DNA, 2070 bp, Zea Mays
ggcgtctagtcatcagatcattatccgcaccgacttgcgtgcacgagcttcgcggcgagggcagcaccggggctgggaatgggaagacactgcagcccagctccagcagcactacagcagtagcgccaccgaacctgaaaactccgaccccccacgaaatcgcggaacctacccacgagccgagccatgctcagccgactcgccgcggcgaggcgacagctactgctatccccggccgtcgcgtaccgctcctcctcggcagcggcgacggcgtcggcggtccacgagagagcagcgcccgcctcggcctccgtgctcccggacaccctcgaaaggggctccgacgcgtaccagcgcaacacggccgccgtcggcgggttgctctccgacctgcgcgcccgcgtctcccaggtgctgcgcgggggaggcgccgaggcggtgaggcggaacgcggcgcgggggaagctgctcccgcgggaccgcatcgaccgactgctcgaccccggcgcgtccttcctcgagctctcgcaggtataataactggcataggacctgttcatggacggttatgtatgtttgtggccaatgacccaaccactaagggtggcacatactatcctcttactgtcaagaagcatctgcgagcacaggaaatagcttcggagtgcaaactgccttgcatatatctcgttgacagcggaggtgctaatctccccaggcaggctgacgttttccctgaccgtgataattttggccggatattctacaatcaagctaagatgtcttcagatggtatccctcagattgcagtagtcttgggttcttgcactgctggtggggcatatattcctgcaatggcggatgagagtgtaatagttaagggaaatgggactatatttctagcgggtccaccacttgtaaaggctgctacaggagaggagatatctgctgaggaccttggtggagcatcagtacattgcaaggtatcaggagtctcagatcattttgcacaagatgaaattcatggacttgagttggggcgaaacattgtgaagaacctgcacttagctgctaaaggaacaaatattcagagttctgcttgtggttaccaagagccattgtacgatgtagaggaacttcgctccattgcaccagctgatgtgaaacagtccttcgacattcgttcaataatagcccgtattgttgatggaagtgaatttgatgagttcaaaaaattgtatggaacaacactagtgactggttttgcaaggatatgtgggcaaccagttggaattattggaaacaatggcattttgtttacagagtcagcgttgaagggctcccacttcattgaattgtgcgctcagcggcatattcctttgattttccttcaaaacattactgggttcatggtcggatcaaagtctgaagctagtggaattgccaaagctggagcaaagatggtcatggcagtttcctgtgctaaggttcctaaaattacaataattgttggtggaagttttggggctgggaattatggaatgtgcggacgtgcatatagcccaaactttttatttctttggccaactgctaggatatctgttatgggtggcatccaggcagctggagttctcgctcaaatagaaaagaacaacaaaaggagacaaggagtggagtggagcaaggacgaggaagaagccttcaaagccaaagtcgtggaggcttacgacagagaaggaagcccgtactactccactgctaggctatgggacgacggggtcatcgaccctgctgacaccaggcgggttctgagcctctgcctctccgcttcggccaagccggttccggaagacacaagatacggtgtattccggatgtgaataaatgtgtgtgagtaataacgcagacgtgtttaataaaaagctgcctgcacgcacccaatgtgtgtgcacaaataaaaatttcgccctggtttctgtcgtcgaaatatgttgaagagtgttgttcatttcatatattactatctgatgaatgggaagtgttcttcatttgatacgtcaataaaaaaaa

SEQ ID NO: 13777 - DNA, 1630 bp, Zea Mays
ttatggggtggcgggttttggcggggttactgtttgacaatgtgggggccacagtttgagaaagctacctacaagaatcgtcagcgcctgtacctatctgaacagacggatgggagtgtgcctaatactctggttatcgcaaattgtgaagttgtgaaacctagggttgcagctgctgaacatatctcacagttcaatgaggaagcacggtcaccttttgtaaagaagtacaaaactatagttcatcctggtgaggttaacagaatcagggaacttccacagaacagtaagatcatagccactcacactgacagtccagatgtacttatttgggatgttgaagcacaaccaaatagacatgctgtcctaggagcaagcgagtctcgccctgatctgatattaacaggacataaggaaaatgcggaatttgcgcttgccatgtgtccagcagaaccatatgtcctatcaggaggaaaggacaaatctgttgtcttgtggagcatccaagaccatatatctgcccttggggattcctcgtcttctcctggagcatctggcagcaagcagtctattaaaactgcaaatgaaaaggagagccctaaagttgatcctagaggtatatttcatggacatgacagcacggttgaagatgttcagttctgcccttccagtgcgcaggagttttgtagtgtgggtgatgatgcttgtcttattctgtgggatgctcgaactggcactgccccagctgttaaggttgagaaagctcacagtggagatgttcattgtgttgattggaatccccttgatgttaactatatcttaactgggtctgccgataactctgtccgaatgtgggatcgtcggaatctgggttcaggaggagctggttctccaattcacaaatttgaaggccataaagctgctgttctttgtgttcagtggtcacctgacagagcatctgtttttggaagttctgcagaagatggtttcttaaacgtgtgggatcatgagaaggtggggaagaagaaaaattctaatgtcccagccgggcttttctttcagcacgctggtcatagggataagattgtagacttccactggaattcgtcagatccttggacaattgtcagtgtctctgatgatggcgagagcactggtggaggtggaacactgcagatttggcgcatgagtgatttgatctaccgcccagaggatgaagttcttgcagagctggagaatttcaaggctcatttggccagctgtgcaccgaagaattgagtcatttgacattgaatctgtcctctgatgctcctagagctgtacccttgaggggcttgtgcttttgtgagcttgtgttaaacctgctgtacgagtaaactagtatgtccgcaaacgcgtcagagccggatgtctgtgggccagctattgggatactgccggatatcgtcaacaattgttccagattggtgtattggatctaatgagattgtcagcaattgcttgtttttatggcttcacgaatcgtatgtgggtttacgttcttggcataccgttcggtcgaagactcgaaggcctactattgtctgcgtgcatttgagcttctcggcatgtctcctctagggtgtttgct

SEQ ID NO: 13778 - DNA, 654 bp, Zea Mays
gggcaatgttaccgggataaaagatctcacccctccagagtcccgggataattcgcttcgatccccagaggcacagacgagacgacagagatgaaggacggaacgtcgtcggggggaggggcgttcgctgcgggcagcgatccaaggcagccgtcgacggcgaagccatacgcgccgccgaagctgtcgccccaggacctacccatcgactatgcaggcttcctcgccgtcgccttcggcgtcctcggcgtcatgctccgctacaaggtgtgctcgtggatcgcaatcatcttctgcgctcagtcgttggcaaacatgaagaactttgagaacgatctgaagcagctttctatggccttcatgtttgctgttatgggtctggtgacgaactattttggccccgctcgtccaggcagtacaaagcgctaaactgcggaagaacatgtgctacattcttcataggactttttggtgcttccgatagctttgccatcggtgctgacattatgtatgtccaatttgagcaaacgtcataggggctctggttttgattcatctggttaataggagctaatagtcagctgctaaacattagctagctgataggcgaggtaaattttagctacacaaaggaagtaactgtctcagtgtccc

SEQ ID NO: 13779 - DNA, 822 bp, Zea Mays
atggctcattcagaaggcttctcagttccggacgttgtcccttgtggcggtcgagggctctcgagccctcatcttcactggccgatggtcgatgtcgacgaagtcgttatccagcgaagtctttggtcacttgaagcgctgcaattagtcgaggggtcagtggcttctgtggtcgagtgtcttttggctctaaaggataatgtgactacaggattgcgtcaaaacattacgaacaatgctgctaaaacaccccttagaaggaaactggaacttgaagaatctgatgagcctgtaatttcggttatgacacccgggagaagatctggggaggaaagatggaaaggccactgggattctaagtctcaacaaagaagtattcttcattctggacaaaaggtccatgatgctttccaacttaagcgagcctcctacactgatcttcctcctgccaaagtttcagagatgatgcatccaagaagtatagataatgcccctactcaatcacttcttagagttgttaatggcattctagatgagagcattgagaggaaaagaggagaaataccacatcgtgttgtttacttgctaaggaatgttgttcaagagattgagcaccgcattgctatccaagcggatcacataagaaatcaaaatagcatcatcaagacccgggaagacaagtaccgttcaaaaattaaagcactcgagaccttagtaaatggcacaaatgaagaaaatgagatgacagtaaatcgacttgagctagttgaggacggatgggttatagtttatccctcttttgaccgcagaaaattcacataa

SEQ ID NO: 13780 - DNA, 678 bp, Zea Mays
tcaggcaaaagggagcatagtccttttatccacgatatgataagttctgcccattctacaaatccgtttggatgatgcgcaatattattcacttcaacacattggcaaatcaggctgtggagcgggcagctggtactgatggccaaaagataacatacggtgtcataaaacaccgtttgggcgatctattttatcgcctagtatctcaaaagttcgaggatcctgccgaaggtgaagaagctttggtcggcaaatttaagaaactgtatgatgacctcaccactggtttccgcaatctcgaagacgaggcacggtgaactagtgtagattctgtgtaaacaaggactgccaaatgttttataagatacataaattgtagattgagatcatctgtaagaattattcccaccgttgcaccatctcttcgccaccactgttttagtcatcggtgcctgatgggcaccctgtttatttcatgtatcatttattgctgtcattgtaataagcgatgggcatgattgtagttgaataagtacaatgtccatgtattcagacaccagtatcgtgcttatttgtttgttaaaaaaactatgttgcctttttgggatttgttcgtgcttattgcatatgatggtttaaaaaagactaacgtatgagtaaataaacttattatgagtg

SEQ ID NO: 13781 - DNA, 1405 bp, Zea Mays
agctcacagctattccctgttttttatgttgtcaaatgagatatgccatgcaacaagcatttaagtcaatgatgacccagtcagcaccaaactcatttggctccaactcgcctttcccatttagcatgccgccacaggcatctcctactgctccaagcacttacccgtacttggaaccaaagaaagatacttccccgcatgtgtcaactgttgatgtctcagctaatgaagtggaagccactggaacatcgaaagaggtggatgttactgaaacgccaaaaccttcaaagaagtttgcatttgttgatgtttctcccgaagagttgcagcaaaagaacctccaatcttcaccggagacggtagatgtaaaacatgatagtacatacagtgaaagtaaggaggatactgaggaacaagttcccacaattagtacaaacactgaaagtaaggaggatactgaggaaaaagttcccacaaatggagcatcttttaagctgaacgaaggtgctgctcatgggccaactgaatctaataactcggcatctatgctatccgttgagacaattgagaaaatgatggaagatccagctgtgcagaagatggtgtatccctacttgcctgaagagatgcggaacccaaattcattcaagtggatgctgcagaatccaatgtaccgccaacaactacaggatatgctaaataacatgggcgcaactcctgatcaatgggataaccgcatgcttgatcaccttaagaacttcgaccttagcagtccagaagtgcggcagcagtttgcgcaagttggcatgactcctgaggaagtagtatcgaaaataatggcaaacccagatgtagctgttgcattccagaatccaaaaatacagacagccatcatggactgctcgcagaaccctcttaacattgtaaaataccaaaatgacaaggaggtcatggatgttttcatgaagatatcacaaatcttcccccaaattaacggctagctgatcttcgtcgtgggatagcacttctgatttttgtcggcccgtcatctccagtctggagggctgctgcggtagcatctatcaagaaaagggtcgtgacgctccgatataccctccccgtgtcaaggtttttgagtttcttatgtacatcatgtgatgtagcggccttggtttagctatgagtaattgagtatgacccttgccagttcattaagtcaggctattgacatagcagggtccaagtttttattaagccagccaatcagtggaaaggtgcagcagagacggttcgtatcagatcaattttgatatataattgttattattaatctgtaatatattagagacacaatggcaatgcaagtaatctgttacgacatttcctgaccatatttgaccgggta

SEQ ID NO: 13782 - DNA, 1897 bp, Zea Mays
gccgttactagtgtcatgctctcagcacactggtctgctcgtctgcctcctttgccttcctctatttaaaccctctccgcccccccgacccaaaacccacaccatccagccttcccacctccctcccccaccacgccgtcgtcatggacgccaccctcagcaccacgaccacccaggactccctactcttcctcctcccttcagccgccaccttgctctccccgctcctgaccgtgctcctcgtagccgtctcgctgctctggctcttcccgggcgggcccgcgtgggcgttcgtttccaggtcccgcgcgacgccgccgggcgcgccgggcctggtcaccgcgctcgcgggccccgcggcgcaccgcgccctcgcgtcgctgtcccggtccctgcccggcggcgccgcgctgtcggccttctccgtcggcctcacgcgcctcgtcgtagcgagccagccggacactgcgcgggagctcctggccagcgccgccttcgccgaccgccccgtgaaggacgcggcgcgggggctcctcttccaccgcgccatgggctttgccccgtcgggcgactactggcgcgcgctgcggcgcatcagctccgcgtacctcttcagcccgcgcagcgtggccgcggcgggcccgcgccgcgccgccatcggcgagcgcatgctgcgggacctcctctcgggcgcggccggacgagaggtcgtcatgcggcgcgtgctccacgcggcatccctggaccacgtcatggccaccgtgttcggcgcgcgctacgacgccgccagcccggagggcgcggagctggaggagatggtgaaggaaggggcgtcaggaggcggtgcaggagcctggtgggcagagtcaacgtgttcgtggccaggatcatcgaagagcacaggcacaagaaggacgacgccattggagagccggccgccgccggagacttcgtcgacgtcttgctgggactggatggcgaggagaagctgtcggactccgacatgatcgctgtcctctgggagatgatctttcgagggaccgacacggtggcgatcctgctggagtgggtgatggcgcggatggtgctgcacccgggcatccagtccaaggcgcaggcggagctggacgccgtggtgggccgcggccgcgccgtttgcgacgccgacgtggcccgcctgccctacctgcagcgcgtcgtgaaggagacgctccgcgtgcacccgccgggtccgctgctctcgtgggcgcgcctggccgtgcgcgacgcggtggtcggcggccacgtggtccccgcgggcaccacggccatggtcaacatgtgggccatcgcgcacgaccccgcggtgtggccggagccctccgcgttccggcccgagcggttcgaggaggaggacgtgagcgtgctgggcggcgacctccgcctcgcgcccttcggcgccggccggcgcgtgtgccccggcaagacgctggcgctcgccaccgtccacctctggctcgcgcagctgctgcaccgcttccggtgggcgccggccgacggccgcggcgtcgacctggcggagcgcctcggcatgtccctggagatggagaagcccctcgtgtgcaagcccacgccgaggtggtgaatggcgatcgctagagcgaaagcgcaactacgctacgcatggcgcgccatcgagttccatgcaaaactatattattatactactattactagcgtttcatattttgcacttgtggttttgtctacgttaattaccgttcgcgatcgatggaactgagtgaagtgtgcacagcatactccattgctagaaagaggacgagatatgtgaaaacgcctgatggctgatggcaaattatatggagagcatgtttcagtattacaaaactgttccttt

SEQ ID NO: 13783 - DNA, 2332 bp, Zea Mays
tttggaattggcaccttgaatatttgttggattcttcgtctgctatcttactgcaaggttgagaaggccttcagggaaggtacggcacagcaaaatgcacatagtatttttgtgtcccttgctttaaaacttttggaacagcgagttcatgtcgcatgcaaagaaattattacgttggaaaaacagaacaaacttcttgaggaagaggagaaagaaaagcgtgaagaacaagagcgcaggttgaagaggagaacaagagagagagaaaagaagaacaggagaaaagaaaggctgaaagaaaaggaaaataataaagggaaaaaactagttgaatcaaagtcacgaaatgatattctatcttcagctccaagcaactccacaacatctatcaatgattattcgacaaatactctggactcaagagattcagttaaggaagatgaagatagtgctgaagttgtgaatctgtgctctcctgacagctgtatgaatcaatcttcatgtacaaaaattaatggagaaaacagtgtccacttcaatgcagtaacagaattttctccaatggacagtagtgacctttgtacatcagatcaatccaagtcttcgagacggggtccaaggtcaagggaggattttcctcaagatcagtcctgttggtatgatgactgcggagatgagtctggaagaattggtgaattacaatggaagtcaagggaaaggacaagaagtattaatagaagtcgcaacgcagcatccacctcaaacaacaggacaagagagaggcaatcatacaattcttgcagctgcggccatctggaagactatggagtcatggacagctgtttcttgccaacagctagatctggcaaagagacgaagatagcaagaaaatcaggagttgagaaacctagggtgcagtaccacagatgctatacattggatagctttatagtgtcaaaaggaaaccgtgctggttctacacagaaaaatgctatcccaaagcaaatatgggagcctatggatgctcgaaggaagactaaattacacaatacagttcatgattcaggttcagttaacgatgttgattcactgaaacatgtggtttttgataacagtggatctcaaaattttggagtaggatgtgaatcacagcctcaggcttctgaaagttccagggatgaatgtaattcagatcaaccatgtgcaaatggaaatgatgaaggctccaggcatgatgaagagctgatgatgaactctgctggctctgatagctcctcgtcatgcatgagcgagggagatagggaaagcagctccagcagtacaacctcttcaagcgctcaaaatccggaatcatcttctgagtctgaggaatcacccgagagaataaatagcacagtaggtacacaatcatcaagagctgctgcttcacggtctttgcttgaagcatgtgcaggaccagctgctgcattaccaaagcatgtatccacctcaacatcggccaataacaatggggtttcatgacggttcttgggctgcaccaacgaatggaaactttcagtatgctcgaccatcccacttatattctagtccactcgtattcggaatacctgggaaccattttattgattatccttacatggctcccgccttcagccatatacctccagagcctattcacaaggccgcatccagctttagagccatgcctctgtcactgccttttcaaaacggacatcggcaggctgctagtcttactcagagagacatgaatctagaaaggcgccctgcaaagttgactaagccgacaggcaaggatcccccagaaaacaagaacaagtcgggcctaaaggatctcccagaagacaagagcaaatcatgggatgcggatgcatccttctcgttgttccaattcaacttgccaatagcttcgcctgtaacaccatcatcaaaagataagagcggagagctggccgcaaggacgccactggctcaggtgcaagctcagctttgctcgagggaacaagcagatgtcaaggagtatagcctgttctcctcgaaagataatggcatattttcgtttatgtagataaaagaaaaactgtgacaaacctgctacccttcgtttctggtgtctcttgctgcacttcgtgaatgctttgtgttctccggagcaaaataaaggatgttgccattttcttcatgctgtctgtatcttcgttttacatttgtgtctgttaccgtgtgtgctaaaagctagtaatctgcaatgctgctgagttgaattttttttcacgtagaatacatagatctgtattgattggttcatgattca

SEQ ID NO: 13784 - DNA, 640 bp, Zea Mays
actcaccggctgagtcagcttcaatctcacctgtgacctgtacactcccagatcagacggttcacgtacgacggttggcaacactcacaaccaccgcaccgcacaccgcagcccaagttctcctctgcatctgaaatatcttgccacctgacgcgacagcgacaagatccaagaactcgctcgcgcgcacggacagggccggaacccagggatcgagactgaacagcagtccgagacgccatgaacgtggaggaggaggtcgggaggctcaaggaggagatccataggctcggccagcagcagcccgatggctcttacaaggtcaagtttggcgtcctcttcaacgacgaccggtgtgcaaatatctttgaagcactagttggcaccttgagggccgccaagaagaggaagatcttgacctacgaaggcgagctgcttctgcaaggtgtccatgacaacgtggagataaccctgttgcccccacctgcagttgctgccgcttgaagcgaagagcaccaccaagttctcgattccatacaactcgttcttttcagggggatgtattggctcagactctggagattattgcagaaacaaaaagctcaccaagagatttttatggtatgtcaatccttagata

SEQ ID NO: 13785 - DNA, 76 bp, Zea Mays
cttgacctgaaacccgtgtttaaaagtattactaagcagtggtataattatttaggggtgtagtgatcgtgctgct

SEQ ID NO: 13786 - DNA, 343 bp, Zea Mays
cgctaaatcccaataaaatgccgctcctggccctgcgcgcaggtgggcatcgtggttgttgacggcgaatatttccacctgattggaattcgtcagaaaatttggaggcttcgaattctgcaagtgatggagattctgagtcttgcagtgacgcagagtttagtgataatgatgaggatcatgacgttgatgacttgtgacataatatcgagacagttttaacctttctccaattcctcactaccgcttcaatgacggttaaactatcaaggctacttgcttgtggcctgccaagaggaaggtttggaatcttattgtgattttaagcgtgagccatctgcac

SEQ ID NO: 13787 - DNA, 1806 bp, Zea Mays
tttcactataagttggtggatgcagctacgaaataaagaaatagatatcgagaagggagtcaatagaaggccgttatatgaaagtcatcctctatcatcattttcatggacccgaactgacagtatggatatgggggattggtcaaagaaatgcaaggaagcattaagcaagtttgagctgctgaaggaagggaagagtaaagaggacattgtttatgaaaaggctgttcagatattacacggtacaaaggatgaggtgcatgacattgttcaaagtgctcttaagtccagtgatttgaagggtctccatgcccaatgtcttacagatatatggataggcagagagaggtttgcttttgttgatctgagtgcagggccatttgcctgggggccttctgttggtggtgatggtgtccgtacagaacttagtctgccaaatgttgcaaagactgtcggggctgttgcagaagttacagaagaagaagctgaagaaaaattgcaagacacaataagggagaggttttcgtcctttggtgaggattaccatgctgttgatattctattagcagagattgatgtgtatgaactttttgctttcaagcattgtgtgggaagaaggatacagcttgccctttgtaaagaacttgatgagaggatgcatgacctgaaaaaggaactggagggttacaatactggagattttgatgaaactaacaagaagaaagctcttgatgcactgaagagaatggaaagctggaacttattcagagatacttcagtggaacatcatagttacacagtggctcatgattcatttcttgcacaacttggatctatgttatggggctctatgaggcatgtaattgctccttctgcctctcatagagtgtaccattactatgagaagttatcgtttcagttgtattttgtgacacgagagaaagtcaggagtataaagcagttacctgttaatgtaaaatccatcagggagagcctgaattctgtgctattacatcatcaaaactccatgtttagccaaaacatgctgtcattgtcagaggatccatcattgatgatggcattttcaatggcacgtcgtgcagctgcggtgccgcttctattagtcaatggcacctataagtcaactgttagcacataccttgattctgctattctccaacatcagctacagaagctaaatgagcacaattcactgaaaggaaggcattcaaatcacaggtcaacattagaggtcccaatattctggttcatacataatgaacccatattattggacaaacattatcaagccaaggctctctcaaatatggtcgtagtagttcagtcagatgatgattcctgggaaagccatttgcagtgcaatggaagacccatcttatgggatttgaggaaaccggttaaagctgctattgctgcaactgctgagtatgtatctggtctacttcctccacatctggtttatagccatgctcatgaaactgcaattgaggactggacctggtctgtgggttgtaatccctcagctgtgacttctgaaggttcacaactttcagagttccagcaagatgtgattgctcgtaactatattattacttcagtggaggaatccattcaagtaatcaattcagcaattcagcaattggctcacgaaagtaagatggttgagaagtacaatgccgttgttagcttgtggagaagagtatcggctatgtccaagggattgcgatatggtgatgcagtaaaacttatgtcaatgcttgaggatgcttcaaatgggaagtgtgg

SEQ ID NO: 13788 - DNA, 202 bp, Zea Mays
catgcaaaatcctcagtgacgcgtagtaattttcttggcttaacttccacatcacattatattatttgcttatctgcatggtttattcggttcaagggaaatctacacatttgaggaaatcgaggaaaggtgcaactcaaactgatgatgaagaaagctgattcgtttgtgctatgttgcaaggggtgattctgttacaatc

SEQ ID NO: 13789 - DNA, 2620 bp, Zea Mays
ggcaaaactgccatggaagtctgtaaagcacaatcatcagatactctcaagctttcacctgatgacgaaatagaaggggaaatagtttatttacaatccaggctacttgatggtgttgtttctatgaagcagagatatgaagatttgatactcaaggttgtccagaatatttcttatgagttggattctttcaataaaagaaaatgggatcatatcattgtgaatcagtttcttcgtgatctgagagaagctaagaagcgcggaaactcagagaggagacacaaggaagctctagctattctggctgcaactgcaccttctgttacaccgacctcacgaaacacaacagtgaggaaagagacagaaaacaatgtgacacctgctaaacgagagaacatgccaagaagcattactggatcctcaagaattggccaactatcttcttcaccacaagcaaaggatttatcattttccaacagtgatgtctcagacgaaactaactttggcattttcaatctggcgaagttctccaagaaaagtgctcttccctgtgatatatgcatgcgatgtgatacaatattgaaccgtatttttgtttgctcgagctgtaaggctactgtacacttagattgctaccagagtctggtgtatcccactggcccatggaaatgtgaactttgccatgagatgccctcagattctgttacctctggtgaacaatcagaccaaaatggtccgaaagcttgtttggtgcaatgtggtttatgccatggaacatctggtgcttttagaaagactgtgaagggtcaatgggttcatgctttctgtgctgagtggctgttggagacaacattcagaagagggcaacataatccagtcgacggaatggagaggcttcatcacaaggataaagatacatgctctatatgccaccgctgtgttggtgcatgcttgaagtgctgtacattagattgtcaaattacttttcatccttcatgtgctagagatgctggtctttacatgaatacaaaaagattgggtaatatgttacaacataaagcatactgttgtagacacagtattgaacagagaaaggcctatagtcaacaatatggtcctgatgaaatcaagggcatgaaacaaatgagggttgaactggaactattacgtttcctttgtgagaggattgttaagagagaaaaagtgaagaaagatttggttggatgtgcacatgacatacttgctgcaaggaggataactgccgtctcttctttgtggacttcatgttatacttctggacctggagcaagttcagaatctgccactacttctgttaataacaaatcatatggtggaacaattcaaaggtctgatgatgtcacagtgagattggaagatgtcacagtggacagtacagttaccaaaaaacatactgtcaggttttctctgcataacagggacactgataggaacactgctgacagttccacatcaacaatatcatacaaacggaagttggatgatggggaatcacttgcattcaagagtcatcccggaacaccagctactgccttgttggagtcacgggatgcagaaaagccaatagataaaaagctcagggatatgtatcaaaaggagcttgtcatggttacttctcaccaagctttgttgaagaacaagacccctccagagagatatgtttacactcgccgcagctccatgtccaaaaggaagcaatgtagtcagcatgtagttcaaagacctggtggatgacagcaggcgaagtcgcttcttgggatatctggataataatattcttggaagctcgatgcagaaaaggacaaagtaaatacagcaagcggggctggccattaatcatgacagccgcaggggctggcgcgtggccgcactggaatcggaaatttggtgcaaattgggctcttcgaagatttgaccaattgagcccatgtcaccttggagtccaacatgcgctgaattcattcactaatttagtcaagggcaggttttgtgaaatacgcccaattgccagtatggcgtcttcacattatgtcgaagaaggaaatcgattgagttatgtgtggtgaaagaaagtgggtagacaaatattactgactggtgaaagctaccaataggccatccgcacattaatgaccatgtttaggagttgttgctatgtactaacagaactgcatgttttgttgtgtggctccattctgacttgtgaaatgaactctcggtaagtcatagggcatttcatgtttgtacaggcatgtaggtttagctttctggtatgtagctaaattcaaagcatcatcttgtagccttatgtggttaaccagatctttgatctattagttaatttagtaaaccaagagctgccttgtgttcgtatgggttgagtcgggcttttactgtattgatatctattattagcgtgaaggctgtttattgccgatgttgagcttcataagcattatctttttttaacaaaacacagtgcttgttttgtgaatacttgtaacctcgaatgtgtaataaatgtagcacgtctattcaactcaatggctcaagtgtcatatatggtcaaccttgcatgtcc

SEQ ID NO: 13790 - DNA, 1985 bp, Zea Mays
cgggcgctgcagtagcgcagcgcagccacgccgcggcaacagcaacaccgcaccatggcgcttcttcttcatccccgcctcccgtcccatcctttccgcgcggcagcccaccaccaccacgccatctcggacgcctcttgcttccttaccctccacggccccggaaggaagcgccgcatgctgctcgcggcggtcacgtgccgcgcagccagggtcaaggagcccgctccgagcgcaggcgcctcgcctccgccgccgccacaggcgctgacgaaggaggcgcacaagtacttcgaccacgccgtggtcaccgtccgcgcgggcgacggcgggcacggcgccgtgctcgccatgccgccggcgccctccgcggacgccgccaagccccgcggcaggttcaaccggggcgagaagaagagcaagaaggtgtcgtacaagcgcaactacgacgggtccgtggcgctgccgacgggcgggcacggcggcgacgttgtggtgtacgccgacgaggccgaggagacgctgctgcggttccacgagaaggcgcggtactgcgccaaacggggagggaacgtgggcgccgctggcggcacgctcagctcgcggatgcacagcgggttcgccggggagacgctcaggatacccgtgcctgtaggaactgttgtgaaacgcaagaagggggctgttctggcggatttggctcatcactgtgatgaagtgctcgttgctagaggtggacagggcggaatcagcttgattgatgtgcctgagtacaagaggaggaaagccatggctttatccccaaacatcatgcgagatactagtgacaaagtattaacgcatggtcaacctggtgaggaagtaagcttggagttgatcttaagggtagttgctgatgttggccttgtgggacttccaaatgctggaaagtcaacacttctatcagctataacacttgcaagaccagacattgctgattatccattcactacattaatgcccaatcttggccgacttggtggagatcctgctttaggggcgttacagttttcctcagaagcaacattggcagatttgccaggtctaattgagggcgctcatctaggaaagggccttggccgcaatttcttaagacatttaaggagaactagagtaatcgtccatgttgtcgatgctgctgcagatgaccctgtcaatgattataagattgttagagaagaattaaggatgtataacccccaatacctggagcgaccttatgttgtggtcctcaacaaaattgatcttcctaaggcccaagatagactatctgcactggtcttagagatatcttcaattggatgtgaagaagggcatgagcaaagtggcagcaaagataacctaaatggacgagtaagtgatcatcaggtcttatcagaggctaaagctgaaggtgttgaaaaggagctcggggactatccaagacctgaagctgtcgtggctgctagcgtattgaggcatatcgggatcgacgagatgctgaaggagataagggcagccctgagaaaatgctttgatcacaagttaccagaacattgagcaaattaaatccatggagagttttctgaagcaacggcaccagcggtttctgaagggtgaaaacactaatgctggagcacagcggtttttcaggcgtcgtttgtaacacgggttctccagtgaaatttctgcgaaaattgaatttgttgtcgtccacagctgccgtttgtaggtgacagtacaacgtatgtgaatagattagtttgagttatgtcggcgctgtcattgtatcattcgtctccaatctgcgcagatttgcagtgtagcattcatctcttgtctgcacagatgcacgatgcggcatttgtcttctgtggtttcagtcctgtgtactacaagaaatacactttgatggaactatcgctttgtgacaacaatttcatttcacgaatcaatgtgatgtgcca

SEQ ID NO: 13791 - DNA, 1421 bp, Zea Mays
cgcgtttgggttctccgccaggccggcgcgttcgacccggtagcccgaaaccgcccatatatcttgccaactttctgcgacacggtggaggcgtggagctaactacccccacgctggctcgccaccgccgccgcagcaggcgtgggaatctgggcagcgccccgcggagaagaggaggcagcgcgctctccgtccgccatggcgggctcttccgaccccgacaagctcatgagcaaagccgacaaactaacaaaattgagttttacaagatggaatgctgattggaaaagcgctacctccttgtatgagcaagctgcaattgcgtataggttcagaaaggataatgagaaagcaaaagatgcttttgagaaggcctcaaaaggacaggaaatgatctcctcaccatgggacgctgctaagcatatggaatctgctgctgctttagcaaaggagcttgggcgctggaatgaagtatctgatttctatcacagagcttcagaattataccgtgaatgtggaaggccacaacctgcatctgatgctctagcaaagggtgccagtgcattggaggagaaatctccagaagaagctatcaaaatgtatgatgaggcttgttcagttctagaagaagatgggaaggaacagatggcttttgacttgtaccgtgccgcagcagctttgtatatcaagatggagaaatattcagatgccgctgctttgtttttaagacttggttcagctgctgataagtgcaatgccatcaatagccaatgcaaggcctatctgagtgcgatcatcatctatctttacacacatgattttcagcaagctcaaaaatgctacaatgactgctcagaggttcaagccttcctcaatagcgaccagaatcgatgcgcaacgaagttattgtctgcttatgaggaaggtgatgctgaagaaatcaaacgcatggctcaatcaagtgccttcaatcaccttgaccatgtggtaattaggcttgcacggaagctaccaacagatgatctgcaggccatcaagaaagctgacgatggcgaggaatccttggacgaggatgacctgacttaaaacgatctcccgagccaaaaggtgcatagagcaaacgtcatagtttgccataggtgggggaaccgctgtaaaaagaagttatgcgagttacatactaaaaacttgggcagcattcccagatctataaacatgaaatttgtagggcccaattatgttgtatccgtactggtggtttggtgttaccgaaacagcgaaactttagtggtatgtttatggtgccctatgctacatgattcttgcaaatctagcatgatgtatatgcaaaaaaaaaaaaaaaaacgggggaaaacagagaggagcgtaaagcagggaaggaattgacgtacctgacaaga

SEQ ID NO: 13792 - DNA, 3872 bp, Zea Mays
ccagcccaccctgccctgccgctgccttgcctgccctcgcttcggcgctttctccagtgagccgcgcccgcactgccgctgccgctaattaaccacaagcggccgtcgccttccccccctcccctcctcaaaaaaggcggagaggtggtggtgctcgtgggcacgcagtggagcacccagtacagcagcagcgctgcggcagtggagttaggagcttagcactccgcctccgttcccatcccgcgcgcagccgtcggccgagcctgctcagtgcccatcatggtgaggaagaagagaactggccctggcggctctggagaaacttctggagagtcttcaggagcttctggacaaggttcctcacagcggcctgaacggactcaacaacctggggcaggacgtggctgggtgcctcagcagggtggccgtggtggcgggcaacaccagggtcgtggtggacattatcaaggccgtggagggccaggtccacatcaccctggtggactgcctgagtatcaccagcgtgaataccagggacgaggtggtgagtaccagggacagtaccaggggcgtggtggtgcccgctccagaggtggaatttcacagccatactatggtgggcataggggaggtagtgttggacgaaatgttcctccaggtccatccagaacagttcccgagctgcaccaagccccatacgtccagtatcaagccccggtgatttcaccatccccatcgggacctggctcatcctcacagcctatggcagaggtgagctctggacaagtccagcaacagtttgagcaacttgccattcatggtcagagttccatgagtcaagaagttcaagtggcaccagcatcaagcaaatcggttcgattcccattacgccccggcaagggcacttatggggacaggtgcattgtgaaggcgaatcatttttttgctgagcttcctgacaaagaccttcaccaatatgatgtaactataacacctgaagttacttcacgtggcgttaatcgtgctgtcatgggagagcttgtaacactatatagacaatcccatttgggcgggcgtctacctgcgtacgatggaagaaagagcctttataccgctggaccattgccttttacttctatgacatttgaaattaccttgcaagatgaggaagatagtgttggcggtggccagggcggacaaaggcgcgagagagtatttagggtggtgatcaaatttgcggcccgtgctgatctccatcatctggctatgtttctagctggaaggcaagcagacgctcctcaagaagctcttcaagtgcttgacattgtactacgtgaattgcctactgcgaggtattctcctgttggtaggtcattttattctcccaacttagggagacgtcagcaacttggtgagggtttggaaagttggcgcggtttttaccaaagcataaggccgacacagatgggcctttcactgaatattgatatgtcctctactgcatttatcgagcctctccctgtgattgattttgttgctcagcttcttaatagagatatttcagttaggccattgtctgattctgatcgcgtgaagatcaaaaaagccttaagaggtgtgaaggttgaggtcactcacaggggaaacatgcgcagaaagtatcgcatttctggcctcacctcacaagcaacaagagagctatcattccctgttgatgatcgtggtactgtgaagactgtggtccaatacttcatggagacttatggttttagcatccagcacaccactttaccgtgcttgcaagtgggcaatcaacaaagaccaaattatctgcctatggaggtttgcaagatagttgaaggacagcgttactcaaagcgactcaatgagaaacaaatcactgctttactgaaagtgacctgccagcgccctcaagagcgtgagctggacattttacagactgtgcatcacaatgcgtactatgaagacccgtatgcacaggaatttggtataagaattgatgaacgccttgctgcagttgaagctcgtgttctgccaccaccaaggcttaaataccatgatagtggccgagagaaggatgttttgcccagagttggccaatggaacatgatgaataagaaaatggtaaatggtggcagagtcagcaactgggcatgtattaacttctctcggaatgtgcaagatagtgccgctaggggtttctgtcatgaactggcaatcatgtgccaaatatcaggaatggatttttcccttgagcctgtgctgcctccagtgactgcaaggccagaacatgttgaaagagcgttgaaggcacgttatcaagatgcaatgaacatactgaggccacaggggagggaacttgatctgctgattgtaatactgcctgacattaatggttccttatatggggatctcaaaaggatctgtgagactgatctcggattggtctcccagtgttgtctgactaaacatgtttttaagatgagcaagcagtatcttgcaaatgttgcactcaaaataaatgttaaggttggtggaaggaatactgtacttgtagatgctttgacaaggagaatcccccttgtcagtgacagaccgaccataatatttggtgctgatgttacccatccacatcctggagaagattccagtccttccattgcagctgtggttgcttcgcaagactggcctgaggtcaccaaatatgctggactagtgagtgcccaagcccatcgccaggagctgatacaggatcttttcaaagtatggcaagatccacagagaaggacagtaactggtggcatgataaaggaacttctcatttctttcaagagagcaactggacagaagccccagaggatcatattctacagggatggtgtcagtgagggacagttctatcaagtattgttgtatgaacttgatgccatcagaaaggcatgtgcatccttggagcccaactaccagcctccagttacttttgtcgtggtgcagaaacgacatcacactaggctgtttgctaataaccacaacgatcagcgtacagttgatagaagcggaaacatactgcctggcaccgtggttgattcgaagatttgccatcctactgaatttgatttctacctgtgtagccatgctggcattcagggaacaagccgccctgctcattaccatgtcctgtgggacgagaacaagttcacagctgatgagctgcagactctgacaaacaacctatgctacacgtacgctaggtgcacccgctccgtgtcaattgtgcccccggcatactatgctcatctggcagccttccgagctcgcttctacatggagccagatacctctgacagtggctcaatggccagtggtgcccgtggccctccaccaggtgcggcacgcagcatgagaggagcggggagtgttgcggtcaggcccctacctgctctcaaggaaaacgtgaagcgtgtcatgttttactgctgagatgctgagctaccttcaccaagaaaatatcctgacttgttccatgtacccgcactgtttcggtgatactatctgacaccgaatttatgcattaagtcttccagtggtctggagattttaagtaacgcctgtttttattcgtgagttgtaacgctgcagttcgaggagcttcagtgctgtatgatgtgtaaactatttgttgtaagttgtaaccaattgttgtaagttgtaaccagccactatgttataatcctgtttgtttcagctttttacagtttctcgctaccaaaagctgttgtgaactgtcaaacgtttagctttttagttagctctataaaaatcgatttgttaaaaaccatccaaaattaata

SEQ ID NO: 13793 - DNA, 753 bp, Zea Mays
gctgcttggtcgtgcattctcctctgcggatgatctatttgttgacccaaggaaccttgagtggctgagggaaagcaactgcccagttgtagctgatgtaacacatgctctacagcaaccagctggaagaaagcttgatggtggaggtgttgcaagcggtgggctacgagaactaataccgtgcattgcaaggacttctgttgctgttggtgttgatggtattttcatggaggtacatgatgaccccttgaatgcaccatgcgatggcccaactcaatggccgttgcgcaatctggaagagctgttggaggaattaattgcaattgctcgagttaccaagggaaagaagccattcaagatcgacctcactccgttccaggagtgatctgctttggttgatagaaagcacaatgccaccatccatggaattccacagggtggatttcaatatgaattgagtacttgctattgttgggagtatacctgcagtggatgacttagactatctctagcagattctttatctcattccgtattttatttcctttttcaaactccactccgcaaacagtgtcaaacagtgttgtcatctacagtttcgcattccctgttttaccctatctactcgagacagtcttatcaccgaacaaactattgtgttgaaacctgccggattggtttgtgttatttcaccagttgtgccatgttggactaacaatatcgctaaacaaatgcaattgttggttatgttct

SEQ ID NO: 13794 - DNA, 302 bp, Zea Mays
aggccttagcctgctgctagaagcgttccaaccggagtcatgtgaggaacaatgagtttcaacaaagttccatccatcttgcatggctatgaccattgaacaggccaaaaaactagatcactttgtttgctcagactgtttgaaagaaaatggttcaaagagactttcaaatgtatatgccacttcatcaaattcttagcccaaggatgaatcaataaggcagacgaggtgaaaactgagtgccaacatccaggggagatgtgctgcttctgtggcgaatcagcccttgcactggcgagagc

SEQ ID NO: 13795 - DNA, 2590 bp, Zea Mays
attgcctaattgatcatatcccaatcctcctccatggtccatgccatcatattatcactcttttcaaatttatctcgaacttaatccatttcaggtacaatttgatggccaacagagtattactattactaattttggcatccagaagcgaatctggcatatattcacaaatgcttgcaaaaattgctggtcatttcttaagaaatttaaagagtcaactgccccactcaagaatgcttgctatatctgctttgaacacattattgcaaggatcacctcataagacatctgcacaaaattctaagcaaccaatagatcaccctgaagattgcaatatttcatcaacagaagagattttgaatgagataatccgggaggaaggattcatgaatgagacactgaacagtttatctcatgttcatattatttccgacaatgatggttcgtcaaaagcgagttatggggcatcatcttttcaaagcggatctgacaaagcaataacttacttctattttgatttctctgcctcatggccacgtactcctagttggatttctttactgcgtggtcacacattctattccagttttgctaggatattcaaaaggcttatacagcaatgtggaatgccagtaatctcttctcttcagagtacactagaagagtttttaatttcaaaagagagaccaaggcaatgtgtcgctgctgaagcgatggctgggatgctgcactctgatatcattgggaatctggaatgtgagaacaactggttgatggcccagttgcataagattatgttagcaccatctgtggagtcagctcctgaatgggcagcttgtattcgatatgctgttacaggaaaagaaagagctggaactcgtgctcctgttctcaggcaaaaagtattagaatgcttatgtactcctcttcctcattccatggcaactagcgtacttgcgaagagatattcttttctgtccgttgctctaatagaaatttctccacccaaaatgtccccagcagagaagcaataccatgttaaaattcttgatgaactacttgacagcatgaaccattcatctgctcaggtaagagaagcaattggtattgccatgtgtgttacaacctcaaatatgagactttctgggttatttggcactggatgttcaccgcaaggccttcatggggatgtaagcatgattgaacaaacaggaaataaatattggtctgaacgtttgacagatggagctaatgaattagccgtaagtatacaaaatagtactcaatctaagcaactagaatcaacatcagattcggctgaagatagcatggatgatagagagcaggctgatgctaaaaggatggaaacgatatttcattttatgatcgcatctttgaagtctgggcgatcttctgttctactggacactattattaggcttgtgtacccaattctctcactacaggaaacatcaaataaagatttatcattgcttgctaagtcagctttcgagttgctgaaatggaggattctacatcggccttttcttgaaactgctattacgtctattcttcctttagtcagtgatcctaactggcgtaccagatctgcactgttatcgtatctcaggacctttacctacaggcacacattcatactttctggctcagagaaatcacaaatctggcaaacaatagaaaaattacttgtggacaaccaagttgaggttagggagcatgctgctggtgttcttgcaagcttaatgaagggtatagatgaagatctatcaaaggatttccgtgaacggtcatatgcacaagcccagcatatttttgttgcacggagaagaaatttgaagttttctgttggtaccatccatggtgcagtccttgctttgacagcttcggtcctttctgttccatacgacatgcctagctggcttccttctaatgtctcgctacttgctcgcttcatccgggagcctccccctataagatcaacagtcacgaaagctgttgcagaatttaagcgcacccatgctgacacatggagcatccagaaggacgcattcactgaagacgaactggaggttctccgtgatacatcttcctcctcgtcgtacttcgcttagattaaaatttcaaaggccataggatattctctggtactggtgttgtgtatatgaatttataactgttgaagtgtcggtgtttttcataaagtatatccttgtacgtacctagttttatttcatcaacagatgccttcgtacaactgagatgaagttatgcagtctactgtataccgtctggacatagcggaagcattatggcatgtgggatccttgcgtgggctgagaaattgttaacatccaaatcttttgcccagtcaacgacgtgaataagatgctgcctagtttaaccgcataatgcatctctggcaactctaatagcagagtcaacgggctagatataaacttgcccatgttcattagaagcaagaaagaatcagccattgacattaagaagtacatgagcacccccgatgcaaacgtctatagccctaatcatacttgtttcttgcttcctc

SEQ ID NO: 13796 - DNA, 683 bp, Zea Mays
tgggatgctatttttatctctctatatctctactactcttaagcggggagcgagggcatccaccacggctccgcccggcatcgcagcgcgtccgtggccctccgccctcatcctcccccgcaaatctcgcctcctcagcgcgatttcgatctgctcgccatcagcgctttcctacgcccacgccatcagcgctgccctcgccctcaccccgccattctcgcctcctcacccaacctccgccctcaccctcaccacgccatcagcctagactccttccacgaatccaacctctgtacgccgccgtcgagagagcctaacctaacctccttccacgaatccaacttctgtctgccgccactgggagaggcatacctccccacgtcacggtcgctgcgtaggcgggggcaggggacgagaatcccgtggctcgccgcgatctccgaaacgaccatggaggcggtggcggctactgcagggaacctttgacactggaggaggaggcgctccggagcaacacggactgcgagtcagccctcgggatcctggtgggcgacggtgtggtcttcgtcagcgagaagaagttgacctcctccatacctcacgctctgccaaaaagatgtacaaggtcgactcccacctagctgccaccgaacctacctcccctcgcacctctatccctaacg

SEQ ID NO: 13797 - DNA, 724 bp, Zea Mays
atgtcgttaagtagagcctgcagaaacgaggatgaagtgctagctcctctcccaattgggttcgccgtgttcatggtgcacctggccaccatccccatcaccggcaccggcatcaacccggcgaggagcctgggagccgcggtcatctacaacaaggacaaggcctgggacgaccaatggatcttctgggtgggcccactgattggcgccgccatcgccgccgcctaccaccagtacgtgctgagggccagcgccaccaagctcgggtcctaccggagcaacgcctaagttccgcccggacgcgccaggagctgggcaccgttccgattctgttcctccacatgacgccctgttctgtttccgtgtggccaggactccgctcgctcgctgctgttttctacttcggaccaaagtgtgacatatctttgctttctgtatatgtatgtaggaatgcatcatgtaaggagaatttggaatacaattgcgtgagtttttatccgatcacaatctattgagtagtggaataaaaaaaaagtcatgtcctttctttaaaagaatgaacttatgaaagtaaagaaaagaacctcacgaggaacttcgtaggtgttgggcttacggcccagtttggtaagcccatcgggggctcgggttccgtctctcctctgctgtactggcgattgaagcggccgagatgaagcagttaggcccagcataatgcacaaac

SEQ ID NO: 13798 - DNA, 1925 bp, Zea Mays
aacaagccaaacaaaaactttgatctgtttgcaaactttggactaccaaatccacatgaacggagctccttgactcttgaaggcgttaggagagcactggaaaaggacctggatttgaagatatattcacttgatgcacataaaaagtttataaagcaatgtgtagacaaagtttttgctgaatctgctgatgaaaatgcaaatgatgatgcattagaggattctgatgctaaagatgatcatttatcaaaagaagggacagatgttgctaaaccaatgcctgtttcaaataaaatgtcctccaatgctgatgtcgtaacatccagcaagacaggaaaggatcctgaagaagaaaagaatcaaacttccagcagtgatattagtgaagacatgataaaagaagccattgaaaaaagggcatcttattttagaaagaactctgatactcttactttacaaggagttcggcgtactttggaagaagatctcaagcttcagaagaaagctttagatgcctataagaattttattactacaggattagacaagattttgcaagaacctgcaaatgggacaaagaaaaaaagtaaaaatggatcttccaaggatactgacaaaacaagtaaaggctctaaaagagtccatgaagaatcagatagctctgaattaaatgatagaaagagtgatatggataatagcgacgtggattcaaggccaagaaagaaaagggcagaaaaggctaaagtcaccaaaaaacagaaaatagttacaaatgagaggaaactgtcaactccaaaggctaaaaaggttgcaaaacaagatttgggtagcagtactgaagaacagggtggcaattcagcagaagaggataattctcattcatccgctgaggaagataataagagaaaacggcaacagactccagcttatgggaaacaagcagagcatctgaaatcgataatcaagtcttgtggaatgactattccacctactgtgtatcggagagtcaagcaagctgctgagaacaagcgtgaggcctgtttgataaaggagttacaggatatacttgaaaaggaaggattgtcaaaaaatccttctgaaaaagaaattaaagcagtgaagaagagaaaagaaagagcaaaggaacttgagggcatagacatgagtaatattattactagttcgcgtcggagaagtacatcaagtttcatacccctgccaccaccgccgcaaatagaagtggatagtgatgatgatgaagacgatgacgatgatgcagaaggcaatgatgcagaaggcgatgatgatgatgcagaaggcgatgatgaagacgatgcagaaggcgatgatgatgatgcggaaggcgatgatgcagaagacgatgatgaagttgatgaggagaatgtcaaaggtcgagatgaaggtgataatgatactgccgaagctgccaacggttctgctgatgatgctgaaaaggagaacaattgattccggccccagaataggttcagcttcatgttggcttcggcaagttggcctcgttcgtggatgtctggatgtagccagttgctcaggagttctcttctgacgtttatttatgtgtgcgtgatgggaacatttgttggcttcagctttgggtgaaacatgaggaacatattgtccttgtagtgatgtgcaatgtcacattcgtcctcttagcatcttgttcgcgattgtgtagattacaacaacagtcgcaaaacatataagttagcagtaatcaagtactgattggtttattagtttctgatatagtataaacctcgtaggtgaaagattggaattactatgcgcttcatgcttttgccttgttttttcttaggtagtgtttattttccgtggcatggtggcatctggggttttttgcagttctgattggcgttgtg

SEQ ID NO: 13799 - DNA, 1220 bp, Zea Mays
ctaataatcgttgttggacttcaaatcatttggccaagcgtacatctcggggtggtacatgaactgttgaatctatacaaccaacatgatgtctcaactgaccgcctgttattcaaaattcctgctacatggcaaggcatagaggcctcaaggttgcttgaatctgaaggaattcaaacgcatctaacatttgtttacagtttcgcacaagcggcagcggcagcacaagctggtgcatctgtagtacaaatgtttgtgggccgattgcgggactgggcaaggcatcactctggtgacccagagatagatgaagctttgaagaatggagaagatgctgggctttctttggcgaagaaagtatatgcctatattcacaggaatgggtacaaaacaaagctgatggccgctgccatacggaacaagcaggacgtatttagccttctggggatcgattacatcattgcaccactgaagatattgcagtctctggaagaatctgtcaccgatcccgatgtgaagtacggctatgtcccgaagttgactcctgctattggcaagacgtacaacttcactgaagaggagcttgtgaagtgggaccagctgagcctgtcagctgccatgggaccagctgcagaagaactgcttgcttcagggctagaggggtacgtgaaccaagcacgccgcgttgaggagctctttgggaagatctggccacctcccaatgtttaacaacggcgttgagagcaatagcaatgtgatttgcctggcaggctcacaatgctgcgcggaagacgatttgcttctttttggataatacacgaagcactcccgtgtttacgttgacttgacttgcagtgtgcatgtattctgtttttgtttgtaattcagatgatttgctggatccatgagaacctgtcgcctgatattccctgcaactgcaatcgtcctcgtacgtacggctggcaacggcttcttggaacatcaccacctgagctgcagttacatgattccatttatacacacacgtatctgcctgctatcagaagtcatttctacgctggttagccaagttcatgttttgaggatacaatcgcccacctagcgtcaagatctcccttgtgaagcgtcatgctgaatgtatgaatttaccatatgcttttgttacttggcctgattttattatttgtgtgcaagtaatgttggatatgtcctcggacata

SEQ ID NO: 13800 - DNA, 123 bp, Zea Mays
tagcagcgaggttacgagtcacctaaagatcatcgtggtacctggaatctcaagtcccaggcaagttgtgcccttgatcactttcatttacccaataatgttctttattatcacttattcatg

SEQ ID NO: 13801 - DNA, 1520 bp, Zea Mays
tgtaaaaatataaaagacccgtctccgtctcgggggagcaggagagggggagaggccaagaacccagccgcgaagccaagcccatctgatccggcccctgctgccctgccccagctcgtctctcaggtcgccttgccgttgccggttccgcgcccgggcccggctcagagtcgcgagctcgtctcgcagatccggcttcgcttgcttgaattctgttctttgggagcaaagagccactactttgacaagctggcatctcctggttacattctgttctctccatgtggcattatgtatgaagctgtttgagcacaaacctttcgatgcaaggactgtcatgggattcggagtgctcaatggcatatctattggacttcttaacttgagtctgggtttcaattctgttggtttctatcagatgacaaagctggccataattccctgtactgttatactggagacccttttcttccggaagaaatttagccggaatatcaagctttcccttagtgtgctccttcttggtgttggtgttgcaactgtaactgatctgcaactcaacgttatgggatctgtactgtccctactggcaatcatcacaacctgcatcgctcagatcatgacaaatacaatacagaagaagttcaaggtatcttcaacacagctcctgtaccagtcatgcccataccaggcattgacgttgttccttgtcggtccattcctcgatggatttttgaccaaccaaaatgtctttgctttcgactacacaactcaagttctgtttttcatcgtgctgtcgtgcctgatttcagtctcggtgaacttcagcacttttctcgtgatcgggaagacgtctcctgtaacctaccaagtccttggccatctgaaaacatgcttggtcctcacctttggctatgtcctgcttcacgacccgtttagctggagaaacatacttgggatcctaatcgcggtaatcgggatggttctgtactcgtacttctgcactagagagactcagcaaaaaccagcagaagcctccccgcaagccgttcaggcaaaggagggtgaatcgaacccgctgatctcggactccctgagcgctgccgaaaatggaggcagtgccaccgacgatgaacctctgaaggtaccaatgtggagctcgaagtactcgaaggcgtgaagtggctgttctggtattagtgcacacggtgctatacagaattcagcgtggtaggcagatactagggttggaaggcaaccctgttcctgttccatttttggccttctattttttcttcttcctggcacaaatactataaatatgtgctgtcagtaaatggatctcactcttgagaggaatacctcagctcgagaccgagtgttctgttctgcctgaaagctagtatttgtttgtgctccactccacgtgtaaagtggtagatggacatgatctcaacagtagtagtttgcattcttttgtactagtgatatacaatatttatgtattcctcgtgttccct

SEQ ID NO: 13802 - DNA, 3224 bp, Zea Mays
gcttggcttggcttgcattcacagttgcacgccggccgccgccaaccccgcccccacgtcgcgcgcgctgtctccctctcgcctctctcgtggagacgactgggcgacagccgacagccgctgtcgcccaacgcaagctgcccaggtcttcttcgggctcttcgccggcgacgagcacagccaggtttaggtcgagcaggggccgatgggggaagaggcggagagcaactgcaagcgcaaggcgccggactcgagcgtggaagagcagccgagcctcgcgccggcgccggcgcagtcgcaggcggacccggcggccaagcgcccgaacatctcccgctcttgcgtccacgaggtagccgtcccgaatgggtacgagtcggttaaggacgaggcggtgcacgggacgcttgccagcccggccttcaatggggagatggccaagcagtacccgttcaagcttgaccccttccagagcgtatccatcgcttgcctggagcggaacgagtccgtgcttgtctccgcgcacacttccgcggggaagaccgtcgttgcggagtacgccattgccatggcgttcagggacaagcagagggtcatctacacctccccgctcaaggccctgagcaaccagaagtacagggagctcagtcaggagttcacagatgtcgggctgatgactggcgacgtcacgctccatccgaacgccacatgcctggtcatgacgacagagatcctcagggcgatgctctacaggggctccgaggtgatcaaggaggttgcctgggttatattcgatgagatacattacatgaaggatcgtgagagaggggtcgtgtgggaggagagcatcattttcttgccccctgccatcaagatggttttcctttcggctaccatgtcgaatgcgaccgaatttgctgaatggatatgcagcctgcacaagcagccctgtcatgttgtgtatacggacttcaggcccacaccattgcagcactatatgtttccaataggtggttctggtctttaccttgtagtagatgaaaatggccagtttagagaagataactttgcgaagctacaagactcctttgctaagccaaataatcaactggatggaaggaaaggtggtggacctaaagcgagtggccgaattgcaaaaggtggaagcgcctctgggaattctgacatatacagaattgttaagatgattatggagcgcaagtttcaaccagtcataattttcagctttagtagaagagaatgtgagcatcatgccatgtctatgtcaaaacttgacttcagcactgaagaagaaaaggaatgcattgagcaggttttctgtaatgctattggttgtttagtggaggaagacagaagtttacctgctatagagttgatgttgccacttcttaaacgaggtattgcagtacaccattctggactacttccaataattaaggagctagtggaattgctctttcaagaaggtcttgtgaaagctctctttgctaccgagacatttgccatgggtcttaatatgcctgcgaaaacggttgttttcacgtctgtcaaaaaatgggatggcgatagtaaccgctatattggttctggagaatatatacagatgagtggaagagctggccggcgtggcaaggatgaacgtggtatctgtgttataatgatagatgagaagatggaaatgagtgttatcaaggacatggtgttaggcaaaccagcacctctagtcagtactttccgtctgagctactacactattctgaacttaatgagccgtgtggagggccaatttaccgctgagcatgtgattaggcattcattccatgaatttcagtatgagaaggcattgccagaaatagctcaaaagattacacggttggagaatgaagctaccttgcttgattcttctggcgagactgatcttgctgaatatcacaaattggggcttgatatatctgaactggagaagaaaatcatgtctgagatgattagaccagagagggctttgttgtatttggttcctggaaggctggttagagtgagggatggttcaacagactggggatggggtgtggttgtaaatgtagtgaagaaacctccagcatctgggactctccctcctgcattaagtgcatcgcgcagcaacaactatacagtcgataccttgcttcactgctcctctaattccagcgagaatggatcacgttcaaagccatgccctcctcgcccaggggaaaaaggtgaaatgcatgtggtgcctgtaccattgcctttagtatctggtctaagcagtgttagaatcaacattcctcctgatctacgaccacctgaagcaagacagaatatactttctgcagtgcaagaactaggaaagcgctacccccaaggtcttccgaaactacatccaatcaatgacatgggtattcaagaacctgaactagttgacttggtacataaacttgaagaccttgagcagaaacaatgctctcaccgacttcataagtccggtcaaagtgaacaggaactatcatggtaccaaaaaaaagcagatctgaatactgaaattcagcaactcaagtcaaagatgcgggattcacagctacaaaaatttagagatgaacttaggaaccggtcccgtgttctgaagatgctggggcatattgatgctgacggtgttctccagttaaaaggacgtgctgcctgtctaatagacacaggggatgaactgcttatcactgaacttatgttcaatggtacatttaatgatcttgaccatcatcaagttgcctcccttgctagctgctttgtaccttgtgataaatcaagtgagcagatacgcctaagaaatgaactttctaggccgatgatgcagcttcaggaggctgcaagaaaaatagctgaggtacaacgagaatgcaaactggaagtaaatgtggaggaatatgttgaatcaacctgcagaccctaccttatggatgtcatatactgttggtcaaggggagccacctttgcggaggtgatggaaatgaccgacatatttgaaggaagtgtcataagacttgctagaaggctggatgaatttctgaatcagttgagagctgctgctgaagccgtggggggaggttaaccttgagaagaagttcaagaatgcaagtgagagtttgcgtcggggcttcgcgcacctacgacgagctaccagcgtcatg

SEQ ID NO: 13803 - DNA, 1273 bp, Zea Mays
gagatttctggcgccaaaacagagtaagaaggaggcattttccctccatacagcaataaatgcagatggatctcaaggatagcctctccaaatttaagcaacagcaggagagatgccagtcatcactggcgagcatagctgcttcgacctcaaagccaaagcacagggcccaaccagcgcatgctcctaacgtcccagcaagaccatcacaacctattaagttttcaaatgatacagaaaggctgcagcacatcaattcgattaggaaatctcctgttggagcacagatcaagcttgtcattgaacttctttacaagacaagacaagcttttactgcagagcagataaatgaagcaacttatgttgatattcacggtaataaagctgtctttgacagcttgagaaacaaccccaaagtaagctatgatgggaggcgtttctcttacaagtccaagcatgacctgaagggaaaagatcaactgcttgttttgattagaaagttcccagaaggtcttgctgttgtggaagtcaaggatgcatattcaaatgtattggaagatttgcaggctctgaaggctgctggtgaggtttggctgttatcaaacatggactcccaggaggacattgtatacccaaatgatccaaaagcaaagatcaaggttgatgatgacctgaagcaactcttccgtgaaatagagctgccacgtgacatggtcgacatagagaaggagctacagaaaaacggtttcaagcccatgacaaatactgccaaacgacgagcagctgcccagatcaatggcgtaaaacccaaggctaagcccaagaagaagcagcgtgagatcacaaaacggaccaagctcacgaatgcccatctgcctgagctgttccagaatcttaacacttaaacgtgctacagtatctgacgacggaagatggttcattttactcctatttattgctacgttgtgtgtatgtgttatgcagctatgctgtatggcttatggttatgagcgccacaaatttgtttgtcaagattctggatgatatacttatgcattctgacataataggaggcaaaacctcaagattttccttatttttattttatcaattacagcattttctgagtttgcggcattatgtttggttgattttgggtcaattaggttggtgtgaggacaagctgaacatattttgatggattgcttagcttgaaatgataccagaatttaaacctcataattacgagtactgcggatctgcaggtttagct

SEQ ID NO: 13804 - DNA, 917 bp, Zea Mays
tgtttttttacatatgaacacgggcacacgaatcgtcggctcacggcctcgtcacgcccaccctctccctcttcgggttccaggcttccaaagttgtcagagacggcgagagtagggggtttccaggaagcttcgccagggcgccggtaagttgactggatttgctgctaggcagtcaggcaagctcgagttttgccatttgagaaggagagggaaaatgatgacctcgtggcttctgggccgccggggcccctccggcttctcctggagttccaccgccgaccaagtcacgcagggcatctccgccgccggcctcaccgccatcgtcactggggcgtccagcggcatcggcgcggagacggcgcgaacgctggcgctgcgcggggcccacgtcatcatggccgtcaggagccttcccgctgcccaggccgtcaaggacgccgtcctcgcccaggcgccgggggccaagctcgacgtcatggagctcgacctctcgtccatggcctctgtccgcgctttcgcgtcccaattcatcgacaggggtctccccctcaacatccttatcaacaatgcaggagtaatggcaataccttttgcgctttcaaaggatggaattgagatgcagtttgcaactaatcatgttgggcatttcctgctcacacaccttctattggataccatgaagaggacctctcatgaatcaaatttggaaggaagaattgtcaacgtgtcatcagaggggcacagacttgcatatcgggaaggaatccgttttgacaagatcaacgatgaatcagtgtatagtagcattggtgcatatgggcaatcaaagcttgcaaacatattgcatgctaatgaacttgccaggcgatttgaggctccttcaacacagctgccttccaccattattggaaaac

SEQ ID NO: 13805 - DNA, 76 bp, Zea Mays
gaggaactctggtggaggctcgaagcgatactgacgtgcaaatcgttcgtctgacttgggtataggggcgaaagac

SEQ ID NO: 13806 - DNA, 1215 bp, Zea Mays
ccaggccacccgcatggcctccggcggcacctcgtcccgctctttcgttgccggagcgcggccgaggcaaggcgtttccccagtcgagcagaatgtcgagtggccagatgagttccctttcaagcctgaggacttcagccgcttcgacgaatcatcagatactctgttctactcggttccacgttttgtcactcacattgatgaccaagcaatccaagctctcacagagtactattctgaagttcttcctccaagtaatactcctggggtggccattctggacatgtgcagcagctgggtcagccattatcctcccggttacagacaagagaagatcgtggggatgggtatgaatgaagatgaactgaaaaagaactcggtactgactcagtatgtcgtgcaagacctcaatgtgaacccaaagcttcctttcgaagataacacttttgatgttatcaccaatgtggttagtgtagattaccttacaaagccaatagatgtttttaaggagatgcgacgaatactcaagccaagcggccttgccataatgagctatatctatatggacctcaactggtgatgctgatcatgcatggatagttggtgcttacttccattatgttggaggttttgaacctccccaggcacttgatatatctcctaatccaggacgaactgacccaatgtatgttgtatgctcgagaaagaaaatagggtaactaaacaatatatttggcaagtgctatcaagaaacaaatagaaggaaaaatacaagaagcaagttgtttggccctgatcgcaggacctattggtgagctgatgtttccgtgagtaatgtaacgacagaaaaaagaagcaactactacataaactatttatagaagcggcagattcacttcataggttgtagcaactgtctttactaaaagtgtgtttggtttgaggaatgaagtgatccatcttcttctcactcctcacttttttatttggtttgtgtaatagaatgagttgatccatcaccactccattcctcgtaagataataattagtatatacatgaggggtgggttgattccaccaaaattgatagaatgaacttatgatgcatcacctcataaagcatagagtgactgcacaaaccaaacacaccataagggtatgtagaaatgatttattaaaataatggtatttattaaataatactacatccgtatt

SEQ ID NO: 13807 - DNA, 1852 bp, Zea Mays
cttcactcatcacttccacttatgtgcacacattgccgtgccgtgcggtgcgtgaaaggcacggggccgccggccggactcttctgacttggcaaccgccgcgcagcgcgacgagcgccacctgcttgctgccgcgtgcctgcgtgcgtgtgcgtccaccactgaccccgcgcccgcccgccgcccctgcccctccactccacttgctcactcgtcggctcgtcgcggcccgcttcccccccggccaagggatggacgcgcttcgcctacggccgtccctcctccccgtgcggcccggcgcggcccgcccgcgagatcattttctaccaccatgttgttccatacaacgaaatggtgaaggacgaatttgcttttctagccaaaggacccaaggtcctaccttgcatcaccatcagaaattcttcgaatggaaatcctcctattgtaggatatcacatcggtcattaaatacttctgttaatgcttcggggcaacagctgcagtctgaacctgaaacacatgattctacaaccatctggagggcaatatcatcttctctagatgcattttacagattttcccggccacatactgtcataggaacagcattaagcatagtctcagtttcccttctagctgtccagagcttgtctgatatatcacctttgttcctcactggtttgctggaggcagtggtagctgcccttttcatgaatatctatattgttggactgaaccagttattcgacattgagatagacaaggttaacaagccaactcttccattggcatctggggaatacacccttgcaactggggttgcaatagtttcggtctttgccgctatgagctttggccttggatgggctgttggatcacaacctctgttttgggctcttttcataagctttgttcttgggactgcatattcaatcaatctgccgtaccttcgatggaagagatttgctgttgttgcagcactgtgcatattagcagttcgtgcagtgattgttcagctggccttttttctccacattcagacttttgttttcaggagaccggcagtgttttctaggccattattatttgcaactggatttatgacgttcttctctgttgtaatagcactattcaaggatatacctgacatcgaaggggaccgcatattcgggatccgatccttcagcgtccggttagggcaaaagaaggtcttttggatctgcgttggcttgcttgagatggcctacagcgttgcgatactgatgggagctacctcttcctgtttgtggagcaaaacagcaaccatcgctggccattccatacttgccgcgatcctatggagctgcgcgcgatcggtggacttgacgagcaaagccgcaataacgtccttctacatgttcatctggaagctgttctacgcggagtacctgctcatccctctggtgcggtgagcgcgaggcgaggtggtggcagacggatcggcgtcggcggggcggcaaacaactccacgggagaacttgagtgccggaagtaaactcccgtttgaaagttgaagcgtgcaccaccggcaccgggcagagagagacacggtggctggatggatacggatggcccccccaataaattcccccgtgcatggtaccccacgctgcttgatgatatcccatgtgtccgggtgaccggacctgatcgtctctagagagattggttgcacaacgtccaacatagcccgtagtgggcgtcgctagcatgaatgatgtatggtgcgtcacggcctgacggttcgtcagtctgggccgtgttttgtgtccgaggaagatcgtctgtcagagatctggattgcctcgctgct

SEQ ID NO: 13808 - DNA, 76 bp, Zea Mays
ctctaaatggtttttccaatatttactgatctcccggttagattctgcgagagcgcatttttctttggcttctgcc

SEQ ID NO: 13809 - DNA, 949 bp, Zea Mays
atccccatggggaatgggtttatgcaaatactcagcaaaacttctcaagaagcctgatcaatgccgagcagtttatgcgtgttcacatcttttctgggctgatgaccaagatgggataatggatggtgaaagggttctgctttgtttgaaacgtgccttgagaatcgcaaatgctgctcaacagatggctagtgctacaaggggaagcagtggatccgtaactctatttattgagattttgaacaagtacttgtacttctttgagaaaggaattccgcagatcacaaataccgtgattcaagatttgattgaattgattagaacggagaagcaaagtgataactctgtagctgatccatctacagaggcattcttttctagcactttgcggtacattgaatttcagaagcagaaaggtgggagcataggcgaaaaatatgaacagataaagacgagttcatgagtcagaactagcgcggcgccacgactggtttcgattttgttgagaattgggtcgtttgtttggcatggttcagtgaaatagaaaccataagttttagctcgctccatgtaaaagatgtttatacgagctgttaattctcaaatctcacggtctgagcgggtctgttcgcccattggcaacactttcaggtttagtcaggtggcaataagctgtgtcctttggggagcacaggtctgtacaggattacttgtgttcgtgatcagttctactgctacctgaatttcatcgttgtatatttccgccccttatgcgaagcttatggattttagatctctgtaacattcggagtacatgccttcatttctgagttctgactggacattgatgattgtttcagagtggccagtgcaggacttgaacattttggatgcccgttcgttgacattttaatgttacccattactctgctgtgtggcatgacctcgc

SEQ ID NO: 13810 - DNA, 2409 bp, Zea Mays
cgcgcgcagccttaaccccatccgcagacatcagccggcgcctgtgttcctctccccgagccggtgcacgcaccacttcccccacttcgatctagcataatccgactccgccgactcgcctgaaccctagccagccgccgccatgccgccgcgacgcggtaggggaaagggtaagggtagggcaaagccaagagcgaagcccaccgagcccgagcccgagtccgatcccgaactagacgaagccgccaagtccgaaatcgaggcgggggacgcggaggctggggaggagtccagcgccgagagcgaggactcgaaggaagacgaatcggagagcgacaccgagtccatggatgcagaggccagcgaagaagctggcgagaacggaacggaggagatggatgcagagcctgaagccaaagccgtcgaggccaaggctgaaacggtggccacggaggcggaggcgaagcctgacgcctcggatgaagaagctggtgagactggctcagaccgcgaagcagatggcaagggtgctgatccgaaggcgaaagcggaggagtccgacggcgaggatgaggagggagccaccgccgtgaccgacggcgatagtgaagaggaagccgctgagacgggcggcgagagcgaagaggatggtggcgactccgacaccgaaggtgatgccgaggaatctcctccatcccctcctcgccgcagtcgccgccgtaagcgagcggccactcccgatgacgaagcagaggagacccctacgccgtcgcgtcgccggcgccgtcggaagtcaggggagcgtggtgactccccgccgccacttcctgaccacctccgctgccgtcgcagcgacgggaagaagtggcgctgctcgggccgtgcactcccaaccgttagcttttgcgagtaccactacgcgagggctaacaagggtaagaagttaccagcggatgaggaggtccttgctgttgttcttcagaggcagaagaacaagaggaagggcaggaggagcatcaatcctccgacgtcccctcaggcagccacgagtgacccccagaccagggatctcccaaatggactgatgacgatctcgccaggtagcagtggacctgcggcattgtcaactcctgtgaagattggtgtagaaattcctgcacccatacagcggtgctatcgttccaagaatgctgagccattgcctgttggtcctgtgaaggttgttcctcgtgcgatgagtgtgacaaaaacagcaagaacatgtcactgctgtggaatgaagaaggctgcacgtgtggccaattgcaagaactgtgataagaacttctgtaacagctgcattaataaatggtattctaagttgtccaggaaagatataaaggctcgttgtccagcttgccgtggtctctgcaattgtaaaccatgcagccttggtaattccaagggttctacgcctaaggaaccgccaaaagttgaaaggaagatacttagcataaaaatttccaaccatcaattttacaagcttttacctgtaagacttgaccaggaacagctagatgagttggaactggaagctaaaatacaaggaacaaaaatatctaatgtctgcgtccaggttgctgaaactggtcagagtgagtcactctactgtaataactgtaagctctcgatgagccgattattaaggtgctgcccaacatgcccgtttaagctgtgcctaagttgctgtcagaagatacgtgaaggaaacatgtcggacaacacccctgaagataaattcaagaatcggttgattcaacaagagtctgtccatgaggatggcagtattacttgcccttcgattgagctgggtggatgtggcaatcattctggagtgaaggatgctcaggctcatgggtcacctgtacctgagagtaatggaagattattggctgctgcccaggcagaaacagtgtctgaggaatgaagatgcagctatggttggctcatcgttcaggtgggagcgcaagctgacatgttcactagcatgaagcctgaagatgtgtatgatacggtccggattcgatagagggtaggttgcttaatttagctaggttatcggcctatatggctattgattttaggcctgtgacctggggatatgtttcgtctttgatccgggagtcgttatgttaaacatcgttgtacatatggttatggctttatttttgtcattaccgagaggcgggagctgatggattggttgtattgtcgttcgtctaagggattaccttgataatttttatgtgcggtactatcagtattcagtagcccacatggatcgtattgttgacttgttgtcattcgaggctagtttcatgttgtcattgaccattgcggctcgatggtgaaagcattacgaagaggcag

SEQ ID NO: 13811 - DNA, 721 bp, Zea Mays
cagaactgcaaccaaacagctgtctacatatggcatagagccactggtgatctcattgagactctcgctggtcactcgggcacagtcaactgcgtaagttggaatcctgtgaatccccacatgctcgcatcagcgagcgacgatcacacagttcgtatatggggggcaaaggtcagtcttaagcgcaaggatgttgggagcagcaattgcaacagtaacgggttccaccactcgaatggaaatgcacatggcaatggtttcgctcaccagtgcaacgggaacagcaccaaatgatttgccaaggcaatgtacccccatggatggttgactggcatctgtaaatccccctttacttccctcctagaacaagagtcgccgccgaaatagtaaaagaaaagaaaagcaaaaaagaaagctgcagcacaaagtgtgggcaacctgctgggtttcgtgcgccatctttcccttgttctatcatgacagccatcacatttatttcttaattcaagatgggatggaattatgatattactttgcgtctttgatatcttgatttatcctccctgattgattgtaacttcattttgatggtggtgatggttaactctgattgctgtctaaacaaccggacggaacttatcataaatttaagtaaaatcagtcatctagttcaagggatcaagtggtttgtttgattgccatattattccctataagaaaa

SEQ ID NO: 13812 - DNA, 124 bp, Zea Mays
gagagtttctaggtaagacttttagaaaatcctttcgaagatgcctcataatatctgcaaagaagggctacgctccgataccagctgtgacggaacctcccaagtaattaggcccacctacagt

SEQ ID NO: 13813 - DNA, 1600 bp, Zea Mays
cgtttggccatagttgcccggctacccgccgcgccgcaaacccgagccactcgcctgccgcgctgattagatttctttgcatccgccagtggagtcgaatcgatggcggcgtggtcgtcgccgccgtcgcttcgccacctcctcatgctccgtccatgcttgcccctcagccccacctgccttgctggctccttgcgccgccacatccacagccgctgccgcctcttctcctccgccgcatcctcctcgacactgacccacggcgacatcgcctcgacgcacggtgacgccgatggcgtcgtcgaagtcaaccctccgcgcggaactagggatttcccgccggaggacatgcggctccgcacctggctcttcgaccaattcagggaggtctcccgcctcatggccttcgaggaggtcgatttccccgtcctcgagtcggaggctctcttcatccggaaggcaggggaagaaattacgcagcagctctacaacttcgaggacaaagggggtcgccgtgttgttctcaggcccgaaattaccccttccctcgcgcgcctagtcataaagcaaggaaaatcagtctcccttccactgaaatggtttactataggacaatgctggcgatatgagcgcatgaccagaggaagaaggcgggaacattaccaatggaatatggatatatttggtgtgcctaaagttcgggctgaggctgagcttcttcatgctattgttctcttatttcaacgtcttggaattacatcttcagatgtggggatcagggtgtccagtcggaaggttcttcaggctgttttgaacatgtactccatcccagatcacttattcactcaagtttgtgttattgttgataaattgggtaaaatgactagggaagaaattgagaaggaacttgtttcaactgggttgtcatctgaagctgtacagggtatcatcgatgtgctttcaatcaagtcattgtccaaacttgaagaggtgttaggctctgatgttgaagctgttgctgacttgaagaaactcttctcctttgcggagcaatatggttatgctgattggatttgttttgatgcatcagtggtccgtggccttgcatactacacaggaattgtatttgaggcatttgatagagaaggaaaactgagagcaatttgcggtggtggaaggtatgatagattgctttcaacatttggaagtgaagatataccggcttgtggctttggatttggagacgctgttatagtggaactgctgaaagaaaagggtctcttgcctgatatgtcacgccaaattgatgacattgtcttccctttggacgaagaacttgaaggaccagcatccagtattgcttcctctctgaggaagaaaggccgatctgttgaacttgtagaagacaaacgtctcaaatgggtatttaagcatgcggagaggatcaatgcgagccggctgatattggttggaaattctgagtgggagcgaggcatggtacgcgtaaaggtgctatcaaccagggaagagtttgagaatggatgggcatgatccttgccagctagtatgctcatctgacattctgactccaagtatacat

SEQ ID NO: 13814 - DNA, 694 bp, Zea Mays
agcgcaagaagaagaagaacggcggcaggaaacctgaagaaaacgtggaaactttccagggcctaatccgcgaatacttcgaggccgcgcctccttggatcatgacgagcagcgtgaccaaccagggccgcgacgagatactcctgcacatgtctcagcttaggaattattggctcaagcattgagatgcaatgataaccaaaccagggcgaagcaactagaacagcatgcaaagcactgtcgtccattgatgcatggacattcagcagtcggcgcctccgcaatcaggcgttcgcaccaactaatccagccttttgagctgttgactgtccaatatggccccctgtacatgattacccaatcaacactctggggatgcggacaaggtgctaaaatcagctgatcatggtttttttctttatttctattgtgtacacgtacaatcccaaccaacgttttccccttgttcccatctgattataggcttgtgtatactgtggggttaaatgattaataaattctggtgttagctaatcaccagcgggaatctcacttttttgtctgccacctatatcatatgctcccttggaccctgcagcatacaaatggcaggaggtgcatgaacctgacctgttaagaactggctttgtggtgtacagaatgtattgagagcgccacattattgggatccctt

SEQ ID NO: 13815 - DNA, 170 bp, Zea Mays
  misc_feature (1)..(2): n is a, c, g, or t
nncggcggcggccaaagcccttagcttgtccgtgcacgcgccgccgccgctgccgctggtgtcgtccacgaggctgctggcgctgtccatttctatgcaacactgctagctatctatagctgtgcggcaccgcccagcgcgtagcggcgtagtatgcttctgttgcgcaa

SEQ ID NO: 13816 - DNA, 797 bp, Zea Mays
ggaccaccagagtgaactgctgtactatttttttagctgcctagttttttagtcgtttcctcttaaaaaagttgttgtgcttctcgtttcaccgtgcgccacaagcacacaactagggcgaccgccgccgacctacggccagctgtgcccatgtcttcgtcgggccctttgctggcgacgggaacccaccacaccggccgccaacctgaggttttgtgggctcagcgctccgagaagattttcttgactatctcattgccagatgcgaaagatgttgtgttaaagaccgatcctaagggcctctttaccttctctgctgttgtccatggggaaccttttagcttcactttggagctttttgattcaatactgtcagagggaagtaaaacgaagacaaagatgggcctgcgaaacataatctgttcaatccagaaagaaaagaaaggttggtggaagcgcttgctaaagtcagaggaaaagcatccatacatcaaagttgactggaacaaatggtgcgatgaggatgaagagtctgagttctctggggattcagatggtggctttgatgaggcaaatgaaggagatgaaagtgatgatgatgatgggatgctttatctccccgaccttgaaaagctaaggggcaagtgatctggctgcttcggtgaagggagtagggttgatgtaacaagttaccgttgacgtgacagagtaggcttatcatcgacgtagttggggtcttacttgctgagcatctgcgacggcttgagacttttagcgtcggcagcgggagcgatcgg

SEQ ID NO: 13817 - DNA, 907 bp, Zea Mays
gcgcgaaggctccgacggcgacggcaagaaggtggatccccgctgccccaacgcgcccaacccgttccacgtctgcaccgaccactgcctcgccaagatatccgaggccggccgctcgtcggagggagccaagtcgccgatctcgctcttctcccgccactcccgccgctcctcctcgtcctccgaagatggcagcgtgaagtccgcggggagcaagaaggtggatccaaggtgcccgaacgctggcaatctgttccatgaatgcggtgagcattgcgccgccaagatgcagcggtcggagcagcagcacaagggggtcaatctcaagtcaccgcgcaggaaagtggggaagaacgctacagcgatcccaaactggaaggttgatccgaggtgccctaacgcgtccaatccgttccacatgtgcgcccagtactgcttcgaccatctgagtgaaacagcgcagacaagtgcagcaaagtcagacaagagacgaggcaagggcgtttctgaagacgagggaagaggagaaaccaaaaccaaccctggttgcgccaacgcgtccaacccctaccacaagtgcggtgaccaatgcaagagaaagggtggtggtgataggtagaccgtagacgaggaaggcaggccggcaagacaggatctgtccggacggacgatcgacggcgggcgatgaagggaagaaagaaaaaacaaagctagttcccatcgaccgtccctgcgggctccgttctgtatgtagagtggtgtgcttccccgttttccattgtaatgcactatgtttctctgacgatgaaggttgcctgtacgagcagaagcctcctggagtgtttggtgtcatctttttttcttttttcttttggttcgctttcacggaaatggagacatgtttttg

SEQ ID NO: 13818 - DNA, 734 bp, Zea Mays
tcaactttgtctaaattatgagaagattaagaagttcatatcgaatgccaaaagccaaggtgctactattctgactggaggtgttagacctgcgcatcttgagaaggggttctttattgaaccaactattattactgatatcaccacatcaatggaaatctggagggaggaagtctttggtccagtcctgtgcgttaaagaatttagcactgaagatgaagccatcgaacttgccaacgatacacagtatggtttggctggtgctgtaatttctggtgatcgggagcgctgccagaggttatctgaggagattgacgctggatgcatctgggtaaactgctcgcaaccctgcttctgccaagctccctggggcgggaacaagcgcagtggatttggacgtgagcttggagaagggggcattgataactacctgagcgtcaagcaagtcacggagtacatctctgatgagccgtggggatggtaccaatccccctccaagctgtaaactggcaagacgaaaatttgtctgtttcggtagaataaatatatctcgatgctatacagaacgaacccgtgtatcacattgaatgacatggtgaaaaaggcacatctgcaggataaaggcgagagttgagttgaaaccaaaaattttggaactgtgccattataagaggtggattttgtcaatgggccttgtctagacttcgttatcagcaaagacagatttgccccta

SEQ ID NO: 13819 - DNA, 1352 bp, Zea Mays
aaatgggtcccactagtgtgccgcacccgcaggccaccacggcctgcgcgaggggtgtcggtgtgggctcttggagtcgccgtggcgccgtgacattggctcgctgaccgtagcctgccgctcgcatcccgctataaaagctccccacgctgcttcgccatgccccaggcccaccgctagcatccgcagttcccccgcgcccgagacgcaaccccgcgccaggagtaagtttgttcttttatcgatatggcgagggaggagaatgtctacatggccaagctggctgagcaggccgaaagaaggaggagtcccgtaagaacgaagagcatgtgaaccttatcaaggaataccgtgcgaagatcgaggctgaactgagcaatatctgtgatggcatcctgaagctgcttgactcccacctagtgccttcttctactgctgctgaatcaaaggtcttctacctcaagatgaagggtgactatcacaggtatcttgcggaatttaagactggtcctgagaggaaggaatctgctgagagcacgatgatggcctacaaggctgctcaggacattgcgctggctgagctggcacctacccatccgataaggcttgggcttgctcttaacttctcagtgttctattatgagattctgaactccccagacaaagcttgcaaccttgcaaagcaggcgtttgatgaagctatctcccagttagacacccttggggaggagtcatacaaagatagcactctgatcatgcagctccttagggacaacttgaccctttggacctctgacctcacggaggatggtgctgatgagggcaaagaagccccgaaaggtgaggctggtgacggacagtaatcttgggagagcgcatattgttcgagcccattgttttagatgctctatgctgtcgaagctgaagctgtgccgtgctattattgtagctgatttcctgttccctcacttctttttttatattagtaggctggtagtgttcgaattagttccccattgctttgtgttgccgctagttggcattaagtccgtgtggactggtattattcactggatttgagaagcatgtcagtggttgctctagcgttttattgagttttgaagtcatctccctcatttcggtttcaatcatttagcagattgtgcatatggttgtgtaaaacacagttttgcacaattgcacaatttacgtagtgtggtttgaaataagagtgagatttgggctggatgtgcggttggctgtttgaatctgctctttagggcctgtttggtagggaggttttgaatactacagtttttagaataccacagttttcaactggaagtgacaca

SEQ ID NO: 13820 - DNA, 128 bp, Zea Mays
cgcccgtcccgagtcctagacaccctagcctcgtcgtaaagctgagagagagagagggagaagaagagcagtgtcgccgggatcggacatggaattcgctgcggccagtcacccctctacttttcctt

SEQ ID NO: 13821 - DNA, 1533 bp, Zea Mays
cttttccgcccccacctcaatctctctggattctctcgaagtttcttccttttcgagagtccggtgataatgacccctgttgtttgtgttgttggtcttggactattccaacttggctttccccaggttgggaaatgtgtggagattgggcttccaatgctaattcttgcggtggttgtgcaacagtatgtgccaaattacttcagttatatccatcaacgggtcaccttcttgtttgagaggtattcgttgcttctttgtatcggcatcgtgtgggcctttgcagctatccttactgctgcgggtgcatatgaccatgcttcacctaagacacaacagcactgccgcactgataagtctttcctcatgtcatcggcaccatggattaaaattccattaccattcgaatggggtcctccaatcttcactgctggtcattcatttggaatgatgggtgctgtacttgttgcagccttcgagtcaactggagcacactttgctactgctcgtctagcgggtgctacaccacctccagcttatgtccttagtcggagcgttggcttgcagggtattggaatgttcttggaggggatctttagtgttccagcaggttcatctgtatcagttgaaaacattggcctccttgggctgacaaaagttggaagtaggagggtgatccagatatcaactgggtttatgatattcttctccatatttgggaaatttggggccttctttgcatcgatcccactgccgatctttgcagcaatttactgcatcttgttcggcattgtagctgctgtgggagtctcgttcatgcagtttgccaacaagaactcgatgaggaacatctatatcatcggactctcgttgttccttggcatctcggtccctcaatacttcaacggatacacttcttcagctggcggccacggacctgcccggacaaatgctggatggttcaacgacattataaacaccgtgtttgcttccgggccgacggtggcgctaattgtcgcttctgtcctggacaacacgctggagttcaggggctacgaggccgaccgggggctctcgtggttccagccgttcctgcgccgccataagggatactcggaccccagaaacgaggagttctacagcttcccaatcagcgtctatgacgtcatcccagaccgatttcggcgctgactccaaatgaccgctgttaccccgcagctgtgcatgtaaatccccgtgagtcttgttagtcttactcctgtgacttgtagcggctggttctagggggatatgggtaaaagaatgcttagggcaattgcttggtttgactcttttcgggataagaaacgggttacatgataatgtagagctctgtgccggatacattggttttgggaagggttacagaagaatactagcaccttacatgttgatgggcatttagttgaaggcattggctatttgtttttttgcccaatatatggctgttggagcttgatctgctgactgggaaaagggggcagtactttggat

SEQ ID NO: 13822 - DNA, 1023 bp, Zea Mays
aaccccgcgcccgccatgctaaaaccctaataaaccctgcacctccatcgcaccctctccgccgccaagaccatcctcgcatccgggttgccagctctccttgagcccagaagcacaccgcgcgccatgcgaccaccgagagggcgaggcggtggtggccggttcggcggaggaggaggccggggccgcggcgggggccgattcagcggtggtggccgaggtggcggcgggggccgcttcggcggcgggttccgcgacgagggcccgcccgcggaggtcaggtttcgacgttcctgcacgcgtgcgagggggaggcggtgacgaagctcaccaacgagaaggtgccctacttcaacgcgcccatctatctgcagaacaagacccagatcggcaaggttgaagagatcttcggccccatcaacgaatcctatttctctgtgaagatgatggaggggatcattgcaacatcgtacaatgaaggcgacaagttctatatcgacccaatgaaattgctgccgctctcacgcttcctgccacaaccaaagggaaatctcaaggagcacctagaggtggtgggcgtgggggaggaaggggttttgggcgaggccgtggtggtggttctttccgcggtggaagaggaccaccaagggggggtggtcgaggtccaaggggtggaagccgtggcggttttatagggcgaggaaggttctaggtgcagtttgagtttgatgatgttttccccttgaagcatcatagctgcacaattggaaacttccatgttattgtaaccagatatgtttaaggtagcagagcactttatctgtggaacttggattctcaactgaaacaaacggtttgtacctgttccgttcccaatggccattatgtgcttccttgttctgaattcaacttgtactgatcatgggcatgcagttacagtccttggtttatgagggcgcgggggagtacattttgccatccttgtgttggttctgtgttggctgtctcgattttaaattcact

SEQ ID NO: 13823 - DNA, 1728 bp, Zea Mays
ctgggttatgtcagcattatgcctacgtcgctgaacaaagtgtccaaaacgagcactagtgtattttttattcctactcccagtcgccgcctgcatttgtctctcggtcaggaacatggaggggagacggctttcacggcggcagttacgctcgctaccggacgccgcgtccttctcgccggaagtcgcggccagcccggggctcgtcggctccggccagttgggtctcggtctctcggcggcgttcgagactctgccgccgattttggtagaagtgaatggctttacaaggacactgattttgaataggccaaagcagttaaatgcactctcctcgaccatgattatgggactcttgaggtgtttcactgcttatgagaaagacgatggagttaaattgttgattatgaagggtaaaggaagagcattttgtgctggaggtgatgttgctgcagttgttcgatctatacataaagacagctggaaatatggtgctgatttcttccgaaatgaatttttgttgaattacataattgcaacttataccaaacctcaggtttctcttcttagtggaatcgtcatgggtggaggtgctggcgtttctttacatggaaggtttagagttgccactgataacacggtttttgcaatgccagaaacagctctgggtctctttccagatataggggcctcatattttctgtctcggcttcctggattctatggagagtatgttggtcttgctggtgccagattggatggtggggaaatgcttgcatgtggtctggcaactcattttgtccagtcaaatagtctgctatcgctggaagaatcacttaaaaaggtggatacttccaatgcttttgcagtgtgtggtatcatcgatcaatttgctcaacaaccatcactgaaagaaagcagctctttgaataggttggaaatcatcaacaaatgcttttccaaaaggacagtcgaagaaattatatccgctcttgaagtagaggcctcaaattcggcagatgaatgggttgctacaacaatccagtccttgaagaaggcttctcctaccagtctgaaaatctctctgagatcgataagagaagggaggacacaaactgttggggagtgcttgcagcgggaatatagaatggtctgccatgtcatgcgtggtgacttcagcagagacttctttgagggatgcagggctatattgctggataaagaccgaaacccaaagtggatgcctccaaggttggaacaagtgcatgacgaggctgttgaacagtatttctccagaattgatgatccacagtgggaagacttgaacctacctgctagacgctcccacggaagaaatatcgagtccaagctttgatcgaaggtcatgggagaaaggtggaactctggaacggagccttggtagtggtcagaataacacattattgcacatcatctcaagtttgaagagtctgcagactattgataaaataaacatgaatgtgccatataggtcaacttatatcacagaaagaaactctttgctgtttatacgtggagactggagtcatatgcatttttaaataattataagtaataaaatcgaaaaagaaatcgttggaaagacttttcttggagtcagaccctacttgatggtgataatcgatgagctttctacacgaccaattgttagatgaacgcgtagggctgtggagctggcccatgtacggc

SEQ ID NO: 13824 - DNA, 2464 bp, Zea Mays
ccttccggtcccccaccacgcgccggacatgaaatatcccactcaaaccaacctaccgcccacagacccaaatcggcaccccggaagcctcaaatccgctctattcctctctccccctctctcccccatcgcaccagcaggcgagcgcgaggcggaggagtagagatggagtcggaccagggcaagcttttcatcggcggcatctcctgggaaacgacggaggagaagctgagcgagcacttctccgcctacggcgaggtaacgcaggccgccgtcatgcgcgacaagatcaccggccgcccccgcggcttcgggttcgtcgtcttcgcggatcccgccgccgtcgacagagcgctgcaggacccccacaccctcgacggccgcacggtcgatgtgaagcgggcactctcgcgggaggagcagcaggcctccaaggccgcgaaccctagcggtggaaggaactccggtggcggaggaggcggcggtggcggcagcgatgcaagtggtgctcggacgaagaagatctttgtgggcgggctgccctctactctgactgaggatgggttccggcagtacttcgagacctttggcatagttactgacgtagttgtcatgtatgaccagaacacacagcgcccacgtggtttcgggttcatcacctttgattcggaggacgcggttgaccgcgtgctgcagaagaccttccatgatcttggtgggaagctggttgaggtgaagcgcgcattgccccgtgaggcgaatcctggcggctctggtggtggtcgttctgggggaggtgggggttatcagagcaacaatggccataacaccagctctggtagctatgatggtagaagtgatggtggcaggtacgggcagacacaacagggtagtggtggtggtggctatcctggctacggtgcaggaggctatggtgctggggcagctggatatggatatggtgctaaccctgcagttggatatggaaattatggggctggagggtatgggggtgttcctgctgcttatggtggacattatggaaacccaggtgcagctggttctggttaccaaggtggacatccaggctcaaatagaggaccttggggcagtcaagctccatctgcatatggaactggagggtatggtggcagtgctgggtatagtgcttggaacaactcttctggtggcggcaatgctctgaatagtcaagcccctggtggacctgcaggctatggaagccagggctatgggtatggtggatatggaggggatccatcatacgctagtcacggaggatatggggcttatggagcacgtattgatagtgctggcaatcctgctactggtggatcatctggatacaatgcaggctatggaagtggtggtgccaactctggctattcaagtgcttggagtgatccttcgcaaggtggtggatttggcggttcggtcaatggaggtgctgaaggacagtcaacttatggcactggctatggcagtgtgcagcccagggttgctcagtaaagagaggcattttgagtgtgcgaaatgaaccagtgcatctgggcagtctatgtattgatttgtcattccagtctctctggttgctctcagcattttgaagattgcccatttgctgcttaaatcagtatttatccgggttggaatgcttgatcctttagcggcttactactagaacgtctagtcaataagtagctaaaatgtggagtagcagtatcttgcggaatgcttttattaatttttacatttagctttatccatctgtgtggtttgccatgagtggagtttcaggttgcttcatctctagttataagctagagtagcttgactacttatgggcaaaattatctagttgtacctctattctacagatcatatatttgtgtttgacattagtatttatgctggatcttgctctacctatattctggaatgttctctatttggtggctgtattgacatgtggtattatcaacattgatgggtttgaaacagatgcaaaccctgaaatatgcaatcatagttacttgatgctgtagctgcttctaacagtattttcaactgtagtgcaagtgtttttatgtagctggaatggtacacccttcaagtatatcaccaagctatgaattccatccatttggtcctagatttcaatattttcaaagcagcagtaagcttattagcagcaagattgtagcgccaagtttctgaggttgaatgggatggcattctttttttagatatgcccaagcaaggtctatgaaatcaggcatttgaaaaaggcattttgcacagtgatttacatgaactggcgagaagttccaatatcggggttctgacagaatgcaagataccagcttaagtgcttcattttctgaagggtcttgtgctgtgctacaagatagtggaatcttattcacatatataacttctgatgttc

SEQ ID NO: 13825 - DNA, 1799 bp, Zea Mays
gagccatccgccgagattagggattgatgatatcagattggtctatttcacatatagaagataacgcccgttcaaggcaataaacgagaacaagcatgggatgtggaaaattttagaaagtaaagacaagtgaattcttgacgacgttggcttggcaccttagtttgagtacataatgaaagaacaaccttttagcaaccctggagcatctagaaaatatcagtcatgtaactatcgttaatcatttgaaaaccactggaagacaggagatgtagcaccacaagccattcctttgatcatttgaaaaccattgcggctctttctgattatatcaaccagttgagtggatgaaagaccaaaaaatgctttggaagaagggctcacaattgtggataataaggcatccagtattatagaggaaacaaaggaaattcaaattagacggaaacctgctagtccaagttcttatatgccaaattcatcaatttgcatcctactggagacattgctggcagaggaattgagactggcataggagaactcaatatatgcttgtgaataacgcatccagtgaaagatagtagattttcatcaattcactacccaggatgttgtcgcattggatgagaatgacatggaagacggcgaactagaggaagacaacaacctcatctaagctgaaaatgtgttgcctgtggttgaagaaaatctagcagatgaacaacactgccttccctgtcctctctagacctgaatctctctgatggtttggattcgtccatgattgatcctgtacgatgaaggatcagctcgtccaacgtttttcaaggaacgaactcaatctgaggaattaccttttcattggtcacctggggtactacgaggaatgacttcacgatagacgactcggttttgcgacgcaaaccaaacgccatggttaggctcagatgttggatcagatgattcctcgtggcttcgtgacgcaaaccaaacgacatggctaggctcagatgttggatcgtatgatttctcgtggcttcgtgacgcaaaccaaacagcctgtaagtccgcacaccttatctatcatggtcattgttgagctgatcagtaattggagtcgtgtgataagcttaatggacctcctatttgtcgtgatcttcacagatcaacaagtgagcggcctttgcatgctgcatgagatcaagcaagccgccgactggcaatgctccacctgccattcagttcgttggtgaggtattaatcaccagccatgttggcacttggcggcatgcagatggagcagaacatccaggtgaagcggacagatacatgatcgatcatgagttggcgcagacacaggccagacaaccagaggctatattccaattcatacattccatgataagcaaaggaagatccaagacaacacaaatatacaaatagttagttatacaagcaaaaatcctgttgttttgtgcctcccattttctagtccagaattaatatgacaatttttcactgaaactggttggatcagagaccaggaaaaaaagggaaatgacaactacagctgtgttttttttttcaaagaaggcagctgcccgtcgatgatgtgctcacttgaggatttcctctgccttttcagtgacactgcttcatccttttcagagtcaaatgaatctctacctcatttcactgcacatacttccaaactgatttgctgtaacatacttgagtttcggtatgacattaatttttaactcataagagaacaaaatcagaagaaaaaaaaacaacaa

SEQ ID NO: 13826 - DNA, 935 bp, Zea Mays
ttctgactgcagccagattcttcttctcaggatatgggaagaaatgctcggtttgcacaaatatggaagagtcgaaaaggagaaaaggctgatgctggtgactcattgagagaaatatgccatctttatgatgctgtccaagtagatcccgatgatgagaagcatccagcagaaccacggattacatcttttgaagagggtgctgttctatgcaactttcttccacttatacgggaatacttgccatcaactgccgaggaaattgaggcggatataatttcattggcgcaatcagaagattctgaagtttatgatatctatactgtcaaggaggtggatgacacaatggaggccacgtcagcagcttcatatccaaggttacaagtggatgatggagaagatgaatgctacgaagattgtccatatgacacagatgattccaatgccgaagacaatcctctttttgattatcctgatgaatcttccgaggacgaggatgatggtaggaacgacgaggatccttttggagacaaagaaggttctgactcagattacgagaaggaagaagtagaggtggaagaggatgagtaacggtgaagggaagttgtgatgaaacgtgcggttgtagaatgtagatgcagggcagcaggggagctgactgatgaatgtttgtgttgctttatgctgtctaagaaacgggacttgtctcgacgctttgtgccagttagcatagcacatcgtgtgcagtatccggaggaagaattgggaaaaaacaatatttggaagcgtcagctagacacaggcgaatcgtaataattggtattttgccacttgaaaagttgcatccttctgtaattaccgtttgtgtagccttgtgtgttcttgctctcgtattatataggagtaatacatgtggaaataaactattttcgtat

SEQ ID NO: 13827 - DNA, 525 bp, Zea Mays
ctgtttcgcgctcccttccggtccaaaccaaaccgtgcgtccgtgtgcgactgcgacgagaagcttccagaacccaccagctaactacgtccgtcctccaccaatcccatcttcggacgccacgacaactcccctccctcttccccgtccgtatttatttatacacccccagtccctacccacttgttccttcttgcttctccatcgagttggattgggttcaaagttgggcttttggacagctgtggtgtgcacggcagctctgtgacttgtgaggaggaagggaggaagaaagcggatccatggcgtcgaagcggatcctcaaggagctcaaggacctgcagaaggatcctcccacctcttgcagcgcaggccctgttgccgaagatatgttctactggcaggcgacgattatggggccatcagatagcccatacgctggtggcgtatttttggtcactattcactttccaccggactacccattcaaaccaccgaagatgatgggaacacagatgactccta

SEQ ID NO: 13828 - DNA, 85 bp, Zea Mays
ctttcagcctcggcggcccggccccgagattggtcccgctcgtcgatgacctggccaagctccaactgccgccgctgcgcctctg

SEQ ID NO: 13829 - DNA, 2971 bp, Zea Mays
tttctttttttttggtcatatatgaactgaattattagttccacacaatttcccagcttctggttcggcatgtagataaactgaattattaagcttcacacgattccccagcttctggtccggcatgtagatgaactgaattacagtacatgttattatggccactctacgcagatggaacccgaacgggaaaccagatctgtcagtactcagttgccgccagcgcagaggagggcgtcaaccttgtccttgaggtgcgcctcgtcgtccccgaggcgggcggcggcggcgccatcctcccagcggatcagcgttggcacgcccttgagcccgaacctggggtccaccctccacgggtgcgccgggtcgcgccaagtgggcttgtccccgacgtaggcgcgcaggagcaccgcgtccttgccctccagtgcctccagccgctcgtagatcaccggctccgccacgttgcagtctgccgcgccgcacaacgacgacggtgggtaagtacgggaccagagcgtcaccacgactagagctgaattcccagaatctgggcttaccggggcaccaggagagggaggagccaggcttgcggtcggccaggaagagcagcagcttcaccttgccgtcggaggcggcgtccggggaagcgaagaggcgatcgaagtgggcgtcgaagtcggaaagccccgcgtccaccttctccaccgtcatctcgccctcctctccccttccgctggccgagtaaagagagcgaattggagcagcaagaaagattgggagacagattggtggaagtggaatgaccgaatgacctaggaagcacacgagacggcgtgccgtgtgattcctttctgggatttctcgcagcctgccggtggtccccgcatctcaacccgcgtgttgcgtacgcgagccggaatcgggggaggtttgggtatggactgaagaggcccaagagctaccgtcgagcccaacaaccaaatgcagccgagtccaacagagtcatcctcatacatcgttcactacttcactctcgtcgttctccccgatcggttccggcctcgcgttcgtcgtctccttccccctcgccggccgcgtgatctgcctgccgcgcggacgccgcgggcgcgacgatgcacgacccgtcggagatccgcaacctccccatcgacatcgcctttggccgcctccaggagtggctcgtggaccgcaagcgagtgccgcacgactggcggaagcgcctcgccggtattcgcgcccgcatcgcgcccgctttctccgccctgccgcggaacctgcacccctcactcctcgccctcgatccagaagaaattggctaccttgaagcaaagaagatatacagcattctcctagaatccaacaccgagagtcgcaacatatttggccgcctgacgggatccgcgggtgaatgggagtcaattattaaagcttacgagaaggaccatgtcttccttggagaggcagcgcagatcatggttcaaaatgttaactatgacataggaagcagatgcagaagactcagcagcagcttgcagagcttgatcgaagggaggctgacatcaagcgtcttgcggcattgtcagcgactagatatgtagaagcctgccaggaactcggtttacagggaataaatgtgagggaagaactaatagagtccgcaaaaacactcccatctacttttagcaaaatcttggaggtcctgaacagtgatcctgtctcaaatgctatggagtactacacaacttttgttaaggactgccatactgaggacaagagaaatagtgattctgtgctacccaaactgaaagacttgcaggccaatcctccttctttgcatgtctcagtatataatgagatcaagagttctcttggagaggcatcaaaatctcctgggtttactgtgatcgcgggagaaattgactcaaatgttgctgctgctgatgatattgattgggacatttctgtggatactaatgaaattgattgggacattggtgctgtggaacaacctggtgaagaatctggcgatggctttggatcgtatgaaattattgatgctaatatagagctggccggttctgaaaattataatgttggtgtctcagacaaatcaatgaacaaagaagatcttgcatcatctgagtctggtatttgctgggacatcactgctgatagttctgaagaaattgctagtatacagaatgcttcatctgtattagagcaatctcagtctcaaatgatagctgaagatagaagtttgttgctggaaaaagaatataggaataatattctggatgatttactcgaggtaaaatcatttttgactcaacgcttaggggagatgaggaatgcagacacatcatctctacagcatcaagtgcaagctgtctcaccttttgttctccagcagcatgctcctgacagtttggagaacatgcttgtagagatctcgtcagcaatctcattgctaactaatcagaagactcttgaccttataatgatccttaactctaaaaggtttctggatagattagtttcaagcttagaagagaagaagcatcacgaagtaaaactacgggaaggtttaggtgatttatctgttaagcgtatggagctgcaaaacgcactgtcatcatcatggccaaagcaagaggcagcaattacaaaaacaagggaactaaagaagctgtgtgagtcgacactgtcgtctgtttttgatggaagaccagtgtatataattggagagatcaatactttactgagctcaagtgttagtcaattagctggatgactgtatttccgttcctggaccaaataagattgcaaaaatattatcttatggtatatacttctgaatatttatggtttcctggtcctgtttctttgctgcacggaagtgcggatgtatgggtttgaattaaagtgtcagcttcatcgtagggaccgg

SEQ ID NO: 13830 - DNA, 1028 bp, Zea Mays
ttcggggatgcttggcttttatagatttaggtaactacctcaagttctacaatgctataagacaggcctatccagacattcaaatgatttcaaactgcgatggttcatctacaccacttgatcatcctgctgatttatacgacttccatgtctataatgattctaagactttgttcaacatgaagagcacatttgacagaacatctcgtagtggacccaaggcttttgtaagtgagtacgctgtttggagaggtgatgcaggtagaggaagtcttcttgcttcattggcagaagctgctttccttactggactggagaagaatagtgacattgtttccatggcaagttacgcgccactattcgtaaacgacaatgaccagacgtggaacccagacgcaatcgtcttcaactcctggcagcattacggcactcccagttactggatgcagacgcttttccgcgagtctagtggtgctatgttccatccaacgacaatcagctccagctactcaggttcacttgcagcgtctgcgattacctggcaggactccgagaacagcttcctaagagtaaaggtcataaacttcgggtcagatgctgtgaccctgacaatctccacaagtgggctccaggccagtatcaacgctctgggatcaaccgccactgttctcacatcagcagatgtgatggatgaaaactccttcagcaacccaaccaaggttgtgccggtaaagagcgatctgagcaatgctgcagagcagatgcaggtcacgctggctcctcgctccttcagctcgttcgatctcgccctggctcagtccaagcttgtagcggagatgtgagctaggctggtacactagtatacaatacaacgtgtgaagtgtggtacacaaataccagcaaccacaggggttgccaagctgttgttagcatcttgaacacatggctttgtattgtgtataatgacatgatgctgatactaatctctattatataaagcactagtttctatgttgtcgtgctcccac

SEQ ID NO: 13831 - DNA, 606 bp, Zea Mays
tcttgaacccacgatttacattcatgggttttgacagaagatgaaagtaatgtcaaagcgctgttcaggcgaggaaaagctaaatctgaacttggccagacagaatcagcgagggaagatttcctcaaagcgaagaagtactccccagaagacaaggagatcattcgggagctccgtttgctcgcggaacaagacaaggcactataccagaagcagaaggagctctacaaaggtctctttgggccaagtcctgaagcgaaaccgaagaaggcaaagtacctcgttgtgttttggcagtgcctggtgtcatttatcctttatctggctgggatgttcaaacggaagaacgagtaggataatttaccagaaaattgtgtagaactggtggcctaattgaccaaccttgtattataaggagtgttgaattttctgtagaactgtcggccggtccggatcaattagttgttatgaactctatacgatgttgttcactattatgccatagtttcatacagtctttcaactggagctcaaagggccttttatgccattgtatattgcagctttcatatttagattatgctagtaataatactgttgctacaa

SEQ ID NO: 13832 - DNA, 2974 bp, Zea Mays
cgggtaagagaaaacggccggacgttggaaaccaagatctacggaatcttcaggctttaacagactccgtgatgccggttcttggcccgggaaagcggcttcgtcggccacctaagtgcaggcaaccgtcggtcctgatgacttgaaatgcggcagcccttctacggcctcccacccagatgaagatgcagcttgtggaaccggaaggctcgaaggggatgggttctcctgggtgctcggagatagtcgaactggtggacgagccgaaagatgctcgttcgtgtgggcttacccacttgagggtgagggtcaagccagtggggcaggagcttggggcacggtcgtgctcggtggaggatgatcttgaccagctcatcagatcgatcaacgtgcgcacgtcggcgagggcttctgggcagacgagcacggataggcggcttattgcgcttgggaagtcgccagtgtcgagctcagagattgtggagtccgtgagcctgaagcaggccctgaggaagatgtgcatctcacaggcgtcggagatggcagccatgaagagactgtcaaaaccgacaggggtgtccaccccttctgattctggagcaatcaagaagctacatggctctgttgcagttcaaaccaatgaggagcaagatgacaagagtaaggcagggaaagtttctgtgaagcctgagaaatcggcaggaagttcagtgggtaagccaagtgaaatcagtaaggggcagagcaagagctcagccaagaagaatttgagatcagcatctcctaccacagggaatgttcataaaaccagaatccaagatgtgatcagtaacaagtcatcagagggagttgaaggtatttctgtagaagtaactctgccaaagcagagaaaaggtaaatcaatgaaaacatctagcccccgggctgttcctgtaggtggctcacggttggtgaggccaatgtttcggaataaaacctcgacgaaaaagaaggtgaaacctgaacctgctatagtgcccgcatcacacaagcattgtgagacgaaaggtcctaaatctcacactagtaaacatcaggagtcccttcaggatgaacccagaaccccagcgccaactgacaagaaggctgctgtcagctccaccactgttgatggagctgattttggcactaaaggatgtggtgtcggtgtgatccatggctcgaaggttggtgagttgttaagatcaaaggagaagggagaatgctcccaaagctctaagagtagcattggtgattatagcaccagcacaagcatcagtgaggacagttatggcagcttcagtgctaacagaagcaggcctcacatgtcaaaggatgtgagatggggagccatcaggcgcatggctatccaacaagggagcttgggattaaagaacttcaagcttctcaaacaacttggttgtggggatattggcactgtttatttggctgagttagtgggctcagactgcatgttcgcattgaaggttatggacatcgagtacctcataagcagaaagaaaatgctcagagcacaaactgagagggagatactgcaaatgctcgaccacccattccttccaaccctgtattctcatttcacgacggacaacctttcttgtctggtaatggagttttgccctggtggtgacctacatgttcttaggcagaagcaacctaccaaaaccttttcggaagcagctgcaagattttatgtcgctgaagtcctcttagccttggagtatctccatatgttgggggtcatataccgtgatctgaagccagagaacatccttgttcgtgaagatgggcacatcatgctctcagactttgatctgtcgctgaggtgctcagtgagcccaatgcttgtgagaacatcatcagtagacagagatgagccaagtaggccttctggtccctgtgcacaaagctgcattgatcccctgtgtatccagccatcgtggagcaattcgtcttgcttcacgcccagtctggtttcatctacaccgtcaaggacacggaggactagagctgaacccctgaagaaaccatcacttccacagctcgttgttgagcctacggaagcaaggtcaaattcgtttgttgggacccatgaatatcttgccccagagatcattcgaggagatggccatggcagctcggttgattggtggactcttggaatcttcctttacgaattactctatggcaagacaccattcaggggaccggacaatgacgaaacactctcaaatgtgatctcacagggcttgaagttccctgacagtccagcattaagcttccacgctcgagatctgatcagagggctgcttgtgaaagaaccggagtaccggcttggctcgtcgagaggagctgctgagattaagcggcatcccttcttcgaaggtctgaactgggccttgatccggtggacttcaccaccagagaccccgaaaaatattgatactgcagcaacactcgcgggaacacgcaagaaaaaggaaggcaaatgtctggaattccggctgaatggcgacgacatcgagttcgagctcttttagttgtagctgtagtggtagtcccaatgatatatcagtaccacgtaagcgcaagagtagtctttagtcccccttccttgcagatttctgttcatccttggtcatttcggacgttgggaagtaaggtaaggttggctgataagcatgtaactttatgcgttgttaatactatccaatattagaagacgctgttggaaaattcctgggcatgtgcgagatgcaactagtagaaacagcacctttgtgttgctggatgaaacagtctgtgcgtaccttgataacgctgggaaatagtgactcgaagtcgaagtgaggcctgtaactttatttcatgttaattggtgaaacaaatcttagatatacacaaatgtatctaaaacatatataaacaaaaaaca

SEQ ID NO: 13833 - DNA, 1144 bp, Zea Mays
ttgaaatatgtgtggcttgacgactgattagttattgagattgaggaagaggaaaagaaacttaaagctgctattgaagaagctgaaaaacaatattcagaagttagatctgagatggaaaatcttgaaataaagtctaaacaatttgaggaattggaagagcggtattggcatgaattcaacagttttcagtttcagttgacatctcaccaggaagaaagagatgcagtttttgccaagatagaagtttctcaggttcatttggaactgttgaagcgtactaatgttctcaatgatgcattctatatatcacatgatggagtaatcggaacaataaataactttcgcctaggacgtctttctaatgtagaggttgagtgggatgagataaatgctgcatggggtcaggctgcactgctgttgcataccatggctcagtatttcaccccaaaattccaataccggatcaagattcaccctatgggaagctatccaagagtcacagacatccagaataacacatatgaactgtttggtcccgtgaatttgttctggagcacccgatttgacaaagccatgacatggtttcttacttgcctgcaagagtttgctgagtttgccataagtttggataagcagaacaatgttccccctgaaaaatcactgaagcttccctacaagattgatggtgacaaagtagggagccacacgatcgtccttagtttcaataagaatgaaaactggaccaaggctctaaagtacatgctgtgcaatctgaagtgggttctctactggtttattggcaatacaagttttgcaccaccctctgtatcactgcacacacaatctctgaagaacaagagttgatgctgttctctctctgcaacaactgtacatagtttgtgtactcgaccctattcgttggatatagccgcagtgacaataatgacacgtttgatgtgcatttgtttattgcttgaaatctgccatgatgtgtttattgtacaatctaaatctcaggaactacattttcacccttaggtaacgcctccaacattacgttttgaaaaaacaatgcaaaaacagtgttttaggtgacatgagtgaaatgctggacacggttttgaaaaccctttttgcgctc

SEQ ID NO: 13834 - DNA, 76 bp, Zea Mays
cccaaacaggcctaaaatgatggcattcaggtttcggatttttccaacgcagtatacgagcgtacagtatggtccc

SEQ ID NO: 13835 - DNA, 2323 bp, Zea Mays
tcacggtctccattgcttcgtgctggacataagcgctctggactgctcggattctgtggttccttattttttttctttctgtctgcagtaagctttgtgaaaagtttggaaagcatggtctggtgaaaccgaaacaagctatgcgcagccttgtcacaccattacgaatgaatgcggggatggacgatgatgtcgctcccaaaaagccgcagcctgaagtattcgatggaccactgctgtcttcgcgcgataaagccaagattgaacggagaaaaagaaaagaggagaggcaaagagaggttcaatatcaaatgcatgttgcggagatggagacacttagggctggaatgcctcctgtttatgtaaaccacagtaatgatggtgggccagctgttagggatatacatatggagaacttcagtgtcactgttggtggtcgtgatctaattcaagaagccactataacacttgcttttgggaggcactatggacttgttggaagaaacgggactgggaagacatcttttctcagagcgatggcattgcatgcaattgatggtattcctaagaactgccagatattgcatgttgagcaagaggtcgtgggtgacgatacgacagctttgcagtgtgttctgaacgccgatgtcgaacgagttcaacttttgcaggaagaagctcgtcttgttcaacaacagaaagatttagagattgaggctgagtttgggcagagctctgacaagggcaaggatggttttgacaaagattctatcagcaagaggcttgaggagatatataaacggcttgagctcattgatgcggatgcagcagaggctcgcgcagcatcaattttggcgggtcttagttttactccagaaatgcaacgcaagcgtacaaaacaattttctggtggatggcgcatgagaatagctctagcacgtgctctgttcattgagcctgatttgctactacttgatgagccgacaaaccatcttgatcttcatgctgtgttatggctagaaacttatctcctgaagtggccaaagacattcattgttgtatcacacgcaagggagtttttgaatacggttgtcaccgatatccttcatctgcatggtagaaaactacatgcttacaaaggtgactatgacacatttgagaggacaagggaagagcaccttaagaatcagcagaaagcctttgaaacaaatgagaaggccagacagcacatgcagacattcattgacaagtttcggtacaatgcaaagagagcatcacttgttcaatcaagaatcaaggcattggagcgaatggaacatgttgatgcagttgtcagcgatccagactataaatttgaatttccaaccccagatgaccgccctgggccaccaatcatcagcttcagtgatgcctcatttggttaccctggagggcctaccttgtttaaaaatttgaattttggtatcgacctggacagccgcatagcaatggttggtcctaatggcattggcaagtccactatactgaaactaatttctggggatctgcagccaacttctggaacagtatttcgctctcccaaggttcgcatggctgtattcaatcagcatcatgttgatggccttgatttgacggtgaatccccttttgtacatgatgaagtgctatccgggtgtgccggagcagaagttgagggcacatctgggttcgtttggtgtttcgggaagccttgccctccaatctatgtacactttatcaggtggtcagaagagtagggttgcattcgcgaaaataaccttcaagaagccgcacatcattctccttgacgagccttctaaccatcttgatctggacgctgttgaggcgctcatccagggtttactcatttttcagggaggggtgctgatggtgagtcacgatgagcatcttatcactggaagcgtggacgagctttgggtggtgtcggaaggcagggtgaccccgttctcgggcactttcaaggactacaagaagatgctcaagtaacaaaaacatgtattatcgaccatagcctatatatctatatgcttgctattatgttgtattaccgtataaattttgggagtaaagcatcgaaattattataacacatacctaatgccgaaaggagaagatttctcacatttttagttcgacccatccgtccatcccataggatcctatttcgttcagcttttttctaattagattttatgagaatttgaatatcgcggagattacacgtggaggaaaataacgatgtccatagggtttaagatctagaaaatgatggatttctattcgac

SEQ ID NO: 13836 - DNA, 2180 bp, Zea Mays
gctttggcatgagacaaacgaggcatttgaagctttggtagcttcccttgatactcgtggcatccgcgagtcacatttgcactcaattttgcaaagtatcgagccaaccttcaaggaagctgttgagaggaaaaggtgtgctaatttagaacacccaactggacggacttcggaaaatggaagtaatgaaagtccaaattgcaacaatgaatttggaagtccatgcagtaccctttctggtgttgcttctgataatcttatggcacattcagatattttcaagatagaggttgggcgcaatgaagctgagaagaattctatctcgaaaagggcttccgtgtttctgaaatggatctggagagagtgctacagtcaccaatctacatacgccatgagatatggaaagaagcggtgtcctgagttgattcactcttgtgattattgctaccagatatacttagctgaagaaaggcactgttcttgccacaaaacattcaaacacattcacaatttcttggaacactcatcacaatgtgaagaaaaacaaagaacagatcccaattggaagatgcaaactgtggacctttctgtacccgtaggattgagattgctaaggctgctcttagctaccattgaggccttagtaccggcagaagctcttctacctttttggacggatgggtatcggaaatcttggggtgcgaagttgtattctgcatcatctgccgaagaagtcttgcagatgcttagtgtgctggaaagtgcaataaagcgagactacttatcatctaactttgaaacgacaactgagttgcttaattcaagcacacaagattttgctactcagaattcggctggaggttctggatctgccactgcacttccatgggttcctgacactactgctgctgtagccttgagattgttagacttggatgcttccatctcatacacccttcatccaaagttgggttcaaataaggagcaagaatctggagatttcatgaaacttccaccgagatatccttctatgaataagggcaaacaagaaatagaacagttcaggcctattggttttgatcaacaggatggaacgttgctacctaacagcaatggtcgtagatctcgtggtcatggtggtagggttcccagaggtattggcagctcttccaggattcagttcagggatgacaatagtatgctctatgggagagccccacgaaagaatgcacgtggtggccgcggccgtggacgtggacgtggacgtggacttcgaactgttagacctcggcaaccatccgagctcagtgccagatcaattccaaaggcaaacctattgggcagttttagcatgttaagtaagacaaatcacactggcactacgcattctcccgagagctcaggtgcagaagagtgggcctttgagaggagggaatatgtgaaggatgatgagaacaatttggtctctcaatccgatgagtctgaggaaaatgtcgaacctatgaatgaggaatatggtgagcatatttcaggctatccaagagacaattccgactccagacccgtacagatgatgggtgatgggagcgacgataatgatgaggatgctgaaggagatgagggtgaggaagatggagaggactatgaagctgaagatcctggtgatgaggatgatgacgttgagatggatggggatgatgatgtcgaggtggatgaggatgatgacattgagatggatggggatgatgacattgaagatgatgatgacgacgacggtggagatggagcagccaacggagatgaggatggaggtggtacatcatcatattcttcagagtatagtgaatgatgagtgattgaagttgtgcaggcttgtggtaaatgatgtaacagaggctttggtgggctcaccaacgctaatgctgacttgaaaaactatttaggaggttgccagttctaaactgtcttgtgtggcttgttattagatagaagccactcaacattagaagatcggccttgtgtgtatacatacataccaattatcaaaagttgaaaatgagggtcgatcagctgtctgttttatgttcagctacttttttcattgttatatattgggagcgttctctttaagacggttgacatatttctaaactcactctcaattttgattttgtagcaag

SEQ ID NO: 13837 - DNA, 2389 bp, Zea Mays
ccgatccggacccgcatataatcgaaccgtggcagactcggactggactcaaacagcgggcttcgtgccgagctcacaggccttgtacttattggccatctatacccggaactcaccgggccggccaccacatccaggagacacacaccaccttcccacaagttcctttggctttccatcctcgccgctgtgcttattattcgcgtccccgagctttcctcccttccacacgccgcggcgcccgatccggagggtctcgagtctcgagaccgctataaatgcgcgccacaccgcccgtcgcttcttcttccacatccgtacgtcttccgttgtaacctgcgcggcgaaacaaacatcagcaggagctgtccattgtcttcgccccggcggtcggtcgacatggagggcggcggcgttggggacgcgtacggcgaggaccgcgccacagaggagcagctcatcacgccatgggccttctccgtcgcaagcggctacaccctgctgcgcgacccccgccacaacaagggcctggccttctcggaggcggagcgcgacgcgcactacctgcggggcctgctgccgcccgcgctggcgtcgcaggagctgcaggagaagaagctcatgcacaacctgcggcagtacgagcggccgttgcaccgctacatcgccatgatggacctgcaggagcgcaacgagaggctcttctacaagctcctcatcgacaacgtcgaggagctgctccccgtcgtctacacgcccaccgtcggggaggcctgccagaagtacggcagcatctaccgccggccgcaggggctctacatcagcctcaaggacaagggcaagatcctcgaggtgctcaagaactggcccgagaggagcatccaggtcatcgtcgtcaccgacggcgagcgcatcctcggcctcggggatctcggctgccaggggatggggattcccgttggcaagctctccctctacaccgccctcggaggtgtccgcccgtcagcttgcctgcccatcacaatcgacgtcggcaccaacaacgaggccttgctcaacgacgatttctacatcggcctccgccagaggcgtgccaccggcgaggagtaccatgaacttgtcgaggagttcatggccgccgtcaagcaaaactacggcgagaaggtcctcacccagttcgaagactttgcgaaccacaacgcttttgacctgctcgagaagtacagggagagccatctcgtcttcaacgacgatatccagggaacggcctccgtggtcctcgcaggcctcttggcggcgctcaaggtggtcggcgggacacttgcagaccacacctacctgttcctcggtgccggcgaggccgggactggcattgccgagctcattgctcttgagatgtcaaaacatactgggtccccgatcgaagagtgccggcccaagatctggctgatggactcgaggggcctgatcgtggcgtcgcggaaagagtcgctgcaggcgttcaagaagccgtgggcgcacgagcacggggcggtggagaccctgctggaggcggtgcggtccctgaagccgacggtgctgatcggcacgtcgggcaagggcggcaccttcaccaaggacgtggtggaggccatggcgtcccagaacgagaggccggtggtcttcgcgctgtccaacccgacgtcgcactcggagtgcacggcggagcaggcgtacacgtggaccgagggccgcgcggtgttcgccagcggcagccctttccccgcggtggagctggacggcagggcgctggtgccgggccagtccaacaacgcctacatcttcccgggcttcggcctcggcgtcgtcatctcgggcgccatccgcgtccgcgacgacatgctgctggccgcctcggaggcgctggcggagcaggtcaccgaggcgcactacgccaagggcctcatcttcccgcccttcaccaacatccgcgccatctccgcccgcatcgccgccaaggtggccgccaaggcctacgagctcggcctcgccagccgcctgccccgacccgacgacctcgtcaagtacgcggagagctgcatgtacacccccacctaccgcagctaccggtaaggacgacccttgcatggaccatggccggcgcttagaggagtgagttttacacgtacgtacgttgatttttttatgtactgtatttctgtgtacgggtacggcaaactacaccacacccacatatatacggaggtgaagttgattcttctgacaaattttgtttggttgtaaacgagcttagtagtacttacacctcaatcagattaagctcctagagtacttgtgcatctgaaatattccgtcacttcctatatatgagaactgaacgtttacttct

SEQ ID NO: 13838 - DNA, 1004 bp, Zea Mays
atgcaacatatactttacaaaattcattcggaaggtgatggctcagactggtgagatccggtgcgccatggatcacatcctcgaggccgagaggaagggcgagatcaaccacgacaacgtcctctacatcgtcgagaacatcaacgtcgcagcgatcgagacgacgctgtggtcgatcgagtggggcatcgccgagctggtgaaccacccggccatccagcacaagctccgggaggagctcgcctcggtgctgggcgccggcgtgcctgtgacggagccggacctcgagcgcctcccctaccttcaggccatcgtcaaggagacgctccgcctgcgcatggccatcccgctgctggtcccccacatgaacctcaacgacggcaagctcgccggcttcgacatccccgccgagtccaagatcctcgtcaatgcctggttcctcgccaacgaccccaagaggtgggtgcgccccgacgagttccggcccgagcgcttcctggaggaggagaagtccgtggaggcccacggcaacgacttccgattcgtgccctttggggtcggccgccggagctgccctgggatcatcctcgcgctgcctatcatcggcatcaccctgggccggctggtgcagaacttccagctgctgccgccgccggggctggacaagatcgacaccacggagaagcccggccagttcagcaaccagatcgccaagcatgccaccatcgtctgcaagcccctcgaggcctagaaatcaatgcgtgtttcctgcacgcgcccccgcagatgaagcactatgtattttctcttttttttgtgtgttgtgttttttttactaagaggagatgtatttcttgttcgtaaaatgcacttagtcaaatggatcgagattatgttgatcattaaacaccaaaatcacttagtcaaacgggtcgggatccattttcctcacaatgtcaacctttgactgatgacaatataatcaaagcaagcaaatattaaat

SEQ ID NO: 13839 - DNA, 1383 bp, Zea Mays
atcttcacctgcgtccgcgtgtgctgtctccctctttctctctctgcgacgactgggtgggctaccgccgccgccgccctacgttagataccgaggccttcgccggcgacgaacacccgccagggatggcgaccacagcactgctccgggctctccggcggccctcatccgaagccgcgctgcgattggctacaaaggcaaatgtgcaaacaactaatggatatagacatctgaataacaggaacctaagcgttttcaatgagttttctaagcaactaaagggtgaggccaagagcaatcctgaattccagaaatccatgaaggagttcagcgagaaacttgatgtggtgaaggaagatctcaaagtaagaactaagaaaacgactgagacaatatacaagcgtgttgatgatgtttggagtgaagctgaggagacatctaaaaaggttactgcaaatatcaaagaaaaaatgtttgctgctaaagaagaggtaaaggaaagttttggagttggaaaagaagagagtacaagttgcagggatggtttgcctgaaggttcaaaacatgagaaaactgaggcatcctcacattcagatggcacgactgaagatgccacagacagccatacattgtttactaaattgaagtcaacaatctcatctgcttcaccagtagtatccggtgcgtttgcaaagttgaaggacacaaaagtctcaactttagctaagcagggatatgaaatcgtcaaggatgaattaagctctaactctagcagaaagaaaaaacaccaagctaggcatgcttctgctaaagtagaaaagagtacaagaaccgatttagttcttacgccaacaaaaaagacagtattgggtgaaaaatgggaagaatttaagaataagatccgaggtcacccggtctacagaagagtggatgaatacaccaagcctgttgtaaccaagggacaagaggtagctgaagatgtcagggaaagatgggagacaagtgacaatccagtggttcagaaaattcaagacttgaatgaatctttgcttgaagaaacctcagctgcggtgacattcagggaaattcggcaacgagacccgtccttttctctttctgattttgttgctgatgtccaagaaatgatcaagccagttttaactgcatattcaaagggtgatgcggagactctaaaaaactactgcaccaaggaagtgattgagcgctgcaaaggagagagagaagcttatgcatcacagggaatattttttgatcacaaaatcctgcacatttcagaagctgatgtattggaaacaaagatgtttggatcttcacccataattatcttacgccagatatactgtgttcgagatcgagaaggac

SEQ ID NO: 13840 - DNA, 877 bp, Zea Mays
tggaggtatcaatctatgggtttggaggttttgcaagtgcgagatgccatacaatccagatgaccttatgatccaatgcgaggaatgttctgactggtttcaccctgcttgcattgggatgacaatcaaagaagcaaagaaactcgagcattttttctgccagacctgtacagctgaaaatggtaagatggttgagaattcacatgaagctacagcgcaatcagaagaaaagccggtggagtcaaaaaggcggcgaaggtgatggccgtgctgattaaatttatgaaatctatgctcggttgtacaaagccttcccacgtttcacgtttgagaactgtaattttattgttcgtcgcagtttgtggtcctgggctggggtccctctaatgtcaggcacactgtatatagcttgtaacctggtcagattgttgtattagagcacactagggtttgtgtgatagcacggaagttcggactactgagtatgtgtagagtatggcattataatgccagcatcaggtgatcaggcttcttctgggcattaggactcctgcatgatccagcaataatacttccatgcagctggacctggttagtcactagtaagttgtcaggaaacttagtactgccatgtgaactttttttgaaaccctctatgtaatgtaagcatctgtgtcctacttgcaaactgttgcacgaaattgggcacccaccctggcccattggctgcggttgcataattgcggcaactaacttgtgttttaagtttggaggaacaataataaagtttaggctcattgaactggtctggttcaacgaaacaaaccctcactttttgcttgtattttgagttaatgtgatgtttattcaaattatg

SEQ ID NO: 13841 - DNA, 1218 bp, Zea Mays
accaagttaacattcaacaaaccaaacacgttaagctgtaagccatagtgggaaactgagcctgacagaatcaagttaacattcagcaagaaacggtagaaagcaagaacctggaggggtccaataaacaccagcgaatcaaatttgatcccaggcagttaattaggagatataaccagaaaaaaacataatgagcagacttttaagttcaaatatcaaacttcataaggattcaagccatactgctgcagaagagttttgggtacaacacagaggacacaacaggtccattaaaccaacgaagccacaaccacgattcatgacacacaaaccacagatgtttattagacgacgacatccatatagaggtacaccagagggcaccagacgacgcagatacccaggtacagcagcagcttaaatgaaccatggcttactgaccaccgcggaggcggagcaccaggtggagagtgctctccttctggatgttgtagtctgctagggtgcggccatcctccagctgcttgccggcgaagatcagacgctgctggtctggggggatgccctctttgtcctggatcttcgccttgacgttgtcgatggtgtcagaagactccacctcgagggtgatagtctttccagtgagggtcttgacgaagatctgcatgcctcccctgaggcggagaacaaggtggagggtgctctccttctggatgttgtagtcggcaagtgtgcgcccgtcctcgagctgcttgccagcgaagatgagccgctgctggtccgggggaatgccttccttgtcctggatcttggccttgacgttgtcaatggtgtcagaggactccacctcgagggtgatagtctttccagtgagagtcttgacgaagatctgcatctgcataagaatcaccaaacaacagggtgactatcaacaaaaaagaacagtctcaaaggaaataaacagcatatgaactatgaaggcgccatgcatgctcatcacactgggtattcaaaatctacacatagctgcagcatatgccaccatacaagtacatcaaaatcataataattagaagacatactgatatattagaatatataggtactcaagaacgattaaatcatagtagcatgttacttcatgtatctaagcatgtatatacatctatctaagtaccagtaaaatcaagataatttaagacatactgatttattaga

SEQ ID NO: 13842 - DNA, 1217 bp, Zea Mays
cgttgttcacagacgcatcagcatcagcagctccatcattcacctccaagtgagcctccactgcaggccccaattgttctggagaatttggaaacaaagaaaattgtccttgttcatggagaagggttcggtgcttggtgttggtacaagaccatctcacacttggaggaagctggtctagatcctgttgccttagatctcacaggctctggcatagaccatactgatacaaacagcatagctacgttagcagattactccaagccattgattgattacctcgacagacttcctgaagatgagaaggtcattttggtcggccatagttgcggaggtgcgagtgtctcgtatgcactggagcagtacccccgaaagatctcaaaggcggtgtttcttactgctacaatggtaaaggatggccagaggccctttgacgtgttctcggaggaactccggtcggcggatgttttcttgcaagagtcacagtttctagtctatggaaatgggaaggacaagcctcctactgggctgatgttcgataagcagcagatcaaggggctgtatttcaaccaaaccccttccaaggatatggcactagcagcggtgtccatgaggcctatccctctagccccaatcatggagaagctctccctcaccccggagaactacggctccgtccgtcgctacttcatccaggcactcgacgaccacatgctgtcgccggatgcccaggagaagctggtccgcgagaaccctcccgacggcatcttcaagatcaagggcggcgaccactgccccttcttctcaaagccgcagtccctcaacaagatcctgctggagatcgcgcagatccaagctcctgcggcgctgctcaaggcgagctcccccgaggagaccgccgccgccatggtgacagggccagccaagtcatgactgcatgtatgtagtgtacacgaaaagagaaatgagtaagcacataggttgcaaaagggagggggaggaggtctggggattaactgaagccaagctgtgtcggataataatgtagggaggtcaaagtgtttctttctttcttctgtgatcagatcagatcatatagagaatgagaggtggtcagcagataattgcatttcttttttcctttttaccttgtgaatgaatgagatattcagtgaccaatgtcaacgcggaaagcctttgtggtgatgcttactaat

SEQ ID NO: 13843 - DNA, 2262 bp, Zea Mays
tcctgtgattcttttttggacctccgcgagggttgctttcgttgggagttgctgtagctctgaaccccctccggtccggtgcgcggcagattagactccgatggggaagtctccggcgaagtggatcaagtccgtgctcttcgggaagaagtcgtcgtccaggtccggctccaccaaggccaaagatttatcgaaaggtgcgagtaacaaaggagctgctgctgcggggaaggagcccgtgttctctgagagctccccagtgatctcggagcctgtgcttgttagcgcccacaacaatgagaccgtgcgggaggtggcgaagggtgagaattccagcgtgcaagaagtgccagtgaccgatgtcagtcaagacttggagaagcagggcagtgtggggtctgatacgtccaatgatgctgagagggtgaaggaagagcgagcggccgtgaaggcacaagctgccttccgtggttatctggcacgccgagcattccgtgccctgaaagggatcataagactacaggcattgattcggggtcatcttgtaaggaggcaagctgtttcaactcttcgtgcaacatggttgattgtgaagtttcaagccctggtccgtgggaggaatcttagactttctgaagcttccattcaagcaaccatggaactttcccaacagaaccttgcgggtgctaaacctggttcctggaaggagaagttgtcgtcaaatgcatttgctcgcaagcttctatcttcatcaattgtggttgaggctcttcacttccagtatgatgagatggaccctaattcagccttcaattggttagagaggtggacgataagtcatgtctggaagcccgcttcccaaccaaggagagttagtgctgatgctaagccacatacaaggaaggccagctatgcaatggaaacagagtcagtgaaattaaagcgtaatgcacggaggagctctgcagggccatttgaaccttctcaaacaaacactgccattgaaattgagaagacaagacggaatccaaggaaattaagtagcactcctgctgagtcagttcctgatggccagttaacagaacttgagaaggttaaacgtagccttaggaaggttactaattccgtggctgaaacctcgaaggcatctagtccaaaaactgagattcctaaccatcaagaggtccaatgtgagagaccactaagaagagcaaaacaagttccaattcatcttgagaatcaagagcctgataatgttaatctgtcggacaatgcaaagatggatattctggtacctgatatccagcctgatgtggaagttgcttcagatccagtcaccatcactaatgaagaaaatgttgatgaaccaccatctgttgttgctccagtggccgaaattatgcctctgcaagacatcaacaacgatgaaaatgctttggtgaatgatgtggaagagagatccaaagaagaacatccttctactgagagcctgaaaggcagcaagaggaggtcttcattctcagctaagcctgaatatccagaaaatggctccaaaaattctccagctctgccaagctacatggctgctacacaatcagcaaaggcgaaactgcggggaaatagctcaccaaaacttagctctgattcagcagagaaaaacggcttcactcgtcgtcactcccttccatcctctaacaacggtaagatggtttcacattctccacgtacacaaaggccagctaatgctggtggcaaggatggagcgaaaggtgacaaggctatgctgtcatcaagagatgcaagcgagagaccactgaaagctgagtggagacgttgaggcggcgaatcaaatccaaatccttcatttgattagcgcgaccgtttgggtggatggatcgcccttgcagtttgctcggatttgttttgtttgtgatgtaaaaaaatgatgtccttatcgtcggcgagatgaatgaaccggctttgttgtgatgaatccgctgggagtcaacttatttattatagggttttccgtcatgccttttgtgatgtatagctgaagtattttcccggtttgttttggtttccagaccccccagacttcctcccttctccttgttgagagctgctgatgttagagagaatgagaacatgcatggattgaattgaacaatcttacccatttggtgaaatgtgggctgcgttttgactgatggttgtttgccattcatggttattgtccttgaagccgcagtatacttgtcc

SEQ ID NO: 13844 - DNA, 1196 bp, Zea Mays
ttcaaattctactctgcaaacgctttcgtcttcgcctcggtttgggagccacatggatcggggcacagagattccgtgtgatcggggcacagagattccgtcgtaaaaaaatcgtgtcctcgccgacagggaaagccgtgttgcaagaaggggaattccgctgcgagatccgtgaacggttcagagatggcacagacggtgttcaccccctctttggaagcgatgaagcatgtcaaggcagagaacggagtcattctcaccaagcccttccttgatgtctgcaagcaaatattgcctgtcctcgataaatttggaggtgctatggcaattgtaaagagtgatatcggcggcaatatcacaagactggaaaacaagtatacttcagaaccatcaaagtatgaacacttgtacagcatggttcaggaagaagttcaaaacaagaccgcaaaaggttcctcaagctgcacaaatgggcttctgtggctgacgagggccatggacttccttgttgagttgtttcgtaacctgcttgagcatccagactggaccatgggtcaatcttgcactgattcatacaccaagactttgaagaaatttcatggatggcttgccagttctagttttacggtggcaatgaagcttgctcctaatagagagaaatttatggaggtcattagtggaaccggtgacatcaatgcagatattgagaaattttgcacgaccttctctcctttcctcaaagaaaaccacaactttctggcgagcgtcggtcttgatgatctgaaggcttcatagatcaatctccatgctgattacaacaaaataagcatgtcttacgaaactcaaagtgttgccgagggtatacctgtttcccgtagccatctcccccttgaaaaactttaggagatggtaataatttgtcagcatgattgaccatggctacttacgcagagaattgacaccactcaacaaatttagttaccgaactctcgatcctgtgttacagcaaatcctatggttatgtggaactctggtgctgtaattctcttgtatgctacccagtatgccgcaggaaatcataattcggtgttccattgcagcaggaccatcgtgtcacttgtaggctacccatattgactttgtggctcagccagctgcccacttccaacacagttgagcgagaacatctagatgac

SEQ ID NO: 13845 - DNA, 874 bp, Zea Mays
tttgtgaggaacatgttgctcgctattgcgctctctgaagatcacaagccgaacagaagtgatgagaggaaacgaatcgagagtgctggtggaatagttatgtgggctggaacttggagggtaggtggtgtacttgcaatgtctcgggcatttggcaaccgtctcttaaaacaatttgttattgcagaccctgagattcaggaacaagaaataaatgatgagttggagtttctaattatagctagtgatgggctgtgggatgtggttccgaatgaggacgctgtttcacttgtgaagatggaggaggatcctgaggcagcagcccggaagctgacagagactgcgttctcccgtgggagcggcgataacatcacctgcatcgttgtgaagttcgagcatgacaagcctggtggcggcggctactcgcctccaggcgacaagagttgattccatttgctgttggttatacgctttgccggtgtcccttttaccctgggccggattttgctggccccatccatggtgccccccgcggctggtacttgaggaaggagctggttcatgttcgtcgcctgtcttgtctatatttatgccactaattttggtctccggtcagtggggttaccggcgggcagtgcttgcccatttgcatgtttatcgtgggttcatcgtcctatacggcattgttgtagacttgtagttgctgttgcctgttgtatcaatgagagctaattctgtgaggcgcagggggatgggtgcactttgagatgttcccggaccgatctccttgcaaacacctccgctgcactgtatgtttctgttatatacagatcattgtccttgcacggccgtcagccaaggacgaatggccagt

SEQ ID NO: 13846 - DNA, 843 bp, Zea Mays
tcaattatatccaaataggctgcagtaacccagcacaaggaagctatgtttcacagtcccattgaatgcgtgttgtggaagtgatgccccatacaactgttccccttcaatattgtgcgggcgtcctggatctacagtgtgtcctgacccatcaaaatacatctcatgggacggcttacacttcactgaggcgagttacaaagttgtcattcaaggagtacttggggggtatgccaagcctcccctttcagaaacctgcaagggtgcggaattcaaagtttctcagcttcaccaatgtacagataatccaacaaacactgtgtcatacgatgctttgagctcttttatttgatctgctcgtaaaagaagtgcatttagagttacagtgggcagcatagatgatgttgcaggaccgaacatcttggacactttctcaaagccgagaagagatccatcgatgtagggtcattcagttctacaatctacaatccacttggctgctgggaggaggagaaaaaatgggaggggagtttgtagtgcagaaatttgcgattgcttagtgcactactttgctctgctatgtttttcttagcagcttactgctgcaggctgtagaagggacaacgaaagttgacagtctctgcaggtggtcatactactatataggaacctagatcttttaaatcagctcctgagggaaatgtatgcagtacttgatatggtctcaattgccttttaacggatacaagcatatatacattgtagcttcattgattcaaattgtctcgcttgatttataatgtaaaagtattgttcgaaataaaaaaaaatctaggatgtccg

SEQ ID NO: 13847 - DNA, 1327 bp, Zea Mays
cggcaccagaccctagccacgactttccccaagcctcagcccctctccccgctcgtgtctccaagccgcaacggcgcagctcctcttcttggacgccgaaaccgggcaccgtcgtagcccctgtctccgctcgtctccgggaccctgcttggccctctccggcgaacctctgtgcccctgctccgccgccagttcgacgccgcctgctccagatcgacgttgtcgtcctccgtcctttgtccgcctgctccagatcgacgacgcctgctccagatcaaatccggcctccgtcctctgtgcccctgccctgccgctcccagatcgacgccctaccgctccaggtcgagctgctgctccagatcgacgcccaactgctccagatcgagctgcttgtcccagatcgacgctaagatggataacatgccaaagaacaggaaaccaaatgctcaatgggatctcagtgctgctagaatttttaatgagatatgtgtggaataagtattgacaaataatagaccacaaggttgtttgaacaacaaagggtacgccaatcttgtagccaagtttaatgaatggtcaggcagaaattacacccgtgttcaaatgaaaacccgttgggatgcactgaaatctgactttacaacatggaaaacactactccttagtgtgtctgggttaggaagagatccaaggattggttctattacagctagtgacgaatggtgggaagaaaagatagaggccatgccagcatgcaaaaagtttaggcttgcagcattggagaatgaagatcttgaaataatgtttaatggggtgtcctgcactaatgcatatgctatggctccaggggcaaaagaaggattgcctgccaatgatagtgatgatgtggaggaggtgtctccaagtgttgaggacaagcaagctagaaaaagaggtgttgatcacaaatccccaattaaaaaatcaaagaagaattttagagatatgcagttcaagcgttttgtggattcatttgtggaaaaagctagttcaagcaagtcttccgcaacatcttcgcctaatgatcatgttaggcaagagataacagaaatgatggaatcagttatctcagctgggatagttgaaggaagtgatgacatttctatgccactcaacttctcatcaagaaggagtatcgagatgtgtttctcacactaaagattccagaagggaagcttgcatggctcaagagaacttgggaggagaggaaaaaacataagctagttatatgtattcatgctgtatcttgaacttgattagtaatgctatttgttcatgttgaaaaaca

SEQ ID NO: 13848 - DNA, 2139 bp, Zea Mays
gcctaagcgtccgctcattttggtgtccaacacctcctctctttctcctccgtcgtaatcgcaatgtctgctcaatcgaacaactgacccagccgaattacaagccgctcaccccccaaaaaacccgaaaaaagaaaactctgttcaaccacccgccgagttcagcagcactctcctccgccctcttccaggtccagcaaagattggggacgcgtaggcatcggagattgcctcgggagcgcgtttcctggtcaactaaggccggcatgaagggctgctcagagcgcttgctgtttctgctgctgctgctggcatcgtcgtcgttactgtccgctgtgattgccgcgcagcagacttgccccgccgacctcgacagcaaatgcgatggtggcgcgtctgatgatgattgggagggggagttcttccccggcgtcccgaaaatcaagtatgagggtccaacaagcaagaaccctcttgcttataagtggtataacaaggaggaagtgattctcggtaagaagatgaaggattggatgcgcttcagtgttgcattctggcacacgttccgtggtactggcgctgatcctttcggtgctcctacaaagacttggccttgggaggacggcacaaattctttggccatggctaagagaagaatgagagctcactttgagttcatggagaagttgggagttgacaaatggtgcttccatgacagggatattgccccggatgggaagactcttgaagaaacaaattctaacttggatgagatagtccagctggcaaagcagctgcagggtgagaccaatataaagccattgtggggtaccgcacagctctttatgcatccacgttacatgcatggcgctgctacgagcccagaggttaaagtatatgcttatgcggctgcacaagttaagaaagctttggaggtcactcactacctaggtggtgaaaactatgtgttctggggtggaagagagggttaccaaactcttctgaatactgatatgaagagagaacttgaccatctggctaactttcttcaagctgctgttgactacaagaagaagattggattcaacggaacactattgatagagcctaaaccacaggaaccaacaaaacaccagtatgactgggatgttgcgactacgtttgcttttctacagaagtacggtcttacaggagagttcaagattaatgttgagtgcaaccatgctactctatctggacacagctgccatcatgaattggagactgcacggattaatgggctgcttggaaatatcgatgcaaacactggtgatcctcaagttggttgggacacagatcagttcatgacagacattgcagaggctactttggttatgtcaagtgtagttaagaatggtggacttgcacctggtggtttcaactttgatgccaaattgcggagggaaagtactgatgttgaggacatgtttcttgcccatatctccggaatggacaccctggcacgtggcctccgtaacgttgccaagctgattggggatggttccctagatgatcttgtccgcaagcggtaccagagctttgatagtgagattggtgccttgatcgaggctgggaaaggagactttgagacgctagaaaagaaggttctagagtggggtgagcccactgttgcatccggcaaacaggaactggcggagattctgttccagtctgccctatagatgatggtgccatgtccataggtccaggaataagcaagggtgcgccctcctccgaacacgcactcgtcctcctcaccacggggatgttatggttccgtgcgatggactacctacaatacagcatggaactgagataattaggatgtaatctgtcagaaaatttccagaattgttacctccttttgtttagagtggattagtggaatcaaactggagttagttaaagcttatcctacattttggtgtggcgatcgtgtttggtacttccttgaatgctgtttcatagtgtggcaacgatgttgctgcttagtcctacaactggtggtagtaatgtatcatagttcgaacgtttcttcacaataaattatgatctttaataaattttattagttcaaaaataaataaaaatagagttcga

SEQ ID NO: 13849 - DNA, 390 bp, Zea Mays
agaacacaaccaaagcatctagtttcgtccctgcttcctgcctacagcgtcgtgcgtatgatacttcttcctaatcattcgcgtgcaccgacaaacaagagagcaggtctccaaaactattgcccccagagatcttgtatcaggagagggtaaataaagtttttgggaagcactctacatggatgctcgatcacttcattgccgtcttcaatctcattgccatggctcatctgtcgccttgtcacgtggacgtttcatgtcgtcggtaacaatgagatggtgttaggcgtcaagttgtcttctctacccgatcgtcggcaaggaacaaactgaggagaagccttcaccaagggcctcagcactggttgatttgctttcgatatgatgcga

SEQ ID NO: 13850 - DNA, 981 bp, Zea Mays
aaatgaggtgtgaggaaaaggagggaaagcattggcgggcgggcgggcgggcgcctgtctcttgcggctgtggtgccgcccgagagcgcgacccattcgttcgcgagcctcacttccagttccagcacgaatcctcgtccaatccacgcctgctgctcgcgagccatcgccacagtgctggcctggccatgcctggagccgttgcgcttgcgcccacgttcgcggcagcgagcagctccgccgccgcggcctccacgctggctccgaacccgacaagccgaggcgacccgctaattattaggttgtgccgcaatgctcctgctagcgcaactccacttgttccacttgtagccacccgtcgctacgtgcgtggctgccgcggcgcggctctagtggccagtccccaccacgctccaaaccctcgcctccgattcgcgtctgcggcagaggggatggctgcggaagcgagcacggcgggtgcggcgtcggcagccgaggcgaagcccttcgccgtcctcttcgtgtgcctcgggaatatttgccggagtcctgcggctgaagctgtgtttcggaccctcgtaagcaagcgtgggcttgactccaagtttctcatagactctgctggtaccatcgggtatcatgagggtaataaggcagactcaaggatgagagcagcttcaaaaaagcgggggattgaggtcacatcaatatccaggcctatcaaaccctcggattttcgtgattttgatcttatccttgcaatggacaggcagaactatgaagatatattgaactcgtttgagagatggagacgcaaagagcccctccctgatagtgcacccaataaggttaagctgatgtgctcctactgcaaacaacatactgagtctgaagttccagatccttattatggaggtcctcagggatttgaaaagtgaccagtgagtatgaatgtcatggcctatctacgctaatcactcg

SEQ ID NO: 13851 - DNA, 1234 bp, Zea Mays
gggtgatcaagggtggcacacagaaaaaactagactttgatcctttctcactaacctttgatagcgaggataaggacaaacttcggggacgtgggacaaccgactgtcttggacatgtcgcactggtggctcagctaatgcggcggcttggtgaggtcaagccacccctgaaacattctgtcattgctgtgttcattgccaatgaggagaactcatctgtcactggcattggtgttgatggcctcgtgaaggatggattacttgacaagctcaaaacaggacccttgttttggatagatacagctgataagcagccatgcattggcactggtggaatgattccatggcatctcaaggcaacagggaagctgttccacagtggccttgcacataaggccataaatgcaatggagatgaacatggaagcactaaaggtaatccaaaaacggttttacactgacttccctccacatgagaaagagaaggtctataaatttgctactccatctacaatgaagccaactaaatggagctatcctggcggggggcttaatcaaattccgggagaatgcacaatttcaggggatgtaaggttgactcctttctatagcacttcgcatgtcatggagaagttgaaggaatatgtagaggacatcaatgagagatttgaaacagtacttgatactcgtggtcctgtgtccaaatatattcttcctgatgaaaatctacaaggaaggcttgaaatcacttttgatggagatgtgatgaatggggtggcttgcaatctggagtctcgaggctatcatgcattatgcaaagcaaccaaggaaatagttggccacgtggagccatattccatcaccgggagtctacctctaatccgggaattacaggacgagggatttgatgttcaaacagctggatatggcttactgaagacgtaccatgcgaagaacgagtactgtctgttttcagacatggcccagggctttcaggtgtttctgagcatcatttcacagctggaagaagagattccgggacacggacatctaacaagccttcgaggttgtctgtcacccgttgaaaacggagccatttcaccgcagtgttctcgtgggcataaaacctttgtgctacaacttggcataaaatctttgtgctacaactctacgtaggcattacaactcgttgtatgaacttgaaattaatatatctcccatttccaaaaaaaaaa

SEQ ID NO: 13852 - DNA, 3199 bp, Zea Mays
cctgatctccaactctgttaacctatgcgacaccgcgacttggagaattgagaggatttgtaccatggaccttggcagtgtgttggttagcatttagagcggtggtcgtgccagccattactccccacaacaagaggtgccggctcatgtttgattctgcagctctagatcgtttgctccctcactgagtgtgatgcttcagctctgggttgttccaaaaacttgctaagtgtagagtagtgacatatttgcctgagctcttattacctgagtagtgcattgcaatggtgtgagctataccaagtttctcaaataaccaatgcaagtgtgttatcctgtccatgaggttgagaggtaaggccagctttgcttagctcccttttcatttgagcaagatattgcttctgtcaatgttcactctggtatttgtttatggcttttggtatcttctgcttacacatggccacattctctgattctatatgtgttatgaggtttcatttgttcactatatgatttacttgtaggtatacttactgatgtggttgcataggtgtcatttgtctctctctgcaggaatgtctcgttatcctgcaccgtatcctatgattcgtcctggttttgttccacgtccaatgccgccgcctggtgttgtgccaattcaacgaccaacaataatttctgggatccgggctattcctcctttggtagccccaactgcccggccacctgctccagctgttaagctggcagataaaccgccaaccgcagtttatgttgggaagatcgccccaacagtggacagtgatttccttctttcacttcttcggctttgtggatctgtcaagagttggaagcgtgcccaagatcctagtaatggaaaacctaaaggttttgggttttgtgaatttgaatctgctgaaggcatccttcgtgcgacacggcttctcaacaaattgagcattgatggtcaggaactggtgattaatataaatgatgccaccaaggaatacctgaagaaacatgttgagggaaagaagagagcacaagagaaggaaaaagaaacagaagatgcaagcggggatggaactacagctgttgctgaaaatgaatcatcaaaacctgtccctgatgaattggatgagacaggagatgctggagataagtacagggaagacaacactgataaatttgggattgttactgacgaagactctcaaactgacaaagatgtcgcagaaaaaataagcaatatgattgaggagtggttaaagactagaccgccacccccaccttcaccagttcaaccatctgctgatagctctggcgtagataaggcaaaaaatgattctgatgataagaatgctgctgatgctgataaaagggcagctaatgaaactgagagatctgaaactgcctctcctgataagaggaaggatagagagcatgataaggacaaacgggacaaagatcttgaaaggcatgaccgtgaacgtgaaagagtacggagggatagagagaaggatcataagcatagagaagctgataggctctacagggatcgccttaaggagtgggaatctagggaaagagagagagaatatcagaggtatagtgaaaaggagaaagaaagagatagagatcataaccgcagaagggagatcctgaagcaggaagatgagagcgatgacgaggataataggaaaaggaaacgaaggagtattagctcacttgaagataggaagaggaggaggcaacgtgaaaaggaggaagatttggcagataaaataagggaggaggaggaaattgcagaagcaaggaggctggctgtagagttgcaacggcaagcagatgaagcagctgcggcggcggctgcagccgccgaagagtctgcatcacttatggagattgatggtgatgacgaaaaggaaacagatgcacaaaacaagtcggctgttgtggaagctgataacatctcgagctttgctaatggtgttggtgctggtcgacttagtaagggaaataatggtgaggaaacatgtatgacacctggtcaaaccgcagatactaagcaaaacaacaatgttccagcaaagaaactgggttttggtttgattggcttgggcaaaaggacatctgttccatcagtttttgctgtagaggatgacgaaaataatgttgataaaagcataagacctctagtacctatcgattactccactgaagaattacaagctgtacatgctaattcttctactggggcaaatgtcacagcagctgccgagtttgccaagcgcatctcagtttctaattcaaaggaagagaaggctgaagctgagaaggataggaataggagatccagtgaagctcgtcctaatgatgagcgaagagagaagctacatgatcgcgagaaggataagcccaagtcagagaacaagaagattctggatgcaaagcaactaattgatatgatcccaaggacaaaggaagagctttttgcctatgatataaactgggcgatatatgacaagcatgagttgcaagagagaatgaggccttggatttcaaaaaagataattgaatttcttggcgaggaggaatcaactttggtggactatattgtttcctgcaccaaagaccatgttcaggctgaaaagatgctagatcttctacagtcgattttcgatgttgaggccgagatgtttgtcctcaagatgtggaggatgcttatatttgagatcaagaaagtcgaatctggactatcaggaagagcaaagtcatgaagcgaagcctgttaccctgtatgacctctgatctgcattactcatcaactgtgaccacacttgtaaggtcatactgcactacaagtatcaaaaaccatttttagtgacagagttgatggatctttttacttgtttcttgtacaaatgcatacgagagttaatgagatactgtgcgtaatatttttattttgatagattgcataactgtgtttggcacagttcacacgagtcaactgcctacttttgcttaacttgttctctggtgaacgaagaatgtcaatgctggcagtagccacaagtgatccctaatcatacatggtgtgtgtgcaaagatgttcgtataatcgtatttcacttttgcttctgtactgtagcagtaccgttgagcttttcgtggttgctgctgtgcgataaat

SEQ ID NO: 13853 - DNA, 2494 bp, Zea Mays
tgcaggaattattatcccctggcgctcagatcgcaagggtaagaatggcaatcaggaagcagcagcaatgaagaacctcaaatctattttgcctaaggaggtgtttgatgctataactgctagtcaacaagaatcaggcacattgagtgttgatttttttaggaatcatgcatctccctcttggaaaactgatgatctagtcaccgagaagagcatggatgtcaatgacaatgctaaagctgaaaatagtttgctagaacattctgtgccaacaaatagatcacccaaagatccagatgaacatcaagttgacaaagcagcaaaagtagctcgaaggaaacttagggagaaaaggcgtgagaagagagcaatggatttggttcataaagatgatgaagcacgtattaagctggaaaatgctgccattgagcgatcaaaagctgtcgattctgctgtgcttggaaaatacagcatatggcgaaaagagaatgagaatgagaattcagactctacagttaggctgatgagggaccaaattattatggctcgtgtctattctacgcttgctaaatcaaagaacaagaacgatctatatcaaaaactgcagactcgaatcagagaaagccagcgggctgttggagaggctaatgctgatgctgacctgcatcacagcgcaccagaaaaaatcagagcaatgggtcaagttttatcaaaggctagagaagaactttatgattgtacggcaatcactcagagaataagggctatgcttcagtcagctgatgaacaggtcaggagcttgaagaagcagagtacatttcttagccagttggctgcaaagacaattccaaacagcattcactgcttgtctatgcgtttaacaattgattactatatcctgccccttgaggaacggaaattcccaaggagtgaaaatttagaaaacccaaatctctatcactatgcacttttctctgataatgttttggcagcctctgttgttgtgaactcaaccataatgaatgctaaggaaccagagaaacatgttttccatcttgtgactgacaagttaaactttggagccatgaacatgtggtttctgctgaacccacctggcaaggccaccatccatgttgagaatgtggacgaatttaagtggttgaactcatcatactgtcctgtgttgcggcaacttgagtctgctgccatgaaagagtactatttcaaagctgatcgtcccaccactctctcagcaggttcttcgaacctaaagtatcggaaccccaagtacctctctatgctgaaccacttgaggttctatctcccagaggtctatccaaagttggataagatactcttcctcgacgatgacatagttgtgcagaaagatttaacagggctgtgggatgttgatcttaatggaaaggtcaatggtgctgtggaaacctgtggggagagttttcaccgttttgacaaatatcttaatttttcaaatccacacattgctcggaactttgatccaaatgcatgtggctgggcttatgggatgaacatctttgatctgagggagtggaagaagaaagatattactgggatctaccacaaatggcaaaatatgaatgaagacagggtcctttggaagcttgggacacttccgcctggcctcttgaccttctataagttgacgcacccactggacaagtcatggcatgttcttggattaggatacaacccaagcattgaccgttcagagatagacaatgctgctgtggttcattacaatgggaacatgaagccatggctggagctagcaatgaccaagtaccgaccatattggaccaagtatatcaagtatgatcacccttacatccgtggatgcaacttgagtgagtagatagtcgtgctgaaaaactgacagatgaggaagagcttattggacagaagtgttccactaccatgtccttgcggtgcgttattcgactcagcaaagtggtactacctcaagctcttgattgctttcctcccctcctctcccaagaaaaattcaccggtggctgttctgacgagtgatgtattattatagcgatgcgttttttaattcaattattagtaatatgcatttatattttccgtcaaaattagcaggagaaaaacttataaaatggatttgtggggctggtgtcgcgtgctgcttagaggtatgcctagagaatcgagtgttgccggaattggatcctttttttgtatcagacgataaagtgggagtacaagccaaagcggaaggcatgaatcgaatggattacaggtttaaccctgagtcctgaccaatgtgaaactattttacctacagtatcaagaaatgctggtgtccgttttatgataactgatctcgtagctaatcttgtgtttctcggtcacgtgttacatggtgctagcgcctgagagattggattagtcaatttatttcacaaactatgacattttcttctagcaa

SEQ ID NO: 13854 - DNA, 2298 bp, Zea Mays
gggacacgagaatagctcgtcaattcgtcatcgctcgatgctcgatgcctcgatctcggccactcggctgctctccacacacggccgggtgacaagtgacgctcccctccatcgcttccacttcgaaacatttcgaattcctcaacccccgaaagggcgaaaaccccaacgcctccaaaagtttcccgcccgagcccctcgaaccctagtaccatcaccgactggcgacgcctcgccggcggccggcgagatgcacatcaaggaggtaactctcgaggggttcaagtcgtacgcgggacggactgtggtgccggggttcgacccgctgttcaacgccatcaccgggctcaacggttccggcaagtccaacatcctcgactccatctgcttcgtgctcggcatcacagatctccgtcaggtacgcgctgcctcgctccaggagctcgtctacaagcaaggccaggccggggtcaccaaggctaccgtgtccatcgtcttcgacaattccgaccgctcccgctccccgctcggctacgaggactccccggagatcactgtcacgcgccagattgttgttggtggaaggaacaaataccttatcaatggccatcttgcacaaccttcccgggtgcagacccttttccactcagtgcagcttaatgtaaacaatcctcattttctaattatgcaagggcgcataacaaaagtgctgaacatgaagcctccagaaattttgtcaatgttagaagaggcagcaggtacaagaatgtacgaaatgaagaaagaatctgctcttaagacacttgaaaagaagcagaataaagttgatgagattaataaactccttgatgttgaaatcctccctgcactagagaaacttagaaaagagcggtgtcaatacatgaaatgggccaatggcaatgctgaactggataggctcaaaagattttgtattgcctatgactttgttcaggctgagagagtgcgagatggcgcactgaatgatgtcaaacaaattaaaacaaagattgttgagctggatgaaactacagaaaacataaaagcagctatacaagaaatggacaataacatttctaccttggctgctgaaaaagaagctaaagtaggtggtgaaatgaaggttctgtcagacaaagtggataaactatcacatgtacttatcaaggaaacttctgtgatgaataatcaagaggaaaccctgaagtctgaggaaaagggtgctgagaagattctcacaaacattgaggacataaaaaggtctatactcgagagagatgctgctgtaaaaaatgtagagaatgaggcttctgacatgaaaagaagagcagaggatctcacaaaggagttggacgagaaggagaaagaataccagggtgtgctagcaggaaaaagcagtgcaaatgagaagaaatgccttgaagatcaactgagagatgcaaaagctgcagttggagatgcagaatctggactaaagcagctagctacaaaaataaagcattctgaaaaggagttgaaggagaagaaaactctattagtatccaagcgtgatgaggctattgctgctgagaatgagctgaaaacaaggacaaaagacttagaaggtatcaaggcatccatgggatctattaattatgacgagggtcagatggaagctttgcaaaaggaccgttctgcagagttagaaattattcaaaaattaaaggatcgtgttcgtaacctttctggtgagcttgctaatgttcacttcagttatcgagaccctgaaagaaattttgacagatcaaaagtcaaaggggttgttgcacgtcttattaggattaaggacagctcaacagcaacagcactggaggttgctgcaggtgggaggttattcaatgtggttgttgacactgaagaaactggaaagcaacttttaaaaaatggggatctacgaagtagagtaaccatcatacctttgaacaaaatccaaacttacatgatacctgacagagttcagcagacagctcgtagactggttggtcctgacaatgtaacattagctctagaattggttggatatggtgaggaagtaaagaatgccgtggcttttgtctttggctcaacatttgtgtgtcgtaatatggatgcggcaaaagaggttgcgtttaataggcaaattagcagtactagtgtgactcttgagggtgacacttatcagccaagtggtcttttgactggaggtagtaaaggcacaaatgcttttccatgatggacagtgtttttcaggcttcttctaag

SEQ ID NO: 13855 - DNA, 1485 bp, Zea Mays
aaatgaaggggcactttctgtattgtcttgtgctccatagtcctaacattgtctgactcaggaaccaggggaatcaaatcgttctaatatttctctcttcaaaatttgttggagccagtcttgacattatttttatctttttttcaggaagaacaggcttctgtgagggagataaagtgggacgcttttaggaagtactcggaggatcgtctggaagctgagcagcagcgtgctgaggagctggaactacaagtagcagctcttaaacaacagctccaagaagctgagatccattataagcaaaaggaagaacaagtttctctaagggaggttcaatgggaagcggatcaaaatcattccctggatgagcttaacgctcagcgtcagtatgccacggacttggagaaacaaatcgaagatctgacacagaagttaacatcagctgatgcacactacaagcagaaggtgacagaagagagggacaaacttgccgaggtcaccaaagagttgagcgagttgaaacaaaaagtaagcgagagtgttgaattggagaggaaggtgcaggaccttgagcagaagctgcagctagcttattccaagtctgacgaacaggcagtggatactgtggagtcgagatcccgtgaattcagcctggattcatcaacgagttcaggcaagcagcaagacaaaactcaggctgtctcaccaaacccaaccctgcaaggagtgcaagaaccttccggcatcatggccttcaagttcatcctgggagttgccctgctgtctgtcctaatcggcgtgtttcttgggaagcggtactagcgctcaggtcgtgctgaaagggctcagccagcggcaagtttgaaaggattggtggccttgatgcaggcatttgttgtttgcaaactgcaacgcctacccagactcccagaggtcggtgctgcactgtatgcataggcagttgaccccatcatcaacctacaaagacgagctagtttcagaagtaacctaaacatcaatctaaccatagcaacatatttagtgtaaaaataattaggacgctaacatgctaataggacgccgtccttagataagatctgatggagatgttagcatgatagaggacaattaatctacaggcaggcctgaaattaaacgagattcttggtggattcgctacagcgtccatctaaagaagtggtagtacttgcaatttccataatggcattcgaatgaaatctactatgcgcataaaaaaaacagggtctaattgatttctcccagattggtgctgcatcccctgccctgcttctgtgcgcgatgcgctcgccgtgtcgcgacactgcagtgccgatggaacgcctcgatcgggctggccgccggtcaggtcaagtccgtgaaccagcagcagaacgccacagagcctgctgcaaccgcgtggaagaaggccagccgctagcgcctctacctcacacgccgccgtgg

SEQ ID NO: 13856 - DNA, 679 bp, Zea Mays
actccggccctgttctttatctcatcaggtcatcattgactcgcagccattgacggttgctatccttgcatcactgctctttggagagtcgattggcgcgataggagttggaggactcgtgttgggcgtcgtggggctcttgcttctggaggttccagcactgtcagttgaaggaaatgacacaacaatctggggaagcggggaatcgttgatgttcctctcagctcaaagcatggcagtcggaactatcatgcacatgattattggtgggcttcctttgctagtgatatctgttcttaatcatgatcctgctctgagtggccatattcaagatcttacatggagcgacatattagcacttggttatacatctatatttggcagtgctgtcagctacggtgtatacttttacaatgctactaggggtagcttaaccacacttagttctctcactttcttgacccccatgtttgcatccgttttcgggtacctgtacctgggtgagaccttctcaacagtacagattggtggtgcgcttctcacactggttgccatctacatggttaactacaaaagcattataggtatccaccattactagcagtgtttcaaaggcatcacctagtcgtccatgcgtgcccagcactatgcctagtcaccttttaaacacaggttacta

SEQ ID NO: 13857 - DNA, 1040 bp, Zea Mays
atttttttggcacctgttccagctagttgaagtgaccctcattgctacagtaattaattctgaagatttccagcccgttgctcctgttgtgaaagtcgagccacttaaaaatcagtgggctgatgaagatgtcgatgccgacgacgtaaaagattcatgggaggaagaagaggaagaggagaaacctaagccagcggctgtgcaaaagaacgcgacgaaacctagcgctaaggctcctgctaaaaagggaaaacagcaagcatcaacaagtgccgaggaaccagacgagcctttgagtcccacttcagagaaaattcgccaacagaggcttgtggaagaagctgacttcaagtcaactacagacctttttgcaaagaagagcggtgaacaaaagtcactagatacttttatcccaaagtccgagagcgactttgcggaatacgcggagcttattgcaaataaactgctcccctacgataaaagttttcactacatggctctcctcaagaatgtcatgagactttccatgacaccgttgaaaggctcggacgcgaaagacatatcttcctccgtgacggcgattgctaacgagaagatcaaggctgagaaagaggccgcagcaggcaaaaagaaacaaggagcgagaaagaagcagctccacatcgagaaaggagacgacgacttcatccccggacggggtggtggctacgatgacccggacgagtacgacttcatgtgatttggctggaaggaagagtaagtagggttaataggtttccgtcttgtatacatttggcaagcagagaacatatcacgagagtttgcggcatactatactatggcatggaacatgcgttatctgtttgaggatgaattttgactctgcaggacaagaagatcacaagtgcttacttaattgttattgaatctctgtggtatttttttagcatacattgcattttcatttattttttgtcaactgtactgtaatactgtcgtcggtatgtactgtaatattgtcgctggtacggggcgtgaag

SEQ ID NO: 13858 - DNA, 1217 bp, Zea Mays
taagctccctgtgaacactaaccgccgagcaggggctttccggccgccgaccaccatgaacttgctgtccgcgctcgacgcggccaaggccaccgtcggggagccagaaggccatggccaacgcaccggcgggaatccaagggaggcagctggggaggaggcgcagcagctgaccatcttctacggcgggaaagtggtcgtcttcgacaggttcccctccgccaaggtcaaggacctgctgcagatcgtgagcccgccgggggccgacgccgtggtggacggtgccggtgccggtgccgctgtccctacgcagaacctgcctaggccttcacacgacagtctctctgccgatctgccgatcgcgaggcggaactcgctgcacaggttcctcgagaagagaaaggacaggataaccgcaaaggcgccgtaccaagtcaacagttccgtcggcgctgaggcgtccaaggcggagaaaccctggctgggtctgggccaggaacaggaaggaagcgacggtcgtcaagcaggagaggagatgtgatcgatcagtagagactagattcgttcgtgcgcgcgtcgtcgtagcttcaggttaagggaaagaataatccaaccgtcggttaattgctcggcttaattacactgctctactacgtagtactggcactgctaccaccaccaccaccaccagagtgaccaagttaagctagggattgttacataggccggccggtcggccgttcgttcgcgagattgtttcgctgctggagatgcgcatgcacgctcgcagcagcttcgctggtccgcgtggccgcgtcttgtgttcgcgcaacgaacggtgcacgttccggtacgttttcatttgtctccgacctgtcctgtgtgtgtgcgtgtgtttttgcactggatattccccctcccctctcgtggtcgtagggagggtttgtatgttcagtggaaagatgtttggtatggtctactccattctatttcatgattcatgaatatgtatgtatgtatgtatgcgtgtgatgtactactgtggtatgctgtataaatttataaacacgcgctttattatattctgagctccagaggtgttttggcactgctatgtgttctagcttcatcgtgaagctgccgcgtataatagaaatttaagtggttttaaaaaaatatttttattctaaataagaaacaaaatgacaatgtcttct

SEQ ID NO: 13859 - DNA, 6594 bp, Zea Mays
taactccaaaaccctagacaggtacagaactagtcgatggtcttatgcaggtattctggtgtatattagatttagacaggccggacacacagacaataaatagtcttgttgtgccttgtgtggaatttatttatagctatgctgaatgcctggctttgcattccaatgaaaaaactagtgtgtcagtgggacctgcagttgctctgctgaaggagctgctctttgcaccatatgaagcagtacagacatctagcagtttggctatctcatcccgatttcttcaagtccctttccccaagcagacaatgatagctaatgatgatgctcctgaaaaccaagctaaagcaagtgcttctgctatgaattcaaccagtgcaaactctcaggttatgattgaagaagatcctgtcacatcatcagtgcaatattgttgtgatggctgttccaccgttcctatacttcggcaaaggtggcactgtagcatatgtccagattttgacctatgtgaaacttgctatgagatacttgatgcagatcgtttaccagcaccccattctaaagatcatccaatgtcagcaatacctattgaagttgatacatttggaggtgaaggcagtgaaatccatttctctgtcgatgagctaacagattcaggtgttcttcatgctgataggagtgttcagacctccccatcatcaattcatatatttgatgcaagtgagtctgcagacttacctgagactattacagaccaggcaactgtttcgatttctgcatcaaaacgtgccattaactccctggtacttaaccacctaattgaagagcttagaggctggatggggaccactgctggtactcgagccatacctttaatgcagttattctacaggctttcttctgctgttggtggtcctttcatggatagttcaaagccagaaaattttgatttggagaagtttgtgaagtggctaatggatgaagtcaacataaataaacagttccctgccaaaacacgatgcacatttggtgaagtattgatccttgttttcatgttcttcacacttatgttccgcaactggcatcaacctgggagtgataattctcattcaaagtcaagtgggagctctgatttgacagataaaggtcctgctcaggttctgggatcaacaacaataactcttccgtcatctagtgctgacctggataaaaatgagtttgcttcccagttagtccgtgcctgttctgccctcaggcagcagaaatttttgaattatcttatggatattctgcagcaacttgttcatattttcaagtcatcatccataaatggagaagctggttcttctggttcaggctgtggatccctattgacaataagaagagagctgccagctggaaatttctctccctttttttcagattcatatgctaaatctcatccaactgatctgttcatggactactacaaattattgttggagaatactttccggcttgtatatagtatggttagaccagaaaaggagaagtctgctgagaaggatagatgctacaaggttcccaacactaaggatctaaagttggatggatatcaagatgtgctttgcagctatattagcaatcctcatactgcatttgtccggagatatgcaaggaggctcttccttcatttatgtggcagcaagactcactattacagtgtgagggattcgtggcaatgttcccatgaagttaagaaacttaataagatcataaacaagtctgggggtttcagaaatcctgtgccttacgagagaagtgtcaagctcataaaatgtttatctactctttgtgatgtggctacggcaagaccaaaaaattggcaaaagttctgtttgaagcacatggatcttcttccatttctcatggacaatgtttatcatttcagtgaagagtgtgttattcagactctcaagcttctaaatctggctttctattcaggaaaagatgctaatcataatgcacaaaaagcagagactactgatctaggaggttctacgaggactagctcacagtctccagatatgaaaaagaaccggaaggctgatgatggttctgaaggttcctcagaaaagtcgtgcatggacatggaacaggttgtagagatgttcagtgataaggaaggtgacatgttgaaaaactttatcaacatattcttactagaatggaactcagcaggtgtccgtcatgaggctaaatgtgttctatttggagtgtggtaccatgcaaaaaaccgacttagggagacaatgctatcgattctgctacagaaggtaatacatcttcctttatatggacaaaacattgttgagtacactgacctcatcacctgtttacttgggaaagtgaacgacttcagtgcaaagcagaatcactctgaacttgtgaataaatgtttgacatctgaggtcataagctgcatctttgacacactccattctcagaatgagctattggcaaatcatccaaattcacgtatatacaacacattgagttgcttagtggagtttgatggctattacttagagagtgagccttgtgttacctgcagctgccctgatgttccgtattcaaggacgaagcttgaaaccctcaagtctgagacaaaatttactgacaacagaattataataaaatgcactggaagctttactatacagtcagttacaatgaacgtttatgatgctcgtaagtctaaatcggtcaaagtacttaacctgtattacaacaacaggcctgtgactgacttatcagaattgaagaataattggactctttggaagcgtgctaagagctgccatcttacatttaatcagacagaattgaaggttgaatttcccattccgattacagcatgcaatttcatgattgaacttgattcattttatgagaatcttcaagcttcttcccttgagtcactgcaatgcccacggtgtagcaggtctgtcactgataaacatggcatatgtagtaattgccatgaaaatgcatatcagtgccggcagtgtagaaatattaactatgaaaatcttgactcttttctctgcaatgagtgtggatacagcaaatatggtcgttttgaattccacttcatggcaaaacctagtttttcatttgacaacatggaaaatgatgatgacatgagaaaaggattggcagcaatagagtcagagtcagaaaatgctcataggcggtaccagcaactgatgggatttaaaaagcctctcatcaaacttgtgtcaagcataggtgaacaggaggtagactcgcagcagaaggatgctgtccagcagatgatggtgtccttgcctgggcccacatgcaaggtaaatcgcaagattgcacttcttggtgttctatatggtgaaaaatgcaaagccgcttttgattctgtgagcaaaagtgttcagacattgcaagggctccgccgtgttttaatgacatatctacaccaaaaaagttctagtgacaccaatgcattaccagcattttcaataccaaggtctccaaatagttgttatgggtgtagcaccacgtttgttacacaatgcttagagttattacaagtgctttcaaaacatgaaaactgcaggaagcagcttataagtgctggagttttgtcagagttatttgaaaacaacattcatcagggccctaggacagcacgcactcttgctagggctgtgctatcttcgttttctgaaagtgatgaagatgcagttcatgaattgaacaacttgattcagaagaaagtgatgtattgccttgagcaccatcgttccatggacattgcacaatcaacacgagaagacttactgctgctatcagagacttgtgctcttgtggatgagttttgggaggcacgattacgtgtcacctttcaactgttgttctcttctattaaggttggagcaaaacatcctgcaatttcggaacatattattcttccttgtttgaggataatttctcaggcttgcacgcctccaaaatctgattgtggggacaaagagtcaggtttgggagtatctagcttgacgttgcactctaagaatgatgatacaactggtaacacagcatctaataaccccaatactaagattcagtcagatatatctggaaaaatttatgatggaagtcgaagagaccaggatattccacttttgagctattctgaatgggagggcggtgcgtcatatttagatttcgtccggaggcagtacaaagtatcccaggcagtgaaaggatctgctcagaagacacgccatgattcatataagtctgactatctggttctcaaatatggactcagatggaagcgtcgtgcatgtttgaagtcaagtaagagtgacttctcaaaatttgccttgggctactgggtatcagacttgatcttgagttcgtgttcccagtcaataagatctgagatttgcactctcataagcttgctatgcccatctaactctcctagacaatttcagttattgaacttgctcatgtcactacttcctcgaacactctcagctggtgaaagtgcagcagagtactttgagttactagggacaatgattgattcagagtcttctcgtctattcctaactgttcgtggttgtttgacaacattatgttctttgataacaaaagaagtgtccaatgttgaatcacaggagagaagcctaagcattgatatctcacagggattcattctccataagcttgttgagctcctgaacaagtttcttgaagttcccaatatcagagcaaggtttatgagtgataggttactatctgaggtgttggaagcttttttggtgatccgtgggcttgtcgtgcaaaagacaaagttaattaatgactgcaatcatcttttgaaagaccttcttgatagcttgcttcttgagagtactgaaaacaaacgtcaatttattcgtgcttgcatctctggattgcagaggcatgtgaaggaaaaaaagagacggacgtctttgtttattttggagcaactctgcaatctgatttgcccagtgaaaccagagcctgtttatcttttgatactgaacaaggcacatactcaagaagagttcatcaggggttctatgacaaagaacccatactccagtgtggatgttggccctctaatgcgggatgtgaaaaataaaatatgtaaccagcttgatttaattggacttttggaggatgattatggtatggaattattagttggtggtagtataatctcacttgatctgagcatttcccaagtctatgagcaagtatggaggaagcaccatggtcaaactcaacattgtttgtccaatgtcagcgcaataactggtgcttcatctatcagagattgcccaccaatgacagtgacctacagactgcagggtttagatggtgaagctactgagcctatgattaaagagctggaagaggaaagggaggaatcacaagatcctgaaatcgagtttgctatagcaggtgctgttagggaatgtggaggccttgagattattttgagcatgattcagagcctgcatgatgatgagttcaggtctaatcaagaagagttgacttctgttcttaaccttctaaaatattgttgcaaaatccgtgaaaataggtgtgcactgttatgtctgggtgctttgggtttgcttcttgagacagctagacgcgcattttctgcggacgcaatggaacctgctgaaggtattctactaattgtagaaagtcttactatggaagctaatgagagtgacataagcattgcccaaagtgtttttacaactagtactgaagcgattggcgctggtgaggaggccaggaaaattgttctcatgtttttggagagaatatgtcatccttcaggtgccaaaaaatcaaacaagcaacaaaggaatgaggagatggtggcaaggatcctgccgtacttgacctatggggaaccaacagctatggaagctcttattcaacattttgagccctaccttagggactggtctgaatttgatcaattgcagaagcaacatgaagataatccaaaagatgataatataagccaaaagctgtcaacacagcgatctgctatcgacaactttgttcgtgtatcagagtcactcaagactagttcatgtggtgagaggctaaaggatattattctggagaagggcatcacaaaagctgctgttgagcatgtaaaggaaagctttgcttctgctggacagactggcttcagaacaagtgaagaatggacaacaggcttaaaactgccatctattccacccattctgtcaatgttgaaggggctggctaagggccatctgcctacacagaaatgcattgatgaagaaggcatattaccactgctccatgctctggaaggggtgcctggtgaaaatgaaattggtgcaagagcagaaaatcttttggatacactagccaataatgaaaataatggtgatggcttccttggagagaagattcaagagctgcggcacgctacaagggatgagatgcgtcgccgtgctctttgagaaagagtgatgctacttcagg

SEQ ID NO: 13860 - DNA, 1377 bp, Zea Mays
ttctactggaaacgcagacagacactcgtctttgaggaagaagcaactgttgctggcaggagtcaagtcagcatgaaaggaggatgcttagctctggaaacactgctgccggcctgccgcacaaaagagatgtttcactctcagtcccatcaagtgttctacatcaagttcctgaaggacatgttggggtgtactggagaggaggtgctcttctgaagacaatcactcctccagggtttcatctgaagctccctttgatcacccagtacgagccaatacaggttacacttcaaacagaccaggtcagagatattccttgtggaacaaaaggtggtgttatgatcagctttgacaagatagaggtcgtgaaccgccttcgcaaagagtttgtgcatgaaaccctactcaactatggtgtgcactatgacaagacatggatatatgataaaatccatcatgagattaatcagttctgcagtgctcacagtttgcagcaagtttacattgacatgttcgatcagattgatgaaacaatgaaagaagctattcaaagagactgtacacgctatgctcctggaattgaaatcatcagtgttcgtgttacgaagccaaatatacctggtagtatcagaagaaactttgaacttatggaggaggagcgtacaaaggcactgatcgccatggagaagcaaaaggtagcagagaaggaggcagaaacacagaagaagattgcgctatctgaagcagagaagaacgcacaggtgagcaagatcctgatggagcagaagctgatggaaaaggacagttccaagcgacaggagcagattgataatgacatgtacctcgcacgagagaaagcagtagcagatgcaaactactacaggatattgaaggaagcagaggccaataggctcaaactgacacctgagtatcttgagctgaggttcattgaatcaatcgccaataactcaaagattttcttcggtgaaaagattcctaacatgatcatggatcaaaggttgctcaagaactaccttgatgctgctcctaggaaggaccattatgagatgtagaagcgtgttccgtgagttggaagcaaaagacctttgtgtgtgtgatcccaccgtccacgcagtagataggattcccacgagccgttcagtacctcagtaagccagaaaagactcatcaggaccctcttgaagatttagatgcaaaaattttcttcgccaaaaatgtacagttttgctcactgacttaggacatgtttggagcatctatttttttagaaactggtttatgaaaactgaaatggtttcaaacatatctgattatatcccagtttatagaaactagattcctagtttcttaaaaact

SEQ ID NO: 13861 - DNA, 1699 bp, Zea Mays
gcataatttgctgatgaaacatggatgaacatggtctgttttatgcactggaccttggcgggaccaactttcgtgtcatccgggtccaacttggcggaagggacagacgtgtcgtgaagcaacagtatgaagaggtctccattccgcctcatcttatggttggaacttctacggaactatttgatttcattgctgctgagttggaaaaatttgtgcggactgaaggagaagatttccacctaccagatagcaagcagagggaactgggtttcaccttttctttcccagtgcaccaaacatctatatcatcggggactctaattaagtggaccaaaggattttgcatcaatggcacggttggagaagatgttgtggctgaattgagtagggccatggaaaggcagggtcttgatatgaaagttgcagctctggttaatgatactgtaggcacattggctggtgggagatatgctgataatgatgttgttgctgctgtaatattgggcactggcacaaatgcagcttatgtggaacatgcaaatgtgattcctaaatggaccgggctgctacctagatcagggaacatggtaatcaacatggagtggggaaacttcagatcagataaacttccaaggtcggagtatgataaatccttagacttcgaaagtttgaaccctggtgagcagatatatgaaaagatgatttctggaatgtatcttggagaaattgtccggaggatcctgctgaaactggctcatgatgcttcattgtttggggatgttgttcctccgaaactggaacagctatttatactgaggacgccagatatgtcagccatgcaccatgacacctcacatgatctcaaacacctgggagctaagctgaaggacattcttggggttcctgatacttctctggaagcaagatacatcactcttcatgtgtgcgaccttgtcgcagagagaggtgcacgcctggctgctgctggtatatatggtattctgaagaagctgggtaaagacaaattgctaggtgactttagccaacaaaggactgtagttgctattgacggtggcctatacgagcactacaagaagttcagtgcctgcctagaggcgacgctcacagacctgctcggcgaggaggttgcctcatcggttgttgtcaagttggccaacgacggctcaggaattggagctgcacttcttgctgcctcgcactcccagtatgctgaagctgcatagttctaggagctcgggggtcctagtgtaacctttttttttgtttcccaccatttcccccttcaatcgagaagcccccctcgtgcgattcgcatctctctattttctttcctcagcagcgggatatagctaggatggtgccattgagcttggagtacattatcactagcaacaagcattagcagcggcaggaaagaagtggaagcggaggcctgaataagccgttccattcctgccgattctttttcttcccaatcccttgaagtttgtattatgaggcgatatcacaaaacagccagttcttatctgtgtgatctcgtctttcaaaataaggagagaggtgggggaccaaatcatacagtctttactcattttttattgaatcgtgcagtgcttctgcctttatttcagaaacaactgcaatggcaatatttgcttgttcttatgtttgattggtc

SEQ ID NO: 13862 - DNA, 77 bp, Zea Mays
gtcaaggcctcgtctaccaagggacgcaatctcgcctcgtccgagcccggcctcgggcgggaacagtagtcccggac

SEQ ID NO: 13863 - DNA, 469 bp, Zea Mays
tacagatcatctagtcttgagttgttagagtctctgatcaggtttgatgaacggagtgatagatcaactcgaagtgatccttctgatgagcggctcacagacaggaccttgcacttcacaaactggccctcatggaatccagacaagggttcagacacccaagagtcaacaatttcagtataatgaaccctcccatggagatgaggtccaatctgaacgacgagcccaccaacaccaggtagaattttttgaacacgtccaccaatgatatctccttgttttgtttgtccaaacacagaggactttggttcttgtgtttcatctatattcggttgtgtgcattggttatcaagtgccttcaaccgaagtaaccttttctcctggttcacactgataacacgacctttcactgcttggccaacactaaagcgctgctggaattctttcagttcgctgggctcggaagaac

SEQ ID NO: 13864 - DNA, 933 bp, Zea Mays
gtgagatattaaggttttgattggcaaaatctcaactggtgctcagaatgacctggagaaagttaccaaaatgacatatgcacaggtcgccgtgtatggttttagtgaaaaggttgggcttctgtccttcccccagaaagatggtggtttcgaaatgagcaagccttacagtaatcagacagcatccatcatcgacgatgaggtccgggaatgggttggcaaggcctacaagaaaacagttgaattgataacagagcacaaggagcaagttgcacagatcgcagaattgctgctcgagaaggaagtcctacaccaggacgatctaaccagggtactaggagaacgtccattcaaggcactggagccaaccaactacgacctctttaagaaaggtttcgaggatggtggtgacaacagccaagcaccagcagagaacgccgagctgcctgatgattcatctcccccagttggtgacgttgtacccacgtagtgtttctctcctcaacgtcagagctgtacattgagcgctcattctcgatagattcttgtttgttggttgcatcataaaaaagatctgtataaattcgcgcccaagctgattatgccactgtggaaatgcatttggatttccgtagtgtcagtccggtcgatagggtgccttgggttcttcatggcacgagcaaatgttctgattcttgtattcgaatgttttgaaatattctgtctgacgggactgcggagttggcgcgagaagtgtgcttgttcagttctatctgaaggcttagctgtctgtagctgtagctggtaacaacagtggctaaaatggtacctctgaaatctttgtgacagtaacaagccattttcctttgaatttttatcaggtagtcggcgcgattactttgtttgacaagcacaaactaaatgtcttggttt

SEQ ID NO: 13865 - DNA, 1264 bp, Zea Mays
tattcgtgacgacgcccgcagccgccgccgccgacgatggaggagcagcacctctcgtctgtccaccgctgaccgctcgtttgtcagcctagcaccggggtgcatgaacgcccagtatatgctacagcaccgccgcccctggccctgccgcctgcgccgctcgttgccctgtgcactccgcgggccttgggaatggccaaccaggatatttatcgttggcatatcatcatgaggatgtgaattccacaggaagacccatgtgatcttattgctcccttagatcttccacattttttacagtcttattccttgccgaggggagtcctgctccagtagtggtctcagaaggggcaaataccatggatgttggcaggcctgtgcttgtgcagaatgcaccaaggacaagactggatgcagggacatgggggacgatggggattggattggggtactgtattgcagctgcagtagctgaacctgaatgactcgtggttgctgtggagggcgattctggatttggcttcagtgcaatggaggttgatgtgaacaagggcttcaacagtgatgctgttttagcaatggagacgatccattccctgtcagcttcaaaatcaagttacccaatggctgatctcacccaactcttcatgacagctacccaagaagggaaaagatcagaatcgcaaggccagattcttagggtggaatgctatagcttaatgccctaatctttatatgcctcttcttatatctgcacttccatgggcaccgggcgacactaaattcacaagataccccctccacctcaaggtggtatggagttctgtgtatcacaagaggcatctaggttgacctcactcttcttagtgttcatgcccactacgcaagacaacaccgcaacgccgatggagttggaagatttcattagtttcgactggatctggatgagatggactctgcttgtaaggagagagagagtgcatggcttgggaggagcatatttttgttcatccttttcatgagtcatgttacctgccatgtcagattatgtaacttcagatatttctgtttttgttagaaaagtaccaaaatagtttcacttcatggctactctcagatgtgttattgttgctgccactaatcatataagggtaacattgtatttgttagccaacaatttttgagatattaaagttggtgataatataattgttgtttgtttctatgtaatcgttgtgcactaatattttgctgaatattttat

SEQ ID NO: 13866 - DNA, 2313 bp, Zea Mays
cttctctcctcctccccgagggctgaggatatcctttaacccatccacctcacgaggaatcagcactcgcttttgctccgcgatttattgctcagggttcttgctgggtggtggtggcgggtggcgcgagcagtagttcacaagagcaagctgttcttgtgtgcgtggttctatgcctgcttgcttgccgaggggaggagaaggaggcggagtagtgggagttgaggagtgcaggtaccggcattgctgaggcggcgccgggagatccggcgatgtcggaagccgaccggatacgccactgcacagcagcgctggcgctgcacgacgatgagactggggatgattgacaaggcgcggaggcatttcacccaggcgggtcatcttcagcattcagaccctgccgagtggcataagctgcaggaggtggaggtccatctgggaagatgcacagatgcaaggaaaattggggattggaagagcgctctgagggaggctgatgccgccattgctgctggcgccgactcctctcagttgcttcttgccttgaggtcagaagcacttctccgccttcacaagctggaggaggccgagtcgactcttgcaagcttgctgaaactggacagtgcattgccctcatcattgacagcagcaaaactctcggggatgcttgctgagtcatacatacatattgttcaagcgcaggttgacatggcatttgggaggtttgatactgctgttgctgcagctgagaaggctagagatcttgatcctgggaacgcagaaatcgggatggttttgaataatgtgagactagtcgcaaaagcccgagagcaaggaaatgatctctttaaagctgccaagtttttagatgcgtccatagcctatggggaagggctcaagtatgatcccttaaattcagtgctccactgcaatcgagctgcttgctggtcaaagctagaaaagtggggaaaagctgtcgacgactgcaacgaggcactaagaatacagccaaactatacaaaggctctcttacggcgagctgcgtcgtatgctaagcttgagcgttgggtggactgtgtgcgggactatgaggtgcttcggaaggagtttcccagtgacaaggaggttgctgaggcattgttccatgcccaaattgccttgaaggcgactcgtggtgaggatgtatcaaatatgaagtttggaggagaggtggagatggtttccaatgtagagcaactcaatgctgccataagttcgcctggggtaactgttgtctacttcatgtcgacaatgaatcagcaatgcacacaaattacaccatcgatcaacattctatgcactgaatgcccctcagtgaattttctcaaggttaacgtcaacagcagcccaatggtagcaaggacagagaacgtgcggatagtcccgacgttcaagatatacaaaggaggggtgaaagtgaaggaaatgatctgcccgagcttgcatgttctgcgctactccgtgcgacactattctgtatccagttcttgagaagctttaggtacccgtaccccaatttcccattttccctaatgcatagagcagagcacccggtcaaacttgcagcatcaccaggcaccaggcaccagcctccagagcattttcaccacctgcgtagctactccccattgagcatgagcataaggaagactgtcaggtggaagagcccctcattccccatctcctgtcgttttcgcctcttcaccgttcatataccgacccattaaattcaatagcttttccatgtttggggctctccacctcattttgtatttgatacttcattttcgttcaccccatcatagtccatatgccagcaccctgtgtctcaagaaaaaatggaaatgtttgtaatgtcgtctaggtttagcatatactctctatactttagggagggagaggagggggggccgggccctgggggttgcagttttcgttacatgtacataccttataggaaaaacatgagagaaatccattggaagattggttccctggcgaaaagagagatggtggcatcagattgagctgagatttcggcggttggggtcaggtacagggctagtagttgttctgagtttccactggagtctttatctatctatctttagaggggggagagacagcgagaggtgttaagttaactgatgatgcagagatggttggtgtccattgaagacgatgacatgtcgttttgctgcttctgttgggtttcatggcgctgataccatatatgctaccgtttccatgaataaaacattgcaacactcgttc

SEQ ID NO: 13867 - DNA, 513 bp, Zea Mays
ctcttaacaggctcgacactagactactgaatgtgcagaacttgcaccaccagttcagaagcatacaagagccaaccggaagcatatagatagcattactttagttgatatagctcagtacttccatcttccaatccgagatgcatcaaagacactcaagattggggtcagcatattgaagaggaaatgccgacagtatgggatacctcgttggcctcaccggaagatcaagtcacttgactctctcattcatgaccttgagttcgtgctagcaagagaggatgaggatgaggaggaggagaagcagctgcagaaggacaggctggctgctgcgataaacgccctcacaaaacggaagagcatgctggagagcgagaaggaaaccatacagcagaaaccggccatggacctgatggctgaaaccaagctattcagggaagatgttttcaagaggagatatagggccaaaagttcagtcatggatatggattagcatttctctttagctgataa

SEQ ID NO: 13868 - DNA, 2988 bp, Zea Mays
ttctggtacaaccgaacaggcccttagtcgttgaccgtctcgctcgcctccccgtccgctccgctcccgtgctttcccctttgctcgctcgcggacctccgtcccggactccgactcccggcggcgctctcgcgccagcaagctcgaatctgcacgccgccgccgccgccgccgccgccccacgcccacggcgcctagaaccagggtctttctggtgtgcaggggtgggcgcttggcttctgagaacatgtaacgggtgttgatacgaaaataggttcctggaatagcgggttcattagcagtttggcacaactttgaagctgcaggggatttcaaatgccctttgtcatcaggtccacggttccactgagccagaggattttttattgtattttcaacttccctgaggatgtttgacagtactcaaaaagctcaatacatggatgggcacagagagaggtttattaggctggatgagtcaagtcctaggtcatctgtaccttctgaagtgggaggcaggagtacattgaggtccagcatgcctgggtttggttatggtccatttaatgcactaaggtctttcttgtctgggggctctggaagactgaagtcacttagacagtcacttacttctggtgctcctaagacagcttttgcggaagatcttaaatcatataagagaactatatttgatccccaggacaaacttcttttccgaatgaactgggttttcttctcgtcttgtctttttgctgttgcagtggacccactattcttcttcctacccatcatcaacgattcaaactgcattggtattgataaaaagttggcagtgacatcaacaataatacgtacggttattgattttgtctaccttatacgcgtgtgtcttcaattccgcactgcttatgttgctccatcttcacgcgtgtttgggactggtgagcttgtgattgatccgatgctaattgcaaagcgatacattaaaagttactttgcaatggactttgttgcattgctaccacttccacagattgttgtatggagatacctccatattccagatggcccagatgtactgactacgaaaactgcactggtttgggttgttttgatccaatacattccaaggttgcttcgaatattccctgtgatcacagatttgaaaaggacagctggtgtttttattgaaactgcttgggctggtgctgcttattatcttctatggtttatgctggctgggcataatgttggtactttatggtactttttaaccatagaacgtgaagatgattgctggcatctatactgtgacgatcccaactttggcttgggatgtaatagcagctacttgtattgcaataatcatcatcatggcagctatgatagttggcttacgaataatagtgcccaagtattcaacatgtgcaatggcggtcaagacaatcctttcaactttggcatttatgagcaagcactggtctctaaaatacttagtccaggaaatttcatctcaaaattatgttattgcttctggtggggattgcaaaatctaagtacacttggtcaagggcttttgacaagcacataccctggagaagtcctgttctctatagcaatatgtgtccttggactaattctttttgctctcctcattggtaacatgcagagctacctacaatctgttgctatacgccttgaagagatgagagttaagaaacgcgatgctgagcagtggatgcatcaccgttcactgccactggacatcagacatagggtgaggaagtatgaacgttatcggtggttggaaaccaggggagtagacgaagaaactttggttcaaactcttccaaaagatcttaggagggatatcaagcggcatctttgtttgggcttagtgaaaagggtgcctttgtttgaaaatatggatgaacgattgttggatgcaatatgtgagcggttaagacctgcactctacacagaaaatgagttcattttgagggaaggtgacccggtggatgagatgcactttattcttcatggttgtttggagagtgtaaccactgatggtggacggagtgggttctttaacaaggttcagctaaaggaagggtcgttctgtggcgatgagttgctcacttgggcattggatcccaagtcagctgctaattttccagtttcgagcaggactgtccaggcactcaccgaggttgaggcgtttgccctatgtgcagaagagctgaaattcgtggccagtcagttcaggaggctgcacagcaggcaagtgcaacacacattccgattctattcccagcagtggaggacttgggcagcctgcttcatccaagcagcatggcgccgctactacaagaggaagatggcagagcagcggcgcaaagaagaagaggcggcaagccggccaagtagtagccaccctagccttggggcgactatctatgcatctcgtttcgctgccaacgccatgcgaggggttcacaggctaagaagcaaggctgtccctaccattgtcaggctaccgaaacccccagaaccagattttggtgtcgatgatgctgactaacgagacaatcacactgtactcgcttgtaattgtactttacctcatctgtagattctgtacaagattcaacgacagctgaagaagatagtgtctgtaaaggtttgtaaccacgcacagacagaccataacggaggtttctttaggggtattcactgaaggcgacagctgatcgtcattcatagattgcaagcaataggggaaagtcacttcatccaaataatggtcattgccttttcttcagaatgctctatttacctatttgtaattactcccctctcatctgacatgtagagtatttgacatattcgttgtattagagagtttgacatgttcgttgtataatatgattttatcgatcttgatatatatttgaatggttgagcgcccgatagggcgctttctattct

SEQ ID NO: 13869 - DNA, 164 bp, Zea Mays
taccgcaggatgaggcgcatggaggttgctgcgatatgtttgtaagagatctaggccgtcgtctcccagtcaactttgggttgctggaccgttgtctccttataatgtaattatttatttattttgtacataactcctattatatagtaaagatgtgacattcg

SEQ ID NO: 13870 - DNA, 534 bp, Zea Mays
ctctctcgcgcgcgccccatggacaaagttggcctttcctgagggtcttgttcctcgggcgaagttactgctatcacttggcagcaccttctttctggcgtttgggcccctgattcttgtcaccgtctcccttttcgctgttttatacgtgtactttggaccgagttttgtacacgatgcaagcaagacgccggtgtcgccgccaccgtacattgatccatacgagctactggaggacgagaggctcagccggccctccccagatgtgttctgaacatgaacagtgcaagaaccagtgcataattgattacaagaaatagtcatacatagcccaaaacttatcttttttactagacgtatagttgtaaatgcaactataaccatagagtgttataatcacttaatcagaagttttagcacgtagtattccatccatcgatttcagatctgaaacagttaaggtgtttggtttctagggctaaattttagtcctacattttattccattttagtctctaaattgtcaaatacgaa

SEQ ID NO: 13871 - DNA, 1582 bp, Zea Mays
aaaaagtgaagcgcaagccattaaacaaacacaaatagcacacacgggcacacggcaggcctacaactacaagaggagaggagaagagagaggagaattttcaatgctgccgcgcaccgtcatcactagctagtggaggggcggacgagaaggcgaggagctgaggggagagaggcttcacagagcttgcttgagcctggagggggctgccgctgtttgtctctccactccacccaccagcagttacctcgggagggcatggcaaaatctggtgcctcctttccggagtccagttggatggagagggatttcctggccgcgatcggcaaggagcagcagcacccgcacaaggaggaggcaggcgcggaggaatctgggatgtggtgaggccaaagacagcacaattgacgatcttctatgctggttctgtcaacgtattcgacaacgtctcagctgagaaggctcaggagctcatgctcttagccagcagagggtctcttccaagctcagcccccgtggcccgtaagccagaagctcctattctcgctccagcaaaagtcacagcgcctgaggttttgcatgcaacacagatgctgtttcaaaaaccacaacacgtttctccaccttcgtctgccatctccaaaccaatccctggcatcttgcaagctgcaagtctccccaggagcgcctcgagctctaaccttgactccccatttccaaaatcttcagtgccatttcctgtttctcctgtaagtcaggctccgagagctcagcctgcaaccattgccgctacaactgcagcagcaataatgcctagagctgtccctcaagctagaaaggcgtcccttgctcgattcttggagaaaagaaaggaaagggtgacaactgctgcaccttacccatcagccaagagcccgatggagagcagtgacacgtttggcagtgggagcgccaacgacaagtcatcatgcacagacattgccctctcaagcaaccatgaggagtccctatgtttagggcagcccaggaacatcagcttcatccaagagtcccccagtacaaaactacagatctgatctgaatatctgatcatgcccaatgttcatagatttgtccaggctgactgatgcaaggaccatacgatacttttgcattcaggcaaggactcgagaggaagagattacgtatgttatcggtgccgctagctgttgtttatgatgatgttttgttgtgctagtttactgtgatgctggtggtgcccccacctaactaacaagagagctgtcacttgcagactcttgatttttttttgtcctagcgccatttctttagcggtatcaagtcaatttatataggcttacaaattctgcgccttttgtatggccaaagtgtaatatttttgttcttgtattatgaacctccatgctgcagaatgcaagagcaaatcttattgtcgatggtgttctcattgccagcatgtgtacgcagtagcggttcatgttgttttgagctgttctgttttaataatatctcaaaaggttgccgattggtgcccgtaaggatgacatttcaagaacagatg

SEQ ID NO: 13872 - DNA, 2473 bp, Zea Mays
gcgcgcgagtgaccagtaatataacacacactaatcaaacaccacatatatcttgcgctctccaaatccctcgccgaaagcccgaaacccttccagtggtcttccgccgccaaccctcgccgctcttccgctgccaaccgttgcgccggcccgactctgtcctgaagccgtggcgtacgggggattcacttccattcgacgccatctggcctcctcttccatctcgcgggcgcttgttcgtgcgcgtggattgttttatcagggtctcgtgcccgtgccctaggtgggcgcgtccgctatgtttcctcccaaagggcccaatcactatggccagcagctgccttacggcgtgcagcagccgtacggccaaatccctagtagcactggatttgcagccccggcagcggcaggtggcactgatggtggtcggtttggtgcgcgtgcaggacaaggggctgctgcgcagtatggagggccttatgcatcagtatatggcacacaacaggttggcggacttggtggcaaaggtccagcttcttcaagtcttcctagtttcccaactcgtccaacttctctccctgagtcgtccaacttctcatctgcacctgtggggtctggcctggcaaggccaaatgatgactatatggctgtgcgtggttatgcacagaagctagaccaatatagcactgattatccactagagagacgtatgtatggtgaacactcagccaatcttggtaggagagatggtctcagtgatttggatagaagatatactgatcagacagctactggtcatcaggttcatgatcatatggagcagagttcatcaatgcgccaccagcagctcctgaaaggtcagctgcagcccggatctgatacaagacaagccgattactttgcaggaagatctgctccagcccatcaagcatcccaggaaattggtgtatatggaagagttgaagctgataatcgcaacatatccattcttgggaatgctccatatggaagacagcaatcagcctcattgttggaaggagctccaaggacaaacatcgacagcctctatggacaaggatcgtcaggcactggttttggtgcaggtcttcctcctggacgtgattatgcctcagtgaaaggcctgccccatccatcttcagaccctgatcaccgagatagcatcttaccccgtgtacatccagccgtctcaatggttgatgatcgtagagttgatcgaattggttatcgtcgtgaactggatctaagagatgaggaacgcagaagggacctaatactggaaagagagaaggaacttgaacgggaacgggaacgagaacgggaacgtgagttacgggactttcgagatcgtgaaagggaaagagaacgtgaaagggaaagggatcatgaaagactactaagagaacgtgaaagagaaagggaacgcgaacgcgaacgtgaaagagagcgcgaaagagaacgccttcgtgagcgccgggagaaggagagagagcgggataggaagcacagaactgatccaaggcgggagcacactccacctagaggccctggtgatcggcggcggtcttcttctgttagatctgagaagcctgtacggcgaatttcccctcgacgtgatgctgtgcataggcatcgttcacctgttaaagaaataaagagagaatatatttgcaaggtttttccatttcgcttcgtggatgatgagagggattatctgtgcttgacaaaacggtatcccagacttgcagttactccagaattttctaagattgtcttgaactgggctaaagaaaacttaaatcttcctctcgatacaccagtgagtttggagcatgatatccatgattcagatgataatgctgatgaaggagcaattatctccactgagaaaacaccaagcttcaatactccagccaccatttggaatgcaaaggtactattgatgagtggcatgagcaaaggtgcctttgctgacataacttcattgagaagtactgaggaacgagttgtgcacttgaacaatatattaaaatttgctttattcaagaaggatcgttctctatttgcaattggaggcccttggaatgcagcaatagatggtggtgacccctcagttgactgttcttgcttgattcaaactgccatcagatgtgttaaagaaatggttcaagttgatctatctagttgcacccactggaaccgttttgtcgaggtacattacaatagaataggcaaagatggactcttcagtcataaagaaattactgttctgtttgtgccaaacttgtctgaatgcttgccttcagtggatatatggaagaataactggattctgtacaaaaaatcaaaggcagaaagggaagaactcactgttaaaaaggaaaagagtcctggtgattcgaaagagcagatgcaagtttcaggggagctgaataagggtaaaagtttagatgct

SEQ ID NO: 13873 - DNA, 1809 bp, Zea Mays
tccgtccacgccattgcgtcgcactgcctccacacgacgactccacgaacacgagcggccacaagacgagatccaggcggctgtgtagctacgctgccatgacgtctaccgtgacgacgcccagccggccgctcgccgccgggagccgtccgcggcggtccggacccgccgtgctctcgctcagcaagggcggcggcggtcagcggcggcagcggcggctggcgccgtccacgagctgcgccgtgctcgcgtcgcccgacaagcagagcacggccaacaagctcccgctgtcgtcgaggaagcaggaggaggaggtggagaaggccacggactacaacgaggtcgcggcagcgctggagaccatctacaagctcagccccgccgtggaggtcgaggagaagaagcgccagggcggcaatgaagacgacggcggtggcgaggccaagaagaaaaggaagcgcagagtggcgggtaggagcacggtggtcgtgaggagccggcgtcggcgtggcgggaggaggatggacctcgggaagcgggtggagatgaagggcgcggccgccgctagcagagagcagcagcaggggggagaggagcaaggagagcgcgagttcgaggagatgctgctgcgggagcactcggtgtcgacggacatgggcagcctggactggaagcgcatgaagatcccgccggtgctcacctcatcgcagagcgcgcggctcttcaagaccatgcagcccatgaaggagagcttgcgagaggagctgcagagggaccccaccgacgcggaggtcgccgaggccaccggcatgaccgtccaccagctccgccgccgcctcgatgtcggccgggccgccaggaacaagctcattaagcacaacctccggctggtgccgtacgccctcaacaagtactaccctgacatgggcggcgacgagaggttcgacgagctgtgccaggcgggcgccaacgggctgatcaccgccatcgatcggttcgagccgaagcgcggcttccgcatctccacgtacgcgctcttctggatccggcactccatcgtgcgcgccatgacgctgtccagcttcacccgcttcccgttcgccatggagtcggagcggcaggagatcggcagggcgcgggaggagctggcgttcgagctcggccggccgcccacggacgaggaggtgcgggcgagggtgggcctctccccgcagaggtaccgcgacgtgctgcggatggccaggcccacatactcgctgcacgcccggaaccgcgtcacgcaggaggagctcatcggcgaggtcaccgacgccgaagccgtcggggtcgacgccggcggcaagcacgacgcgctgctccgcctcgccatcgatgacctcctggactctctgaaacccaaggagagcctggtgatcaggcagcggttcggcctggacggcagggggaggcgcacgctaagcgaggtcgccggcaacctcagcatctcgcgggagatggtgcgcaagtacgagctcaaggcgctcatgaagctcaagcaccccacaagggtggaatacctgcgcaggtacatgtgatcgggctgagctgagctgagcttcttctgctgctatggaatgcattgtaatccgaattcttctattattattgtataataatacaagactatagcagatatatagacgaaatgtacgtgtacaggaagacaggaatgaatggtgtgtgcgtttggggatccagatgagtgacttcatcttttaatttgcatgtaattaattcttaacgtacatacatacgaccgtcgtttatgtc

SEQ ID NO: 13874 - DNA, 940 bp, Zea Mays
aggaggagctcatggcggaagctccggcgagccctggcggcggcggcgggagccacgagagcgggagccccaggggaggcggaggcggtggcagcgtcagggagcaggacaggttcctgcccatcgccaacatcagtcgcatcatgaagaaggccatcccggctaacgggaagatcgccaaggacgctaaggagaccgtgcaggagtgcgtctccgagttcatctccttcatcactagcgaagcgagtgacaagtgccagagggagaagcggaagaccatcaatggcgacgatctgctgtgggccatggccacgctggggtttgaagactacattgaacccctcaaggtgtacctgcagaagtacagagaggtgcagggtgatagcaagttaactgcaaaatctagcgatggctcaattaaaaaggatgcccttggtcatgtgggagcaagtagctcagctgcacaagggggagcatacaaccaaggaatgggttatatgcaaccccagtaccataacggggatatctcaaactaatggaggtatggaccttttctgcgacagctgctcttacctgaggcgattttttttgtcttagttatttactaagacaccttgcggtgaccattaaagagtaaccaatcgccctcaataggtccgtttttatctgccagaactgatgaggtcgctcactaggagtaagtcgcttccctgggaacggttgtcggctagcaccgctcttgtatgtatattaagagtaacttaatgattggtcttttggctgcgatttgattacatgtatttgtatcgggaggcataaatattgtgtaatttgtgttaaagactggtgtaattgaactatgggaagagctgctttggttgtaaccatattttgatgcccgtatattaggcaaaaatagaaggctgtgggcgtgcacaac

SEQ ID NO: 13875 - DNA, 923 bp, Zea Mays
tcatggggctcccgtagcgtcgactgcttcgagaagctcgagcagatcggcgagggcacttacgggcaagtgtacatggcgaaggagacgggcaccaacgagatcgtcgcgctcaagaagatccgcatggacaacgagcgggaaggggcccagagcgggacgagcaagggaggtcaattgacgacaacaagtacaaggggagcatttacatggttttcgagtatatggatcatgacctcactgggcttgctgatagaccaggaatgcggttcattgtgccacagattaagtgttacatgaagcagctgcttacaggcctacactattgtcacgtcaaccaagtcctgcatcgagacatcaagggatctaacctcttgatagataacgagggtaacttaaagcttgctgattttggccttgcaagatcattctccagcgatcacaatggaaaccttaccaaccgtgtgatcactttgtggtatagacctccagagttgctacttggaagcacaaagtataatctagccgttgacatgtggtcagtgggctgtatttttgcagaactgctcaatgggaagccaatattgcctggaaagaatgagccagagcagctgactaagatcttcgagctttgtggtacccctgacgacacaatctggcctggtgtcacaaaaatgccatggtacaacaacttcaagcctcaccggccattaaagatacgagttaaagacttctttaaacattttgatcggcatgcactggatctgttagagaagatgttgactttagatccatcacaaaggatatcagcaaaagatgcacttgatgcagaatatttctggacttcacgagcgatgagcgcggccgtgaacaccatgaggatacgggcccccagatggcgtcggctgtgcaggcggccatga

SEQ ID NO: 13876 - DNA, 1798 bp, Zea Mays
cgcgacgtggcgtctggcgtggtcgagcctctagagaagcgagccgtgcccgtctctcccaatccactccgtactcggcgctcctcccccgtcgccgccggaaatcaggaagcccaagtgctctcttgggtgcgctcgtcgccggtggcagtgagccagtgatgcatcttcatctccggcttccttattaggatcagcccgtcgatcgatcatggcgtcgtcgagctcggctgctactactagtggtgacagtcagggtctcaaggctcgagatgcctgcatcgtcggcgtcgcccgcacgcccatcggcgcacttctcgggtcgctgtcgtccctccccgccaccaagctcggctccatcgccatccagggtgctctcaagagggcgaaggtcgacccggcgctcgtgcaggaggttttcatgggcaacgtcctcagcgccaaccttggccaggctccggcaaggcaggcagcccttggcgccggcttgcccaactccgtgccatgtaccaccgtcaacaaagtttgttcctcgggaatgaaggctgtcatgtttgcggctcaaagtattcagctggggatcaacgatgttgtggtcgccggtggcatggaaagcatgtcgaatgccccaaaatatgtggctgaagcaagacgaggatcacggttcggacatgatgtccttgttgatgggatgctcaaggatggcctgtgggatgtctataacgatttcccgatgggaatgtgtgctgaattgtgttcagaccagcactcaatctcaagggaggagcaggattcgtatgctatcctcagcaatgaacgtggcatagcagctcaggacagcggtgcattttcttgggagattgttcctgttgaaatttcttctggtagagggaaaccaccagttgttgttgacaaggatgagagtcttgcaaagtttgatccagtaaagctgaagaaacttgggccaacttttaagacgaatggttctgtaacggctggcaattcttctagtataagtgatggcgctgctgcaattgtccttgtcagtggagagaaagccaagaatcttggccttgaagttattgcaaggattacagggtatgctgatgctgcacaggcacctgagctgtttacgacagctccagcccttgccattccaaaggctatatcaaatgcagctcttcaaacttcacagatagattattatgaagtaaatgaggctttctctgttgttgctatagctaatcagaggcttcttggtatcccttccggaaagctaaacttaagtggtggtgctgtttccctgggccatcctatcggttgcagtggtgcacggataattgtcactttgcttgggattcttagacagaaaaatggaaaatttggtgttgctggagtttgcaatggcggcggcggcgcttcagccctcgttttggagctcatgcaaccctcttcgcatatccattcatcattgtgaagttggtgcgagcaaattagcaagacaaaatttgtaaaatgtgctgtatctgtcgtgctgctcagcacagggcattatcttgtactcccttatatgggaaaatatagacgtatatatacccatggaaataacagaggcccggaagaataatgtacagacactgatacagccactgaaagaagacatgggtagtgaacaatctgcgtggacgtgattttgccttgccattttatgttggggcaattgtgagtgcagttgtaagaatctttatgaggaagattcttcaataggcaacaccgaattgaattggtgtaaaaaaaa

SEQ ID NO: 13877 - DNA, 96 bp, Zea Mays
attctatctttaagtcggttcgacccttcatcttcgaatatgctgtcataccgaagcctcatgaatgataccttcggcatcacgtacaagcagctt

SEQ ID NO: 13878 - DNA, 1481 bp, Zea Mays
ctctaattcactcgcttgtagcagtgaagctcacacctaatatatagcttctttactggctcactaaattcctgagttatcagaggaatcagtgaaaagcctgtaccaaactggcaaggcatatgtacatgattccttggacatttatggccgacctgtgctgattgtagtggcagccaaacattttccttcgacacaggatccagttggaaaccagaagttgtgtgcctatttggttgagaaggcagtcagcagacttccgccaggagtagagaatatacttgggatctttgatctgcgaggctttcgggttgaaaatggtgatctccagttcctaaagtttttgatggacgttttttactattactacccgaagcggcttggccaagttctttttgtcgatgctccttttgtttttcaaccaatgtggcaggttgttaaacctctgttgaaatcatatgcctccctggtaagattttgtgatgccgagactgtgaggaaggaatacttcaaagaagaaatcgtgcctcctgatttccgcgattagaaatgtgcaggtggtctcggaaacatggcctttaatttattgagaatcgattggcacccagggggactggcgccttcccatacctttggattaacctctcaaaagttgctcagacggcagcaaatgattggagagtccagtaaaaaatgacccagtacttgtataactagtgcgaagtagaatgctgagtttaggctgctgtcttgagtgctcctataccatatttttctggttttggatgaagctatatggatcaaattcatctctgttgaacaattgccaattacataacttgtgtttgcccaattccatggtgtagtaccataacttctcagtgcagtgcagacaacacatggattccatttttttattaaagtaccatctgctacaaatatgaatcatggctttgtttgtagacttcataaagaaacacacagattaatcaaaccagtcttcgaagagtctgctatggataggaacgttccaaagcaaaataagatgcaagttgtattgcataaaaaccaggtacacatcaatcagctgcattctggaagactaaactgcaacacaactacatctgcaatcacagagaaatcaggtgctcattcaagtactctactgatcgaaaatggatggcgtctgtgatggttgattcttttgcacgtcttctacactggtacattgacggctgatggagatggatggtggtgtcgctgttttgtgttttgtttagcactctaggtgacacattgttatgggattgttacacagctgatatgttatgaacctgatatggagatctttttgcgtcctttgtttgggtgttactgttgtgccattcgtctcataagttatgccattttattacttgcttttggattgatatatattcgtctctgaagccttccttcaatacaaatacaagagtttttta

SEQ ID NO: 13879 - DNA, 786 bp, Zea Mays
agctgcacacagacgcaacgcaacgcattgaagtgctctcggtcgccttcctcaattcatctatccatcaagttgggttggagaccagacgctactgtacagagaagcgaagaaggcagaattgcaaagatcgctagacccaccgccactgccaaacggaggatctccatctgggcctcggaacatcagtgaacctgtggcagcatttggcccccctggatccaatggggagctcaacgtcagtgtcatcgtctccactgtgccacgagacttctcgatcgagacgttcggcagcccaaaagacgtgggggaagtggtgctcagaaggatcgcgaggacgaggcgaagcccggacatcaacgctacccttatcgacgccgccgtgagagaggacgcgggcagggtgaagtactacaagctggagttccgagtcgagagcccttctttccggcggcacaacgtcgcggtctgctgcgtgagggacggcaggctctacaccatgaacgcgcaggcaccggagtcggcgtggaaggcggtccagaaggagttcttggcaatggcggactcgttcggcttagttagcgacgcttgattgacatgcagttaggcacgcagttttggttttgtacccctgagcgttttgtccactagtttgcaaggtctcggtaacgagatgccgtggtttggtgtagagaaactaggacatgatgtttctgtttctgttatactaccttacaatcatgtctgaagttttcttctgaatccgttggatctgatcttacattg

SEQ ID NO: 13880 - DNA, 1259 bp, Zea Mays
ctattataatactaagattacaattgcaaggttggggtacctaacttccgaagctcgccgttcgggatacctcagctccaataaactcggcgggcgggcggtggagggcgagtgaagacgaggtgcttgcctcgctcggctcacaccccttttcgtctcttctctgcctttcctccgcaatcacagagcgcaagaggagagagagagagagtgaggggggagagagagggctagggttttgtgccccccacgcctcacgcatcgaatccgagccgggtcggggttgctgcgaatcgccggcggtgcttgggctgtgattccattgcaatggcatctgaaactgatgagaaagctaagatggagagtttgacatctgctgcagcctttgtggagggtggcattcaggatgcatgcaacatttgccttgaggccttctgtgagagtgacccttctgcagatcaaccaaaatggatggatcaacacatgagtcaccaaaatccaccacccaacccaatcggtatccaatcaaatactgtagacttagatgctgaagactctgttccatcaagctttacttcgaagaggccgctaggtcatgattcgtccaaggaaaaggcaaagaagcaaaggtctgttgacacatcgtccactttttctgagtacctcaggtggatgggtgaaatatctttggaacggttgtctgtgttcaaattagtagcttcaattgaggagaggaagttggagtctatgaacaaaaacgagaggcaaaaactcatcttggagaggaagaagctaaacctggagaaacttaggatggatcggcagaaattgaaggaggacaaggaagaggaggtcatgatattgggcatggatctgagtaaatgtaaccccctacttcgacaatgctacgaggctaagcaacaggagatattggcaagggttattggaaactcgtcgtcaagcaagtgaggagtgaacgaagttaatttttgttagtggttgagtaagtcatgttatttgttttcgagaaaaactgcatgtttctgaaccatatttttgttcttgttgttccaagttgtttgcaaacttgacatttttcagtatgtcatgcttgaacattgtaatgttggtcgatgctaacctatgatgatgctgaacaggatgctgtcgtttcttctggaaatagcactactgtatctagtcctaggttttttttaacagacaacaccaaactctcgattgccacaacctggaagtag

SEQ ID NO: 13881 - DNA, 1106 bp, Zea Mays
cgtcgtttggttgcgctgtttgccttcgtgcagactgcagaggctcacggggacggagagcgacgggcgcctctccttcgatttgagtcccattcaggaagagtgcttgcataggttgcagaaccggatagaggtgcagtatgatggttcaaatctagagcatcagaaagcactggtggccctttggcatgcttcttttcctggaactgaacttctaggattagtatcagaccagtggaaggagatgggatggcaagggaaagatccatctacagatttcaggggtggtggttttatatctttggagaatttactgtatttctctaagaaatatccaaaatccttccatgagctccttcgtaagcagaatggtgatagagcattgtgggaatacccctttgctgtagctggtgtaaatattacattcatgctaattcagatgcttgatcttcaagcagctaagccaacgtcattggttggagcagttttcctaaatctactcttagaaaatgatcgagcgtttgacattctttactgcataaccttcaaactgatggatcagaaatggcttgaaatgcacgccagttacatggatttcaatgtggttattaaatctacacggcgccagctcgagagggagctgttgctagaagacatccagaggatccaggacatgccatcatacatgcttctcacctgctagcaattgaacttggtcatacctaacattgcagcaaggtagtgcatctccatacactcgaagaagttgcgacgttggaaccacgtataccgagctcagtatggggggcgtgggcgatctaggttcatggactgtggatgtgctgctttaaattgtcgtgtttacctacttgacaacgaccttaacaccgaatgccttttcgtttggacgatgcgctgcatcttggagctaactttcgttgtaaacaggactacaggaggatcgtggaaacttgtctgaatatgatttgtagccatgtgtatgcataatcttgccgctttactgaaaaaaggcagattaaggctaattatagccttatagtcatttgagttgggctgggtaccttgtgtggggcccataacgaaca

SEQ ID NO: 13882 - DNA, 2888 bp, Zea Mays
tcagtccgccaccgctcgcacgtgcagagtgcaggggcaccatcacatcctcctcctgccccgatccgccagccgcgccgctcgccgcaccccgatgtgggccgccgacccctctgcagctccggccgcggccgtggtcgctgacccagatggccctgatgccgtgcggctcacctggaacacctggccacggtcaaaggtcgaggccagccgctgcgtcgtgccgctcgccgccaccatctcgcccggtcgcgtcccggacccctccgcggcgtccccgccgccgctcccttaccctccgctccgttgcaaggctccctgctccgcgctcctcaaccccttcgcgcgcgtcgacttcgccgccaagatctggatctgcccgttctgcttctcccgcaaccacttccccctgcactactctgccatctctgagtccaacgttcctgccgagctcttcccgcagtgctccaccgtcgagtacatcgtcggcggagccggcgtccctggggtgggcagctcgccccctccgcccgtatttctcttcgtcatcgacacctgcgtcatcgaggaggagctggggtacgtcaaaatggccatgcgaaaggccaccgcgcttctgccggagcacgcactcgtgggcctcgtcaccttcggcacgcaggtgcacctgcacgagctcggattctccgatctcagcaagatctacgttttccgggggaccaaggagatctccaaggaccaaatattggatcagcttgagctgtcgggcgctgggcgcccgggcttccccatgatgccacagcaaccgagcgggccgcaggtgaatgggatgcatccgtcggtcacggccggggtcaacaggttcttgctcccggtgtcagagtgcgagtgtacactcagcacgttgctggacgagttacagcctgaccaatggccagtggaggctgggaaccgtgccatccggtgcaccggtgttgctctcagcgtggctgccgggttgcttggtgcttgcatgcctgggactggtgcaatgatcattgcattgctaggtgggccatgtaccgagggccctggaatgattgtttcaaaagatttgtcagaaccagtttagatcacataaggatcttgacaaggatgcagcttcctcacttccagaaagctgttaaattttatgatggtcttgctaagcagttggtcagccaagggccatgtgttagatgtttttgcatctgctctcgatcaggttggactagctgagatgaaggttgctattgagagaacaggtggccttgttgtcttatctgaaagttttggacattcagtattcaaggattctttcaaacgcatttttgagggaggtgaacagtctctaggcctttcattcaatggtacaattgaaataaactattcgaaagatattaaagtccaaggtattattggaccatgcacatctttggagaagaaaggagccgtgtgtgctgacacaattgttggtcaaggaaatacaacagcatggaaaatgtgtgggctcgatagaaatacttctctgacagtattttttgatgtctcaccgagtgaacggtcgagccaaccaggacaccaaaatccccatttgtatatacaatttgtaacaagttaccaacacccagaaggtcaaatgagggtaagagttactacgatatgcaggaaatgggtagacggttccactaataccgaggaattagttgaaggttttgaccaggaaactgcggctgttgtgttggcaagatacatctcttttaaaatggagatggaggaagagttcgatgcaacacggtggcttgatagatctctcatacgtctttgctcaagatttggggattatcggaaggatgacccctcttcatttagtttgcattcaaatttctcattgttccctcagttcatgtttaatctgcggcgttcacaatttgttcaggttttcaataacagtccagatgagacagcttatttcaggatgttactcaatcgcgagagtatcactaactcggttgccatgatccagccttccttgatatcattttcctttgattcacctccatctccggtgtttctagatgtggcatcattagcggcagatcgtatactgctacttgatgcgtactttagtgttgtcattttccatggcatgacaattgctcagtggagaaacatgggttatcagaaccaacctgagcatgagcaatttgcacaactattacaagcaccacacgaggatgcgcagatgataataaaaggtcgatttccagttccaagactagttgtctgtgaccaacatggctcacaggcaaggtttttgttggctaagctgaatccatcggccacatataactcagctcatgatgttgctccaggttccgacatcattttcaccgatgatgttagcttcctggtcttctgtgagcacctacaaaggctggctgttcagtcttaaggacctgtatgcaatagttgtacaccctattggatagttgctgataattcattaggctcttaggttggacttgttagaaaatctcccttttttgttcctctttgcccacagttttctgaggccagactatttttcgggaaacagtcctaaaggaaggtgtaaattgccccggaggtctggtatctgcatactatttatgttgacatcgcccagcttttcttgtggaaagtcatttgggcagcttaggcaattatcctttcaggcacgtgagtttgtaaatgtgacatcgtggacacttgacatgctcttcgacatttgattttacagctaacttaaacataaaaaatagcgcaactgtaaattttttgtattatttcttaggcaccatgactaatttttttctgaaaaaaataaa

SEQ ID NO: 13883 - DNA, 268 bp, Zea Mays
ctgtgagtgtgtgtgtcaaaaaaaaaaaaagaaacagcactgtacaattcattcgttcttcctcctcggtcccatgactcgattctttcttccttcctcccagtcgcttgaatacttgatgatgccacactgctcgatccagcagtccagcgagcctcgatcgctccggcgctgtacatgctgctcgcgcgcatgcactgcagacgatggcggtgttcctctctatctcggtctcagtcaggtctctgtgtactggagcgtgctacgc

SEQ ID NO: 13884 - DNA, 109 bp, Zea Mays
ctcccttcgtctcggacggtgtatccatcccgcagccagcggagcgggtccaaacaagcagccctccgccgccgccgcctcctcctccaccacaccacctgattcgatc

SEQ ID NO: 13885 - DNA, 857 bp, Zea Mays
gaaaacttagtggcactatggccacccatataagactcagtagttgcagaactacggcatacattgagaagtctagcccatttccaactgatggaaagcagggatggtggagcactggtttctcatatggcttgtggattgcttctctagtggcttcggggttttcggttgtcccgattgcatctcagacatggaaggcttactttgggctaatgcgaagtgaaacaccaaaggatgatagcagacaagctgcttcaattttgttccctgacaaagatcagtccttgaagttgaaaaaacaccatgggcgagcagaggctcttctgttagcagcctatgggaaaggccttgtgctgccatcggggaagttcagcaaaacctcagtttgatgtctatggtgattgcagattgacttgccatttttttgggggtaaacagaggctcttctgttagcagcctatgggaaaggccttgtacgatgcctatggtgattgccgactgacttaccatttcctgtattgatggtactgcaaattttcatttcgcttaggaggccccaatcaagacattaaggttgaatctgctgtaagtttgcaaaccgtaatagagatcatagctaacccatcatttttcgtggaatgcattacagcattagacatttcccattgtgtccttagtgtggcaggctacctagatgaaatctggatgttgtaaacatgtaatgatggaaactggaatgaactggtcgtcttttcggtgaaagtggactcgtttgctcattttgctacactgacatggttgggttggcagtgttgtgttttaaggtgtttggtttgaagaatgagttagtccatcat

SEQ ID NO: 13886 - DNA, 2527 bp, Zea Mays
gctctcttttttccagataggaccactgggctgcagctggagctggactggacggcggcactgcacggtctggttcttgttcctgagcagttgagctgcgcacaccgacttcttttgcacaaggtacagcagcgcaggcgcggcggcagcccgccgctggatctctcccgaggctccggcgatggagcggtcctgctacttcccgctgcggtgggagagcacgggcgaccagtggtggtacgcgtcgccgatagactgggcggcggccgacggccactacgacatcgtccgccagctgctgcacctcgaccccaacctgctcatcaagctcacctccctccgccggatccgccgcctcgaggcgctgtgggacgacgacgcccgcttcgccgacgcggcccggaaccgcgcgtccgtcgcccgcagcctgctgctggagtgcgagtgcaggaaccaccgccccggcgccggggagaacacgctgctccgggccgggtacggcggctgggtgctctacgcggcggcgtcggccggggacgccgcgttcgtgcgggagctgctggagagggacccgctgctcgtgttcggcgagggcgagtacggcgtcacggacatgttctacgcggcggccaggggcgggagcgcggacgtgttcaggctgctgctcgaccacgccatgtcgccgaggtgctcgacgagttgccggaacggcgaagccagcgccaggcgcagctccgtgttccggcttgagatgatgagccgggccgtccacgccgcggcgaggggcgggagcgtggagatgctcagggagctgctcgacgagtccagcgtgtcgacgtatctcgacatccgtggatccaccgtgctgcatgccgccgctgggagagggcagctgcaggttgtcaagtaccttgtggcctctttcgacataatcaattcgactgataatcacgggaacacagcgctgcatgtagcggcctaccgagggcaccaacctgtcgtggaagccttggttgctgcgtctccatcaaccttgtcagttgtcaacaacgccggtgacacgtttctccactcggcagttacaggattcaggaccccaggattccgacggctcgaccgccagttggagctgatgaggtacctcatacgcgagagaaccgcggatatccagaagatcatcaacctgagaaacgacgcgggccttacagctcttcacctggctgtggttggctgcgcacacccggatctcgtcgagctactgatggccaccccgtccatcgacctgaacgctgaagacgctaatggcatgaccgcgctggcgctgctgaagcagcagctgcgctcagcgacgtccgaccggctcatcaagcagatcgtctctgccggaggggtcttgaactccagcatcctgagaacccggtcagccatcgcttctcagatcaagatgcagggcgggatcgcgagcagccccggcaccactttcaaggtatcggatgcggagatattcctgttctccggcatgggagcggcggagtctctgaggccaagctcctgctccagcaacgggaaggatgatgaccctactcacgcagacgcagactgcgccgagaaccgtggatcgtcggagaagaggctgagctccgcgagccgggccaaagaccgcctcaagatgatgctgagatggcctcgccacaaggacaagacgcccaagaagtcagaggacagcagcccgctggggtcgatcagcaggctgaacgagcacggggccgagacccctgctccgctgaggcagaagtttaccaagacgacggcgctcaacggcaagcggaccctagcggtgaagagctccaccccgagctcctcatccaccaagaagaagctcaacacgaagctcatccacggcatcatggaggccatgccacagctggcgccatctacggcgcggtccgcgtccccgacggacactttcctgaggtcctcggtatcgtccacgccgcagccgctggcgaagctgaaggacatctgcctcgacgacgagatctccatggtgacgccgcccgccggcaggctgaaggatagtgacgacgccatggaggacccctcgtgctccaacaactcgtccatggacgacggctgtggcgccgggacggcagagagcgcggcccggaagcacgggtgcggcaacgggaggctcatcaacatctgctttggcgcgcagggcctcaccgtggaggactcggcgagcgggcagcagacgagcaagatgttcaagcagcagtgcctcagggtgtcctgattgacggcgtggtgtctcgactacaacagcgtggtgtgattggtttggtgtctcgcgtgcagctatgtgtgcttgtttgctttgctccttgcacagccagcggtgaactggtgatccaatgaacttgtgcttgtgttaactgtgacgttgacgaatccacagctctttaacttcctcagtgtcaggtcgtgcattcttcaaacaaatcaccgttgatcaatcacttcctcg

SEQ ID NO: 13887 - DNA, 1564 bp, Zea Mays
cgaacaaccactggcttctctgatactgatggtactattcgtgaactgacattgaagtcgatgctcgtattagcaccaaaattatctcagcgtacaatctcaggatctctcttaaaatatctctctaagctacaggtggacgaagaacctggtatcaggacaaacacaacaattcttcttggcaatattgcaggctacatgaacgatgggacaaggaagagagtactgatcaatgcattcacagttcgtgcattacgtgataccttccctccggccagagcagctggaatcatggcactgagtgtcactagttcatactatgaaatgacagagattgcaactcgcatcctgcctaacattgttgtgctcacatttgacccaaatagtgatgtccgaacgaaggcttttcaggctaccgatcagttcttgcaaatagcaaaacaacaccatgaaaagattcaagggttctggtacttttcatggtttagatcacagcttaatacaggagacaacagtgtggctgaaagtactggtgttaagttaaagcctggaaatgcaggtttacttgggtgggccatgagttctgttacacaaaagggtaaaccttttgaccatgccccaatatctactgcaaatgccaataattctcaagcatcaacaacctcgactgccactccagacactcaggcttccacactagcgtatgcaccatccacatccacctcgcttgatcaagctgcatcagcatcagcaaggtcgtcagtagatgggtggggtgagcttgaggatggtaatatccatgaggagaatagtagcgataaagatggatgggatgatgtagacccatttgaggacaagccatccccatctcttctatccaacatacaggctgctcaaaaacgtccagtggtgcaaccaaagcaaccggttgcaaactcatctaaaccaaacccactgaaagcgccaaagtcagaagacgatcctttgtggggtcctatagctgctgcaccacctaaaagtgcagtaaaatctgcagacatcaagccatcaacatcacataatgatgaggatgacctctggggttcaatagcagcacctccaaaatcatctgggaagcctttgaagccagctgtagcgaatagtgacgacttatggggtgccatcgcagcacctccaccagcaaccaaagccagacccttagcctcgtcaggtaggggccgaggaacaaagccagcgcaaccaaaacttggtgctcaaagaataggaagaacatcttcaactggaatgtgacgtcttatgatatcaagtgttgtacaagaatgcaaagttttcctttttttttcccctgccttgcgttgagtctgtccaggatgacattctttgtaaactagtaaaaagatttatgtatatgagcacagttttgaccaatgtattagtattattttaccattgtgtattaaaatagatccagaagatttttgcacatcacagctgcaatcatcttaagtccatattattaatatattgctatgtcttattttggcgtgataagagcaacttaatg

SEQ ID NO: 13888 - DNA, 2841 bp, Zea Mays
gcgcgcgggcaggcgtgtggcgcggctgtgtcgtctgtgagtgcatgcgaggcctccggttccggctctctctctcggtgcagttcgtccgggagggggagagcgaggtggagtggtgctaagccaagccaactagatcgagtcgtcaagaaggttggagaggagagatcgagatggggaagcaggcggcggtggtgctggccgtgaacggcaagcggtacgaggccgccggcgtggacccgtcgacgacgctgctggagtacctgcgcacccagacgcccgtcaggggccccaagctcggctgcggcgaagattgctgaaacacagaagtatgcctacatggctgcaaagcaagccattattgagtatagcacagaaaatctgcagccaccaattctgacgatagaagatgcgatccaacgaaacagctacttccaagtccccccatttttagctcctaagccagttggtgattacaacaaagggatggctgaagctgatcaaaagattctatcagcggaggtaaaacttgaatcccaatactatttctacatggagacacaagtggcgctagctattcctgatgaagataactgtataaccatctattcttcgacacaaattcccgaggtcacacaaaatgtggttgcaaagtgccttggcattccatttcacaatgtccgcctcatcagcagaagagtcggaggaggctttggtggaaaggcaatgaaagcaatacatgttgcatgtgcatgtgcggttgctgcattcaagctgcggcgtccagttcggatgtacctggatcgcaagacagacatgataatggcaggcggtcggcatcctatgaaggtgaagtactctgttgggttcaagtcagatggcaagatcacagccttgcacattgatcttgggatcaatgctggaatatcaccggatgtgagcccaatgttgccacctgctatcataggtgctctcaaaaagtacaactggggcaatcttgcatttgataccaaggtctgcaagacaaatgtctcatcaaaatcagcaatgaggggtcctggagatgttcagggctctttcatcgctgaagccatcattgagcatgttgcctcagcactttcagtcgacactaacaccataaggaggaagaaccttcatgactttgagagccttgtggtgttcttcgaagatgctgcaggtgaagcttctacctacagcttagttacgatgttcgataagctggcctcctctccagaataccagcgccgagctgcaatggtggagcacttcaacagaagcaacaagtggaagaagcgtggcatttcttgtgtgccaattacatatgaggtcaatcttcggccaactccaggcaaggtgtctatcatgaatgatggttccatcgttgttgaggtcggaggggttgagataggccaagggttgtggacaaaagtgaagcagatgacggcattcggattgggacagctgtgccctgacggcggcgaaagcctcctggacaaggtccgggtcatccaggccgatacattgagcatgatccagggagggttcaccggtgggagcaccacttctgaaactagctgcgaagctgttcgacagtcgtgtgttgcgctggttgagagactgaagcccatcaaggagaatctggaagctgaggcaggcacagtggaatggagttccttgattgctcaggcaagtatggcgagtgtgaacttatcggcacatgcatactggaccccagatccaactttcagaagctatttaaactacggagctggcattagtgaggtggaaattgatgtgctgacaggagcaacaacaattctaaggagtgaccttgtctacgattgcgggcaaagcttgaaccctgctgtcgacttgggccaggtggaaggcgcattcatccaaggagtaggcttctttacaaacgaggagtacacaacaaactctgaggggttggtcatccacgatggcacatggacgtacaagatccccacagtcgacaccatcccaaagcagttgaacgttgagctgatcaacagcgcccgtgaccagaagcgtgtcctctcttccaaagcatccggcgagcctccgcttcttctagctgcctcggtgcactgcgcaatgagggaggccatcagagccgccaggaaggaattctcggtctgcactggtccagcaaactctgccatcacgttcgagatggacgtgccggcgacgatgcccatcgtcaaggagctctgcggcctggatgttgtggagaggtacctggagagcatgtccactgccggaccaacaaccactgccaaagcatagatccagcaggtgcaccgcccatggtgagagagcttaataggtctgtgtaaaacactgaacagcatgacatgccaagcttacatgtgttagctctgatgtacagaagacgaggtagcaatgggagctgtggtcttgtgaatcaggatccatgaacattagaggaaaaaataaagtaaataagtgtcgggcagacaaatgtgtggatgaaatcatgtggttttgattggattttgaagaaatttttgcaatgaatctccgttcatactcctaggtgtgtacctgcctactgggtacatgggggataggattgtaccatccagctaggtttggccttgctgtctcgttgtgaccttcaccggtagctactccctgcgcacctatttgaactagcagagcagtgttgtgaccttcaccggtagctacttactccctgcgctgcgcacctatttgaactagcagagctaaaattactaaggaagacatatcaactagtaatgctatgggctaaat

SEQ ID NO: 13889 - DNA, 607 bp, Zea Mays
cgacattctttcggcgtgtcacgacctcctgtcgcaagctcgatgctctccccatcgacacacgagccccttggaggggccccgacctagattttactgagatttctcctcatcaacctagatcttagtttctctggattttactgagcactcaacattgtgttttttggttgctgtattggacaatgctaatggagttacaactccaaggacaggaaggtttaagcaagtcaaggatggactgctttctgcagtttcggaaatgcaatactgcgctagagagatgaggaagattattaactcgctatggacaatgaatttgaatgaagtgtcgtcgagacttcaagagatggctgtgtttctcgaaggtgcagctgatcgtggtcatatggctgctgaggagcttagtcctccccgcctcaatttctaatgatttgtatgcagaaaacactatgtacataggggaactgggaggggtaactgatgccgactgggcacttgacaatggaggatatttgagatggttcaatgtaatctatggtgataatatgaaccatgtgggtggttgtagggtgcttttatctgaaacatctctatgtgattaaag

SEQ ID NO: 13890 - DNA, 2156 bp, Zea Mays
aacgaacggaggcgcgcggagcaaatcggagattcggagcccgggaccgggcgcgctccaccaccacacgtgacctcgctctcggcctcccgggcctcggcttgggcgcttggcaggctccccgctcctgcgggagaacgcaaggcaatcgatctcccgcccgcctccgatccctcctccattctcgctcgtccacggtctgccctatataacccctcgctccgttggtttcgtcgcctccgttcccccaagggagaagggtacgttggtgatatcccgcgtccccagcgaggatgctgtcattgcgctgccacgccgccgcgccggcgacccgcggcgtcgcatgtgaacacggggcgcgttcatcgtttccacctaggcagagataaataagatctgcggaatcaagaagctctgtccaaggaggaagccagcggcacggcagtgccctcggcggtgatgaagtacgtctccgggccgtacttcgaaccggacttcgacccgctactcgaccgcttcggcaccccaggggtcgtcgtcgacaatgagacacgcgaggactgcacgctcgtcaaggttgacagcgtgaaccgggacggcgtgctgctggagatggtgcagctgctcaccgatctcgacctcgtcatctccaagtcgtacatctcctccgacggcggctggctcatggatgtgttccatgtgacggaccagatcgggcgcaagctgacggacccgtcgctgcccgagttcatccagcgcgcgctcgtgccgacccaccggccgggcaacggcccgtctccgaggttcaccacgtgcctgggcaacgtggtcgggccgggcggccccgacgtttcgggctgcgccgcgctcgagttcacggtgcacgaccgcccggggctcctgtcctccatcacgtccgtgctggccgacaacgggtgccacgtcgcgtccgggcaggcgtggacgcacaacggccgcgcggctggggtgctgtacgtgacggacaccgcgggcggcgccgcgctgctcccgggccggtgcgcgcgcatcgagcggctggtgaacgccgtggtggacgcgcgcgagaacgtgaccggggagcgccactgggtgcgcgtgtcggagcccgcgcagggccgcgtgcacacggagcgccgcctgcaccaactcatgcacgacgacagggactacgagtccggcccggccccgacccccgtcgacgaggacctcttcagcgtgggcgaaaaggcggcgaccgcgcggacggcccgccgcgccgtgacgcgggtgtccatcgacagctgggaggagcggggctacgccgtcgtcaagatgacgagcagggaccgccccaggctgctcttcgacacggtgtgcgcgctcaccgacatgcagtacgtcgtcttccacgctaccgtcggatcccaggggcctcttgccattcaggagtattacatccggcacaaggacgggcgcacggtcgacaacagcgccgagaggcagaaggtctcccggtgcctcgtggccgcggtggagcggagggccactcatggcgtcagggtggaggtgcgcgccgccgaccggtcgggcttgctatcggatttcaccagggtgctgcgggagcacggcctgtcgctgctgagagttgagctcaagaggcacaaggacgaggccttcggcatattttacctcgtcacggacaccggaggcgaggtgcgcgctgagtcgttgcgcgccgtgcaggcgagggtcgccgagatggatatctcgctcgacgttgtgaaggaggcccctggctggccgccggtgaggaagactagcgtaccagccccgcccgccgccgggtctcagcctcaggagaggcccagaccttccctggggagcctcctatggtcacaccttgggaagctctcgaataacttcaacaacatcaggtcttgatacctgttcgcagaatgcacctgttgttctgcatagacgcttccattggtgcgtcggttccaataacttcctggacctcgagtaccaagaatttatgtcaggaagcagtacaaaactgtacataaagtgtatcagataaaagtaagcagagtgacgttcaatttatcaagaacttaggtgtgtttggttcgagaaataactttatctaaaatgag

SEQ ID NO: 13891 - DNA, 1459 bp, Zea Mays
gttttaccagaaatgttgttcgttgtattttggtgaaatgggtttgataacagctactgatagggatatcatcttagaggggcttgatcagatagagaggctgatccaagaaggcaaatttgagtggaggaaggaccgggaggatgtgcatatgaacattgaagcggctctaattgaaagggttggtgagccagccaagaagttgcatactgctaggagccgcaatgaccaaattgtgacggatctaaggctatggtgccgtgatgctattgacaggattttgattcgtatcaagcagcttcaggtgtctctggttattttggcttcaaaatatgttgatttaatagtcccaggttatacccatctgcaaagggcgcagcctgttctgctgccacatcttctcttatcatatgttgaacagttggagcgtgatgctggtcggctggtcaactgcagggagcgaatgaatttctgtcctcttggtgcttgtgctttggctggaactggacttcccattgataggtttcaaactgctaaagatttgaaatttacagctccaatgaagaatagcattgatgcagtatcagaccgtgattttgtacttgagtttcttgctgccaattcgattgctgctgtccatctttcgcgaattggtgaagaatgggttctttgggcatcagaggaatttgggtttctgataccaagtgacaaagtttcaactggaagcagcattatgccccagaagaaaaatccagacccaatggagcttgttcgtgggaaatctgctagggttgttggagacctcatgactgttctaaccctctgtaaaggccttccacaggcctacaaccgtgaccttcaggaagacaaggaacccttgtttgatagtgtgaaagctgtattaggaatgcttgaagtatgcacagagtttgctcaaaatatctcttttaattcaaaaagaatacaaagttcacttccagctggttatctggatgcaacgacgctggcggattatctcgtgaagaagggagtccctttcagaacttctcacgagatagttggaaggtctgttgctctatgcgtctccaagaactgtcagctagctgagcttgaattggctgacctaaaatctgtccatcctgtatttgaggatgacgtctatgaatacctgggggttgaaaacgctgtaaacaagttcatatcctatggctctactggttcagaacaagtgaaaaagcagcttgaggattggcgcatccagctcggggtgagctcataagggttggcatggttcaagaaataagctcgcaaattagtgcttgcgatttttgaaggtgtatgttgacgtcgtgaactttttctgtgtgtttgttcatacatttcgaaaactggaatgaatgatgtaaacatgttggacaccttgagcctcttttatatattattattgcactgtgtttta

SEQ ID NO: 13892 - DNA, 2666 bp, Zea Mays
ctagtagcacggagacacctgttctcggcaccggtgcacgccggatcttctatcgtcggatacaccgtgagtaggcgtgatggtgcttgataccccgttttcgtgcagcttgttgctaattcgttttagtttgagggatcaagaaccaccttgttctttctttctttcttttttggactatgatgaatcattgcaaatctcttgaatacatttttcactataaaatactgccttgcctttgagctccttggttcacgtgcaatgtttctttgccctccgattttgcaggacctcgagttattaagttgggcgaggagaggtggttcattccagcagggatccttctcgtgagcccagtcgatctgaccgtccttggtatctggggggggttgttctgtactctctctttaatttggacctccaaagtagtgctgggatgtatcgcctttgggattttctgggtgatggccgtcttccccaccgtcccgttcatgcctgttgggcggacggctgggtccctccttggtgctatgctaatggtcctgttccgcgtcatctccccggaggacgcgtacgccgcgattgacctcccgatcatcggcctgctcttcgggacaatggtcgtcagcatcttccttgagagggctgacatgtttaagtacctcgggaacctgctctcgtggaagagcagaggcagcaaggacctgctcttccgagtctgcatcgtgtccgcgtttgccagcgcgcttttcaccaatgacacatgctgtgttgtcctcaccgagttcatcctcaaggttgctaggcaaaacaacctgccaccacagcctttccttctggcccttgccactagttcgaacatcggctctgctgccacgccgatcggcaaccctcagaaccttgtcatagctgtcgagagtgggatctcatttggccagttcttgctgggagttttcccagctatgatcgttggggttctcacaaacgctgctatcctccttttgtacttctggaaatacttgtcggtggagaaggatcaggagggtgggcagcccacaggaccagaggtggttgccgacgatgaggttacttcccatcggttcacaccggctagaatgtcacatgtttcttctctgaatccagatgacatggattgcgtaagcgaaccgatcatcaggagcaacagtgtcagtactactgggaatgagaacctgagaagcagaagcatcaattctgaggctgacattcagcttgcgatcaagtctctgcgggcatcaagcatgtcgcatgagatggtagaggtctcgacggttcctgatcggagagatgaaggtgcatcctcaaggaagttcacaaggactgctagccagcaaaggagcgtgataatagaggatttagcaccctccccagagattaatggggaaaaggagaaagaaactgaagttgcagagaagagatggaaagtacttgtgtggaagactgctgtttatcttatcactctcggtatgctcattgcacttctaatgggactgaacatgtcctggactgcaatcactgcagctcttgttcttctggcactcgattttacggacgcacaagcttgtcttgagaaggtgtcatattcactgctgatctttttctgcgggatgtttatcactgttgatggcttcaacaaaacgggcataccgaacacactatgggagttagtggaaccatattcacgaatcgatagtgcgaaaggtgttgcacttcttgccgtggtgattcttatcctttcaaacgtggcctctaatgttcctacagtcctattgctcggtacaagagtggctgcatcagcggcttcgatttctcatggttcagagaggaaagcctggctcatccttgcatgggtcagcaccgtggctgggaacctcaccctcctaggctctgcggcgaatctgattgtctgcgagcaggccaggcgggcccagttcttcggctacaacctcaccttctggagccacctccgattcggggtcccgtcgaccatcatcgtcacggcgattggtttgctcatcgtcatcagttactgaaacagctgaaggcagaagagcgtagtgtaagagaagcagaatggataaaaatccttccaataagaagtacatgtaaattaggcttgccctataactcaagtgtgtatcggtacgttatgtctccgtctgtgctcttgctcgtgagcaagcagcacatggctgaccgtgtagcttgcatttccattgcataataggcttatgaagaatgctttggtaatatgattttacagtctgacaaggattgtgaagcagaggcagtgtaccatcaagataatacttctggaagcatataaaaaaatttcgtatatttggatttcaaatccagtctgcttcagactggaaattcatattatcttctggaatcgtgctttattgtcagaaacatgggctaaaattggaaagtccgtcatttattgggcttgcaatgggacaaccttttgggtctgttatatatcactataaccagtgacaactttggttcgcaaactcaaaccagtttctaatctttattttatgatttttatataaagttcttaataggtcctcttgctattttcaatctaaattctaaatactaaaaaaagtttctgtgaa

SEQ ID NO: 13893 - DNA, 68 bp, Zea Mays
cttcaacgagctcttgctcagcaatttccacctgctgaacacctgggtcctcgatcacttgctcgtct

SEQ ID NO: 13894 - DNA, 1753 bp, Zea Mays
gccccagccaccgcaggcgggtcccacacagtcgcgtcgcgtcgcgtcgcgtcatcttttcagcgcttgtccactgcgggcctgcggcattcctttccttctcctcgaaggcgaagcaaagctaccaacgcatacaagagtgagagcagggagcacgagcgctctgagtgagtggaagacgagaggagttggagttccccagggctagggtttcattcgccacccgcgccgcccttcccttccccagcatccgtccgccatggtgaggaagaaaagaactggccctggagagagttctggggagtcttctggagcgcctggtcatggctcctcacagcgtcctcaggcaacacaacagggtacccgtggtggagggcaacaccagggccgtggtggatatctgggccctggagtgccgccttcacagcacccaggtggtggcccacctgagtatcatcaaccgcttgactaccagggacgtggtggatatcagggccgtggtggaccaccttcacagcatcctggtggtgggacaccccctgggtctcaaccgcgtggctaccaggggcacggtggataccagggccgtggcgggccaccttcacagtatcctggtggtgggacaccccctgggtctcaaccacgtgactaccacggacgtggtggtccgcgtcccagagggggaatgccacagtcataccgtggcgggcatgtgggaggtagtgttgtaccaagtgttccttcaggtccatctaggccagttcccgagctgcaccaagccccagatgtccaacatcaagcccctgtggtggcaacaccatcttcgccaggagctggctcgtcctcgcagcctgggaaggctgaggtgagcgctggacaagtccagcaacagttccagcagcttgcgattcgtaaccaaagcttagccagccaagctggtcagatggcaccagcgtcaagcaaatctgttaggttcccattgcgccctggcaagggtacgcatgggtccaggtgcattgtgaaggcaaatcatttctttgctgagctgcctaataaagaccttcaccaatacgatgtatcaataacacctgaggttacttcacgcggcgtcaatcgtgctgtcatggcagagctagtaaaactttacagacactcccatttggatgggcgtctgcctgcatatgatggaaggaagagtctttatacagctggagcgttgccatttgcttcgaagacattcgaaattactctgcaagatgaggaagacagtcttggtggaggccaaaggcgccagagggtatttcgggtgaccatcaaatttgctgctcgcgctgatctccaccatctggctatgtttcttgctgggaggcagccagatgcccctcaagaggctcttcaagtacttgacatcgtgctacgtgaaatgcctactgccaagtattgtcctgttggtagatcattttattctcccaagttagggagacctcagcaacttggtgaagatatgtcctctactgcattttttgaggccctccctgtaattgattttgtttctcagcttcttaatagagatatctcagttagaccattgtctgattctgatcgcgtgaagattaaaaaagccctacgaggtgtgaaagtggaggtcacacaccgtggaaacatgcgtaggaaatatcggatatctggccttactccacaagcaacaagggagttatcgtatgtgcatgtttcttagtttatatcagttgat

SEQ ID NO: 13895 - DNA, 1574 bp, Zea Mays
ggttgagattccaagtgaccaaaggtcgacagaagcctctcatttctaaacagttatgtgcagcaagccttggaaaatggtgcgtccccttacattccagagagtgaacgctctggtgttataagtgtcggcagctacagaagccaagaacaacaggaaacatctgcccatactcttagatttgaggcctatgagatgcctaaaccttcgttgccactagcaacttcacaaaccagcatgtccacaccacctactgatctggttccagttccagaggcaggctactacaaggaagacaatcaaacatcaatgtctcaaccaccaagtgatgcaatttctggtgagtttggtgtcaaacttcgccttgatggtgttcaaaagaaatggggaaggccaacatattcttcttctacaccctcaagctcgatctctagtcaaccaacacccaatggggcctctcattctgatgggggagggtcaagttcgcaaccacgggagtcatcatacggttctaagagacagcagggcacggaagtttcagcagaaaagcaacggctggctgcttcactttttggttcagcagcagctaaagctgataggaaagcacaagcttctcgaaagacagcaaaggacagtccctcaactgagaaagtggctaccactaatgtgactgcccagcctgttaaggagcaagtaatccctgctgcaccaccgcctgatctgctggatctgggtgatgagcctgtttcatcgagtccaccgtcggctgaccctttctcacagctagaggggctccttggaccagcatcggctgccccggtgctttctggaactccggctaccagcacttccaaagcaccaggccttctgtcaatcttctcagatgatgtaccaaccggagtgactagtgtgtccaccgatcccactctaggtgatgttaattcgatgggctcccgcaaaggagcagctgcagtggcttcaatgaagggcccgagcctccaagatgccttgcaaaaggatgcggctgcacgacaagtaggagtgacaccaacagtgaacaaccccaatcttttcaaggacttgctaggctgaaggggacagtagggcacaccatatgctctgtgtggcctctttgggtacgtggagttcgtctccgacatggttcgatcaccgaaacgacgccgaactcgctgtttgatcagcgtaggctggggttttagggttacaagggctaatatttgtttgagagtcacaagacacgacctatctccttccaattgtggtttgtggagatttgtggatggttgcgggtattttttttcctttacgctcttgtaattttgtcctgagactggtgtacatgtgtctacatgatgtgtaatttgtacatgaagaccatggtccgtccagaagcgtatgccgtcgtctttttgttcattcatgtaggaggggcatgctcatctgtgctttcagagtttcccatatatgttgattaatataacaattgatgtcattctctggaacttgggtgaaataaaaaaaatggtacgtgcgcagcggtgcagggtttgttc

SEQ ID NO: 13896 - DNA, 1423 bp, Zea Mays
ctcctccgctccgcctcctgtttatagtcgcctgctgtcgcggcccctttttccttccaccacccaccggccaccaccctccgcgcttgcctagttgccttgactgcctgcctcgtcttaccaccaagctaagctagcgcgttccttccttttttcctccctcgcttcctgttgctcggtccatggaggtggcggcggccgcgacggcgggcgcgggggttgtggagctgcagctcgacctactcgaggcggcggcgccgacggagcgagaggccaagaggcgccgggtgcacccggttccagcgggcccaccggccggggcagcagcgccgggacgccgcagctgcagccgcaggcgccgcgccgtgcagcgtctcttccaggcctgccgccacgtcttccggggccccggcaccgtgcccagtcccggcgaggtccagctgctccgccacatgctcggatgcggccggaggacgtgggcctgagcccggacctgagcttcttcagggctcgagacgccacacgtggcggtggcaccccgaccataacgcacacgacgatatacaaatgcccgaatttctcgatggtcatcctcttcctgccgcgaaacgcggtgatcccgctccacaaccaccctgggatgacggtgttcagcaagctgctcctggggtcgatgcacgtcaagtcgtacgactggctcaacactgctgaccccgatccttcttccgccacgagcaccaccagctcttcgtcctccgatggcccatgcctgaggctggcagaactggtggtggacgacgtcttcacggcgccgtgcgacacctccgtgctgtacccgacggcgggagggaacatgcaccggttcaccgccatggcgccctgcgcgatcctcgacgtcctcgggcccccctactccatagaggaggacagggactgcacgtactacgcggaattaccgtacgcacaccactcgctggtggctgcgggcgaggacgtggagcggggccagggccaaggccatctggcgtggcttgaggagatcgacatgccgagagagctcaagatgtgcagcgtccactatggtggaccgccgatctccgacgagtgacgtcgccggccgtctccctcactggttgtactatgtctaactgatcgcggcagagccgtgccgccgccgttgtgtatagcaggcagcagcaagccataggctgtagttacacgaagtcccgatcgattacaatgtttcttgctggcctgcatcgttgttctctagatgccctttctttcttgttatttttgtttctactactactacaagtagacgatgttttgtcctgatgatgaatgatacagataagtcatatatatccacatatttcatttttgtcgtttgggctattctggtcatagtttgtgcgtgttg

SEQ ID NO: 13897 - DNA, 1481 bp, Zea Mays
ttttttttttttagatgaaaagatgactgctactgataataaaaattatgttgatgatgggggaaatgtgttaccatcaaaattagaggacatcacagagagtgactggacaaggttagagaattacgcaagtaccggagaaaaggttgaggtggagctgataaattgcagtgcgaaggggtttgttgtgtcacttgactcactgataggtttcttaccgtaccgtaatcttgctacaaagtggaaattcttagcctttgagacttggttaagaaggaagggtggcgatccttccttgtacaagcagagtttgggattagaggatagttttgaggttaatgacacaaacctagaaccagaatctagctcagtttccaaaatagctggtgaggaccaagaatctctgtcatctaagccgaagtttgaagatcttattcgagcatacaaccaagaaaaatccaagtttttatcttcatttattggtcaaagactccgagtatcagttgtcctggccgacagaaattccaagcggatatttttctctatgaagccaaaagagagcgaagaaatgatccagaaaaagaaaaacctgatggctaggctcaacgttggagatattattcagtgcactatcaagagatttgtttactttgggatatttgttgaggttgaaggtgttcctgcgttgattcagcagtgggaagtgtcgtgggatgacaccttagatccagcagtttcttacaaaattggtcaggttgtggatgctaaagttatccaacttgactataataatatccgcatatttttgtcacttaaagatgtaaagccaaatccatccgtaggtgctttggaatcagtcgttggtgaggatttatcgtttggtggagctcttgaacccgtgcaagcagatttcgagtggcccgaggtagacgccctcatggaagagatgcggagaacagagggtgtaagagatgtctataaaggacggttcttccaaagcccagggttagctccgacgtttcaggtctacatggcacctgtggtcggtccgaaatacaagctcctggcgcggtatgggaacagcgtccaggaggtgatggtggagacggcacttggcaaagaagagttgaaggaggcagtcctgatgtgcactaatagggttagctaggatctccatgacgcgcatttgctgggaccggtttctcgggttgctagctggattggaacagcatacggattatatatccggttaaaagttactgaaatgcagaaaaagaagaacgactctattaatcgagtttaggattgccaatttgattgaaaattctctgttgtggattggttgaggaaagaaacgaaggtggtctgcccccttctcttgtcatatcacgactctgcatgtggctcatactgcggaggactaggagttctttccacttattgaggattatatgattatatcttaaaaaaagatcaatagg

SEQ ID NO: 13898 - DNA, 74 bp, Zea Mays
gatcaccccgtcgacaccatcctcggtgacattcataaggggataaccactagatctcgtgttgcatatttttg

SEQ ID NO: 13899 - DNA, 3593 bp, Zea Mays
cgaggctgcgtctctcgaagtccaaaacgccccgccctggaaccctaaccctacctttcctctcccgccaccgcccgccccaatggcgaagccgatgaagtacgacgatgaggaggagatctcgtcctccgccgaggaggaggaccagtccgacgccgccggctccgtatctggcgaggaaggggatgacgacgacgaggatgctgcggcgccgcccgcggaggaagctgagggcgaggggcagcaggaggaggaggtcgacgaggaagagatcgaagccgtcactaccggcgctggagctgaggacgaggaggacgccggtgccgttaccgccgctgaaggcgacgacgagtcccagtccaccgaggacgacgagcccgtcgcgagggacaaggacgatgacgacgagactgatgcagtggttgggaagcgagagaaagcaaggctaaaagaactccagaagatgaagaaacataaaatccaagaaatattagatactcaaaatgccgccattgatgctgacatgaacaataaagggaagggacggttgaagtaccttcttcagcagacagaaatatttgctcactttgcaaaaggaagtcagtccaacgagaaaaagccacgcgggaggggacgccatgcatcaaagatgactgaagaagaggaagatgaagaatacctcaaagaggaagaagatgcccttgctggtgcagggggaacacgtttagtttcacagccttcatgcatcaagggaaagatgcgtgattatcaattagctggacttaattggcttatacgattgtatgagaatggtatcaatgggatattagctgatgagatgggacttgggaaaacacttcaaactatttcattgctgggctatctgcatgagttcagaggtataactggtcctcacatggtggttgcgccgaagtccacccttggcaactggatgaaggaaatccaacgtttttgccctatcctacgtgctgtgaagttcttgggcaatccagaagagcggaaccatataagggacgatttgctacagcctggaaaatttgatgtgtgcgtgactagttttgaaatggcaatcaaagaaaaatctgcgttgaggcgcttcagttggcgctacataattattgatgaagctcaccggataaaaaatgagaattctcttctatcgaagactatgaggatttacaacactaattatcgtctcctcatcacaggcactccactccagaataatctccatgagctctgggctctcctcaatttcttgctccctgaaatatttagctctgcggaaacctttgatgaatggtttcaaatttctggggaaaatgatcaacaggaggtggtccagcagcttcataaggttcttcgcccatttcttcttaggaggctcaagtctgatgtagaaaagggtctacctccgaagaaggaaaccatacttaaagttggaatgtctcagatgcaaaagcagtactatcgcgctctgcttcagaaggatttggaggttattaatgccggtggtgaacgcaagcgattgcttaacattgccatgcagctgcgcaagtgctgcaaccatccatatttgttccaaggagctgaacctggcccaccctacacaactggtgaacatctagttgagaatgcaggaaaaatggttctactagataaattgctgcccaagctaaaggagcgtgattccagagtcctaattttttcacagatgaccaggcttttggatatcttggaagattatcttatgtatagaggttatcagtattgtcgaattgacggaaatacaggtggagaagatcgtgatgcatccattgaagccttcaataagccaggaagtgaaaagtttgttttcttactttcaactagggcaggtggccttggtatcaacttggccactgctgatgttgtggttctttatgacagcgattggaatccacaagctgatctgcaagctcaggaccgtgcacataggataggtcaaaagaaagaagttcaagtgttccgcttttgcactgagataatgcaaacgaaattacagtacactatcgaggaaaaggtgattgagagagcatataagaagctagcattggatgctttagttattcagcaaggacgattggcagagcagaaaactgtcaataaggatgaccttctgcaaatggtgcggtttggtgctgaaatggttttcagttctaaggacagcacaataactgatgaggacattgaccgtattatagctaaaggagaggagacaacagctgaacttgatgcaaaaatgaaaaagttcacagaggacgccattaaatttaagatggatgataatgccgaactgtatgattttgatgatgagaaggatgaaaacaaggttgatttcaagaaacttgttagtgataactggatcgagccacctagaagagaaaggaagagaaactactctgagtctgattactttaagcaagcgcttcgccaaggtgcaccagcgaagcctagggagccaaggattccaagaatgccgcacttgcatgatttccagtttttcaataaccaaaggctaaatgaattgtacgaaaaggaagtgcggtacctcatgcaagcaaaccagaagaaagataccattgatggtgaagacgaagatcaattggagcctttaacagcagaggagcaggaagagaaggagcagttattagaagagggttttgcatcatggacaaggagagacttcaacacatttattcgtgcatgtgagaaatatggtcgcaatgatattaaaagtatatcctctgaaatggagggtaagacagaagaggaagttcaacgctatgctaaagttttcaaggagagatacaaggagctgactgattatgatagaattataaaaaatattgaaaggggggaagcaagaatatcccgcaaggatgagattatgaaggctattgggaagaagttagaccgctacaagaacccatggttagagttgaaaattcaatatggccaaaataaagggaagttctataatgaggaatgtgaccgctttatgtccagaactacccaagagttggctaggcggtgtgatactcttatcagactggttgaaaaggaaaatcaagaatatgatgagcaagagaggcaggcaaggaaggagaaaaggcttgctaagaatacgactccaacaaagagagcagcactaaggaattcagagggtgagagtgctccgttgagctcattcaagaggcgacggcagtctcttatggacgattatgtgggctcgggaaggcgaaagagagggtgatgtgatgtttgacatcctgcctttggagctctcagcgagatgcagtctctgcaatgctttaagcccgtacgtgctgtgcttagtttcttgtgcacgtgagttgaatgcctcaagggctggtgactttgtagttgctgtagattcggacttcgcaattgcaactgttgctacacttttgattcactttttcatcgtggccctaacactcattccaaattataagattagagattttaacttaacactagagttcgatcaaatttatgcaataaaataa

SEQ ID NO: 13900 - DNA, 2896 bp, Zea Mays
ttgtttggcgccttaagctttcatgaggccagccaaactttacaagctgaaacatctaacaaaggttgaggttatttccaatgatcccagtggttgtacatttgttctgggatttgataaccttaggagtcagagtgttgccccaccacaatggacgatgcgtaacattgatgacagaaatcgtctacttttttgtattctgaatatgtgcaaggagatactcagttatcttccaaaagttgttggaattgatattgtggagctagctctttgggcaaaggaaaacacactgaccatagataatcaagtgagtacccaagatggtcaagaaacatcagttgctactcaaaccgagaggaaagtaacagtaactgttgaaaatgatctcgtgtcccaagcaaaagaggaggaagaagacatggaggcacttcttgacacgtatgttatgggaataggtgaagcagatgcattctctgagagattgaagcaggagcttgtggctttggaggctgcaaatgtatatcaattactggaaagcgagcctttaatagaagaggtcttgcagggtctggatgctgctagtgcaactgtagatgatatggatgagtggctacggattttcaatctgaagctgaggcacatgagagaagatattgcatcgattgaatcacgtaacaatggcttggagatgcagtctgtaaataacaaagggcttatggaagagctagataaattgcttgagcgtctgcggattccacaggagtttgcagcatcattaactggaggctcatttgaagagtcacggatgctgaaaaatgttgaggcatgtgaatggttgacaggggccattcgcagtcttgaagttcctaatttggacccatgctatgtcaacatgcgcgctgttagagagaaaaaggcagagctggagaaactgaaaacaacttttgttcgacgagcatcagagtttttgcggaactacttctccagtttggtagacttcatgatcagtgacaaaagctacttttcacagcgtggacaattgaagcggcctgatcatgcagaccttaggtataaatgcaggacatatgcccgacttctgcagcacttaaagagtctggacaagagctgcttaggtcccttaaggaaggcatactgtcattcccttaatttactactacgacgagaggcacgcgaatttgccaatgaacttcgtgcaagtacaaaagcaccgaagaatcctgctgtttggcttgaaggttctggcggctctggtcataatggaagcagttctgatacttcacaggtctcagatgcatactcaaagatgcttacaatatttatcccgcttcttgtggacgagagttccttttttgcacattttatgtgctttgaagtacctgcacttgttccagctggttctcctaatgctaataagagcaaatccggaggaaatgacccggatgatgatctgggtcttatggatccagatggcaacgatctgaaacctgacagtacctctgctgaactgggtacattgaatgaagctcttcaagaattactcgatggaatccaggaagacttctatgcggtcgtagattgggcttataaaattgaccccttgcgttgcatctcaatgcatgggattacagagcgttacctttctggacagaaagctgatgctgcaggatttgttcgcaaactacttgatgacttggaatcaagaatatcagtacagttcagccggtttattgatgaagcatgccatcaaattgagcgtaacgaaagaaatgtgcggcaaactggaattctagcctacattccaagatttgctgtccttgcatcacgtatggaacaatatatccaaggacaatccagggatttaattgataaagcatacacaaagctagttagcacaatgttcgcaactttggagaaaattgcacagagtgatcctaaaactgctgatattgtgttgattgagaattatgctgctttccagaacagtctttatgacttggctaatgttgtgccaacgcttgcaaagttctaccatcaagccagtgaatcatatgaactagcttgcactcgccatatcagctcactcatttatctgcaatttgagaggttatttcaattcaaccggaaagttgacgaattgacttacactattgctgctgaggagataccgtttcagctgggattatcaaaaactgacctaaggagggtactgaaatccagcttatctgggattgataagtcaattagcgccatgtacaggaggttgcaaaagacactgacctccgacgagttgtttccttcgctgtgggacaagtgcaagaaggagtttttggacaaatacgagagctttgttcagatggtaacacggatatatgggaatgagccgatcatgtcagtcaacgaaatgaaagacgtccttgctggtttttagatacaagtacacagcaccatgtatgatttcagagaaatagctatgtattccattcattccattgaattctgcacccacttgcgttactgtgttaggcgccctttttgggttatgtgtgtgtatgtggatgtcctctgtatagaagtgaacgcggcatgcttcccctaatgatgttcctgtgtcgcatcgagccgtcagtgacaatgcaaactgcaaacccggagtaccggaaggaacatgttcatgtttatgacgtcatttgtccaattgccgttccattcacggtcaagaaggtcatgtcttgccaagttcgctttgtttcctggtctgaggtctcattgctactttcggttgttcagctgaagactgaagtgcaagctatcacgtgtcgggctccagttcgttagtgtggccccatatgttgcgggcttcccagcttagaaacat

SEQ ID NO: 13901 - DNA, 1991 bp, Zea Mays
aaggacgatctgcaatacaatagatcgatcatcagccgcttaagaggagaagctccccttatggttttgtgttctcacaatttatggatctgcatgtggtttgtagaatcttccagaagcatgggtctggaccacagaacggtgcgcagtatggtgcaccatacatggaagaggaatgggaagaggatgatgatgctattgagaatggttctacccacgatgcatctggtcaaattgctgcaaccacctgtgctgtagatgaggagtcaaatgaggacgatgagaatgcatattgtgaaacaaacagacctgctcgagtagaaccatctcatctgccttcggtccatgaaatgctcaatccaccagagatggctcctctccaaggtcaagattctaaagagacaagcgatggaagttgttctgatgttgctatttctctggaagagattttgcaggaacctttgtcaaatattagtgtggagaatatgcatagacttgaagggcagaatgccactgatgataacatcagtgttgataacttgttatcagcatatcccacgaaagataatggctacgtaggccagtataacactatgaatgggagtgctccagcagatgaagctcacgcacgctggcctttgagaacatatagtaatcagaattatgtcaatggccctcttgctgatgagttctttgacacagggaatgataccaatggggttgcatattccaggcagcagcaagctgatggcttcccagcacctcgccaagttgatgaaagtatggtattttatgatgccccatctgattacaacttggtggatggaaaagatgacttcgtatatctgaacgacattctgaatgagccacttggaaatgaatcgctctttgatggagatgatatgatggcttactttgatgccacagagaatgatttcaagtatgacattttgggctctggtcagggtttggattatccacttgcagacatgccgttgaactttgcccaaaagagtgacaaggaagacaagtttacattcgaagggatctctgaggttccggaagcaaatcctcagtacggtgcatcctcatctggttcacatgaagatctgtatactgatactgaatttctaggtgtaccaacagatgacactgctgataaaacttacggaaatcgcctggccagcatgttaggctctatcccagctccacctgcaatggcctcagaattcccgccgtcaacagggaaatctgctgggatgctttcggctgtcagctcgagctcaattcgttttactgctggtatcatccaacttgatggcctcactttcagcagcggctccggtcagtggcccttgcagaagaatggagacttgagtttgcttgtctcttttgctgtggagggcgacgtggcatccaagctccctgttggtcttgggcgtgctactcggattagcaccgttcccatggtgctgcgcagtggtttttaccttttctttatgtcggccatgattctcttgtttagctacaaagtagggtcgtgtatctacagcaggtaagttgaagttgatggcgcctcttgtccggccagacctgtgggctgtttattttagttcaacacgtggatcattccctcagtgatgggggtatagcagtcgttcgacaccttttttacacatttaccattttgacctgtcaaaacatacagcaataaactttcgaactggtggtggtgatcatgccgggaccatgttctcgtcagggaaagcagtgcactgtgaatttggtgctctgctcttattattgtaaccaaaattaactgcaatatgttatattctgtcctgtagaggaaaagctattttatctggttattgtaaccaagattataccttggtgggttgctgtcaaagaaacaatggaaatatgattattatcaggccgtgttatttgctccaggccagataattaccatttgatcaacataaacctca

SEQ ID NO: 13902 - DNA, 140 bp, Zea Mays
cttggattgtgattggtgttaagcgccattgggcacgaccttcttataagtctaagtacttcttctatacttcttattgaggatggtcacctaagctagcatatatttcaaaactataaataatttataatagttcaaag

SEQ ID NO: 13903 - DNA, 1128 bp, Zea Mays
gccacgccacgcacttggtccacacgtcgtattcggatgaagcatgagagagaagagcaagaaagacttcgtcacgtcaggtcgacggcgaaagacgcggaggttggtgaaggagtgaaggaagaaagagaacgaaaggcggcctctcactcgcagtcgcagtagcaggcctttggtttcacttgcgtatcctctgtatgcctctgttagagcaattgaaacaaaatctgctgtggatgatcagcaatggctcacgtactgggtgctgtactcatttatcactctattcgagctcacctttgctccggtactcgaatggcttcctttctggtcttatgcaaagctgttcttcaattgctggttagtattgccacagttcaatggagctgcacatgtatatgagcattttgtgaggccaatgattgtaaatcagcaagttgtaaacatctggtatattccaaagaaggatgaatcaagtagacctgatgatgtaatttcagctgcacagaggtacattgagcaaaatggatcaaaagcgtttgagaatcttgttaacaagtttaagagttcgaacccaaggcgctcaattctggaggaggtagaggttgaaaggagggccaggattcaactagaatctgaagcgagggaagtgaaccctttcttcaatccagaatatcagtactaggcaaccattttcccttcacttgccaggaatgtgctaggatcggtttggaggaagatgtctggatattaggattgcgttttgcacctactgaatcgatgatattgtgtagatggacaaccataattgttgtagatatgttgtggcgatggaactcatgtaatggtcatgtcgcgaatgtttcatgctgctggaaattatgtattcacactggactctagttatgtgcctcactagtttcttgaaggtagttgttgaactaggtatttcttcgtctcttgtctgatataggtgtaaaccatgtggcactgccatgggaggttgactgtccgaatgctacgcttttattaaagctgccagaagcactgaccagtgcactcgactcaagtttggatgaggctgtccgagcagtctgcctaccgtctaccgagcctcacgctcagtag

SEQ ID NO: 13904 - DNA, 1158 bp, Zea Mays
agcccatgtatcaaaccctaggtgtcatcgagtccagcgtcaacaggcaacaggtgtcccagccgcgcgccgcacgccctgttgccttctctcgacttcgagagcaccgccgcacggcataacgctcgcacggccgagccccgacattctaccgcactccctccgctgcacccctttccattctaccgccggcgacgccaaagttcttgggcctcctcatcggcgacttttccgccggcgacaggaaacaacgaaccaaaccacttctctgtcgagaggcgtcgcgctcctctcttcgccctctgctgttatttttcttaacccggctttctctcgattgctgcgtaaagttgaagatgaggaagctcaagttccatgagcagaagctcctcaagaggcacaatttcttggagtacaagagggagggcggccaccgcgaggcgctcgtcacacagcgctaccgcctcgtggagagggacgactacaagaagtacaatgggatatgcttaatggtgcaaaagctcgttaacatcataaagcagatggacccaagagaccctttcagaatccagatgacagacttgattctcgataagctgtataatatgggtgtaatttcaacaaaagagagcttgttaaagtgtgagaaactttcagtgagcgccttctgcaggcggagacttgcaacagttatggtgaagctcaagtttgcagagcaccttaaggaggctgtgacgtacatcgaacaggggcacgtgcgtgtcggtccagatgcagtcacggacccagcctttcttgtgaccagaaacatggaggacttcatcacctgggtggattcctcaaagatcaagaggaaggtcatggagtacaatgatgcattagatgattatgatgccatgttctgagaaaataattctgcagaaatttatgtgcccgtcagtagtgtaatcttaagcctgccacatatgggtcttttctgaacaaatctgtgggagttgtcttctgcatggctacttgcatttgtattgcacctgcagatgtgatgcaattttgtggttggttgaaggcacattataaattcatatctgatgtagttgtgcaattgtctttgttaaagagcgggtttgcccggatttcccctaaaaaaaaaaaggtaaa

SEQ ID NO: 13905 - DNA, 2007 bp, Zea Mays
atcattttttcgtcgaatccttatgctggattggattttcatgatagcagattggggaggccatttgtgaaaccttatgaacaagaaagttatgggaaagaggatgtgctttctgctgttgagaaatgcatgaaaaagtatgctgataatttgctacgatctcttgagggaatcactagtcggctttcgcaactggagatttattgctataagcttgagagatccataggtgaacttcgaagtgatgtgcttcgtgatgagactgaccataggttgaagtctcttgagaaacatctaaatgaagtacacaggtctatccaaattcttagggacaaacaggagttagctgaagctcagaaggaattggccaaatttcaacttacacaagatacatctaaaaagaaggaagatgtaccaacatctattcctgagcaaaagaagcttgaagaaaaccctgacacatcaaaccagcaattggctcttgttttgcctcatcaggtgaacctgccatcacttgcccctagagcttctgaatcagtccaacagtacaagaatcaacctgtgcaaccatcagacccaacccctcccgtgccacagcaggaccgctatgttcttagccaagccatcgtctactacccacagcgccaagctccaggtatccaggacacacaagggcaaaaattgcaaccagaagtgcaatacttaccagcaagatccccagcacaagatgttccggtccatgctccatcccaaccacctcaggctggaaaccaaacacagccacagccttaccctccttaccagcagcagtggcaccagcaatcctcccagccagctcctgcaccggtggcccagacacagcagactttctcacagccatttcctccacccgcacagcagccccagttatccaatgtgcagcagtttccaccgcaaccagtacagcagccccaatccaatgctcaacagtatcctccaccagtgcaaccacagcaatctagcccacagcttcctcaggcaatgcaaccacaacatcctcctatgcaaactcagatgagacctcaaaccccaccaaactacccgcattatccaccccaccagccattgaaccccacccctgaaactcttcctggcaatgtggctatgcaaggatcatacaacactgctgttccatcaggtgccaaccgtcctgaactgccatattcgtatggaggggctggcatcccactgtctcagtctcagccactgccacagcacaacatgcaaaggcaccagctaccaccttcaagtcagggctcctttgggccacctccaagcaaagggtcctatgctggctctccacagtatgcaccacagggcaatccgcaaggctacagcacaggttacgcttacccaccaaacggccctccagcagtccagccgcaacagatgccccctggcggagttggcatgagtcatccggcttcgcatatgatgcgtggccatccctacggagaaatgatggagaaggcgatcaccatgggataccctagggaccaagtgctgaacgtcacccaaaggatggccgagagtggccagtcaatggatttcaacaccttgctcgacaggctgaacgaagcagggtcgggagctccacccccacgcgcgtggtgattggatccagtttgggcgccgtgcttggtgtcggttatgtgacttacgactgttatcatgcagctaaataaataagatttgggttgatgccgtgtactgcttatctgtacaatgtgcatatgtgatttttttctccatgtaactgccactggtactacgaatgcatcgcaccaattggactgttcagatattatgtatatatattccgatattcggaagcaattactggcaggcatcctaccatttttgtagcgtgtcatgtgtccgttgcgttgatgatgtgaacaactgttgtccgtcgacttcagcttgacgctaaattttgtaaagactcttttggatccctagatctta

SEQ ID NO: 13906 - DNA, 654 bp, Zea Mays
ttttcctatgcataatatagagaggctggagaaagagcttcaccaacttcttccaccttatatgtcagaaggaataagagtactccccccttcatttggcactgattctgcctggtttggtgcaaagatgatcagcaacgtgagtactttcactgaggcatggtgtgcaaagaagaaacaattccgtcagaagacaggccggagtggtacattgtttgccaattcctggtaatgaaaatctcagacacaagtcacgagcaagaaacttaaagagttccccgcatcaaaaatacggacataacatccggtccatgctccactgagcctccaccagtatatagaagcatgagcattcatgcccagtatatattcacgtccatatcatgcatatatggattatgagccagtgcatcatttggtggtgttgttataggatgttttggtaagttcgttgtggttataggttgttggcaaaagcgcagttgtctcgttttaattttaagtggaacgattaattagttattgagcatgagtctttgtttatagctatatatgtctcatgaaatttggtacagttctaaatgttgtaaaacgcaataaatcattttataaatgagatatgtctttattgctgttgttcttggattggtaatg

SEQ ID NO: 13907 - DNA, 959 bp, Zea Mays
cagagggcacaactacaaatggggattatctccttccattcaaaacaggtgcttttcttgcaaaggcaccagttcaaccagtcattttgagatatccttacaaaagatttaatgcagcatgggattccatgtcaggggcacgtcatgtatttctgctgctctgtcaatttgtaaattacctagaggtggtccgcttaccagtttactatccttctgagcaagaaaaggatgatcctaagctctatgcaaacaatgtacggaaactgatggcagtggagggaaacttgattctttcagaccttgggctggcggagaagcgagtgtaccatgccgcactgaatggtaatagtctagctcgtgctttacatcagaaagatgattgaaatgccatgctatcgtgcttccataatactggcttgcttgtaactgtgtgcttgcttgtgcatcgtcatggttgagaggaatgtcgtgaatatactatccggcataaatctgtaaagtaatttaccaactgtcatagttcagtaattatgttggttatactcctacatggttgggcatccgcacatttgatcctgtggtcaatccatgtgagccttttttactatcgatgttcaccaaactgaaccatctacttggtcttccctgcaggattgttgtgtcaaagctattttggataaaatttggaaatgaaagcagttagtttttcctagttgtccctgtaccattgcagtaggagaaaaaggaatcaaattttgttgtcactaatctttctcattaaagaccatctgtagataaccacaccgttttgctgcaaagatcaaatagacgttaatcaagctaggcatagcgtaaaaaatgctgttttcttactctcgtcaccgcagttcatgtgctgtgttttgagttgacatgatgtacttgatgtgtccgttgactaacatatggttgtctaacat

SEQ ID NO: 13908 - DNA, 1490 bp, Zea Mays
gtgaacctcagctgcacagcgagagggaggagagattgtgttggttctagtctgcactcgcggagctggtgcggattctggtgaaagcaaaggatcgtttctgcaagactctgaagctggagaaaaggatgtctaccttagccactcctgcatccacgacgagatactacatcaacggcgacgagctgggaggaaggagtactctgtcatgccacaagtgtaccatgagtctcgggaggatgcggagcgtgtaagaggacgacacttgttgggcatgtcatcttggcgtgctccgcacgagaatgccaggaagccaatacgaatatacctcaattatgatgccgtcgggcattcgcccgaccgtgattgtaaaaatgttggcgacatcgtgaagcttggcgaacctcctgtatcatcagcaccaggaacacctatatgcgatcctcatggtgatccaccactggtgggagactgctggtacaattgcacccttgaggacatagctgggaaagacaagaggcaacgtctccgtaaggcactggggcaaacagtagagtggtttagaaaagctctagctgttgaacctgtcaaggggaacctacggctcagtgggtactcagcttgtggtcaggatggaggtgtacaactacctcatgcgtatgttgaagatggtgttgctaatgctgatttagtcctcttagtaacaactagaccaacaacaggtaacacccttgcatgggctgtggcctgtgaacgtgaccagtggggtcgggccattgcaggacatgttaatgtggcccctcgtcatttgacagctgaagctgaaacattactttcagctactctaatacacgaggttatgcatgttctagggtttgatcctcatgccttcacacattttcgtgatgaaaggaaaaggagacgtggtcaggttactgctcaaagtttggataaaaagcttggaagaatggttactcgtgttgtcctaccacgagttgtcatgcacgcgagacatcattatggagcattttcccaaaacttcactgggttagaattggaagacgggggaggccggggcacctcaggttcacattgggagaagaggctcttaatgaatgagatcatgactgggtcagtggatacgagatctgtggtttcaagaatgactttagcattactggaggacagtggatggtatcaagctaattacagcatggctgaacatttagattggggtcagaatcagggaacagagtttgttatatctccttgcaactcatggaaaggggcataccattgcaatacaactcaattatcaggatgcacatataatagggaggcagaaggttactgccctatagtaaactatagtggggacttgcccaagtgggctcaatattttccccaagccaataaaggtatgcccaaatgtagcataaattattatgtttatgacattaaacaggatgctgaattatattaaatgaaaa

SEQ ID NO: 13909 - DNA, 2239 bp, Zea Mays
gccctacttagggtgtttggttcttttagagcataaaatgggcagtcaggcagtgaaaccgcttcgggtatttcttctgatgatgcgggtttggagacgtcatctaatatgccagagaggacagcaacccttcttgacttgtattcgggctgtgggggcatgtccactggtctttgcttgggtgctgctctttctggcctgaaacttgaaactcgatgggctgttgatcttaacagttttgcgtgccaaagtttaaaatacaatcatccacagactgaggtgcgaaatgagaaagctgatgagtttcttgctctccttaaggaatgggcagtcttatgtgaaaaatatgttcatcaagacgtggattcgaatttagcaggttcagaggatcaagaggatgctgacactcttgacaaggatgaatttgttgtacagaagcttattggaatacgctatgatggcactggaaggaaaaaaggcgtatattttaaggtccaatgggaaggatatggtcctgaagaggatacatgggaacctattgataacctgagtgactgtccgctgaaaattagagaatttgtacaagaagggcgcaaaagaaaaattctcccgcttcctggtgatgttgatgtcatttgtggaggcccaccatgtcaaggtataagtgggtttaatcggttcaggaaccgtgatgagccacttaaagatgagaaaaacaagcaaatggtgactttcatggatattgtggcatacttgaagcccaagtatgttctcatggaaaatgtcgtggacatactgaaatttgctgatggctacctaggaaaatatgctttgagctgcctagttgctatgaagtaccaagcacgccttggaatgatggtggcaggctgctatggtctgccacagttcaggatgcgtgtgttcctctggggtgctctttcttccatggtgctccctaagtatcctctgcctacatatgacgttgtagtacgtggaggagcacctaatgccttttcgcaatgtatggttgcatatgatgagacacaaaggccatccctgaagaaagctttgcttcttggtgatgcattttcagatttaccaaaggtcgaaaaccatcaacctaacgatgtaatggagtatggtggttcccccaagacagagttccagcgctacattcgacttggtcgtaaagacatgttggattggtcgtttggtgaggaggctggtccagatgaaggcaagctcttggatcaccagcccttacggcttaacaatgatgattatgagcgggttaagcaaattcctgtcaagaagggagccaacttccgtgacctaaagggtgtcaaggttggagcaaataatgttgttgagtgggatccagaagtcgaacgtgtgtacctttcgtctgggaaaccactggttcctgactatgcgatgtcattcatcaagggcaaatcactcaagccattcgggcgcctgtggtgggacgagacggttcctacagttgtgaccagagcagagcctcataaccaggttatattgcatccgactcaagcaagagtcttgactatccgggagaacgcaaggttacagggcttccccgattactaccgattgtttggaccgatcaaggagaagtatattcaagtcgggaacgcagtggcagtccctgttgcacgggcactgggctactgtctgggtcaagcctacctgggtgaatctgacgggagtcagcctctgtaccagctgcctgcaagttttacctctgtggggcgaaccgcggttcaggcgaatgccgtttctgttggcactcctgcgggggaggtagtcgagcagtaaaaggatagcggagcaaccctggttggtattttgattcgagcccatccagtagcatgtttaccaataaataatcattggtcgtgctgattcttatggttggagatgaatgtatgtagggtgtactcgagctcgagtgcttgttgtactgtaggttgaggtttctcatccattggcctgcctatttgtggatgacgtttcatttcagattagcaatgtgcttatttaaggtttcgtcatgtacctgtattctacaatccactattgtttccaaagacagcatttgatccttgttcaacgcgagcagattttcgtccaccaaagctgtgtagggatcgaaatgtcaacaatgaattgagtcattcaatcatttgtctaatgttaatgtgtcctttgcatttat

SEQ ID NO: 13910 - DNA, 1844 bp, Zea Mays
  misc_feature (1)..(2): n is a, c, g, or t
nnaagctttacaggcctggatctgttggttttgtgtctaaatcgggtggcatgtcaaatgagatgtacagcaccattgccagagtgacagatggtatttatgaaggaattgcaattggaggggatgttttccctggatcaactctgtcagaccacattctgcgttttaataacataccacaggttaaaatgatggttgttcttggggagcttggtggaaaagacgagtattcacttgtggaagcattgaaacaaggaaaggtccagaaaccagttgttgcatgggttagtgggacatgtgcacgtctattcaaatcagaagtgcagtttggccatgctggtgccaagagtggtggtgagttagaatcagcacaagctaagaatcaggcactaaaggaagctggtgcaattgtgcctacttcatatgaagctcttgaaagtgcaattaaggaaacatttgacaaactgtttgaggaaggaaaaatttctcctgttactgaaattacaccgcctctcattcctgaggaccttaaaactgcaatcaagagtgggaaggtccgagctcctacccacatcatctccactatttctgatgacagaggcgatgaaccatgctatgctggtgtccctatgtctacaattattgaacagggttatggagttggtgatgttatttctcttttgtggttcaagcgcagccttcctcgctattgcactcagtttattgagatatgcgtcatgctttgtgctgaccatggtccctgtgtatctggtgctcataactctatagttactgctagggccggaaaggaccttgtttccagcttggtgtctggattattgacgattggtccccgtttcggtggagcaattgatgatgcagcccgatacttcaaagatgcatgtgataggagcctcacgccatacgagtttgttgaaggcatgaaaaagaagggaatccgtgtgcctgggattggtcacaggattaagagcagagacaacagggataagcgtgtgcagcttctacagaaatatgctcacacacatttcccttcagtcaagtacatggaatacgctgttcaggttgagacctacaccttgtcaaaagccaacaatttggttatgaatgtcgatggtgcgatcgggtcccttttcttggatcttctatctggaagtggaatgttcaccaaacaggagatcgatgagattgtggagatcggttatctcaatgggctctttgtgcttgcacgatcaattggcctgatcgggcataccttcgaccagaagaggctcaagcagccactctaccgtcacccatgggaggatgtactttacaccaagtgagaaagccattctttgcaaggcataataaagtattattatcgcctagagcttccagttgcctgtacacttcattaaatcgagcacttgcaaaaaagaaagccagagagagaggaagacgaacatcactagtcagcactagattgtgtgttttatgttgagttgcaaattcaggtcctgatttttgtcctgccatgaaccgttaggcgatattgtattggaaaggatgcttcctttattgtttcacgatatatggcctcagaatagaaatttccattaaaaatgaactctgatttgttcgtcgataaagtgcatttgtacagacacgcattacgaaactaggcattttcaatagcatattaatccagaaaaggatacaagttggtgacaacaaaaagatacacgtgtgaacttagtaagattttatgatgaatgtgagcatagtactgggaaatgtgacatgaaaccaaacaaaagaaatatatccaatagcagatattgtgc

SEQ ID NO: 13911 - DNA, 1459 bp, Zea Mays
gttggcacttggcaggatgtaccttaatggatagacacaaatccaatgcttcgtaatggtgagactggtgactggattgggacttttcaaggtcataaaggagctgtttggagctgttgccttgacaggaatgctctgagggctgcatctgcttctgctgacttctcggctaaagtatgggatgcacttactggtgatgaactacattcatttgaacataagcatatagttcgggcatgtgctttctctgaggacacccaccttttactcactggaggcatggaaaagactttgcgtgtgtatgatattaatcgtcctgatgcagctccaagagagcttgacaaatcacctggttctgtccgaactgctgcctggcttcatagtgaccaaactatattgagttcctgcactgacatgggtggagtaaggctatgggatgtgagaacaggtaaaattgtccaaactcttgaaaccaaggcttctattactagtgcagaagtaagccaggatggcaggttcatcactacagcagatggctcaagtgtaaaattttgggacgcgaatcacttcggccttgtgaaaagctatgatatgccgtgcaatgtggagtcagcttcacttgaacccaagtctgggagtaaatttgtagctggaggagaagatttgtgggttcatgtattcgatttcttcactggtgaagaaatagcttgtaacaaagggcatcatggaccggtccactgtgtccggtttgcacctggtggtgaatcatacgcatcgggttcagaagatggcaccattaggatctggcagcttagcccagttaatgctgatgacgacgaggcggccaatgcaaatggcaaggcaaatgctgcagtgaacgaggttacaaccaagctcgagggcggcttccacattcccaaggagggacaggctggggggtaggacctcatgtgctttgttgtggtgcttgtggttcttattgcgaggagattgcccatagggctgccacggtcattcagtttctccctgcagagccatcaacacctgtttgcgatccaagggtatcatggcttcaagagtcatcaccctggtaactggggaaaaaccatacccctcgtaagcatggtggtgggtttttggatggggccttcgctttgatagaacatagcaactgtagtgtcaaaaataaacaagagaatacaacttgggtaggtatcgtgtcttcggtcattaaagtgaagtattctgtatcgccgccagtaatttttgtggcttttgatgttggaacgccgattttcaaatcaaagctgacgaccacttcttgatcatgaggcaatatagatagcgtcatgcccatatcaaatgacagatttctctgctcactggacatgcttttttggtggcatccgcggacacgatacgtgaaatttagttttatgttattgtacacctacccgaa

SEQ ID NO: 13912 - DNA, 2454 bp, Zea Mays
aaatagcgcgcctcatccgcgccgcccccgcgctttttctctctgctgacgccgccgccgccgggagccgtaccccgggagagccccccagcccttatcaaaccctaaatcaaaaactatccaaaaaaatccgcaaaaaactagaaaaaatcccaaaaatcaccacttgattggagatggcggcgcaagggcaggcggcggctggatccgcgtccgagtctggcggctcaccggctgcctcagctgctgcagcggcggcggctgcgttcccggcgacttctctctacgtgggtgacctgcacgagagcgttcaggacgcacagctcttcgacgtcttcagccaggtcggcggcgtcgtctccgtgcgcgtctgcagagacatcaactcccgcaagtcgctcggctacgcctacgtcaactacaacaacactagcgacgctgcacgggcacttgaactgcttaacttcactcctatcaatggaaagcctatcaggatcatgtattctaaccgtgaccccagctcgcgcaaaagcggtgcaggaaatatatttattaagaatcttgataagtcaatagacaacaaagctttatatgacacgttctgtgcatttgggaatatcctttcatgtaaaattgcaacagacccctcaggagaatcaaggggatatggttttgttcagtttgagatggatgaatccgctcagtctgccattgataaactcaatggtatgcttatcaatgacaagaaagtgtatgttggaccttttgttcgtaagcaggacagggaaaatgtctcgaacaatatcaaattcagtaatgtgtatgtgaagaatctgtccgatactgttactgatgatgagttgaaggagatgtttggaaaatatggaaccataacaagtgctgttgttatgcgggatagtgatggaaattctaggtgttttggatttgtcaattttgaaaatgcagatgctgctgctcaggctgttcaagagttgaatggcaagatattcaatgataaggaactgtatgttggaagagcacaaaagaagtctgaaagagagatggagttgaaggagaaatttgaaaagaatattcaagaggtagctgagaagttccaaaacactaacttgtatctgaagaacttagatgataacattgatgatgaaaagttgcgtgaaatctttgctgagtatggcaatattacttcttgcaaggttatgcgggattcttatggtgttagcagagggtctggatttgtttctttcaaatctgctgaagatgctaaccgagctcttaccgagatgaatggcaaaatggttggaagcaagcccctttatgtagctcttgcacagcgtaaagatgacagaaaggcaaagctacaggcacagttttcacaaatgcgtcctgttgcaatggcaccttcagtaggtcctcgcatgcccatgtttccacctagtgttcctggagttggtcagcagctgttttatggtcagccacctccagccttcatcaaccctcagggacagcaaccgcaacgtcctgctggtaggcgtgctgggtctggtggaatgcagcagcccatgccaatgggtagtcagcaacagatattccctagaggtggtcgtggctaccgctatgctactggacgtggaatgcctgatcctggcatgcataatgttggtgctgtgatgccatctccatatgagatgggagggatggcaatgagagatgctggtgtctcacaacctgttccaattggggcactagccactgcgcttgctaacgcctcaccagatcagcaaagactgatgcttggtgagaacctgtatcctcttgttgaacagctggagcgtgagcaggctgccaaggtcactggcatgcttttggagatggaccagacggaggttcttcacctgctggagtcgccagatgctctcaaggctaaggttgctgaagccatggaggttctccgctcagcccagcatctccagcagagcaatgcctccaccgagcagcagctggctaatctatcactgaatgatggcgtcctctccagctgaatgtttctgatgattcagaaattgctggcaatttttgcttgatacctatctctagaatgcaattactttgtttactttattggaattttaggtgctgctctataattagctgaactagggggtggatttaattgccttgaattggttattttggttatatgaatatgttatgtcggagctcaggtctgtcattttggtatatggttatgttagcccttgtccgtttatcacccgaattatcacagattgaattttagagcgtcattgcttttctagctgatattttgttaagcaactcgttgcctcgagatgatcgattaggctatgatttttttctagcagcgtactaatttttatcttttatttcaaaccctagtataaaatggtatataaa

SEQ ID NO: 13913 - DNA, 3954 bp, Zea Mays
gcaacacacggcgccgcaggaggacgttggtgaagaggacggtggggcagctgctctggcgtccagcgggtgcgaacctgccatcaccggtgctgattctgaggcggcaccagctgtggatgatgaggttgaaggcaaggagggcacggtggatggaagtgctgttgctgatgtcgctgaagcggtggtgcatcaggaagttagcacagagcatgatgatgccctaacgcttcccaagtcttctgcttccatggagtccgaggttattagagaggataacaaagaacagagcaccgctgatattgtggggccacatgagcagggtacatgtggggcaagtgctttggtggagaatgagcatctttgtgctgacatgagggctgattcatttgtagctgttactgagcctgacagtcaagaggattatgctgtggagtcctgcatgcgcgatgatgtcctaatttgtaccgagtctggttctgccgacatcgagtctgaggttaatggaaaggatagcaaacaagaacagagcaatgctgatgtcgtggaggtcatagggcagggtgtagttagggcagatgcgctgatggcaaatgggcatctttgtgccgacatccaagcagattcttctgaagctgctactaagcctgataacattgctaatgagagcaaactgactgaagttgcagaatcaggagaggatgctgctgccagtggagaactggatgccatcgatgcatcatcacaaaccaatgggcatatttatgttgcctcgggtgctgattcttttataattgcttctgagtccaagtctcattcctttgagacggatggacaagaaactgatcagcaagaagaggaagttccacaaactgaagctgaactattggatggagtgctaaaaccaactgaaaggaactgtgcacgcagtgttgaggaactcataggagaggaagttgacacagatgggcatcccagtgtagacggtacagctgatgcttctggggagcaagaagccaagcccatgcaggtagaaggtgaggccacatgtggtattctcgaatttgaagaagtggataaggatggtgaggatagtttgtgtaatgactgcatggttggtgttgtttcctctaatgaggaaacagagcttcctatgaaggaaagaacagatgaagctgtccccagtgttaatgttggcgagtcagagcaagtaactgaggatacaagccaagatatcatgcagggtggattggccaggggagtttttataggcacaatttttgttaagccagtatcagatcctcatgttgaatcaagcctcgtacataaagtcaaggcagaagttcatttagttgatgaaatcacagcagcagatttgaaagctgaaaatatggtcgaagtgaaaagaacagatcgtgaagttgacgaaatagaggtaaaagcgccaggtactcacgaaattgggaattcttcagaagtagaaccgaaggaagagtttgagatggaggttgatgatgctgtttcattgcatgaagctgcagcttctgcatcagaaaatggttctgaagaaaaatctagcaacattgctgttgatcaagttgaacctgtcaacctgaatgtagatgaactcgcggtagatgatgatcaacccagttttaatccaggttatggatctgctaaatcttctgatgtggccgaaacaaaaaatgtggaagcacaagtgacagaacagaagggcaatgcacaccatgcttcaggtgagtggcatggagatcatacgcaagtcattggaccacagaggatctacataattaaagttccaaaatttgccggtgatgatctctgggataagatccaggctgcacaggctcacttagaccaactgacccaggaaagagacgcaattaaccgccgtaggcaaaaacaaaaggctatatgtgatgaatacagggagaagtttgaggcagcacgtcaagaagagcgggaagcaagggctgcccatggagataagaagaatgatttaaacagtgtgcgctcagtattagagaaattgcaccaagcaaattcagttgaagaacttgatgagcttattgcaaagaaagagaggattatgcaacatgagaccatttctttgaaagaagaaaagcttttaattaaagagattaatgaattaaaatcccaacggaagcagctgtccgccaccatgggctcaaaggctgaaatcaatgaggcatttgaccaaaaagatcacattcatgagcggcataaggtgttaaagaaggattctgatgttttattcagcaacctgaaagtcctagaggagaacacaagaaagattcaaaaatcttttgctgatgaaagaacagctctcagaaaattaacagaggaacaccgagcagctaatgaaatacgtcaaaaggcctacagcgattggactgagcttagatcagagcccagcaagaagaatgaatactttttcaagtacagggacgcccgaaatgcagcagaaaatttcagagccaatggagatataaatggacttatatcacactgtaatagtcagattgagagagttatggaaatatggaacaaaaacgaggacttccgcaagcagtatgttgaatcgaacaaggttagcacactaaagagattagggacccatgacggacgaaaacttggccctggtgaggatcctccggtcattccaagccgaagaccaagcaacatttgtccattgtctgcctcaagcccggaaatgatcaccttagcttcaacaccagcacctgtattggctgctgcagctgcagtcccttccaaagagaactcctttcctgctttggcagcccctcagaccagtaagcgcgccaaatcaaaagcatctggtagctctgcccagattaagaacaaatctgttatagtatcagaggaagaagatttggaacagactttaaaggagaaggctcatcaattggagttagctaggaaggcagaggagttagataggaaggcagaggagttggcgcggaaggaggaggaactaagaaaagagagggatgcagctgaaaaggagcggcttaggatggagcagaaggctaaggctaaggaggctgaggagaggaagaggcggaaagcagagaaggacaaggaaagagccgagttcaaagcacgcaaggaagctgaggagagagagaagaagaaagcaaagagagacaaaaagaaaggcgcagcaccagcagattcgagcgccattggtgacagccatgctgctgcttcggctacagcagatactgacagtaatgcatcagacaacccaagggaagctgacgtttctcaaccagcggtggctcccaggaggccggctagaccagcggcggcaatcaagcaactgaacaggttgcagcccatgccagcgcccctgcgtaacaggggcaggaggaaactgcggcagtacatcctgatcgcagcggcggtgctaacggtgctggcgctgttcgtggcaggcaactacattcccaggctgaggtcgcactcctaattttatcgttaggaaaggagtgccagttctgtcgcggtgaacctggtggtggttctacctagaggattcttcttttttcgactgttcgggttggtttgtatttagcttcccttattataggtttgtgataaaagttattaccggatggtggtgaaatattcgttagaacatgataataatgactatagattcttttttgtacataggtctctggtgctaaccttagcgtatatgatatttaatcatattctatggcgttggctgtctccggtgtgaacgatgtcgttcactatgttcggcagagacgagttgaatgtatcttctgcgcgctgcgtacaacccagaagagacgagagagagtatgtttaggatttagagtatgttagttgttaggtttagggtttagagttagggtttag

SEQ ID NO: 13914 - DNA, 2386 bp, Zea Mays
ccacatccgacatcaagccctccaactgagtcgtcggagcggacgtcgagtcgtcgatacgcctgaaccccagctttccactcgcctcgctcgcccctttcgcgtccaccgaccccgaccccgaccccgatccccgccggtgcttcgccaccccgatccccaccgcgcgatggcggagccggctccggctcccccggtgaccgcgccgctggtggggctgctgtacgacgagcggatgtgcgcgcacgcgacgcccaacggggaggaacacccggagaaccccgagcggctgcgctccatctggcgcaagctcaacgccgcgggcgtcgcgtccaggtgtgtggcccttaaggcaaaggaagctgaggacaagtatatagcttctgttcacagcaagaggcatataaagctgatgaaggaaattagctcaacaatatatgatgccagcaggaacaagattgctaggaaattcaattccatttacttgaataagggttcctcggaatctgctgttcttgcagctggttctgtcatagaggtagctgagaaagttgctgcaggtgagttaagttctgctattgctctagtcagacctccaggccaccatgcagaacatgatgaggctatgggattttgcctcttcaacaatgtggcagttgcagctaattatctcttaaacgagaggcctgatttaggtatcaagaagatattgattgtcgattgggatgttcaccatggaaatggcacacagaaaatgttttacgatgatcctcgtgtattgttcttctcagttcacagatttgattatggaagcttctatccttctgaaggggatgcttctcattgtttcatcggggaagaagctggtaaagggtataacatcaatgttccctgggagcatggcaagtgtggtgatgctgattatattgctgcatgggaccatgtactgcttcctgtcactaaagtttttgatcctgatataattctggtatcagcggggtttgatgcagcattgggtgatcctctcggtgggtgctgcattacaccaaatggatatgcactgctactaacaaagttgttaggatttgctcaaggaaggatagtgatggcccttgaaggaggttataaccttaggtccatagcgaactcagtttgtgcttgtgcaaaagttctcttgggagacaaattcacattcaacactccagagatgcaaccatttgaatctacatggagagtaatacaagcggtacgcaatgaattgaagacatgctggcctgttctgagtagcaagttgccagaaaatgtatcattgaggattaagcctgcaccaagcgaggctgagggtatgaatataccatgctgcggatcacgtgacacaagctcaccaaaaggaaccgtgtggaagactgtacctcacaggttgcttttcggtagatcgtctaccccttgttggggaactggtggtgtggcttttctcaaccctgagataaactacaatgagaagtcgtatgtctgcatgtacaaaataacgttggagcagttcaatgacatcttgtttcaggagaatcgtttagtgctggaggatggcaaagacggaaacactgtgtatcctgactctcctttgattggttcatctgaaatcaagtttatatctacaaacagagctgttcatcttgaacctattaaggatagctggtactccaatgtactttatcttgggaatgaggatgaagttccaattctaactatgacgtgccccgcatcagatattgagaggtataaatctggtgagctgcgtttagcacctccatcagagacgtatgcggccactctgataaagggactagtggaaggcaagcaaatggatgcggacggagctgccagctacatcaacgctgctgctgcaagagccttgtgaaggcggcttcagcgtgtgcttttgtacagccagtaaggagtagcaaggatacactatctgttagcgtggcgacaccaggaaaccttcattgtccgcaaatggagaacttggatccaatttgaattgggaagcatgattcgagcttgccctagcttgattactggtgaacggtgatctcccctggctggttgattctgggagaaacactagctgtgtcggggtggagcaacactagttggcggttgcaacaggtgctctcactgcactggtatcgtgcttgtctgacataccgtagtatttgcatggcatgctggtgatggtatttgtgcaattactgcattatgttctgttgcctggagttattgttgtttggccgccaccgctgctgctgctgggcagcgtaatatccactcgtcgaagcggattggcactccgccttcttggccggccgcgcctggtgcccaagcg

SEQ ID NO: 13915 - DNA, 3027 bp, Zea Mays
gctttgctcacttgcatctaggcttctagctgtactcctcggccggtcggtcccacccatggacagtgacaatgattgcggctccgacgccggcgccgagtgggtctgggtacgccgtccgtcggaggttgaggccgctgccgcggcggccggatggctggcggatgaagaggcgcggccgctcaaggtggtcttcggctccccggctaagtacttcaccgacgcagcgccgatcgggaacggccgcctaggcgccatggtctggggctgcgtcgaatctgagaggctccagcttaaccatgacactctatggacaggtggacctggtaattatacaaatcccaatgcacctgctgttctttctaaagtaaggagccttgttgagaacggaaagtaccctgaagccacatctgctgcatatgatctatctggtgaccaaacacaggtctttcaacctcttggggatattgatctggtctttggtgaggacatcaagtacacaaattacagacgagagctagatcttcacactgcaacagtcaccgtcacatatactgttggggatatagtctacacaagggaacatttctcctcaaacccacatcaagtcattgtgactaagatctctgcaaataaaccaggaaatgtctctttcacagtgtctttaactagtccactagaccacaagattcgtgtaacacatgcaaatgaaataatcatggagggtagctgtccaggccaaaggcctgaagagatcaagactgctgctgatcaacctattggaattaaattttctgcgattctttatctgcagataaatggtgccaatagcacagtggaagtattgaatgataacatgctgaaacttgattgtgccgactctgttgttttacttcttgcagccaccacttcatttcaaagtgcattcatcaaaccttcagaatctaaactggatccaacagtgtctgcttttacgacattaagtattgctaggagaacgtcatattcacaactaaaagcctaccacattgatgattaccagactcttttccagcgtgtttccttgcaactatcacaaggctctaattatgatcttcggaggagtaggctagttcagtcagcagagactagttctcagggtgctaatgtatcggattatggttttcaaatatctggctgcaccagattgacatcccttaatagttttgtgaagcctacggtagaaagaattgtaactttcaaagacaatgaagacccttctcttgtggaacttctgtttcagtttggtcgttatctactcatttcgtgctcaaggcctggaacccaaatttccaatctacaagggatatggagcaatgacacttcaccaccatgggatgcagcaccccatccaaatataaatctacaaatgaattattggcctgcgcttccttgtaatcttagcgagtgccaagaaccactgtttgactttattggttccctctcaatcaatggagctaagactgcaaaagtgaattatgaggctagtggttgggtcagtcatcaagtcacagacttatgggcaaaaacatcaccagatgctggtgatcctgtatgggctctatggccaatgggtgggccttggcttgcaactcatctctgggagcattactgttttactttggacaaacattttttagagaaaacagcgtatccactattggaaggatcagctaggtttttgttggattggttaattgaaggacacaggggatatttggagaccaatccttctacatctccagaacattattttattgctccagatggtaaggaggcctgtgtgagctactcaacaactatggacatctcaattataagggaagttttctcagctcttatattgtctgctgacattttaggtaaatccgacactaatgtggtgcagagaataaaaaaagcactgccaaatctcccaccaatgaaagttgctagagatggcacaatcatggagtgggcacaagactttcaggatcctgagattcatcacagacatgtgtctcacttgtttggtctttatcctggacatactatgtcacttgaggaaacacctgacctctgcagagctgttgccaatagtctttataaaagaggtgacgaaggcccaggctggtctacttcatggaaaatggtcctatgggctcgccttcacaacagtgaccatgcatacaaaatgatactgcagctaatcactttggtggatccagaacatgaggtttcaagagaaggaggcctatacagcaatctgttcactgcacatccacctttccaaattgatgcaaattttgggttcccagctgcgttgtcggaaatgctggtacagagcactgggaccgacttgtaccttctccctgctctgccccgcaacaagtggcctcaaggctacgttaaaggtctgaaggcccgaggtggtgttactgtaaacatcagctggaaggaagggagcctccatgaagctctgctatggtctagcggcgggcagaataccctttcaaggctgcactacggggaccagattgccaccgtcagcctatcatcgggtcaagtttacaggttcagcatggatttgaagtgcttgaagacttggcccctgtgatagcacacatttgctgaaatgaaagatacgattgattgtgcaaaaattcatgaaaacttctggctggcaagaaaataatcgatttcatacatcaatcataacacgtatcatatttcttatttactgtgtatgtttagttacatttcactgtatacatgtttactcgttgcccgtgccaagtgctatacagtgcacgactgcatgtgcattctgttaacatttttttagatgggaacatatcgaatgcaaaccacgttttggtgtaaacttcgtcctactaaaaaaagtttcaaaaaattctgaaaaaacatgaatgtacatctcagcttaacttatctatatacaaactttcatggtaaaatttatcttactctagcagttaaaaaaacaaa

SEQ ID NO: 13916 - DNA, 128 bp, Zea Mays
gtgagagccccgtccggtccggaccctgtcgcaccacgaggcgccgtcaacgagtcgggttgtttgggaatgcagcccaaatcaggcggtaaattccgtccaaggctaaatacaggcgagagaccgat

SEQ ID NO: 13917 - DNA, 727 bp, Zea Mays
agcccagcccagcccatgtacattccgcagaccctagaaacttgcagccgcgtccctgaccatcgcagaggaaccaaagctagagacaaccgctgcgtaaacgaatccatcgccatggcgtctcgtctcgttgcggcggcggcctcctcctcctccctctcctcagcgtcccccctcgctcgcctaatctctcgccgcggccttgccggtgccgcagtttgttctagcaagcctctcaatgtggggggttattttttatggtggttacaagctttttagtggaaagaaggaagccaagactgaggcggcatcaccacaggcataggtggcggagatggagttatacccgtatctgtggcctggcaacaatgttaaataaaaggaatgctttatgttgtgctttcaagttgataaattgtggcaacaggagattttgctttacgtaggcaatatattgagaagctactcttactcatccaccatgaataatctttgctgcagtggagcttcatgtcggcgaacaatgcaaacgttgtacttctttcatgcgattgagtagttgatgttttacttctgttgccaccaacagttgaacgctgtacttgcagattgataagatctccgtgctttctagtttgcgttgttactgatgaatttagcaaacgttttattggtggtattatttgaaaattggagtattggtagggatgaaaacggtcggaaacgg

SEQ ID NO: 13918 - DNA, 2212 bp, Zea Mays
aacacgcacccggcgtaccgcgaggggttccgggtccacctgtcagcgtcccgcctaaaccccgtcgccgcgccgcccagggccggcaggctggtagacccgtcaaatccaagcaaaggccaccccggccggcgacgacttccccttccaacacccacctcgcccgtccctccctccccgcaccctgatcccccggcatccatccatggcgacgaacagcgcggtgattgtgctcctcctcgtcgctgctgccgtactcgcctgcgcgggcggtgcgcgcgggttctacctcccgggcgtcgcccccgccggtttcctcaagaaggacccgctcgccgtgaaggtgaatcagctgagctccatcaagacgcagctgccctactcctactactccctccccttctgcaggccgggcacaatcgtcgatagcgccgagaaccttggcgaggtgctccgcggcgaccgcatcgagaattcactctacgtgttcgagatgatggagcctaggctgtgccagatcgtgtgcaagattgctccaacccaagatgaagcgaaggatctgaaggagaaaattgaggatgagtaccgcataaacatgatccttgacaaccttcctttggtcgtcccaattaagagattggatcaagaggcacctactgtataccagcaaggcgtgcatatcggcatcaagggacagtactcagggagcaaggaagagaagcatttcattcacaaccacttcacatttctggtgaagtatcacaaggatgacacaggtcttgccaggattgttgcctttgaggttaaaccatacagtattaagcacgaatttgatggcgactggaaggggaatgctacactccttaaaacctgtgacccacactcaagacgccttgtcgtagactctgattcacctcaagaagtagatgccaacaaagagatcattttcacctatgatattaactttgaggaaagtcctatcaagtgggcatcacgctgggacacctaccttctgatggcagacgaccaaatccattggttttctattgtcaattcactgatgatagtcctcttcctctctgggatggttgccatgatcatgctccgaactctttaccgcgacatctccaagtacaaccagttagaggaccaggaggacgcccaggaggagacaggatggaagcttgtccatggagatgtgttcaggcctcctgtcaatgctgacctgctgtgcgtatatgtcggtacaggcgtacagttcttaggaatgctgcttgtcaccttgctgtttgccatcctcggcctcctttcacctgcgaatcgcggagggctcatgacagcaatgctcctcctctgggtcttcatggggctgtttgcagggtacgcctcctcgcggctttacaggatgttcaagggctcgcagtggaagaatgtcaccatcaagaccgcgctgatgttccctggcatcgtgtttgcaattttcttggtcctgaatgcactcatctggggcgagaaatcctcaggcgccgtgccattcaccaccatgtttgctctggtactcctctggttcggcatctccgtgccattggtctttatcggcagctacctcggcttcaagaaacctgccatggaggacccagtgaggacaaacaagatagcacggccaataccggagcagccatggtacatgaacccggtcgtctcggtgctgatcggaggcatcctgcccttcggcgcagtgttcatcgagctcttcttcatcctgacatcgatctggctgcaccagttctactacatctttgggtttctgttcctggtctttgtcatccttatcctgacctgtgcagagatcgccatcgtgctctgctacttccagctctgcggcgaggactaccagtggtggtggagatcctacctgacgtctggctcgtcagcgctgtacctcttcctctacgccacgttctacttcttcaccaagctggaaataacgaagaccgtctccggcgtcctatactttggctacatgctcattgcctcctacgccttctttgtgctcaccggcaccattggcttctacgcctgcttctggttcaccaggctcatctactcttcggttaagatcgactagagagtaacagctgcaacactgctccgtgggttttcgaaatcagagatcaagagagaatactagcacagggatcatgtcaagaag

SEQ ID NO: 13919 - DNA, 2774 bp, Zea Mays
cgccatgcgaggagaggtgctgccatgcaatgatttgagaagagataggagagaggaaatatttatgtgctgctcttgcttgcagcaataaagaagtggtttcccagtttggttgcgcgatgtccctgggatagaattccgcactgacaatgaaccctacaaggctgaaatgcagatttttgtgacaaaaattgtagatatcatgaaagaggagaagctttattcttggcaaggtggtcccattatactgcagcagattgaaaatgaatacggtaacattcaaggccattatggtcaagcagggaagagatacatgctatgggcagctcagatggcacttgcacttgatactggtgttccttgggtaatgtgtaggcaaacagatgctccagaacaaattctcaatacttgcaatgccttttactgtgatgggttcaaaccaaattcctacaacaagccaacaatatggactgaggattgggatggatggtatgccgactggggcgaatcattgccacataggcctgctcaagacagtgcttttgctgttgctcgtttttatcaacgtggtggaagcttacaaaattattacatgtattttggtggaaccaattttgagcggacagctggtggtccacttcagataactagctatgattatgatgcaccaattgacgaatacggtatcttaagacaacctaagtgggggcatttgaaagacctacatgcagctattaaactttgtgaatcagctcttactgcagtagatggttcacctcattatgtaaaattagggcccatgcaggaggcacatgtgtattccagtgaaaatgtccacacaaatggaagcatttcaggaaattcacagttttgctcagcttttcttgccaacattgatgaacataaatatgcttcagtctggatttttggaaaatcttatagtctaccaccatggtctgtgagcatactaccagactgtgaaactgtggcttttaatacagccagggttggtacacaaacatcgtttttcaatgtcgaatctgggtcccccagctattcaagtaggcataaacctagaattctatcccttattggtgtcccctatctctcaactacttggtggacttttaaagaacctgttggcatttggggtgaaggcatctttactgctcaggggatattagagcacttaaacgtgacaaaagacatctctgactacctttcatatactaccagggtgaacatttctgaagaggatgttttatattggaattccaaaggttttcttccatcactaaccatagatcaaatccgcgatgtagcacgtgtatttgtaaatgggaagcttgcaggtagtaaagttggtcattgggtctcactgaatcaaccgcttcaattagttcaaggacttaatgagttgacattgttatcggagattgttggcttgcagaactatggtgctttcttggagaaggatggtgctggatttagaggtcaagtaaaactcactggcttgtcgaatggggatatcgaccttactaattctctttggacatatcagattggtttgaaaggtgagttttcaaggatctattctcctgagtatcaaggatctgctgagtggagtagcatgcagaatgatgacacagtttcacccttcacatggttcaagactatgtttgatgctccagaaggtaatggccctgttaccattgatcttgggagcatgggaaagggccaggcttgggtgaatgggcatctcattgggcgctattggtcactagttgcgccagagtccgggtgtccatcgtcatgcaactacgcaggaacatacagtgatagcaagtgccgatcgaactgtggaatcgctacacaaagctggtaccacataccacgcgaatggttgcaagagtcaggcaatctattggtactcttcgaggaaacagggggagacccatctcagatatcgctggaggttcattacaccaagacaatctgctcaaaaatatctgagacttactatcctcccctttctgcctggtcacgtgccgccaacggtcgcccctcagtaaatacggtagcaccagagcttcgcttgcagtgcgatgacgggcatgtgatctcgaagattacatttgcgagttacgggacccctacaggaggttgccagaacttctctgtagggaattgccatgcatcgactactctagacttggtggtagaggcctgcgaaggcaagaacagatgcgcgatcagtgttaccaacgaagtattcggagatccatgccgcaaagtcgtcaaggatttggcagttgaagccgagtgctccccgccatcggttaaccaagaacctcgatacgatatatgatcacggtactgtattgtggtgctcaggtcttggtggacgttgccgcagctttgcagggccgtgcacaatggtcctgcatcgttgtctcctatacctctgcacccatattatatgtaaacagtgacctacatgtaaatctaaagaagaggagggattgaaaagaaatgagatggaaaaggaataaagttgcttttattacaaatggtcattcctgtgaaccgtctggcttactcctgtaagggccattcctttggacttcggtctacttttgtttccctgttgacacttcttccacctgtaggcggtcgaccaaccgctggtggtggtgatgcccttttgattgagcccatgtgcattctcctggctcggcgtggacagaggaaaggaaaaaatttattccgaatta

SEQ ID NO: 13920 - DNA, 800 bp, Zea Mays
ccggggagtacatcacgccgctaagagacagcatgtcatcagtgtttccctcagcacatttagcttttgccagcatcgacctgaatgcacacactgtctttgcgatcacaacggccttggcaattctccaaacagtctgtctcaggaacctcagtctcctctcgtatctttctgctgacggtgtgatggcgacaattgcagtcatcctctgcctgttctgggttgcctgttctgggttgtgagaaacactttcacctaaactcgtgcactgtactttcctttggccaacccaactgaacaagttgcttgatggtttacaggctctgatactcccatgtgcgtgctacctctccatcaagaagggcgcagtgccattgtgggagatcatcctgtgcatagtcatcataatgatcggcgtcgtatgtgcatgcgtgggatcatacacctcagtcagccagatgattagcagcaccaaatagcgcacgctagctgatatttatctagtgtctacggatccttccaaatgctttgacagagttggaactggcagcttttcgtagctaagtttatttgttccttctttatggcagaaatttggtaagagagagtttagttgtgggaggacaggcggcgaaggagtaatctgagtttagtgtggtgcttttgtgactgatcatctctggagcttttgtgaatgatctagctagctatctgtaaatgatctagttgtgaatgatattataattgtgatgcttttgtgaatatataattgtggtgcttttgtatttatgtgatggatc

SEQ ID NO: 13921 - DNA, 394 bp, Zea Mays
ggcagggctgggctggcgcggaagcggagtggaagatcctgtacagtctcggcaaggacggggacggcctcctccgcaaggacgtcgcgaggagcgtctacgacgggacactgttccaccggctcgcgcccagatggaaatctcccgacagcgacatggagagaagctgataagcgtggtccgggagaactgaaccgagaggaccgtcctattgatgtcgtcttgcgctgggctgctctgaactgaacaagtctggacatgccgtcaagcgacatgtgggtgtgaacactctttcgggtcagattattaacaagaagggtgtgaccgtgtgagtgtgaacagaatcggccgtatagatgtacatgaggcacgggcccgttgacccggcccgagg

SEQ ID NO: 13922 - DNA, 2859 bp, Zea Mays
cgcttccacagccagctctccccaggctcactcttctccccagttgcgttttctttggaagcttccatacacaactcgcatcgttcatcttccactgatgctatataaggagagagagagagagagatagagagagagagagagagagagagagagagagagagatgatctgatgatgcatgctgtaacagctcctgaactgcacaagttgtagtttggctgctggataataagttcatccatccatcaacgctacaaatcaagagtcgtggagaatgaccttttcaagcaggactggcgatcaagaaagaagaagcagatatttcagtacatcgtactcaagtggagcttggtgctccttattggcctattaactggatttgtcggcttcttcaacaatcttgcagttgagaacattgctggattcaaattgctgctcacgagcgatcttatgctcaaggggaggtatattagagcattttttgtgtatggaggttgcaatttagttttggcagcagctgcagcagcaatctgtgcttatattgcacctgctgctgctgggtctggtattcctgaagtcaaagcttatcttaatggggttgatgcctattctatattagctcctagcacactctttgttaagatttttggttcaatacttggagtttcagctggattcgtgctaggaaaggaagggcccatggtacatacaggggcatgcattgccaacttgcttggtcagggtggatcacgcaagtatcatcttacttgtaactggctacgctactttaagaatgacagagacaggagagatttgatcacatgtggatctgcagctggtgtggcggctgccttccgtgcacctgttggcggtgttctgtttgctcttgaagaagcagcatcatggtggcgaagtgctcttttgtggagaacattctttacaactgctgttgttgcggtggtattgagggggctgattgagttctgtcgtagtggaaaatgtggtctctttgggcaaggtggattgatcatgtttgatctcagttcaactgttgcagtctacagtactccagatctaattgcaattatagtccttgggataattggtggaatctttggaggcctcttcaactatctgttggacaagatcctccgagtttatagtattatcaacgagagaggtgctccattcaagatccttctcactataacaatatcaataatcacatcaatgtgttcctatggtcttccttggcttgctgcatgcactccatgccctgttgatgctgtggagcagtgtcccactgttggccgctccggaaattataagaacttccaatgcccaccaggacattacaatggtcttgcatcactcttcttcaacacaaatgatgatgccatccgcaatctcttcagcaacggcacatcgactgagttccaaatgtcatctcttttcatcttcttcactgctatttactgccttggactagtgacttacggtattgctgtcccatctggtctctttatccctgttattcttgctggagccacgtatgggcgcatagtgggaactcttcttggatccatatctgatcttgatcctggcctttttgccctacttggcgcagcatcttttcttggtgggacaatgagaatgactgtgtcagtctgtgtgatccttctagagctcaccaacgatctccccatgctccctttagtcatgcttgttcttctcatatccaagaccatagcagatagctttaacaagggagtttatgatcagatagtggtgatgaaaggcttgccgtacatggaggctcatgctgaaccatacatgaggcacttggttgctggtgatgtggtgtctggcccactaatcaccttttctggggttgagaaggtggggaacattgttcatgcattaaggttaacgggccacaatggtttccctgtgcttgatgagccacccataacggaaaccccggaactggttgggcttgtgactaggtctcatttattagttttgctgaacagcaagaatttcatgaagggacgggttaaaactagtggtagcttcgttctgcgaagatttggtgcatttgactttgcgaaaccaggttcaggtaaaggtttgaaaattgaggacctggatttcactgatgaggagatggacatgtatgtggatctccacccgatcacaaatacatcaccttacacagtggttgagacgatgtcactggcaaaagcagcaatccttttccgggaacttggtttgaggcaccttttggttgtgccaaagacaccagacaggcctcccatagtcgggattctcacaaggcatgacttcatgcctgagcacattcacagtctgttcccaaacctcaatcctcacaagtaccattcagcatcaatggcaggttgacaaggagactctttctgcttctcatctatttggcattattcgggtgctggctgtatgtaaattgcaaaggtgtatgcgtatctggttttcaattggatccatctcatcttctctacatagttttgtttgtgtggattttgtagcatatgctctttttgcaataaaaaaaatgtggcagttgtttggctggtgactgcctattatgagcctgcggcaataaatgttcagcaaattgcggagtaaacattgagagctccagaacatggagagaaagtgtgtattgtatatttgcgttgttcctgtaaagcatgtttagtcaaactcgaatattgtctataacaccgagtaaatctcaggcggaaacatgggcgagctttctaagtacagatttcttgctattgtaagtacttgaattgagattcgtaacatttctgctc

SEQ ID NO: 13923 - DNA, 579 bp, Zea Mays
ggttgcattttagttttccagcctgtggtgactggaaggaccttgaattcaaagactataattatggagctcaaggtcaacctatagccaaaggttatgttcagcctttgatggaggttcgtgaggcaatcgagaacatctttattatgatgggattcactgagatgccaaccaacaatttcgtcgaaagcagcttctggaatttcgatgcactgtttcagcctcaacagcatcctgctcgggattcacatgatacatttttcctgaaagctccagcaactacaaaacagttgcctgacgactatcttgagaaagtaaagcaagttcatcagtctggcggttatggctccaaaggatatggttatgattggaaacgggatgaagcggagaagaatcttctccgtactcatacaactgctgtttccacgagaatgttatacaagcttgctcaggagaaaccttttactccaaagaggtattactccattgatcgtgttttccgcaatgaagctgttgaccggactcatcttgctgaattccaccagatagaggttttgccatacaatgcttctttttttc

SEQ ID NO: 13924 - DNA, 84 bp, Zea Mays
ggaataacatggtgatgcagatgattggagcgaacttgctcacatagtcatactgatgtacatctagttttttactattaacta

SEQ ID NO: 13925 - DNA, 1914 bp, Zea Mays
caagcctagaagactcggcagcttttgcggccccgttctcttccccatcccctcttccctctctagccttccacccttcatccaccagccgctcctcgagcacccccgtcccgcgccgcctccggctccggcgagatgtcacgcttcggtcgatccggcccgccgccgccgatccgcgacacgtactcactcctcgtcctcaacatcaccttccgcacaactgctgatgacctcttccctctcttcgacaagtacggcgagattgtcgacatctacatcccaagggaccgccggactggtgactcgcgcggattcgcgttcgtgaggtacaagtacgaggacgaggcacagaaggcagttgaaaggctcgatgggagattggtagacgggagggagatcatggtgcagtttgccaagtacggcccaaatgctgaacggattaataaagggagaatagtggagccagttccaagaccaggggggcgttccaggagtcacagtccaagacggaggtaccgtgatgattatcgagatgaccatgatagagattatagaaggcgaagtcgtagccggagtagagatagatacacccgtgacaggtacagggatagggattaccgccatcgtagcccgagtcgcagctacagtcctgatgattacaagaagcgtgggagagacagtttgtcacctgagcgaagaagccctcgtcgtagccgcagtcctgatgattacaagaggcgtggcagagacagtgcatcaccagcaagtaagagccctagtcgctccccacctcgcaagatgtcaccttctcctgagagatctcccgtcaggcgcaacaatgaccgatctccacgctctcggagcccatcgacataagcgcaattcacttgcaaagcatcttgagtagctcaggatgaatggacttgctctgatcctatgtgtacgcatttgctcgatggtggcctcttctcagctaaagttgtgtagtgccgtctttcagttgctgcttcaaccttggaatactacttctgtttggcacctgaactgcttatcaaaaactttatttacatgatgcagtgaagatgtgctggctgatatgcggtcaacatgcacgtagcttactgttgaagttgatattatctgtgctgtttgcgttgttgatgatggctgatgagatgattgatgatgatggcactgcagctgcctgcaccatttgctgtctgcacctattatgctgacaagtaagattccaatgatttatgcatcgccccatgcatctacatgctataggtgttaacccccattatagtatttggatttagatgtgtctgcactgatctatcatagtcctgttttgggtttttggatcataaggtctgcatgtgcacaattaatcgttgcatgcactggatgtgctgtcaattcatttctgcggtttgccaaacatgtcttatcgagaatgcataagcgcatgtcttaagcaggtgagtattaaagctgtatacacacttgtgacgcaattcaagtttattgacatgcttatggtcataaaagggtatccttatctggctaccccaactgttctttgaacatacccacgtaggcttgcaagttaatggttcatgttttgcatgaaatactgcactaatgcatctagagtaggaaaggtatgattgcatgccgcatgcgagtatttgtattttttggtgctcgttacccttcttcagcaatagaaggcgtgggagaggttctagcaacagaatcgctgactggtcgattgacctggatctgaatgctgatgatttgccgcaaagacttcgtaccgtgtcatttgtggagtccgtcgaccgatcaagctgtgtaactaccgatggttttgtaagactagcttttgatctgtttttttttttgaaa

SEQ ID NO: 13926 - DNA, 679 bp, Zea Mays
tttgttagctaatgcttttcaattaaagtcaggtaaaaggaaaggcagccattgatgttgtctgcaacccactgggcaagtcgggcggcgcacttatccaacagttcatgatcctgacgttcggatccctggcaaattcgactccataccttgggggcatactcctggtcatcgttctcgcgtggctaggcgcggcgagctcattggacaagcagttctcgagcctggctaagcaagacatggagagggagaaggctgcccaagaccaagggaaactagaacgctcgctactcagtaagcctgcagaaggcggcactggtgatgtactggtggagcagcagacaaatgggtcggcgacgagcaaagctactggaacagagagctcgccatcgaactcatccctccctccccccccccccccccccccccccccccccaattcaatagatcgtagttaggagagtgattacagcgagcagaaatagtcggcatttaaaataattcgtggctttcgagtttgtaacagcgtgcggcttcaagcctgcccgtaatcttcctttgtaataataacatgagcaaaatcttgacagccggcagcgaatgtcgctctggagatggcaaatgtgtgttttgaactgaatggtaaatgtgcggttatctcttgaatagtatcttggct

SEQ ID NO: 13927 - DNA, 1632 bp, Zea Mays
cccggaagcttcaagaaggtggacggtcggagggacgggctacatgggtggctgcttctggtagcttcggtcgcccgccgcgccgccgccaggctgagtggaaggtagggggaagcaaggaaccagagggtgtgatgtggatgtagaggattggatgctataatggcgcaagctgctgtcgagcccgctttgaatggtggctctttgattgggaggcagccggtggttccaaggatgaagaggaagacaccgtctgaactgaggggtgagcaactgaagcggcgtacctctgaaaagcttggagatgatctgttaccttctgccacattggataggtcaaacaatggacttcggaacacagagcaacaaaagatttccaagtacatcaacacacgtgttacagaggtgttccctgtgagaaaagcaagaaaccttgggaaggaaaattccaaggatgtcttacagaataatgagaaggtttctaagtttgttaatggtacaccagcctcaaattttgcatcatcttcacttctatgtggtcatggtgacactgctaagttggacactttagttccaaccatggaggctgcaaagccaggtttcaagaaagttgagaaatgcagtgaaaatgctctgcggagtgtatctgagcttcatgtaggcgatgagaagcagactggttctaacaaatttgatatggaaaaggtactgaaagggtttggagctcgtgatgcttttgtggcttctgggctcaacggccctaatggacaagttggtggtactgtgtcgaagccttcagacatatgcccttctaagatcactgttcctggggaaaaagctcctctggattttaccttaaagactagtttgcagtttgtttcatcgtcatctgtgaagtggtgtcacaagctcaatacaagttttggcagaagtagcatcactggagccattggtcagagctgtcctcgtgggtgtcaaaatttagagtgctcaaagcttgagagcaaaaaggaatttctattctcaaaggctttacagtcatgggtatatccacaatcgctgttgccttcctctatcatatctgctatgctctcatcaactgcaggaggtgaaagtgattttcttctcaaaagacatcaggactgggaagattcatttcagaatctttactacatgctccggaagaacatgttgaatatattctatgtttatacaacacaatttgttgctctcttcattagtggaagctgtttggagaaaaagcagtctagtaatgcctacttatcacaatctacacgtggcctacgctcattactacggaaacatggcgtttgcttttctatgcctctttgcagcactgaagtggagcaggctactgaggacgaccttattgaactttcagaaatcgaaaggcgcaatgtcggacagtcgctgctttcgtttactggcaacgagaacgttcatggcctatacgacgttctattgaattacaagtccttgctgaattcattatctgctgtggatgtcccagtcttgtattcaccccagccatttcaaaatggctgtctacacatcccagagaaaggggaccatgttagtgcgacatgttagaaatgcaaactggtgcatgtg

SEQ ID NO: 13928 - DNA, 1562 bp, Zea Mays
gggaagtcataacttccgtttttgttcttatttaaagataacgtacgttgacttgtactcataatttggctaaggcttgtgctgcctatcgtgactttgtatcacaaaatgctataagagttaaaacttcttgttttttcttaaaaagttttggactagggtagtggggttttaaattttgctgagatacttctacctgcctccactaccttgacgagctggcatctgctggttacattctgctcccttcatgtagcattatggatgaagttctttgagcataagccttttgattcaagaactgtcatgggatttggagtacttaacggaatctccattgggctcctcaacttgagtcttggcttcaactctgttgggttttaccagatgactaagctggcaatcatcccgtgcactgtcattttagagacacttttcttcaggaagaagttcagtcggagtatccagatgtccctttctgtgcttcttcttggtgttggtgttgcaactgtcactgatctgcaactcaatgctgtgggatccatactgtccttgctggcaattatcacgacttgcattgctcaaattatgacaaacactatccagaagaagttcaaggtctcatcaacccaactgctttaccagtcttgcccttaccaatcactgaccctgtttctcattggccccttccttgatggctttttgactaaccaaaatgtctttgcttttaattatacatctcaagttgtgtttttcatcgtcctgtcatgcttgatatctgtttcagtgaacttcagcactttccttgtgatcggaaagacatctcctgttacttaccaagtcctgggccatcttaaaacatgccttgttcttgcttttggttatgttttgcttcacgatccgtttagctggagaaacatacttggaatcctaattgctgtagttggaatggtcttgtattcatacttctgcacagtggagacccagcaaaaaaatgttgaagtctccccacaacaggtgaaagaaagcgaggcaggccctttgatcgcagactctatgagcaaagttgaaaacgggggtggtggtgttgatgacgagcctttgaaggtacccatgtggagctcaaagtactcgcgggagtgaaaaggtcacgatggcatggcaccatacaggattcaatttagtaggcagatagtagggttggaagccaacccagagtgtaatgaacatttcagttacatttttgggcttctttagtgtcgcagtctactagcagttaaaggatctgtttcttggaaggatcctaccttcagggctctcagacctaccttgaaactagacagcaggtattgtatgattgtatctcgatatgctccacatcctcttactgtaacttccaactggtacatggcgtgcctatatccaaagatagacctcattctttttgtatcaagaagatccggataagaagacttgtgcaagatttgtagcgtttagtgaaatttgtgactgtcagtcatgttcgctttaaaaaagtttagtaatttaaaagtcaattaaga

SEQ ID NO: 13929 - DNA, 942 bp, Zea Mays
ctgggttccaattgaaaaactgctttttttcccttctcaccatcagtgatgtatgcttcaattgattattgttaaggaggcttatctctgcttacctactaaagatttgtcgtcactgcaagtgcaaactagtaccttctagttcgagagatgacattgtcttcacagaccctttgaatacattcaagggcctggaaaattacaagacgatattctgggcgcttcgttttactggccggatcttcttcaaggcattgtgggttgatatagttagtatatggcagcctgctgagaacattatcatgattcgctggatcgcccacggcattcctcgagtaccttgggatgggcatggccgcttcgatggtgcttctgtgtataaactcgacaaggatggtaagatctacgagcataaggtccacaatgttgctatgaatccaccaacgaagttcaaggtcctaccagtccatgagctaatcagatcacttggttgcccctctactgcaaaaccaacttattttgaagcttcatcacaatatctgtgcgctgggccatcttatttgagattagcttggataagatgctacatctcattgtgccgcatgctttcgctcgcaaatctgggagaaggatagcctgggtttagtgatacctccaaattttgtattttcagtatgacagcacacatgttactaagtactattgagtcatgacagttgtatatatgaacactgatagtttatagaataagacctcttagttaaggtgtacaacacttgttattgattgttataagcatcagtcagcaaactagtctgacatgtttctgttcccagtatcgagagtggtgttcttgtggccgagtttagtgagcatatttgtgtcaaccctgcacattatatttatgatgtcatatatatgctaagaaaaacagaaaaaaga

SEQ ID NO: 13930 - DNA, 2090 bp, Zea Mays
ccgcatttgtggaggaaggcttgcatcggtttatctcttccctagaatctggctgatgaagctgtcattggaatcaatccatggtgcatctctgttgattctgctcaaagatatgagaactcattttcaaagaggcaccagactttgtttcagctttcttctgatttggtggatgaagtatggaaggatcgcccgctagttgaacctaggcctgtaattgtacacccagtagaatttgcagggcgcagtgtaccagaaaagatgaaggagctaagagaaaagcttgtgcatgaaaaagccactgccattataataactgctcttgatgaggttgcttggttgtacaacattcgaggaagtgatgtggattatagcccagtggttcactcttatgctattgtaacattgcacagtgctttcttttatgttgataagagaaaagtaactgtcgaggttcagaaatacatgtctggaaatggtatcgaaataagagagtatgaaactgttcaatcagatgcaagtttgcttgcatctggcaagctacaaagttctgtacatgtggaaaagtatatggatgaggtggagagttcaaaaatttggattgattctggctcatgttgccttgcactctactcaaaattgagtccacatcaagttttgacgcttcaatcaccaattgcccttccaaaggctgttaagaaccccacagaactggatggattgaggaaggcgcatattcgagatggtgccgctgttgtacagtaccttgcttggctggataatcagatgcaggagaactatggagcttctggttatttcagtgagataaaagggtcgcataaaaatgaacatttagcaaccaaacttactgaggtgtctgtgagtgacaaacttgaaggcttccgtgcaacaaaagagaactttaaaggtttgagttttcctacaatttcatctgtgggaccaaatgcagcagttattcactataaacctgaagcaagcacatgttcggaaatggatgctgataaaatatatctttgtgactctggggcacagtacctggatggtacaacagacattacaagaactgtacattttggtaaaccctcagcacatgagaagtcatgctacacagcagttttgaaaggccacattgcactagacattgctgtgtttcctaatgggacgacaggacatgctcttgatattctttcacgagcaccactctggagagagggtcttgactatcggcatggtacaggccatggaattggatcttatttgaatgtccatgaaggtcctcatctaattagcttcagaccttctgctcgaaatgtaccgctgcaagcatcaatgactgtgacagatgagcctggttattatgaagatggggcctttggtataagattggagaatgtacttatttgcaaagacgccaatgctaagtttaattttggagataaaggttatttggcatttgaacatataacatgggctccataccagaccaagctgatagacaccgggcttctgacccctgttgagatcgactgggtgaacacgtaccactcagactgccggaagatcttggagcctcatctgaacgagcaggagaagcaatggctgatgaaagctactgagcccgtagctgcaagaggctgagccttttcgtcaacgttgcatgccaccgagcgccaggctcatcttctgcgtggcatacatataagattggctgcccccgctggttaaataataatagcggcgaaggaacaggatagcttgttctcaacgctgatcttcgccgctaaagtggagtgtttggcaggatgctattttctttcccattagggtacgttcgggttttacggaacggtaggtttttatacggaacggtgggtacaacaattcctagagccggattgtttctctaattatttatataaggtttgatcaattgaaataattttggatccattcttgacaacctaaggcccataagctgatttgtacagttattctgggaagtcgcttccaactgaatacgctgctaattgtttcgcccaaaccggatagccttctttgacgctaaataa

SEQ ID NO: 13931 - DNA, 993 bp, Zea Mays
cacgctcgcatcgcatcgcatccaacggcaactgccaaggtcgccgaagtcgacggtcaggaggagcatggccgaccataaggaggagcagtctgtgatggacaagatctccgagaagttccacggcggggactcctcgtcgtcgtctgactcggacgacgagaagaagaaggggtcttcttcggcgtcggcgacggaggccatgaaagccaagatctaccgtctcttcggccgcgagaggcccgtccactctgtcctcggcggcggcaagcccgccgatcttgtcctatggaggaacaagaagatctcaggcggggtactcgctggtgccacggccatctggctcctgttcgaggttatggagtaccatctcctcaccttggtgtgccactgtctcatcgtctcgctggccatcctgttcctgtggtccaacgcctccagtttcatcaacaagtccccaccaaacattcctgaggtgaaaatccctgaggatgtgtctgttaatgttgcactgacactgagatacgagatcaacaggggctttgctaccttgagggagattggacatggacacgatctaaagaaattcctaattgttatcgcaggtctctggctcttttcagttcttgggagctgttgcaacttcctgacactgttctatattgtctttgtggcactgtacactatacctgttctgtatgagaaatatgaggacaaggttgatgcttttggtgagaaggctatgatcgaactgaagaagtattatgccatcttcgatgagaagtgcctatcgaagattccaaagggcctcaaggataagaagcactagattggtagtaaggatttgctacacctctataacaagacacaagagcctgatttttcgcctttgtactagaggattccaataacatttttacatgccttgcgggagtacgcccttggacttttgctgatggaatctgcgaccgaaaacttatggtcttatttcca

SEQ ID NO: 13932 - DNA, 372 bp, Zea Mays
agaatatctgtttcctaaaagaatgcaaagtgcggccttcaagatcttgaggactcgactgaaaactgtgccattcagtgaaaatattaagcgcacatcttcagcaaatccatactcccagattctgcaagtgacagaagatggcaatagaaaccaagatacacagaactatagtgcaatcaatttcccgtcccttctccagcaatttgagcacatgcagctgcagcaccgtaaccatttgaaggatcaactgcaatcccgcaaatctgcttcagctctaacgttatctcaggaactttgttaaacaatgttttcttgatgtaaagatgcttatcgccgaagcagaagattaatatctgactttcaacgtac

SEQ ID NO: 13933 - DNA, 908 bp, Zea Mays
ccgagagtagcagcttcaaattggaatggaaaaggctctttcctattcacctcgagtactgctgtgtatgactgcagtgacaatggattctgcagtgaggattctccttgtgtacccattggtcaaagcactcgtactgatgtgcttctaaaagctgaaaatgttgtccttgaggcaggcggctgtgttcttaggctagtaggactttataaatcagatcggggtcctcatgtttactggctgtcaaaaggaaccttggatgtgcgtcctgatcatatactcaatctgatacattatgaagatgcagcctctcttgtaatttccatcatgaaaaagagattacggagctgcatctttgtgggttgtgacaacgagcctctgtccaggctagagatcatggaccgtgtcaacagaagcaggaaatttgacacacagtttcatggcttcactgggactgatggtccgctggggaagaggatggacaactccaaaactcgggcaaagcttggatggcagcccaagtatccgagctttacagagttccttggtctcagcaatctctaactttcatgcgatgtcactaaatacctgttattaaagatgaatatactgatacataaaagagatgatgacagatttggaagtggaatgttgtttgcttataccgcagttttcgactatcttttgatttcttctgttagatcttgtaaagcattgcagcatggtgtggcatgtacctgtgttgccttctattcgcttctgttaactcatgaaagcattgacttcaatacctgttaattgtttccatggcttcaatctatcgaaccaactgtctctctcgatgttctctagaattgtaacaaaaattccaatggtactttttggataagaacaagttttgatgaaaa

SEQ ID NO: 13934 - DNA, 1566 bp, Zea Mays
ttctgattgaatagcaccagcgtgctgattatcatcatattagtgctcaagctagaagggttttatcggcagcatttaattcacagatatctctctgagaaagcaacatctctggcaactggtgttattagtgagctggttaaggaactgagagtaaaacctgtgccaactgttcttgcttccttttctggtggctcaaaagggtgcatgtacaaggttattcagttactagctggaatatgtgaaggagatgcaaccatgaaggattatcggttagtgagaaactgtatctgcgggcaaatttatgactctagccctgtagattttgtcagtgatgtgggcacccagtttctccaaaagcctgctgttggaaatttatctcagtcaactatattacgttcatggatggcaaaggttctagcttctggcatggatactctcttcccaagcaggattgaagctcagcgtgcagagtactggcacacactatactcagcagcaggattgggtcctgttcttatattttgctcagaagatgataatcttgctccatgccatattatctgtggctttgcaaggcgattgattgaactaggcacagatgttaaacttatgaaatggagcgactcccaacatgtcggccattacaattcacatgaaattgaatacaggaaagctgtagatgatacgttgaagaaggctcttgttaccttctgccaccgaagccaactatatgactcaaatatggctggtgaccaggagtataagatagcgcactcagtgtgcagtctacacaatgctgcagccaattcaaatgagagcttaagaagggttgctaacagtcctagtgatcacttcttcttgccaagttcgaaggaccatgatgaatctcgggaacccagttctctaattgaggatcagaggcgccacatctcacatccaccctgcatggagcctaaaggagtccttggccaaatcctgtttgatgtttgtgttccaaataatgttgaaggatgggacattaagccgacagtgtccccgaatggacggccaacgtttgcttctgcccggcaacttggtccattcaatcccataaggtacttccggcgctcaagactgtagttttctgcaggagttgaggtttttgtatatatataaccgaggcaaggtggctagtagcaactctgagcaagattttacctatgtaagttccctgtaattgtttctgtttctgcttttgcaccgcttggcgagagaatgcacatatgctttgtatatcatatgagtgtgtgtactagaagggagatcctggacatatagtttctaggcgggttgcaaggtgcacgctaacattgtagccaaggggaatggattattatgttcctgtagtttcctctatatttcatgtttgtgaaatataattattgggaaaaaaaaacttatcttcatttttagcgatcatagttgctgttagtattttaatgttgatctttcttttttcgcttggtgtcttctgtttctttgagtgttgttttaggtttagcgctgtcagcgactgtatttccg

SEQ ID NO: 13935 - DNA, 935 bp, Zea Mays
atctgtgaggtttttcattctagagaagtgaaaacattggcctccttgggctgacaaaagttggaagtaggagggtgatccagatatcaactgggtttatgatattcttctccatatttgggaaatttggggccttctttgcatcgatcccactgccgatctttgcagcaatttactgcatcttgttcggcattgtagctgctgtgggagtctcgttcatgcagtttgccaacaagaactcgatgaggaacatctatatcatcggactctcgttgttccttggcatctcggtccctcaatacttcaacggatacacttcttcagctggcggccacggacctgcccggacaaatgctggatggttcaacgacattataaacaccgtgtttgcttccgggccgacggtggcgctaattgtcgcttctgtcctggacaacacgctggagttcaggggctacgaggccgaccgggggctctcgtggttccagccgttcctgcgccgccataagggatactcggaccccagaaacgaggagttctacagcttcccaatcagcgtctatgacgtcatcccagaccgatttcggcgctgactccaaatgaccgctgttaccccgcagctgtgcatgtaaatccccgtgagtcttgttagtcttactcctgtgacttgtagcggctggttctagggggatatgggtaaaagaatgcttagggcaattgcttggtttgactcttttcgggataagaaacgggttacatgataatgtagagctctgtgccggatacattggttttgggaagggttacagaagaatactagcaccttacatgttgatgggcatttagttgaaggcattggctatttgtttttttgcccaatatatggctgttggagcttgatctgctgactgggaaaagggggcagtactttggat

SEQ ID NO: 13936 - DNA, 7111 bp, Zea Mays
ccgccacacagctgatcctctcccgagtcccgacccgtcatcgccgccgccattgtcccgccgcgcagggtttagggttcagtagcggcggcaccagtttttctcctcatcaagggagtcgcggccaccgccaacgagacaagctgtcggcgatgtcgtctatcgcatcgcagctgaaggccatcaagtcggcgctcggcgctgcgccggagccggctcggcggcccgtcacccggccgtctgtgctcttcgacgccaaagaggccgccgacatcgacctccgggccatcctgcccattgccctctctgggttggagcaccttaccagcgtagacgagagatttgcaaaatacagcaacactctgttcagggagactagccttgaggtgaaccgcgaacagttgactcccaaggagaacgacaaactcaacaagtctatctccacctaccttcgccttctagctggctatttgcatcttccctctgccctcaagacccttgaataccttatccgcagatacctggtgcatgtatacaattcggatgagttgctgctgagcgcactgccataccatgatacacatgcgtttgttcggatcgtgcagttggtcaacttagggaatagtaactgggcatttcttggcggtgtcaagtcctcaggtgcaccgccacccaggagtgttctagtgcaacagtgcatccgtgataaggctgtgctggagaccctatgcaactatgctacaccaacaaaggaattcagtcactcgaagacagtcgtctgcttttgcactgctgtgattgttgagtgtttgggtgctgtccctaagcttgacacagatgtagtgcagagggtgttgggatttgtgtttgactctcttaatcctgcagtgacgcgagaccaggaatataaggctggcgctcttatgattgttggagtacttggaacccgtgcgactctagcgcctaaacttgttcaaaatttgattcttttcgttgcaaggactgcacaacatgatgcattcgagtcagttgacttgccatggcttcgtgtttcagtgatggctcttataagtcttgttcagtcccaatctgtccatgttttccctaagaagccactgatggttttgaaagacatcagggatttttctggtatactttctgtattatccagtgaatacaacatcgagaaattcattaggctttatgttgaatcattaattgactacagtattgtcgatggtacctgccacacacacctgattgaaactattgagagtctgccaatgaagaatttcattgaaagtgtcgtgtgcaaaattcttggaaactgtatcaaggtatctcgggccacaggaatcccagatattaatcacacagaattatgggctaagaaaatttttaaggcaattgaaagaaaatatcccctggagctacgtgatgctattcataaatttcttgagaactctgaaactaattcaccgggaggggattctttggctgaggtttttgggatattgtttgatgaaaacaagaatttgccaactgaaatatctgactcaaacatttggttcagtctcgatcatccaaaggctacggttcgtcaatctgctctctcaaaagttgctacatctggcatcttcaataacagaactctaaatcctcagaagtttatcaatatgcaagatgctatattacgtagtctgtatgatgatgatctaagtgttgtccaagctgctttatccatagaaggactagctgctgttgccaatcctgatagcctgttaaaagcatatgattgcgtgctcaccaaatgcatcaaaatcatcaacaaaggtggttcaaaggcattaaaagcttctgatgttgctgtttcttgcttggaaaagctggtaacggaataccaatcgcatcatatggaacatgccaaggatatagctacattagtgtttcgtctccttattgttcacccaaagacccttagggtgaacataaaggccttggagctagctaagaaaatacggtgggagttctacgcaagtagttctcttgtatatgatggggtcgattttgataaaatgaagaacatgagtgcagactccattgcttctattaacatgaacaacatcaaagcttttgctgaaactttcctagcagacccaaataagcatgtggagtggttagctaactctggaagtggaagtagattttctaaaactctgtttctgctcatagtattgcaaacacttgtttccacagaagctttggatgagcaggtgaatctttgtcatgcttgtttgccagtcctgaaggatgaatgtcatcacatacagcccaaagatagcgatgttggtgatgagatcagcattactaaccttgagatgtgcagtttagaattggtgaagcattttttcaacagagacacagaggcattgaatgttagaatccttgtatgtatattttggggtatagtaagggtgcagtcctcctgtattaagcagaatcccgtggttggcagtggtggaaacacaatgctggatgatttgtttctcttcttccttgtttcacctgccaaaaatatcttccagaagcacctacagtatcttgttaattgcattggagcaccttttcaatttatttcaaagtacttcctggatgaagatttatcagaaagagtccaagtggagagtcttcttgtgtttgcatctatttgttccaagtgcgcttcctctgacaataatagcttggatgaaagcatctgtgtgcagcttctactaggttttccttccattattctaccacttgctcatgtcaacaaggatataagggcatctgcaattaagtgtattgaggggttatctttggtgtggcagcgcttgagcacttctgtaccaagaaatggaaacaacaccaaattacctcaatgtttgtcatctccaacttttggtagtttccttgaattgttggttaaccaaaagaccatgatctgctcggacgcaaaatttcttcctgcatatatttcatctatgctgagcccatgtaaagatattctggttcccgagaatctccatgaaagatttgatccgcatacaaaggatactattcttactttcatcttgcgctctgctttgaggctccctccttacggaaagttcatggttctgtcagtcctgaaaggagtaggaagcatcttatttcatgcagaagatgtgaagtctctgttttttgatcttctggaccgtcgtgatcagtaccagaatcgacataattgcaagcagatcctatccacccatgaaatgcataccttgtgcttgcttttggaggttttattctcaacgccagatcatgtgaatattggttttaacatgtttgaacctttgatgaaagctttaaaggttgatgcttcgtctccaggtgattctgttgttgtgatgccatgtcttactgtcctgcagaatcttcaaccagggttctttgataatttgaagactgatactaaggaaaaagttgttggacgccttatttccttggttcgaactgagagtttcgtagttcgaaatgctgcacgggatgctttactgcgtattaatgttcattcttccactttagtaaaatttattgaattaatttcaacacttggtgatgcaagaggacattcaaaaaggataaagagaaatgaagatcgggaccttaatgtgttctgcaattttgcggagatatttggagaaaattctgtagcttctattcttgtttctcttctagatatcttgtttcttaagaaagatgtgaagcaaaggtcgcgtttattacaacctcttttccagattctatcgaagctcctttctgatcaatgggtctcagttattgttagtcagtataacgaccaacaagatacctcatctgaaatccctgatttatctagttttgtaaaagaagttcaacacttggtactgctggccctcaaagatattacagatacactacaatcgggtcaccatgatgcaatggtcagcagttccgatgtaggtcttcttattgattgtgtacggtccatccaggacataggaactcggaatcatggcttttccttgatagcttctttgggaaaggcttgcccgcaactggtctcagagagtattgttgatttgtttgtcgctattggggatgctattaaacaggacgatagccactcgcaacgtgttttggaggatttattatctgtcttagtcccatgttggttatcaaggaccacaagcatagaaaagcttcttcagatattcattaaagctttagcagatgtgcctgaacataggcgattgacgcttatggtttacctcttaaggaccatgggaaaagaaaataatttgagtactgtgatcatgcatctgttacactcggtggttgagcggatttcacactcgttttctgtacatcatggggacgattatagattggctatgtcacaggagtgggagtatggattggcagtaaatgtgcttgaccagttttcgtataaattgtggtttccttgtttgagtaagcttctaaaaaacatcagggtgcatgagaagcaagatctgcatcttatgctacatttggcaatgaggcttattctatttaagttgcaagatacagaacttaattttgaacttgaatctgaggaagctgctaattctatccagggttctcttggggcacttatggaggaagttatcttgtgtggtgtgtatgccagagataaaaaaagagatatttgtactgacattactaaagaagtcagagattttgcaaatacaatactcaaaactattacaggctggatgcgtgcttcgacatacttgatgggaattactctgctgttggatcattcagataatcatgtgaaaagaaagacacttcggattttgtctgaaacggccagaggaaacagtttggttcagaagaatcaaaggaaagcacgaaaactgaagcatatatctggtactactattaaagtagacaagagctctggtccttatttcagcaaattgtgcttaaagattctggagttgattgacagagttggtgattcggacactaaagtgaaagtagctgctatttcttcgcttgaaacactagcaaaagaatatccctctgataatcctgtttatagcaactgccttgcaacaatcattgatcaaattggctctgatgaggcagctgtgtcttctgcattaattcatactgtgggctctctggtaaatgtgatcggatcaaaagcattaccacaactcccattaatcatgaaaaacataatgctaatgtcacatcaaatttcatgttgccctagcggaaattatgctcatggttccactagaactgccgctgaactttctaaccaagacataactgtgttgctatctgcactgacaacaattgaggtgattgtggaaaagctgggtgaatttgttaatccatatttgaaagaaatacttgatctggtagtactgcatcctgaatgcagcactcaaatgcatgccaaattagatgcaaaagcagcacgtgttcgagagctattgactgtaaaagttccagtccggcttatcctctcacctttactgaatctgtactctcttactgcaaattgtggagatgcaagtcttacgttggcattcagcatgcttgctagtctagttggtacaatggaccggctggctgtaggaacttaccattcaaaaatatatgaacattgtttagcagctcttgatctccgtcgtcaacaccctgactctttgaagaatataaatatggtggaacaaagtattattcatgccataatctctcttaccatgaaacttacggagggcacttttaggccactttttcttcgtactttggaatgggctgaggctgaagttgatgaatcctcatcaaagaaaagtttggaccgtgcaattgttttctacaaattggttaacaaacttgctgaaaaacacaggtccttgttcacaccttacttcaaatatctactcgagggatctatacaatatctctctgaagacgatgctttgggtggttcgaagcataagaagaagaagaccaaacttgtagatgttcaagttgaacagaaggataaattattggggttaaaattgtggaatttaagagctctagttttgaaatccttacaccaatgtttcctctatgataatgaccagaagatccttgattcctctaatttccaggttcttttgaaacctattgtctcccagttcgttgtggaaccaccaaaatctgttgaatcagttcttgacgctccatcaattgaagaagtagatgaaactataattctgtgcttgggccaaatggcagtaactgcacggacagatgttctttggaagcctcttaaccatgaggtgctgatgcagactaggagtgatgaagttcgccccaaaatgctgggcctgaaggttatcaggtacatggtccaacatctgaaggaggagtatgtcgttctcgtaccagagaccataccgttcctaggcgaattgctcgaggatgtggagcttcctgtcaagaccctgtcgcaggagatcttgaaagagatggaaaccctcagtggcgaaagcctccagcagtacctatgaggcatcatctcctcgcggtagtaccgtttggctgatgaactgtagaacatctactcatttcctgtggattaccagttcaacagatcggcatacttgtcggatgtctggaaactgaaattacatgctgtccaattcatggaaggcaagtgcaattaacttaaccttcaaggaggcaaatgcagtttaaggaaaacttacacgttgaaagcacccatattatgttttcggatgagttcctatgtagctacgttgaaagagtacttttctacacaattgattgaggtgttctcgatttgatctctttttgagcttttggtgtcgttgggattttgcgctaaatattggaaattagaccaaggggctgtttgttcgttgtgaaggaattataatttacttaatatagtaggttatttggtttggaatttaatattccatcacatgttaaagtttagatataatcctatcctaaatttatagggtgagaatat

SEQ ID NO: 13937 - DNA, 802 bp, Zea Mays
gtcgattccaccatgcggtattactgtgactactgcgacacctacctgacccatgactcgccatctgtccggaaacaacataatgctggatacaaacacaaggcgaatgttcgaacctactatcagcaatttgaggagcagcaaactcaaagtttaattgatcaaagaatcaaggagcatcttggacaagctgcagctttccaagcaggtgcccctttcaaccaacatctgcttgcattcccaggagctatggcccgccctcgtcttccaattctgccaacccctggcatgcctcatgggtttcctcaagcacctggcgcaccattgatgccaggaattaggcctccagccatttaccaagcaaatccacaagcatctgcaggtccaacttctggtgctcctccagctccaccgactgctccacagcctgcgttctcctatgctcccccatcagaggggaaccactgattctgttccttaggcatgacttgggaggccatatgaagtatgtgcagaaaggctgttcctttggaggttgatgttgtcatcttttaactaaggtcatttctatcatcctgaattcaagatattattgagaaaatcttccaatttgtgtggctgggtctctgttgttcgatgcatgttaactatgttagtttttatataaatttcaataaaaaggacgcttgaaaaatcaaaactaaattctctgagaattgtttgtggcatgggatgcttgaactcggtgttgtgattcgccagtattcatgttttagatgttcttatgtccacttttaccatc

SEQ ID NO: 13938 - DNA, 435 bp, Zea Mays
aacagaagtgcatataattctagtggtcttgattatctgcgtcacaaaaattgcaaaatcatctctggagaaggcattggctgagaatggagagctccatgtaggaacatcgcagcttccaggtgtaacctctcccttggatctgcaacaacctcttgtaatcaagattgacacatcaaatgaagaccacgagaagtaaaagtgttgtgtttacaatctcagatgtaaattctttggttgttgagtcggtagactgtatatacacccatactctggtgaggcccgtaaatgggtaaaaaagacatcatccccccttccaaaaaagggaatgaagtttagtttactgataggttatagtaatacgatatgcgctttgtttcactccacgtgctaccttatctttggtgaaaatactcgcacttaactgggttgaga

SEQ ID NO: 13939 - DNA, 683 bp, Zea Mays
aggtgtatggtttctatgatgagtgtcagagaaagtatggcaacgccaatgcatggaggtactgcactgatgtttttgattaccttacgctatcagcaatcattaatggccaagtcctctgtgttcatggtggtctttctcctgatgtacgcactattgaccagatacgaacgattgatcgcaattgtgaaattccccatgaaggccctttctgcgatcttatgtggagtgaccctgaggagatagagacatgggctgttagtccccgtggagcaggttggctgtttggatcgcgagtaacagcagagttcaactttgttaatggtatcgagctagtttgccgggctcaccagctggtccaggaaggcttaaagtacatgttccaggagaagggccttgtaactgtgtggtctgcacccaattattgctacagatgtggcaatgtagcttctatattaagcttcgatgagaagatggaaagagatgtcaagttcttcacagagacagaggaaaacaaccagatgcgaggcccaaggactgcagtcccatatttcctctgacttcaattgtacattttagaagtcaacatttaaatctgatactttcttgtacgcagctcctggcatatattcatttcgttggatgtcatcagcagatggatgggctggatggcttgccgttgc

SEQ ID NO: 13940 - DNA, 1290 bp, Zea Mays
ggaggacccgggttaatggtcgagttagatccttaccttaacaccgatgctgggactatgtctccattcgaacatggtgaagtgtttgtgctggatgatggtggcgaggtggacttggatcttggtaattacgagaggtttctggacattaaacttactcgggacaataacataaccaccggaaagatctatcagtctgtaattgacaaggagaggaaaggggaatacttgggaaagactgtccaggttgtgccacacatcacaaatgccatacaggagtggattgagcgtgttgctatgataccagttgatggcatggagggacctgctgatgtctgtgtgatagaattggggggcactataggtgatattgaatccatgccatttatagaagctttgggtcagttctcttatcgtgttggtcctggcaacttctgcctggtgcacgtcagtctagttccagttttgaatgttgttggtgaacagaaaacaaagccaacccagcatagtgtacgtggtttgaggggactcgggctcactccaaatattttagcttgccgcagtactaaggaattagaggatagtgtgaaggagaaactctcccagttttgccatgtgccggcagcaaatattatcactttgtatgatgtttccaatatctggcgcattcctttgttgctttgtgaccaaaaggctcatgaggctatccttaaagttctgaatctggaaagggtggatagcattgcccgagagccgaagttagacgaatgggttgcaagagctgctatatttgatacccttcatgacactgtgaggattgctatggttgggaagtacactggcttatcagattcatacctctctgtgttgaaagccctcttgcatgcatctgttgattgccgtaggaaacttgttgttgattgggttgcttcgacggatcttgaggattccacagcaattgaggcacccgatgcatataaaacatcatggaatttattgaagggggcagatggaattttggtacctggtggctttggtgacagaggtgttgaagggaaaattttggctgctaagtatgcccgggaaaagaatgtcccatatcttggtatatgtcttgggatgcagattgctgtcgtggagtatgcccgtcatgttatgaatttcactgatgccaacagcactgaatttgatccaaataccaagaccccttgtgttatttttatgcctgagggttccaaaacacatatgggtgcaacaatgcgcttaggatcaaggaggacatttttcaag

SEQ ID NO: 13941 - DNA, 310 bp, Zea Mays
  misc_feature (1)..(2): n is a, c, g, or t
nnaatgaaatgttaggttggtgagctcggctggggggtgggtggtgggtgggttcttgtattctttgattttgtagcctgatgaatggaacctgtaaattggtgatgtgtgttgtttatcaaaaggaaagcgaaagaaataatagcagacgggtgaggtgttgccattgccaatatctagctgttctcttgtgctttgcctgccttgaagggaagaggaatgttctcttgtgagctcgacttgtcaactcctatatactaatccattgattttccgtaaaagaatggtgtcaaggttagatatggcccgc

SEQ ID NO: 13942 - DNA, 158 bp, Zea Mays
gacggggtttgttgcacgtattagctctagaattactactgttatccgagtagcacgtaccatcaaacaaactataactgatttaatgagccattcgcagtttcacagttcgaattagttcatacttgcacatgcatggcttaatctttgagacaagc

SEQ ID NO: 13943 - DNA, 716 bp, Zea Mays
atgcatgcactcagctccacgactcgatcgatctactggcagtgactcgcgtaacacgtgttttttcaaataaaaaaagatagatgccagtcccggtgcacatggcatgtgtcccggcccgatcgatcaggacacacccggcctatatattgagtacctagttacgtgtgcttctcagcagtgacgaactcgaagcttgcgttcttgtagtagaggtcggcagcaagcggtagagcgagaggtcgagaagatgaagagcagcactctgttggcgatcctagttctccaggcccttctggtctctgcggccgtggccaaaggacctgcagggccgacgacgaagaagcagtgctggtgcggcgagtgcaccagctggtcgggcgtgtggacctgcgacgacctcctcaccaagtgcgccgccacctgcaagaactgcgtccccgtgtccacggacaagggcaccaccaagtacaggtgccgcgacttcctccccgaaaactgcggctgcaagatccactagactcatccacagcggcacagccgatggatccttccatgctcctccgtccgtccgccttgctataagcaggcaggcagccaccaataagctagctcttgctgttgttttgcatgtttgattgggtgtcccttcccagtcgagatggaataaagtcaggcgcacgtactgacgtgttattacgatatttctcccctaa

SEQ ID NO: 13944 - DNA, 5125 bp, Zea Mays
gcgctttgatttttacagaagcgtctctctcctcagtcctctttccctctcgctcccggatctgaactcctccgaaaaaatcgtacccgagagaaaccctagcactggaggttttccgccgtggcgcctcgccggagacctccgctcgccgtggccgccgacgcgtcgccctcgtcgtccccccggaagtccggcgaagatgcgccgccgcccgccgggagcacgccggcggcggcggccggcgtcaccccgtgcgagcaagccaggaaggcactgtgtgtgcggtcgccgtttgatggggaggaggctgctggacgggacccctggctgccatcccgtgttgccagatgggcggcggtgggcgacgtgcggaagaatcataagaagagccagccccaacagcagcaaccggagccatcccctcccctggagcagaacccgagagtgcctgccgggcgcaagggcttttgggagaagttggagccctattttcgagagttcacagtggatgatttggaggaattattgacgaagcatcatttctgtgctagccagattgatccatgttttgtgatacctgttgtgggctctaaggagttaggggagaattcagatctatctcatgcttttgaagtagatgaaagtccagagttgagctcgaatttgggcaaccataacaaggatttggataggagcaaagatgatattcaggacagcttggattatattggaggcagtgtagagctgattactcaagatgagagtaataaagataattgtgatcaggacatgcaggaagtgattgtgcagcaagaggagcagccggttgaaatcgctttagatcaaagcaggactgatagcattgttttaccgggatccagagaagatcggtggcgttctctgagctggctcttaggagcaaggggacggtttgtgctcacttcagagcgtccaaacaagaagaggaagctcttaggtgcagatgctgggctagagcaacttgtacttctgccatcccctgaaggcgaggctggttcagtctgtgatgtttgttgtttgggagaaagtgacatggtgtctaacaggatgcttcattgcaagaactgtgagatatctgtgcaccagaagtgttatggtgtgcatgttgtgccagatcgtttctggttttgtgtttggtgtacccggaatattgggatgccacggaggttgacacggagcgatgcgtgcaggactgtgttaatgccctgtgtgctctgtccaaaggagaaaggtgctctgaaacctttcaaaagggaccctggtccatccatagatggaggaaaccaggaatttgtacatttattttgtagtctctggagaccagagttttatgttgaggacatggaatcaatggagcctgtcaccaatgtagtagatacccaagagaatcaatcaaaattggtgtgcagcctttgcaaggtcatgcatggtgcatgtgtccgctgcagccatggagcatgcaggacttcctttcatcctatatgtgcaagagagttcaagcttcagattgagatatgggggaagtttggtcatgataatgttgagatgcgagcattttgtgcaaagcattcttctgtcaaaagcatcagctccatacagaatgacaaaagtgtatctgaactggactccgctcaagttgagctgcatgatggaaagcctgttactgggaaggaacagcaagtgagatttacgcgcagtaacaaggacaaatttgtgaacagcacaattactactagttcttgtagcctaaacgaagcacatacaaatgaagtggctaccatttcacccgttcttggaaggactcaagaaacacaaagtgcagatatggctgctgatcaaccctcttcagatgggaatcttatgagcgattctggagatgtttccggaattcttagaaagctagtcgaccaaggaaagattagtcttgatgacattgaattggagccaagtcttcgttcagaatcagtggaagctgctttccagccggagacaactgcatactcccctggtttgaagttgaaaatgatcaagtggctgcagaactctgagtgtgcaccttctgttcaggttaagtcatttaaagagggttcattggcacaaggtacattgcctaggagtgaaagcaagaacttaaccactgctacatttcaatcaggacaggaggaagccatttcatcgattgaccatcattttctggaaaatgataatgctaataacggggatttggttcaaaatggctttcatagatgtcctgatcctgatgtaaatcagatttctggccgacatttgctcaacatggatggttactgttgctatattcatcctatcattgagaaaaggttgcaaggtttgtggagtaatagtttggagcaaactatacagaaaaatggttatcatgaagagttatcttggtctcttcatgacgaggactttggtggttcatcaacaaaacttgtgcaattaacaggcaaaactgccatggaagtctgtaaagcacaatcatcagatactctcaagctttcacctgatgacgaaatagaaggggaaatagtttatttacaatccaggctacttgatggtgttgtttctatgaagcagagatatgaagatttgatactcaaggttgtccagaatatttcttatgagttggattctttcaataaaagaaaatgggatcatatcattgtgaatcagtttcttcgtgatctgagagaagctaagaagcgcggaaactcagagaggagacacaaggaagctctagctattctggctgcaactgcaccttctgttacaccgacctcacgaaacacaacagtgaggaaagagacagaaaacaatgtgacacctgctaaacgagagaacatgccaagaagcattactggatcctcaagaattggccaactatcttcttcaccacaagcaaaggatttatcattttccaacagtgatgtctcagacgaaactaactttggcattttcaatctggcgaagttctccaagaaaagtgctcttccctgtgatatatgcatgcgatgtgatacaatattgaaccgtatttttgtttgctcgagctgtaaggctactgtacacttagattgctaccagagtctggtgtatcccactggcccatggaaatgtgaactttgccatgagatgccctcagattctgttacctctggtgaacaatcagaccaaaatggtccgaaagcttgtttggtgcaatgtggtttatgccatggaacatctggtgcttttagaaagactgtgaagggtcaatgggttcatgctttctgtgctgagtggctgttggagacaacattcagaagagggcaacataatccagtcgacggaatggagaggcttcatcacaaggataaagatacatgctctatatgccaccgctgtgttggtgcatgcttgaagtgctgtacattagattgtcaaattacttttcatccttcatgtgctagagatgctggtctttacatgaatacaaaaagattgggtaatatgttacaacataaagcatactgttgtagacacagtattgaacagagaaaggcctatagtcaacaatatggtcctgatgaaatcaagggcatgaaacaaatgagggttgaactggaactattacgtttcctttgtgagaggattgttaagagagaaaaagtgaagaaagatttggttggatgtgcacatgacatacttgctgcaaggaggataactgccgtctcttctttgtggacttcatgttatacttctggacctggagcaagttcagaatctgccactacttctgttaataacaaatcatatggtggaacaattcaaaggtctgatgatgtcacagtgagattggaagatgtcacagtggacagtacagttaccaaaaaacatactgtcaggttttctctgcataacagggacactgataggaacactgctgacagttccacatcaacaatatcatacaaacggaagttggatgatggggaatcacttgcattcaagagtcatcccggaacaccagctactgccttgttggagtcacgggatgcagaaaagccaatagataaaaagctcagggatatgtatcaaaaggagcttgtcatggttacttctcaccaagctttgttgaagaacaagacccctccagagagatatgtttacactcgccgcagctccatgtccaaaaggaagcaatgtagtcagcatgtagttcaaagacctggtggatgacagcaggcgaagtcgcttcttgggatatctggataataatattcttggaagctcgatgcagaaaaggacaaagtaaatacagcaagcggggctggccattaatcatgacagccgcaggggctggcgcgtggccgcactggaatcggaaatttggtgcaaattgggctcttcgaagatttgaccaattgagcccatgtcaccttggagtccaacatgcgctgaattcattcactaatttagtcaagggcaggttttgtgaaatacgcccaattgccagtatggcgtcttcacattatgtcgaagaaggaaatcgattgagttatgtgtggtgaaagaaagtgggtagacaaatattactgactggtgaaagctaccaataggccatccgcacattaatgaccatgtttaggagttgttgctatgtactaacagaactgcatgttttgttgtgtggctccattctgacttgtgaaatgaactctcggtaagtcatagggcatttcatgtttgtacaggcatgtaggtttagctttctggtatgtagctaaattcaaagcatcatcttgtagccttatgtggttaaccagatctttgatctattagttaatttagtaaaccaagagctgccttgtgttcgtatgggttgagtcgggcttttactgtattgatatctattattagcgtgaaggctgtttattgccgatgttgagcttcataagcattatctttttttaacaaaacacagtgcttgttttgtgaatacttgtaacctcgaatgtgtaataaatgtagcacgtctattcaactcaatggctcaagtgtcatatatggtcaaccttgcatgtcc

SEQ ID NO: 13945 - DNA, 330 bp, Zea Mays
tggatgcaggtttcaattttggcaggaacacttgctcgacttgatagagaagcaccatactacaagaaggatggatataatgatttcaatacgttctatatgcaggctgcatctggtactaaaggtggctcaagtggttctcctgttgttgattgtcaaggaagggctgttgccctgaatgctggaagcaaatcttccagtgcctctgccttcttccttccattagaacgtgttgtcagagcattggatttgatacgtgacagttgggatgcatttggtaccaagacagaatctgtttatattccacgtggtacacttcaggcaacctag

SEQ ID NO: 13946 - DNA, 1851 bp, Zea Mays
cgttatattcatttataaaattatagatgtgccacaggcatggcgtcatgcaccgggatcttaaaccagagaactttttatatgcaagcaagaaggagagttcccctctgaaagcaatcgattttgggctgtcagtgttcttcaggcctggtgagcgatttactgaaatcgtaggcagcccatactacatggctccagaggttctaaagcgaaactatggccctgaagttgatgtttggagtgctggagtgatactttacatacttctctgtggtgtaccaccattttgggcagaaactgaacagggagtagcacaggcaattatacgatctgtggtagatttcaaaagagaaccatggcccagagtatctgagcctgctaaagatcttgtcaggcggatgctggacccaaatccattgacacggtttactgcagcacaagtacttgagcatccatggttacatgactctaaaaagatgccagacatttctcttggtgatactgtccgagcaagactgcaacaatttgctgcgatgaacaagttaaagaagaaagcattaagggtgattgccgagcatctgtcagtggaggaagtagctgacataaagcaaatgtttgaaaagatggacgtgagcaagaatggcaagctaacattcgaggaattcaaggcgggccttcgtaaactggggaaccaaatgcctgattcagatcttcagataatgatggatgccgctgacatcgataaaaacgggaccctagattacgaggaattcgtgaccgtgtctgttcatgtgagaaaaataggcaacgatgagcacatccaaaaggccttcacatacttcgaccggaacaagagcgggtacatagagatcgaagagcttagagaggcactggctgatgaactggagggaaccgatgaagacatcatcaatggcatcatccgagacgtggacacggataaggacgggaaaataagctacgacgagttcgcggcgatgatgaaggccggcactgactggaggaaggcatcacggcagtactcgaggcagcggttcagcaacctgagcctgaagcttcagaaggacgggtccctcggcgccgagacacggtaggcgggggccggccaccgcctaccgccacccgacggagaagtgatccgagtgttcgtcgagctgtagtcaggtgattcgattccacgcacgttccaattttacacggtgaatcttcagtcgagcttgtagttcttgggtttgtgattgtaaagatggtggttgtgcccgtacgtactgtagatgcagcagcgtgtacctacacaatttacagagaaaatgcatgctggagtagcacaagtagtcttgctttgtagtaacttgtaattagaatttgtttgtatgatatgcgatattatgatggttgtcggcggcacagctccgtgaatgcctacaagtaggggtgacaatgggctctaaattttacactataaaatttaaggatcggatcgagttaggatcgggctctatttccattcattttttaactaaaatttatttagggccctgtcaatttgtgaagaagcatttggatcgcgatccattaccagcccggctacgagaagatgctgttgctgacgcagtgctgctgatggcttgccggcgctgcttgaacttgctttggcaccagcctgtatgtagggcaaacacaagaagatgctggcacggtgcggttgtccgttgcctgcagtgccgggagccacttcaattcgccggcaacggcaacagaatcggcgattgtgcagtctcaaatccgtggttttgttttccagggcaaccgaataaaagcataaatacctcc

SEQ ID NO: 13947 - DNA, 1413 bp, Zea Mays
gttaagtcacgttgatgtactgtttcatttacatgatcgtccagcattaagcatagtctcagtttcccttctagctgtccagagcttgtctgatatatcacctttgttcctcactggtttgctggaggcagtggtagctgcccttttcatgaatatctatattgttggactgaaccagttattcgacattgagatagacaaggttaacaagccaactcttccattggcatctggggaatacacccttgcaactggggttgcaatagtttcggtctttgccgctatgagctttggccttggatgggctgttggatcacaacctctgttttgggctcttttcataagctttgttcttgggactgcatattcaatcaatctgccgtaccttcgatggaagagatttgctgttgttgcagcactgtgcatattagcagttcgtgcagtgattgttcagctggccttttttctccacattcagacttttgttttcaggagaccggcagtgttttctaggccattattatttgcaactggatttatgacgttcttctctgttgtaatagcactattcaaggatatacctgacatcgaaggggaccgcatattcgggatccgatccttcagcgtccggttagggcaaaagaaggtcttttggatctgcgttggcttgcttgagatggcctacagcgttgcgatactgatgggagctacctcttcctgtttgtggagcaaaacagcaaccatcgctggccattccatacttgccgcgatcctatggagctgcgcgcgatcggtggacttgacgagcaaagccgcaataacgtccttctacatgttcatctggaagctgttctacgcggagtacctgctcatccctctggtgcggtgagcgcgaggcgaggtggtggcagacggatcggcgtcggcggggcggcaaacaactccacgggagaacttgagtgccggaagtaaactcccgtttgaaagttgaagcgtgcaccaccggcaccgggcagagagagacacggtggctggatggatacggatggcccccccaataaattcccccgtgcatggtaccccacgctgcttgatgatatcccatgtgtccgggtgaccggacctgatcgtctctagagagattggttgcacaacgtccaacatagcccgtaggtattgctaccactgctagtatgatactccttcctagtccttgccagcaccagtgacccaaacttggtcggctgagctcagcgctcagcagctttacgtgcatctgcgccttgacttgtgcagtgggcgtcgctagcatgaatgatgtatggtgcgtcacggcctgacggttcgtcagtctgggccgtgttttgtgtccgaggaagatcgtctgtcagagatctggattgcctcgctgct

SEQ ID NO: 13948 - DNA, 2286 bp, Zea Mays
gtatttcaaatcccctcgcatccaaacacttccgtggaaaaaaaacaattaataatttattactggcagaagggggaagaagagatggtggacgaggcatgggagcgggcggtggaggcggcgctgcacgccggcggcgaggggagctcgtcgccggcgcggagcctgacgcttgacggcgccgtcaagtgcacgcacgggcggctgccggcggcagagatactggagcggcaccagagcctggagcacctttcgatcgctggcgtcggggtcacgtcgctcgagggtttcccgcggctgcggaacctcacgcggctcaccctctccgacaaccgcatcgccggcggtctcgaccacctcgtcgccgctggcctgtcctcgctgcgggacctcgacctcagcaacaaccgcatccaggacgttgacgacctcgcgccactcgccgacctgcgcctcgtctcgctcgacctctacgagtgccccgttacccgtgtcaaggactacagatccagggtcttcgagatgatccggacgctcaaatacctggacaagatggatgccgacgagaacgagcgccccgagtccgatgacgacgatgacgacggcgagggcgatggcgagggcgatggcgacgatgatgacgaagatgaagaagacgaggaagaccctgggagcggcgaggtagcgaacggcggcgtcgcccatgcgcgcgcgggcgtgccctcgcacccggtggaggtgaatggggtgatcgatgtggacgaggaggagagcgacgctgacgaggtcatcccgaacggtggtgtcgagcacagccatggcgcaaacgggtttcgtgtcgcggctgctggcgaagcccgtggcgaggaggatgaggacgtggaggaagatgacgacgacgacgatgactttgaggaggaggatttgggggaggagattgatgaggatgttgatgacgaggatgctgttgtggaggtgcatgatgtaccaagtagtgacgaggaggaagatggcgtggaggaggatgaggaagaagaggatgaggacgaagatgatgaagaagaggaggaggttgaggatgaaggtgaagaggcggagccacagagcagtggtagggttgccatgatgacaggcgaggatgaaggagaagagatagatgggcatgaacatggagaaggggacgatgaggatgaaaatggtgagattggtgaagaggatgaggagggattggaggtggggaatgatgacgacgaagacgacgcagatgcggatgatgaggatgaagatactgaatatcttgtgcaaccaatcgctcagcctcaagccatggctattggaagtgaattagatggagttgaccctgatgatgctgacgaggacaaggaagaagtcgacaacgatgatgatggggccacagatcagccttcatcctcgcatggagccaagcggaagagagatgatgatgatctgtcaggcagtggtgatgacagtgaggatgacggtgttgaggacttgaggcccttcaagcacaagtgatggagcagccaatgtacatggatccctccctcccccttcttcagctagaagtaagcagcaagatcagcagcagcaggaggaggcagcaggaacagaaatatgttagcaagaagaaggatgccgcggacggggccaaggaggccacagcggaggcggcgaagccggccgcggccgccaagccaaagaaggccgcggcgctgccgctgccggagatgatgcagcaggagatcatcccaccgctgaaggatgccttggaggcggaggacgacgtgtcccaggtgcagctcgccttccaaaacaacacgctggagggatccttcataaagaacgacgtcccttattatttttgggccttctttccaaaaggagacctcacaggaccgaagggctttgcgctatcgtcctacagcaacgaagtgagcaccatcgagccgttcctgatcgatgagaagaggataacggccaagtacgtggtgttctgggtctacaagaggctggctgggcaaggcatccttccggtctggaaggaagaggagggggaggaggaggccgcgaagtagtaggttgcgcaggcgcatacgcatacacatacacacacacagggtgctgccgtgaacatacacatgtaacgctgtaaagttcatctgctagtaaaagttcatctgctgtgaacatacacatgtaacacagatacttcagtttcagcagttaaaaacctaccgtcgttattcttctggtgtgagataagaa

SEQ ID NO: 13949 - DNA, 1815 bp, Zea Mays
atttcgcgcggcgccgacacaacacaacaaacacagaagacaggcagggcggcagcgcccacctccatctcccagccccgctccccaaatctcagccccgctccttcccagtcccagtcccagatccaggatgtcctcctccgacccggacgacgcccccgacgggggcgaggactcgcccctcttccgccgcagcggggggccgtcctccggcggcaccgttggcgacgtccccgtctcgcagtcgctcatcaaggcggcaagcaacgtgtgcttctccctcttcgtgctcgccgtccttgtcgtcaccgtcgtcgccgtcacataccagccgccggacccctggctccagtcctccgccgccatcaccacctcgctctcccgcgtcctccccaactccaccttcctcgtccccgacgactcgctcctccccaccggcgaggatttcaactcctccaccgccgtcccagccccgcgtgtcgccgccgcctgtcgatgcggagatcaatgacacaatccctgtcgtcggatcagaggcagagttcaagaagggaaagtacttgtactacatgagaggaggtgaccattgcaagagcatgaaccagttcgtctggagcttcttgtgtggactcggcgaagccaagttcctcaaccggacgttcgtgatggatctgaacatctgtttgtccggggcacacacggtcgacgggaaggatgtggatgggaaagatttccggtactatttcgatttcgagcacttgaaggagagtgtgccggtggtggaggaaggggacttcctgaaggattggaagcgttgggataagaagaagggcccaggacggatcacagtgcggaaggttccatcgtacaaggtaacaccaatgcagctgaagagggacaagagcaacatcatctggaggcaatttaatggccatgagcccgagaattactggtaccgagtttgcgaaggacgagctgccaaagtcatccaaaggccttggtatgctatctggaagtccaagagactgatgaacattgtgactgagattgcaggtaggatggattgggattacgacggtttacatgttgtccgagggtggaaggcgcagaacaagcaaatgtatccaaacctggattccgacacgtcgcctgatgcgctcgttgataaggtgaccaagcttgttaagccgatgagagatctctacatcgcaactaatgagccattctataactacttcgacaagctcaggtcacacttccatgtccatttgcttgatgattacaaggagctttggtcaaacactagtgaatggtacaacgagacaacaacacttagtcggggtaaaccagttccattcgacgcctacatgagggtgattgtggacactgaggtattttacagatcgaagacacaggttgagacgttcaacaacttgacaagggattgcaaagatggaatcaatacgtgcaacttgtgacacatgagttcacgcttcggatcatttgttggtgttcaatatacccttctagtggctggcacatcagaactcagtggaactcatccaggtttatgtactactcttccagagtccagacgtccgaaaaatttgtatttagtgggcaatctgcaacatctatgctctctgtacccgcactaaattaagtgagaactatagcttcacctttacagtgtatctgttttcacgagtcacacgcttcttgcccgaatatttggaggaaatgaatttgtcagtgagcttatatgacactagagcaatgtaaagatatattgtgcccatcaaagtatgaaattac

SEQ ID NO: 13950 - DNA, 175 bp, Zea Mays
acctttgtacacttccttgaagaagaccaatttttgtctcaacgtcctcaagcttgttcagtaactgcaaatttatttcttgagtttcagcttgtgccttcatggttgcattgttttgttctcgttctctcaacagtaaagcctctgtagtagatgtgttttcctgaagcctgta

SEQ ID NO: 13951 - DNA, 134 bp, Zea Mays
atcattattatgtattttgcatatatgtttgatgtgatgttaattttgcctatgccatgtttgtttgtattgctatgactagcgcgaggttacgagccacctgaagatcatcctggtacctggaatctcaagtc

SEQ ID NO: 13952 - DNA, 89 bp, Zea Mays
tcccttgctaatatcacccaaaatttggtcgacgggatgattcctttgagtcgtcgctcgaacttgagttggaggtgccggttgtgctt

SEQ ID NO: 13953 - DNA, 1310 bp, Zea Mays
cagttagatcttggttgactaatatagaatatgtgcgcaaagaaaggttgtgcagttacatcaccaatctaggcaccgtctcctctacggtgcttgttcccctgtcaattggatattacccaggctttcaaggtagaaaagaagctttttgttccatcatggccttatcaactccagcgtctattttggttgacgagaaccaacagataaatagaggtaagagggccgatggaccaagggccaaagggctgaagccatccgagaatcctggcaatcaagggaggagagctcttaaggatttgtccaacttctctaaaggcactggtttgaaggacacttccaccctgaaagagaagtcccagcagaagcctcgtagtaatgtggccaacactattaaaggcaatgctttgaaggacaagcccatcctgaaagagaagtccacccaggaacagaggtcaaaagctcttaagaacccaatgaaaattttagttgatgaagagatcaaaatgtgccatgagtgggctaaggatggggtggagggatttcactcaacacaaaataattctcaaaagttggataaggatctgctagacaaacgtgtcaagaagaaagtggcggcagtaaactcagccttgtgtggttggccagatacagtatttgattctctaatgtatccatctatggaggttgctgagcttttttatgaacaaaacgtgctggaggtggaacctgagattctcccggacatcagttggcgtctctctagttcagtagatggtaaagcaaagattgatgaagaccgtcttaccgatgctgagcttgaccagtaccattctttggagaacaatccaattatttttgagctgagagacgagccagcgatcccgcagctgggagtgtattgaagaatctgtgccagcaggacagaaagctctgtttgcttgctgcttgctctggagtctggagttgtctagtctagaattctagtaggtcttgaacctggtgttttccccagctatgttctagtgggatgttggtgatgtaggatttcagtttgagtactggtaccagttccagctgaagcgacagccttatggctgctgatgggtgatggttgtggaacaacgggcgatataattctaatattttcagcaaactagtctgtggtctctatatttattctcgtgaatcctaaacagtgctaagttttttttggccctaatctatggtctctataaaatcgatattatttttactattttaatcacttttagcttttactatttagatcttctcctaagtcactaaac

SEQ ID NO: 13954 - DNA, 828 bp, Zea Mays
cacagatgaagaggacttgtattagcgaagttgcaagaagacttgtgcttggtcaacaagaggtttttgattgctggtggtggtgctccagaaatagagatgtcaatgcagctggctgcttgggcaaaggagcttcgagggatggagagttactgcattaaggagtttgctgacgcacttgaggtcatcccttacacactggctgagaatgctgggctcaacccaatctccattgtcaccgaactcaggaatcgtcacgccagaggtgagaagaacgctggcatcaacgtcaggaaagggcagatcacaaacatcttggaggagaatgtcgtgcagcctttgctggtgagcacaagtgccattacgctggcctgcgagtgtgtcaggatgatcttgaagattgatgacattgtcactgttaggtgagagcatgaagtcggtggtttggtcagattgctctgttctgtctggattgatagtagttaggttactacttagtgtagaacttctattcacgggcgtgtttcaatgttttaaacacaatgttagtacggagaggacagtaatgtacccatccttgcatgacactaccagggttgcatctgctatttccagtttcttatgattggccgtgtatgtatgccttgtttctgtcgccgcttacatgtaacctgttggctatatcatattatatattttctctgtttctttttagttgtcgctggataatttaattttgtactatccaacgacaactaaaaagaaacggatggagtatgttttttttaaatgagaaggatttcaacgagggctttgccgcgcggctcc

SEQ ID NO: 13955 - DNA, 110 bp, Zea Mays
atcttgcggagaagctcacgctttccagcatcttgtggtcgactcagttctagtcctccgcatcacgtgattaattaatgtaccttaatgatttgcataatgcacatgaa

SEQ ID NO: 13956 - DNA, 1080 bp, Zea Mays
ccgcgactgcagcgtcggcggctgggaccagcggatgtgcgttcctctctctagaagctccgtccgtcttcacagccttttcctcccaacaacgcataatattagctagggtttcaacgcatctgacggcggaagctagggcgtcgccaccgtcaatgtcttggcactcccgctctgttcatcaatcgcatcgacaggtgctccatgattctctataacatccgaaataaattaggattaaagcaagaataggaagttattcaaaactcaaaagtaaagggtttccggtcttccagttaaatgaccaaatgacctgtagaatgacagcaagcaagcaaaataaacggcagacaaattgcaccaactcagagcagtgcaggccagggaagaaagcaaaatttgacacatctcattgtctagtaagtttgaagcctcatatcagtcttaaatgggatcaatatctgaggaaagttgtgccagagaaggaacaagttggaattttgtggtcagacttggcccctttcatggaaagccagaaacactgttcaggccttgctgatgttatgtatgttcctccagagattttctctcttaagagcctgaaaggtgtgctatcctatgaggcatggtctacatctcttacagaagccgagagaaaatttctcatacaattccttccaagcgagactgatgcagaagaaaatgtaaaattgttgcttacgggacaaaatcatcactttggaaatcctttccttagctggtcatcttctctttgctatggtgatattcatccggatgcactacttaacaaggagaagcacataaaaaaggatgagaaggcatatcatgttaacttgcttaattaccattccaacatggttgaaaccttgaagagttggaggaagagatggctaagttgcggtgatacagagaatttgttcagggataaccctagtaatcagatgcaaggagttatgcagctgaaagctactaacagtggaatgcccatgaaggttgcacaaagaatcgatgtttcaaagtttatgtcatacatcaaagttcttaaaagtcatttttcac

SEQ ID NO: 13957 - DNA, 3185 bp, Zea Mays
gtttgaataaagcttggaatcatcaagtttggaaatgttgctctggccactgatggccggtgacattacttgcggatccttgctgcaaaaattgcagttgatatgggatgaagttggcgagagtgatgaggatcgtgacaaggtcctttatcagctggatcaggaatgccttgatgtttacaagaggaaagttgaccaagcaactaactctagggatctcctgatccaggctctggatgactcaaagatagaacttgctaggcttctttctggtcttggagaaaaagctattgcaagaacccctgagaagacaacaggaacaatcaagcagcagctagctgctatagcgccaacacttgagcagttgactaaacagaaaaatgaaagaagaagagagtttgttaatgtacaatcacaaattgatcaaatatgtggtgaaatcgctggcaccatagaggtgggtgaacaggtgacaacaccccaagtcaatgaggatgatttgacacttgagaggcttgaagattttcggtctcaactccaggagcttgagaaagagaagagtaataggctggagaaggttcttgagtatgtaattatggtacatgatctttgtactgtcttggggatggattttctcagcacagtgactggagttcaccccactttagatgactctgttggcgacaactgtaagagcattagtgatgatacattatcaaaacttgacaagacggtagctacacttaatgaagataagaagttgcgtctaagcaagcttcaagaactcgctggtcagctctatgatctttgggatctcatggatgcccccaaggaagaaaggcgcatgtttgatcatgtgacctgcaacagatcagcatctgtggatgaagtcacagcacctggatctcttgctctagatttaattgaacaagctgaggttgaggttcaaaggttagaccagctgaagtacagcaagatgaaagaaatagctttcaagaagcaaaatgagctggaagatatctacgctggtgctcatattgtaatagacacagctgctgctcatgagaaaatattggcactgattgaggcaggtaacatagaaccatcagaactaattgcagatatggatgcccagatagcaaaagcaaaggaagaagcattgagtagaaaagatatccttgataaagtagaaagatggatgtctgcgtgtgaagaagaaagctggcttgaagattataaccgggatgacaacaggtataactctagccgaggtgcccacctgaatctgaagcgtgcagaaaaagctcgtatccttgttaacaagattccagcacttgttgaaactctagtggcaaagaccagggcatgggaggagaaccgtggtctgtcttttatgtatgatggtgtacctcttctagctatgttggatgagtatgttatgctcaggcaggaaagggaagaagagaagaaaagaacgcgggaacaaaagcgctacgttgagcagcaattgaacactgatcatgaagggccattcggatcgcgagtgagtccaaaccggcctgccagttcgaagaaggccattggcccaaagttgaatggcagcgtctcaaacggcactcctccaaacagaaggctctcaatcagtggccaacagaacggtggtggccatggcgtcaggtctggagggaaggatagcaagaaagacacggcgaagacagcatctcctgggaacagtgcagctgcaactgcacctgtgggtttgacagcaacagccaaagaagacgccgcctcccaaatttctgtcaccgatctggttccgagcacaccatgatctttaacctagcatcatatattagatataagtggacctttttctgttgttctattgttttctggtaatatattgtaatggcttcgtagagtaattatgatccccttcagctgctttggcacatcctggtgtaattcttgtttagttcccctaggcggtgctgtttcgacttgtcagacggtgtagtatagtcttactgagatgtattgtcattaatcagtgtgctggacgtataagctgttaaaaccttttctgttcccgtccttgagttttgcatctatgtgagcgtagcgtacttccaatattctctggaaactggattggcacagcgtacttccagtattatctggacactggattgcgcgtttcatttctgtagattcagttcactgattgcttccacaaggctgctatctaaagtattaaaaccattgggattctcagcccctagaggcgacatttcaatctacacacatgtgaattgaggtcaatactagattatctaaacagacgggaagcggcaacgtcacttgaaaaacagaactgtcaatgcgactggattggcctcgtgcaggtgagatttctgccattatgaaacgtgacacatttggcttccacaaaacagaggcacagatttacagaactgtcaatgcgactggattggcctcgtgcaggtgagatttctgccattatgaaacgtgacacatttggcttccacgaaacagaggcacagacgagtgcttcgatgatttagagatccacacaaaacgcacgcgccggtatggacttgagctctttcttaggtgcgttcgacagtgattaattctccgtcgtgaggattagtcggggcggccaccgctctcgtcttcagcgccgtcactgctcaggtcgcccccgtgagtgactcttgtagccttctctcccttcttgacccagcgcgctgctcgaaaccacagagctcggctaggtgttgagcaggggcagaggcagctgggacaatgcgagaggacagcgcgaccaccatcatggcaatcagctgctgctccgcgtcgtcgtgctggttggccgcacgcttcagggcggccagatggctggccgccgtgtcatggttgttgtccgagatagcgaccgcggcttcagacaatagttgcctcgacgcggccccggggtcggcggcgagcaggacgcggatgaagacgcaacggaggagtttgaaggtgaccagagctagacccggggacaaccagaggctgctgagacgggatccctcccagcaaggcggcgatatcaactaccacagtggtgccctgcctcacggcgcgcaggtacatcgcctgctgcgccgccacgtgct

SEQ ID NO: 13958 - DNA, 364 bp, Zea Mays
cgcgctacgtgagcagaaggacagggcgagcatgggggaagcgtttatacctatgtttgcgctgagtcgcgccttggatgtggagcaatgcggtacgcggtggaccacaaacgacgacgaggaattctggtggcgcttgcgatggatcccgggcggcgcatctttggcaatcctcccacaaacctggggaagcaccagagctccccaagggtccggtcgaagtagaggtgaagcacccccacggtagtacccttctccctctctgcttgatctcgatggtgcgcggcttttatttaccgagaagcgaggcgaatcgaccatctcggtcgcgagtacgacggatgtagctcaacgacccgacgcc

SEQ ID NO: 13959 - DNA, 877 bp, Zea Mays
gcaggtttgttgaaattatggcaactgtattctcaagggatgcatggcgctgtgtatggcatatgattcagaacgacttggtccatggatggggccttgattttgctcttaggaaatgtgtggagccagcccatgagaaaattggagtggttgactcccagtggattgttcatcaagtcatcccttcgcttggtaaccagggcaaggcagagaatggaaaagcaccatgggaaggggttagagcacgctgtcgtaaagaatgggggatgttccaaacaaggttgactgatgctgagaaagcatattacttggagcacgggatcacaccaccaaaatcgacggtagcttagctgcacgcaccgacagtagcttagctgcactgcatgcctgcatacaggcacctcgcgagtcacgccaaggtttctgttttgtgaacctagcgccttcctgtccgataagcaactgactctgtagagatgcagcaccacagccagatttgtacagaatcgatgtacgtttttactcttcttaatcttctttacttgttttcaaccgtagcgacgagagtagctcttgtgtaagtaaccgatttagcatgaatccggtggctcttttttttttgatatattgcccaaatgcaatatcgatatggtcatttcgtttcattgttttaataacaagcaaatggttgctttgggacagcccttgtgccttcagtgcctcattttcatgctctagccagttatcagaatgacagccctgaaacatcttgctgcatagccagatgcaaacagttatccacatatggtgtggtgtgattagttgcttgcattacccatcacctgtataacccaagtcaggatgaagtactcgttgg

SEQ ID NO: 13960 - DNA, 958 bp, Zea Mays
cttcaagataccaggaaactggatagaatgcctgttatcttaggcagtaaggactatgttgatgcttggttaaatgatgtttctgtaaaacttgaagaaattactgcaccttacgaaggagctgatctggtttggtatccagtgacatccgcattgggtaaagcatcatttgatggacctgagtgcatcaaagaggtacatatcggagctactgataagcctatttcaaaattcttcaccaagaaatcgactgcctacgatctatcagggaagtatgagaatatgtcacgggagcttgctcatgcttacaaagcagcgaaagtggaatgcgatggatcagtagaaaatcaaggaggggacggcaaccaacaccagtcccgagagaagcaaactactaattgtactataaaggatgaacctgtcaccttggaaccacaagttttcgagacaccgtggagcatcgagcatgaagatactatgactctggctggtgccactttggaaacacaacgtgatttgggattcaagagaaagatcgaggacactcaagtcgaagctagcatgaaaccctctcagcttaccaggaaggaaaaagctgtaaaagcagcttcggatgggcaggcatcgttgctttcatatttcgcaaggaagcagggtcgctcgatgaagtagtttgcggtagccgtgccatgtattcctgtgtaactcaaactttaccagtacctgtcctccgtgttcgggacaaactatttcggttttaattttgttttggctaccactaaaatgaaccagctagatttctgcggtcattaattttctgcggcccaacttagccgaggccaatgaaaaaagaactttatttccggtagtctggtccaatcactgaattaagaaccttgtttttggtggttatgttaagccgctgaacataagggtgacgataacgatcttgtttttg

SEQ ID NO: 13961 - DNA, 1592 bp, Zea Mays
ttgtgatttttacgagatgaacatgggctgttttatgcactggatcttggagggaccaacttccgtgtgctgcgagtccagctaggaggaaaggagaaacgtgttgtcaaacaacagtatgaggaggtttccattccaccacatttgatggtcgggacttccatggaactatttgatttcattgctgctgcattggctaaatttgtcggtactgaaggtgaagatttccaactcccagagggtaggcagagagaacttggtttcactttttccttcccggtgaaccaaacatcaatatcatcaggaacactcatcaagtggacaaagggcttttccatcaatggcacggttggtgaagatgttgtttctgagttgagcagggccatggagaggcagggactagatatgaaagctacggcattagtcaatgatacagtgggcacattggctggtgggagatatatggataccgatgtagttgcagctgtaatattgggcactggtacaaatgcagcatatgtggagcatgcaaatgcaattcctaaatggactgggttactgcctaaatctggaaagatggtaattaatacagagtgggggagcttcaaatccaacaaacttcctctttcagaatatgacaaagccatggactttgaaagtttgaaccctggagagcagatatacgagaaaatgatttctggtatgtatctcggagagattgttcgaagaattttactgaagttggcacatgaagcttctctatttggggatgttgttccacctaagctggagctgccatttatattgaggacgccagatatgtcagccatgcatcatgactcctcacatgacctcaaaactcttggagctaaactgaaggacatagtcggggtcgcggacacttccctggaagtaaggtacatcactcgtcacatctgtgaccttgtcgcagagcgtgcagcacgcctggccgccgcaggcgtgtacagcatcctgaagaagataggccgggacaaagtaccaagcggtggcggtaaaatgccgaggaccgtagttgccttggacggtgggctctacgaacactacaagaagttcagcagttgcgtagaagcgactctcacagacttgctcggcgaggaggcttcttcctccgtggtcgccaagctggccaacgacggctctggcattggagctgcgcttctcgcagcctcacactcccagtatcagtatggcgcgagtgactagtagtcctgaaatgggcgcggatcgagattttgagtgtagctctcatttatcttttcttttttcccttttcaaaacatctttttggggatttttttcggcttccttttgttggctattccgtggatgcacttacggctctgcattgggatgtagctagtatagagccaatgagtttggaggttatctaatggcacaaggcaggagcatggaaatggaagcagagcaatgacattcatgctctgcccattcttttttccccttgtatggtgttgtaaaccaataaaaaaatgttaacccttttttttgtgtgtgttggcaataaagagaatacgataatttgaccatgt

SEQ ID NO: 13962 - DNA, 1628 bp, Zea Mays
tttaaaataaccaagtaactgcacttctccccgattttccattcgaactcgcatcatggcgttccctcagatctcccgcagagccctcggcctcctgctcgtcatcgccgcagcggccgcgatcgtctcgcccgccaccgccgacgaggtggtggccctgacggaagccgacttcgagaaggaggtcggccaggaccgcggcgccctcgtcgagttctacgcgccatggtgtggccactgcaaaaagcttgcccccgagtatgaaaaacttggcgccagcttcaagaaggctaaatctgtactgatagcaaaggttgactgtgatgagcacaagagtgtatgcagcaagtatggagtttctgggtaccccacaattcaatggtttcccaaaggttccctggagccaaagaagtatgagggtcaacgttctgtggaagcccttgcagaatttgttaacagcgaagcaggtaccaatgtcaagatagctgccattccttcaagcgtcgtggttctgacttcagagacctttgactcaattgtccttgatgaaaccaaagatgtccttgttgagttttatgccccatggtgtggtcactgcaagcatcttgctccgctggcttcagttttcaagcaggacgacggtgttgtgattgccaatattgatgctgacaagcacactgacttggctgaaaaatatggtgtttctggtttccctacattgaagttcttccctaagggaaacaaagccggtgaagattatgatggtggccgggacttggatgactttgtcaagttcattaatgagaagtgtggcaccagccgggatccaaagggccacctgaatcaagaggctgggcttgtgccaagcttgaatcctcttgtgaaggagtttctcaatgctgctgatgacaagcggaaggaagtcctctctaaaatagaagaggatgttgctaagctcagcggttctgcagccaagcatggaaagatatatgtgacagctgcaaagaagatcatagacaagggctctgactacactaagaaggagactgagaggcttcaccgcatgctggagaagtcaatcagtccttccaaagctgatgaattcatcgttaagaagaacattctttcgatattctcttcgtgaaggtgatgatccacagccacggcctgccagtgacttgaactgatagcgaaccaccactttacggaaaacagaacaaatcggatgatgtgagagaaaggtggtagtgaagtccagtagtggcagagctacttcgtgcacgtagatctcttttgcattttctggttccagggattgacttcgtactcacagtttacttcacacagaaggtttatgtagccatcctgtgataacatctactttctttttgatccaataaattggttattcagcttccgtgaattattttgccctaatgtaatcttggtgcatcttgtttggattggtcactcttagctggcaacatgggaattacctaaattgttgttggctagagggtcactcgtagagatgtcaatgtaagggcttgttcggttagctctcaatccatgtggattgagtgggattgattgggtttaaatctcaaacaagtcaaatttcttcacaa

SEQ ID NO: 13963 - DNA, 564 bp, Zea Mays
cgctgatccgtccacggctcggcgacacctctgactacctcaaggcgtcttgctgataggaagatatcacgatttgagaagaatatcacaaagaggggctctgttcctgagacagccaagaaggcaaacgattatcctgttgggcctattcttcttgggttctttgtcttcgtggttgttggatcatctctctttcagatcatcaagacagcatcaaacgctggtctattctgaggtgaatcggttgacacatgcagtttgtcactagaaactatacaagtgtagggcgtggcttaatgtcgcctttttaatgttgtaccgtggagagttttaagttatatatgtaatggaagtgctaatttaagtcacctgtctgacaggaaagatgttggagtagtccataatacatatcgagtatagttatagttcgtgttaaatatttctatgctcaaattggtcgcatcattgggctattgtactcttcgatttatcgagtaatttggtaatctttcgcagaattttcgtcttgggtttgccccgagcccatgagaggttagtgtggtc

SEQ ID NO: 13964 - DNA, 5270 bp, Zea Mays
cgattagctcccgcccgcctcccgccccgctccccaccgcgctcgctgcgctgcctgtcctggcgctgcgtcctgcggcgccgcgagagttggagggtgctcgtggcgggcagatccggcgtcggcgtcggcgtcggcagacaggctcggaggtgagatcggcgtcggtggcggcggcggagcgcgcgaggtggtcgagggaggaatcggtggcgcgcggaggcgaggacgaggctgaggaggacgtcgagctcggctggtgctgcatgggggtatgaagcgcggcgccagagacgacgcactcatggggtcacagctcaagcgcccgaacgttggccgatccgatccgtcggctcagccacaacacatgcctgtgcccggtttagcgtctgcagccgcaccgccgcctcaagctggtgctgctccgccggcgcagccgcaacagacatccggcgcggccttgaccaaccagaagctgacgacaaatgatgcgctcgtctaccttaaggcagttaaggataagttccaggacaagcgggagaagtacgaggagttcctcgaggtcatgcgcgacttcaagagcgagaggatcgacaccaatggagtgattggccgtgtcaaaacgctgttcaacgggtaccctgaactaatccttgggttcaacgccttcttgccgaagggctatgcgatcaagctacaagaagagaagaagcctgttgattttgtggaagctatcaatttcgtgaacaagataaagaatcgatttcagcatgatgaacgagtttacaaggcattcttggacatcctcaacatgtaccgcaaggataataagtctatccaagatgtttaccatgaggttgctgggctgttcaaggaccataaagatttgcttgaagaattccagcacttcctgcctgatacctcagtggccccacaagcagtggcatcttcaaggggtggtttggttaagcgggaggacaggagctctttgccacctgcaaataggacccttcacaatgagaagagggagagagcttgtctatcacatgctgaccgtgactttagtgttgaccgtcctgatgtggatcatgatcgccagagaagacgtcttgataaagaaaaagaacggaaggtggaaagggatagaagggattatgagagagaagacaaggatggtgaacatgacagtagagacctggagataggacagcgtaagcgaaagccttttccaaggaagatggaggataatgcaggtgcggagacacaccaaggaggccccagtgagaatcatggaatccatagcgtttcttcttcatcatatgacgataaggatgcgctgaagagtgtatacacgcacgagttccatttctgtgagaaggtgaaggaaaaactggagcatgaagcttaccaggagtttttgaaatgtctacacatctacagccaagagattatcacgagaagtgaactgaagaacttggtgaatgatatactccagcattatccagatcttatggaagggtttaatgaattcttggaacattgtgaaaatatagatggatttcttgctggtgtcttcaacaaacgcccaacaacaaggattgttaaaactgaggataaagaaaaggatagagatcgggacagggaggacagggatagagatcgggaaaaggaaagagagaaggaacgagaaagactcgataaagggtcaacattcaattcaaaggacggttcttgtcacaaacctcctatgttttctggcaaagagaagtacaacctatccaaaccaatatcagagcttgatctctcaaactgtcaacgttgcactccgagttaccggcttctacctaaaaattatcccatgccccctgccagcaacaggactgatcttggagcctctgttcttaatgatcactgggtatcagtgacatccggaagtgaagattattcatttaagcacatgcggaagaatcagtatgaggaaagcttatttagatgcgaggatgacaggtttgagttggatatgctgttggaatcagttaatgcagcgactaagcgtgttgaagagctgatagaaaagatgcaagacaactcagtcaaacctgagagtccaatacgcatggatgagcatttaactccgttgaacctgaggtgcattgaacgactgtacggtgatcatggtcttgatgtgatggatgttcttcgcaaaaatgctagtgttgctttgccagttattctaactaggctcaaacagaagcaggaggagtggtcaaggtgccgatcagatttcaacaaagtttgggctgaaatatatgccaagaattatcacaagtcacttgaccatcgtagtttctatttcaagcagcaagatacgaagaacctgagcacaaagtctctcctgacggagataaaagaaattaatgagaagaaaagaaaggaagatgatgtgctccttgccattgctgctggaaataggcgacctatagttcccaatatgtcattcgagtatgtagactcagaaatccatgaagatctacataagatcattaagtactcctgcggtgaaatctgcaattcttcagatcaattagataaagtgatgagaatatggacaacttttgtggagccaattttgggtgttcagcgaaaacatggctccgaggatcctgacctagttaagccaaagagccgaacaacaaaatcgggtattgcaaatgttggggaaagcaacactggagctgggattgtctccaagcataacaacgatgatgaaagtgaacaagggctgccgtctcgggctagaatagcaaatggagttgcagccaacgctcaaaatggtttccatgatgcagatcgaattgcccgtagaggtgaagaatcattaaatgttacacttaatggaagagtgcatggtgctgcctctgcagacgaaacaccttcactaagcacacaaaatattgcttctactgagcgatcagcagagaatgcagctgttgttaggactgaacaacataaggcaaatttggaacttacgccaggcgtgaatggttctagaagttctcatggtgcagttgaggtggctggtgaaggcaaggctgtcaatgaaacattgccttctgctgtgggaggggaaacaggtaggttgggaccatcttttaatggcatcagtgagggaattaaagggcgcctaaataatgatggttctgcaccccatatttcaaaagttgaaagagaagagggtgaattatcgccaaacggagattttgatgaggaccattttgttccttttgaagatggaacatctaaaggaaaggaaggttctacaagcagatcattccagggtaggcatggggaagtggtgccatctgctgaggcagctggtgagaatgatgctgatgctgatgatgaaggtgaggaaagtgctcagaggtctactgaggacagtgaaaatgcttccgaggctggtgaagatgcgtcgggcagtgaatctggtgatggtgaggaatgctttcgtgaagaccacgatgaagaagaagaggatatggatcatgatgatcaggatacaaaagctgaaagtgagggcgaggcagaaggaacaactgagacacatgatgtggaaggaggaatatcactaccactttcagaacgctctctgtactcagtaaaaccacttgccaagcatgtacctacagctttacatgatcgagagaagttctcacgtatattttatggaaacgattcattttatgtcttgttcaggctacatcagatcttatatgagagactactttcagcaaaaactaactcttttaccgctgaaaagaaatggaggaattccaaggatacaaaccctcctgatctatatgcaaagtttatgagtgcgctttacaacttgctcgatggttcttctgacaacacaaaatttgaggacgactgccgagctattattgggactcaatcatatgttctctttactttagataaattgatttataaagttgtgaagcagcttcaagcaatagcaacagatgaaatggacaataagcttctgcagctatatttatatgaaaaatcaagatctcccgggaggttttttgacctagtttatcatgaaaatgcccgtgttctactgcatgatgagagcatataccgatttgaatgttgctcaagtccgacaaggttgtctattcagctgatggaatatggtcacgaaaagccagaagttaccgcagtatcaattgatccaaatttttcttcgtatctttttggcgagtatttatgtagtacgtcagacaagaaattatctgaaggcgtctaccttgcaaggaataagcggaaatattcagataatgatgaaccttcagattttttgaaggcaatggatggtatcaaagttgtgaatggtctcgaatgcaagatatcctgcaagacctctaaggtctcgtatgtcctagacactgaagatttcttgtcccggcttcggaagagaaggaaaattttgcggggtgggagtgtgtctgacagttcgcagttttcaaaaatatatgctgcaaaagtgcagcgcttcaataggttcctatccaaagcataggatcatttggcatacaaaatgtctcatcattgtatctaaacctggagatattgctgggaccccagttgctttgcttcttcagtgataatatgcaggagttggaagatggtgacgtcatcgacaattcgtcgcagaatgccctttttgaataacagatggggagatctatagggtaaatacagcaaaacgaagcgagcatgtaggccacagcagtcagctctgttgtgcggaaagatgtgtatatatgtattagcaacatgtttgttctgatgacctttttaatgcttttcgatggtaggtctgttccatcaagtatttaactaatcatcatttgttgcagttggtataggtcttctgttctttttttttttgccgtcgtttttcattgaggatgttgccaaaattaaaacctgtgtcaaacagttatgtagtcttgtcttggttaatcttacagacgccgtaatttctcagcctcttgagtgaggtgcttgtacaccctttcattaagcttttgaggcgtggttgacagcaatattctcttgtgtgcatacaattcaattgaagtataggatgtgtttcttctgatcttctcggtgatgtgtatacaggtgcatacatagatttttctctagaatatatctataaaatctagacaatgtctaaaccgttttaagtattcctt

SEQ ID NO: 13965 - DNA, 772 bp, Zea Mays
aagacctttgcatattttccactacactcgggcgtcacgtcactaaggtattctgcagttacatccaggagcaatcaatagcatcccaagcaaatcacacctagaaattgatgtaagagatattgatgagaagagaaggaatgatgtcattgagaagattcgccagtctgcagcacatatttcaaagaaccgtggagtagagctttcagaatttaagatcatcaaccaggacccacctgctctatctgacaaatcagtcgttgacgcaatggaatttgctgcaaaacagttaaacctggcatacaaaaagatgattagcagagcctaccacgattcactcttcatggccaggttacagccacaagccggaggagtatgcatcacccgaggacatggcgaatggggtgaaggtcctagccttgacaatggctacgctgtcgctggagtgacttgttagcgtttggaggaatcaagtcagcccgtgccaaaaaggcaaaaacaaacacctgtgttatttctaataataagctgcatagcattggcgtcatcttccctgcaccaggcctgtatacaaaccatcattcatcagggtttaggaataaagttgtcatctgtatctgtatgatctggacaatgattttctagcttgatcatattgatatatagtagtgattttctaaatctttatccatataaacaaactaatatagaaacgatgttatatcaattgtacattacctctatcgggtacacagggacaggataccctaaa

SEQ ID NO: 13966 - DNA, 183 bp, Zea Mays
caatgatctatccccatcacgatgaaatttcccaagaatccccgggcctgtcggacaaggctatatactcgttggatacatcagtgtaagcgcgcgtgcggcccagaaacatctaagggcatcacagacctgttattgcctcaaacttccgtggcctaaacggccatagtccctctcagaaga

SEQ ID NO: 13967 - DNA, 2549 bp, Zea Mays
ccgctcccggaagcttcaagaaggtggacggtcggagggacgggctacatgggtggctgcttctggtagcttcggtcgcccgccgcgccgccgccaggctgagtggaaggtagggggaagcaaggaaccagagggtgtgatgtggatgtagaggattggatgctataatggcgcaagctgctgtcgagcccgctttgaatggtggctctttgattgggaggcagccggtggttccaaggatgaagaggaagacaccgtctgaactgaggggtgagcaactgaagcggcgtacctctgaaaagcttggagatgatctgttaccttctgccacattggataggtcaaacaatggacttcggaacacagagcaacaaaagatttccaagtacatcaacacacgtgttacagaggtgttccctgtgagaaaagcaagaaaccttgggaaggaaaattccaaggatgtcttacagaataatgagaaggtttctaagtttgttaatggtacaccagcctcaaattttgcatcatcttcacttctatgtggtcatggtgacactgctaagttggacactttagttccaaccatggaggctgcaaagccaggtttcaagaaagttgagaaatgcagtgaaaatgctctgcggagtgtatctgagcttcatgtaggcgatgagaagcagactggttctaacaaatttgatatggaaaaggtactgaaagggtttggagctcgtgatgcttttgtggcttctgggctcaacggccctaatggacaagttggtggtactgtgtcgaagccttcagacatatgcccttctaagatcactgttcctggggaaaaagctcctctggattttaccttaaagactagtttgcagtttgtttcatcgtcatctgtgaagtggtgtcacaagctcaatacaagttttggcagaagtagcatcactggagccattggtcagagctgtcctcgtgggtgtcaaaatttagagtgctcaaagcttgagagcaaaaaggaatttctattctcaaaggctttacagtcatgggtatatccacaatcgctgttgccttcctctatcatatctgctatgctctcatcaactgcaggagaaagtgattttcttctcaaaagacatcaggactgggaagattcatttcagaatctttactacatgctccggaagaacatgttgaatatattctatgtttatacaacacaatttgttgctctcttcattagtggaagctgtttggagaaaaagcagtctagtaatgcctacttatcacaatctacacgtggcctacgctcattactacggaaacatggcgtttgcttttctatgcctctttgcagcactgaagtggagcaggctactgaggacgaccttattgaactttcagaaatcgaaaggcgcaatgtcggacaggcactccatttggatgctttatctgacgtggataacaccacgcagtcgctgctttcgtttactggcaacgagaacgttcatggcctatacgacgttctattgaattacaagtccttgctgaattcattatctgctgtggatgtcccagtcttgtattcaccccagccatttcaaaatggctgtctacacatcccagaggtgaagtgtagggagatgaggagagcagacatgtcatccggcgggttcgacacagaacagggatccgcatttgcgtcgacggcaggcaacgtatgctacagcatggaagtaaaggacgcggttctgccgccatgggtggtctctgggctgtgcgccgccatgagcttggacgcgaccagctttgatctgacgatcgccacggagccgtcgtcgatgggcttgaacgtggctctcgactccatgggcaccaccaccacggatgtccagcctgaaggatccaccccctccagctgctctgcgcccacgacgcccttggtgggtgccgttcctgacgcggccctcgtccctgccctgcactccgcctcgctgcgccgcctcacctacacggacggcggcgggtacgttgcgcacacaaccgtgtgagcgcctctgagcttgagagcccggccctcctcggtatgcgcagcgcagcgcaggcttgttcttttgagaatttggagcctgccctggcctttgtcgtacaaggacgacgtgtcgttacacgcttggttgggttggatggtaactaaactatgaggccagacttcttctggtggtctggaaaaggaacacttatgcttgaactcggtgtgtgctttttgcctggtcgtactgtcgttcaaagttgggaccgttcttaccttgccgtgacaccgcctgttggtgtgagctcctgctgtttgaattctgaagacaaccatcaccgttctgcggttgacagaggacggtttcttgattctttttttcttctctcgtgtgcattgtatttgtattgcaccctgcacttgccggctgtcccggtcggtctagcacatcctgctgagttcctgactcctgagccaggaccgaccgtccaaccagttgaagaacggacggagcggc

SEQ ID NO: 13968 - DNA, 106 bp, Zea Mays
cgagcttgtcaagtgacttaggaacatctacagggtgtctgatgtctgttagacaaggacaactgtaggtgggcctatttacttgggaggttccgtcacactccac

SEQ ID NO: 13969 - DNA, 2373 bp, Zea Mays
agtcgcgcgcatcttttccagtcgcgcccatctaactacgggtagactcggcaggacggcagcacaggtccacgcgggcgcggaggcaacgctatggtggctcgccgcttcgtggtccggcatggccccgcagccggaggatcagccgaggcggcggaggagcaacagcacgaggtggagtacgacacggagcacggcctcgacgtcctccgcctccagatcttttccctcaccgccgtcccgcccgacctccagaagatcgtggtggaggcggatgggtcggtggtggacgacggcaccgacctggaagccgtctctgagcgcctgcgcctccttgctatcggcgaggagggggaggacgacggggcagcggccagggcgcaggagaagtccgacgaggaattcgcacggatgcttcaggcggaagaagaggcacttctcctacaacagtacaatatacaaaatgatggtggagatgtgtttagacaaagagttgagccttacatgcaccaggttctgatgtatgaagattcagtgggacaagaggcagcacaaaagacagttccgatatgcgaactggaggagaaggcattagtttcactggccaaggaagggaatttcaatccttcgaaagatgaagagaagcatgcctttctgctgcaattgcttttttggtttaagcaatcattcagatgggttaatgcagcaccttgtgacagctgtgggccgtgagacatccaatgttggaatgggcaccccacttacctcagaaatcaaatttggcgcttcacgtgttgagatgtatagattctggatttcactgatcacgtgtggacagaatgtttttcaaacttgtatggaagatggatgcacctagatccatgcgaaggagtctatgataatcccttactgtacgagaaagggtggaacaagaagttaaattatgttattgcgatttctaaagatggagtacgggacgtaacaaaacgctacaccagaaagtggcatgaggttctctctaggcgaataattacctccgaagaaactgttgtgtctgttctatcatctataacagggaagtatcgcacaggtttgtcacctgatgctctatcagtcatagaaaaccgtgaaaaggaggagtctgaggaacttagaaaatctgcttatcttcaagttgaaacggctttatccttacctggaaggcttagtggttctgtggaatggaggaaagcaaggtcagagttgggccaagcagattcactaagttgctcatcctgccctattcggaagtgtgtggatggtcatgtttcaaatatatatgatgctctttctgcttttctttcacatttttttgacaaaaaaatccctaaagaaagaattattgaagcttttgaggcattgaagactttgatgctaactcttaaaagttccaactttaagagcagaagtgctacattagaccagaaagcacaccatctatttgaggagatatttccttccattgaaagattgttatctgctatttcactgaaagcagagttgggaactgctggataccaatctgtgaccgtgtctggaaatccagtacactcatccttagcgttaccagtagcactggatgcagttaatgagatattgagtaattataagaataatacctttttcacagaaggcaatcatttcccaagagggaacagagtatgctcaggttcagtccttgcaagcagggaacaacttccaataggaattgcaacagcagcttttgacggcattcactcctccaaatgggaagagcctgatggagccaaaggatgttggctgatttatacaatgcaagatggcaaaagttgcgagttggagtcatatgatttgatgtcagctaatgatgctccagagagggatccaatggactgggttcttgaagggagcgcagacggaggctccacctggaatatacttgatgctcggaattcagaaatgttcgagagccgtttcctgaggaaaacatttacagtggataagagatataaggcaaatgctttcaggtttaggtttctacgcgtaagagattcccattctaatccaaggtttcagataggatcaattgatctatatgggaaaaccatatgaactccccccggagctgtgtttcacttttcggctttctgaactgctcggtctcacgagcctgtgtagtatcataaattcataatattgtaatgcgagcatttactgtggacgcaacgctctcttcagtatgaatagatactgaataattaagagcatgatatatattgtttgcgcgcgcgattgagttctgaaatataagtgaagtccctcgacatgatcaacgatcctgttttcttgaactca

SEQ ID NO: 13970 - DNA, 110 bp, Zea Mays
ctcgtgtgggctccagctatcctgagggaaacttcggagggaaccatctactagatggttcgattagtctttcgcccctatacccaagtcagacgaacgatttgcacgtc

SEQ ID NO: 13971 - DNA, 493 bp, Zea Mays
agcatgtcttctctaacatcaaaactatttgctcatttacttggcgtttataacccctattgtgtatgacttctacaaccatgaaatggagtcaacactgtttgtcgatctttttttcaagttcatacagaacttggcgtttatgggtgccctgcttttcttccttgggatgaagaactcaattccaaaacgtcgctccaagggaaggacaacaaaaaccaagacaaactgatgtcagtggttgtaggaggggaagcaattgggctcattatgtttgcatactatacaggaatagatgtcccacttttgttcttggtgcgccaattgaattgtgaattgggacttacagaacttagcatgtaggatatttaagttatcttgcgcaattttattttcttatgttgcgatgtgttcttatgtcacatttcattttgctacaagaactgctttgacagtaaaaaaatattaagtcgcatagtctattttctgtgca

SEQ ID NO: 13972 - DNA, 924 bp, Zea Mays
aaatccaagaagaaaggagcatagaacataagaggagagaccgcactacacacctcacgcctgaagttcagatctaagccttctcgtcctcgcccaaggacaacgataaacatctaagaaccaaacaaaaacagagcacgaccatcggtctctaagcaaaacgcgcagcacgccgggcgctccacgcacgtaggctagcagagcgcgcatggggcttctggaccagctgtgggacgacacggtggccgggccgcgcccggactccggcctcggcaagctccgcaacgacgacgcccaggggagagggctggaagaagctgcgccggaaaggcaggatggccgacggcgccgacgcccccggcacgccgaggagccccactgtgtacgactgggtggtgatcagttcgctggaccgctgaagcagccggccgggccaagacgaggacacagcacaaggatggaggaagccagccaccatcagcagcagctagcggactgaaggaggatcggaacagagaggcccccccggccatgcgacctgcttaacagagcttctggtcacggttctgttatactacgcgttaacggtgtatgtatatacgtcatcttcctgtaaatctccgtggtgtgaggtgctgctgattttgaagagagtgatgctcctgttatgtgctactagctagctagtgctgttgctgtatgagtacagtgtagtctactattaagggttgtcgtttggactgttagtctatagagacagaaaaatgtagaagtacgtattaaagccaatcgaatagacatgtttgtcgccatgtaaaaaaagtataatcctacgtatactcgtacgcaacgatagtaatgcgtgcttgagtgttgtggacactttcgccaacaccttggcttgcgttgccttgcctgccacag

SEQ ID NO: 13973 - DNA, 187 bp, Zea Mays
gccagggccacctcctccgcgaccgcgcgccgcccctctccgccttctctgcggccgcgccacctcctctctgctacatcgaccaacagctcagaaagcaacgagcgttccagtggtatgacatgatcccacagaacgctttgagagtagcagaggaaggaggaacgaggaaggttttatagtttgg

SEQ ID NO: 13974 - DNA, 723 bp, Zea Mays
gaagaatgtttgcgaatctgttgggggaagtgaagaataggctgaattgtcgggacaatcacgcttatagcattgactggccttctgaccttcatgttcttcctattggttgccactgctaatgcgatcattgtctcagtcttgatgtcactggccgctgccggaggattcttggccatcttctttgcttgcttggttgcagtgtatattggagcagtatcagttgctatctttgtcatttctgcgactgttatctcagcagttgttggaattttggttgctaccggttgggttgggttcttctggattatctggttcaccgcaaggaagagcatggtcctgacgaagcactccttcggcatgacgagctcggcaatccaatcgtattccgcgtcccggcaagtgaagcagaagcctgtcgactgaggctagttggttgcgtcctgtatgaagcggatatatctatctatgtgaatcacggttttgctgtttgtttgtttgtaagagtgtagaagacagcttgcttgttgcggcagctctgtttctctcggtgactaggtgtataatgctagctctgaactttggcagcatgtacgttcggcatggcggtcaatgctgttatttaaaggatagtgagcagatgttaatgtttatagcaaataaaagcatgttaatgtttattaaatttatcttgaatgaacttattatttctttattatttag

SEQ ID NO: 13975 - DNA, 4178 bp, Zea Mays
atcagggacatgaaacagctgcgacttaggttccagttctttgcaagtgccatgtcattcaacatcatgccagaggagcagcaggtgaatgagagcttcttgcccagccgttttcgcaatttctggcagcgattacagctaaggtatggtttcagcagatcctttcggaagattgagtcaaatcaggtggaggcacggcggtttgcacttgtttggaatgagataataagcaagttccgggaggaagacattgttagtgatcgtgaggttgagcttcttgagctgccacctgagctgtggaatgtgcgtgtaatccgttggccttgtttcttgctctgtaatgagctgtcacttgcacttggtcaggcaaaagaagttacaggatctgatcgtaggctatggaggaagatatgtaagaatgattatcgtcgttgtgcagtgattgaggtctatgatagtgcaaaacacatgctgcttgagatcataaaggaggggactgaggagcatggtattgttacacaactgttcagcgattttgatggatccatgaagatggagaagttcactgtggagtataagatgactgagctgcacaatatccatacaaggcttgtagctctattggtcctcatcctcaaacccaccaaagatgttaccaagatagttaatgctttgcagactctctatgatgttgttgttcgtgatttccaagctgagaagaggagcatggaacaactgagaagtgaaggtcttgcacagtcaaggcccaccaggcttctctttgtggatgcagttgtgcttcctgaagaggacaatgctaccttctataagcaagtgaggcgcatgcacaccatcctgacctccagagactctatgattaatgtcccacagaaccttgaagctcgtcggaggattgcctttttcagcaattcattgtttatgaacataccaagggcaacccaggttgagaagatgatgtctttcagtgtcttgacgccttattataaggaggaggtgttgtacagcaaggaccaactctataaagagaatgaagatggcatctcaatattatactatctaaaacagatttacccagatgagtgggagtacttcgtagagcgaatgaaacgtgaggggatgtctgatattaatgagctgtacagtgagaaggaaaggctgagggatcttcggcactgggtctcatataggggacagacattatcacgtactgtgagaggaatgatgtactattatgaagctctcaagatgctgacctttttggattctgcctctgaacatgatttaaagactggatcaagggagttagctactatgggttcctcaagaattggatcctcaaggcatgacggagttgctggtgggtcagggtattacagcagggcatcttcctctcatgcattgagtagagcaagcagtagtgtgagctccttgtttaaaggaagcgaatatgggactgtcctcatgaaatacacatatgtagttgcatgccaggtatatggacagcagaaagctaagaatgaccccaatgcttttgaaatattggagctaatgaaaaattatgaagcattacgtgttgcttatgttgatgaaaggcagatcaatggcaacgaaaaagagttcttctctgttctcgtgaaatatgaccaacaattgcagcgggaggttgaaatctatcgggttaagttgcctggagagttgaagattggcgaaggaaagccagaaaatcagaatcatgcactcatcttcacaaggggcgatgcagttcaaactattgatatgaaccaagacaactactttgaagaagctctaaagatgagaaacctactagaagagttcaatcgttattatggaattcgcaagcctaaaattcttggggttcgggaacacgtcttcacgggttcagtttcttctcttgcttggttcatgtctgcccaggagacaagttttgtcactctggggcagcgtgttctggctgatccacttaaagtcagaatgcattatggccacccagatgtttttgatcgtctttggtttttgggccgaggtggtatcagtaaagcatcaagaataatcaacattagtgaggacatttttgctggtttcaactgtactctccgtggtggtaatgttacacaccacgagtatatccaggttggtaaaggtagagatgtgggcctcaaccaggtctctatgtttgaagccaaggttgctagtggcaatggtgaacaaactttgagccgagatgtttacaggctgggccaccgattggatttcttccggatgctctctttcttctatacaactgttggattctatttcaatacaatgatggttgtgctaactgtctatgcatttgtatgggggcgcttttaccttgcactcagtgggcttgaggactacatcaacaagaacacttcctcttccaataatgcagccctgggagctgttctcaatcagcagttcgtcatacagctaggcctgttcacagctttacccatgattattgaaaattcacttgagcacgggttcctcactgctgtgtgggatttcatgaaaatgcagctacagtttgcatctgttttctacacattctccatgggaacaaagacacactattatgggaggacaatccttcacggaggagcgaaatatcgagccactggcagaggttttgttgtggagcataagaagtttgctgaaaactataggctctatgctcgcagccatttcatcaaagctatagaacttggtgttatattaactctttatgcatcttatggcagtgcatctgggaatacattggtgtatattctgctgacactttcaagttggtttcttgtgtcatcatggattcttgctccattcatttttaatccctctggttttgactggctgaagaattttaatgactttgaggattttctaaactggatatggttccggggtgggatctcagttcagtcagatcaaagctgggagaagtggtgggaggatgaaactgatcatctccggacgacaggtctatggggctgcatcttggaaatcatattagaccttcgatttttcttttttcagtatgcaattgtatatcggcttcacattgctgataatagtagaagcatccttgtctatcttctttcgtggacatgcatcctcctagcttttgtggctcttgtgacagtggcttactttcgagacagatattcagcaaagaagcacatacggtatcgccttgtccaggcaatcattgttgggagcactgtggctgctattgttgtgctgttggaattcacaaagtttcagtttgttgacacttttactagtcttttggcttttctgccgactggctggggaatcatatctattgctctggtattcaagccatatctgaggagatctgagatggtctggaaaactgtggttaccgtggcacgtttgtatgacatattgtttggagtaattgttatggcacctgtggctgtattatcatggttgcctgggcttcaggaaatgcaaacaaggatcctgttcaatgaagctttcagcaggggacttcacatttctcaaatcattactggcaaaaaggcacatgtgttttgagattaagagagtatgcacttgctttatgttcttgcagctaaatacatattccaactgaccattttccaaagtgagctgcttcgtcattctggaggactagtttgtctccatggcctatggtttatacaagctttatggcgtgtagagtagatggatgatagctcttccctgtacaggcaatctatttgtcgccgattcttcttaactttcgatatacacttggatgttcatgctagagatgatagtccatctaatgagatgtcgatgctgtccgtattcgtaaaatcgtaactccagatttttggtagcctttagatatctagttaaggctgtacaaaacttcatcatgagcgctattcaagctatggtttctgtcccctactcttttgttgtaaagggtacgatatttctgcatacctgcacatatctcagcgttatgtggaggactaatcctgtacacctaaattactgcctgaaatgtcatcttgcttggtccatatgtgtctcgctgctgggctgcatctaagctcctgtgcatgtggcacgttacgcgcgag

SEQ ID NO: 13976 - DNA, 4219 bp, Zea Mays
caagtattcaacatttgccgtggacgaaattcataggattgatcatcgtttagaaaagaatccagccagctggaggatgagccttctatacttcctcaacactatcaaaatctggatcatcatcagcattttaaagaccataagttttctccaatatccttctctacagacacagaaagtccgcagtttgtgatgtcatataacaagactgctgagaggagacctgatgatctaattgagatgatgacctgcacagttaaaccttcggtggactttgtgattgattctcgcaattcattacatggtccagcaaccaatcatgtttcaagaattgattatggaacaatggccaatgatgatagtaataagaaaccaagccctgctaacacgagtgtgcagagtgctgagagtgattttgcagttgatcagaagcagcaaagtcaatcatggacacctatttctggaagtatatctgcaaacgaaaatcacaagaactctgatagtcattcaacacgtagtactgtaacgcctcctgattatgcatttcttcaggtatctgacagtgatacacagacacaatcaatcaaagtacaacaaccattgaagcaacaacctaaactgctcaacaagaaagagagtgcagctaaagaagacgtcaggattgtagacgacaattgctctccaacttctgcacatatcacttcaagtagcaacatgtctcacactgacaagaaagttgatgccaatccaacttctgcatcagcagctatgaaggaggcaatgaattttgctgaagctaggttaaaggctgcaaaagcattgttagagggaaaaggtgacagttttaaattgcggaagaagccaagtcatcttaaaagcacaaggtctacagaaatcaagtctcctatttctgtagaggccgatacttctgaacaaaaactatgggtgaaaaagtcatcggaagaagaaaagaaccctgacgattctttgtctgacaagcacaaaaagctgactgcagtcagattagatcattttgatgacaatggaaaaaaggtacttccattggagaagcctgagcatatggtgcaacactgcactgaatcctgtcaaacttccagtaaactacaaaaactaggcaactggaagtcaggtaatgacttttttgagctaacccgagatgatcagaaatgcaaaaatgatgaagccacagagggaggtgataaatgtgagcaaatgaatcctattactagtgtcatcaatgatcacaatgaaattgaattcaatgcagcaggctctgacttggacaggtatgaaaaactatgggaggttaatgatggcaggagtgtgggggtgaaacctgtaaatctgagagagaacaagacagctcccgtggacaaagatagtgtgtctgtgattttagaatcttctacagaaaataaggcacaccaaaagactcacaactcaattggtgagggacttgtaacactgaaaaatgctaaggaaagccatggtactgataagtgctttgagcttccttctatgagtggagcctccacaaagctggatgtcttcaaggatgtgtcaggttcatttccggaggctcgctcatcagtaaatgccagcgatcttggagaccatggtaatattagtccaaacttaagtccattagcaggaacatcacaagaggacacaaccagtaaactggtatcagaagtatcttgcgatggtgggatgcaacacacttctcgtagtaatgaaaagctacaggaatcctcagatgtatctgatgttgctatttcccagggaagtaacattaaatcattcattttagaagaacttaaagaatctgatgtatgtgatgctttcatgaggggacctaatggaaaagggcaggaagctgaaaattatggaagagaaaaattcagctttattgatggatcactcttgctgcgaccacacttccataacaaaggtgctaagatgaatgtaatctctgaggaagtacagaaagtcaaaaatgaggagaaacttggtccgtgtacacaccccgaagtaacaattgtggatctggatggtgattgtcctaaagatttgaatgatgttattctacaaaatgatgactttgcagacccagaagaatcaaacatgcctaatgtatttgaggtagctagcaagttgattaaaagagatctggatcaagaaatgcatgggtcattaggacatggtgaagaggagaatatggaagaaggaacagatgtacatctttgtgatattaatggcaaagaagtagatgaaaccttgttagaaaatagtgtgtgtacagatactgaagaaggatgtgctcattgtaaccaggaagaccagaattcatctgacagcaccaacagaggaaaaagtgatgtagataacatgtgttatacatcttgtgacgaggttaggtctgaatcattttcaggcgatgaagttgttatcaaaactacaattgataaaatcggggatgtttccaacagaggaggaagagaattatcaacagaaaggtctacatgtgaagatcatggcaacgcaatcataatggaagaaaaagacactacaacaaggatatcaaaggcagagcatgcatcatctcccttggagacgatgtgtggtgtaactaaatctgctgaagctcccacaacaagggagaacatgacaacagcagatagtgcatgtgaaaaggacaaagggtcttctcaaagagtacaggaggaaaacgaaagtgaaaggagattggagaaagaaagagaagttgaagagaaggaaagaaggaaattggagaaagaaagagaacttgccgaagagaaggaaagaaggaaatttgagaaagaaagagaacttgccgaagagaaggaaagaagaaaaatggagaaagaaaaagaacatgccgaagagaaggaaagaagtaaattggagaaagaaaaagaacttgctgaagagaaggaaagacataaattgaagaaagagagagaacttgctgaagagaaggaaagaagaagattagaagaggcggaaagggagagggagcgtaaaaaggatagacttgctgttgaaagagcgacaagagaagcacatgagagagcatttgccgaagctcgtgaaaaggcagaaaaaatggctttggaaagaattaatgctgcacggcagcgggcatctgcagaggcccgagagaaagaagatagagcaagtgtcgaaccagctgctgaaagggctactagagaagctaggataaaagcagaacgtgcggcagtcgagcgagcaactgctgaagctcgggagcgggcaatagaaaaggcaaaggctgagaaggctcttgcagaggcaagagagcggagggaacgatacaaatcctctttcaaggagagttttaagtccaccaatcaggatattcgacaggagtcacagtttcatagggcaacttctagtaatttcatccgaaacccagattccagcaacagagcaatggttgaggttgagtccgctttaagacataaagcaagattagagaggcatcaacgcacagctgagcgtgtgacaaaagctcttgccgagaagaacacgcgggacctgctggctcaaagagagcaagcagagaaacataggctgtctgaattcctggatcctgagatcaagagatggtcaaatggaaaggaaggaaatctgagggccctgctatccacattgcaatatattcttggtgccgatagtggctggcaaccggtgccactaacagatctcattacagcggttgctgtgaagaaagcttacaggaaggcaaccctatgtgtccatccagataaactacagcagaggggcgctacgatcagacagaaatacatatgtgagaaggtttttgatcttcttaaggatgcttggaacaaattcacttcggaggagcgctagggtggcgggggtgctagagcggccgtttattttgaggcaggcgattcgtatattttctatagcgacgtcgtcagtttcttgattcaaaactgattgtaaatatgcagttgtagccctagatatccgtgtcagaaacacagcgcagatgatgctggttagtaccttatctcagaatcagttcagcaaaaagagctccattgctcgtaagtttccaagcccgcgcggtgggtcgaaaactgcccaatgcattggtcagatggatcctttacggtagagtttcagg

SEQ ID NO: 13977 - DNA, 584 bp, Zea Mays
gccagccatggctgagaatctggcgcccgagaagcgccactccttcgtgcacaacgggcagaaggtgttcgagtgggaccagacgctggaggaggtcaacatgtacatcgagctcccgaagggtgtgccaaccaagctatttcactgcagcatccaggctagccacgtcgaggtcggcatccgcggcaacccgccatacctcaaccatgacctgacacacccagtgaagactgactcgtcgttctggacaatagaagacggtgagatgcatataacactgcaaaaaagagagaaggggaaaacatggtcatctccaatacaagggcaagggattttggatccatatgctgcagatcaagagcaaaagcggcttatgctccaaaggtttcaggaagagaaccctgggttcgacttttcacaggctcagttcagtggaacctgccctgacccaagaaccttcatgggagggatacgctccgagtgaagcaccctacctgcctatattgggaactagataggctgccttacggcacgctgccgtgcgctcgtcgatctccaatccaagggtgatgtgctgccctcct

SEQ ID NO: 13978 - DNA, 1787 bp, Zea Mays
gtagctcttccccaaataaattgattgtgccgttgcaacgtatgtaatttgagaaaccgtatcttatcaagtcgtgtcttataaaaagagagagagagagagagtggaaccagtatttataagcaatatgtgatgcatcatatcgtaaacttcagatcggataggaaagcgccaagacgctcacgctgccagctcagctcgtgttcgacccatgctttccacgaagcatgggcaagaccaagacggcaggagcaggggagcagcagctgatgataagctagctagccagagtcccactccactttacctccttgtcagctgctcgcacttgcagcgtcccgttcccgcacttctcttccttctcgtttcgtcctgcacagcgcacgcaactgccaccggccaccgcgcaaactccattgcgcgcagatcaagaccgccacacccaccaccagcgcttcagcgggagacgtgacgactgacgagacgaagcctctccccacggcgcctccccctccacatggcctgggctcgccttgcctcccgctcccgtctgcgccccgcggcctccgccgccggccgatcccgacacgcctcaacaccggctccgcctccgcctccgtccccacctaccacacgcacggtacctgcggccacctccgcgccaccgctccggcgtctcctcctgcttccgcggcaccggtttgctgacgccacgccctcagcatcgaccgcgtggctgctcggtgcccgctggcgccaggggcacggcaggaggtgctttgcgagcgccgcctacccggcgcaggcgacgccgggggaggcgtctgagctggtggatgtgccactggcgcagactggggaaggcatcgccgagtgcgagcttctgcgctggttcgtcgccgagggtgaccaagtagatgaattccagccactctgtgaagtacagagtgacaaagcaactatcgagataacaagtcgtttcaaggggaaagtacataagattcactttgtccctggtgacatagtgaaggttggtgaaactttactgaaaatggttgtgggtgacagccaaattgtttccccagataatatagttccatccgctggtaagtcccttggagtagagtctgcagttttctcaagtgaaggcaatgttcctggtggaaatctctctacaccagctgttaggcatctagcaaagcagtatgggatcagcataaatgaaattgttgggacagggaaagatggtagggttttgaaagaagatgtgttgaattatgctgtcagcaaaggtgtttgcaaacaacaatcgttagcttcggaagggaacattggtcaagttgagttactagaggaagggaaagcattactcgatgaggacttctatgaagataagaaaatccttctcaggggataccagagatcaatggtcaaatcaatgagcctggcagcaaaagttccacattttcattatctagaggagataaattgtgattctcttgtgcaactaaaaaccacatttcaaaatgagaacaaggatcaaactatcaagcacactttccttccgttcctcataaagtcactttctatggcactgagtaaataccctatgttgaacagttctttcattgaggaaactaacgaagttgtgttcaaggggcctcacaacattggggtggcgatggctacaacacatggattagtcgtgccaaacatcaagaaagtgcagtcgctatcaatattggaggtcctaatagttcgaacaatgaactacagtaagtttggat

SEQ ID NO: 13979 - DNA, 482 bp, Zea Mays
ctatgcaaggtactggaagtctagttcaaaacaagctagttggtgctccaggcgggggatcaagtccacatgtagtacaaaatgccgatatccctgttaagcaaaccactagctcttcctcacgtgagcagtcagacgatgatgacatggaaggagatgctgagactactggaaatggaaaccctgttcaacacagattacagagaaggaagcaatccaaccgagaatcagccaggcgttcgagaagcagaaaggcagctcacttgaatgaactggaggcacaggtatcacagttaagagttgagaactcttcgctcctaaggcgacttgctgacgttaatcagaagttcaatgaggctgctgttgacaatagggtgcttaaggcagatgttgaaaccttaagagcaaaggattaaccgaacaaggcctaattgggtgttcttggccattctgatggaacgtgggaatgcatcatgttttca

SEQ ID NO: 13980 - DNA, 1373 bp, Zea Mays
tcactccagtgatgatgcatggtttgagcatgattttcgctacaccgagtgggagacgctcaacatgttcttggggatgggccgaccggcgtggagggaggcgcgcgccacgctacaaaaaatcctctcagccgacgagccagtcttgcgtgacaacgaagccctgaggaataaatgtcttattccaatgagtgatatcgagatggttctaccaatcacggttggaggttacacagatttcttttgttctgtgcaccatgcaaggaactgcggattcatcttccgagggccgcagactccagttaatccaaattggttttatcttccaataggatacaatggacgagcatcatctatagttgtgtctggaaccgatgtaattaggcccagaggacaaggacatccaacaggaaactccgctccttattttggtccctctcagaagcttgattttgagcttgagatggctgccattgttggtccaggaaatgaattaggcaaaccaattgatatcaatgatgctgaagaacatatttttggcctaactttgatgaatgattggagcgccagagatattcaggcttgggagactatacctcttggacctttccttgggaaaagcttcagtaccaccatatcaccatggattgttactcttgatgctttgaagcctttcatgtgtgaggctcctaagcaggaacccgaacctttaccatacctagctgaaaagaatcacataaactatgacattcctcttgaacagctaacacaccacactatcaatggatgcaacatgaggccgggggatatatttgcaactggcacactcagtggacctgaaccggactccctcggatgtctattggagctaacatggaacgggcagaaggagataccagtgggcaatttgacccgcaagtttctagaagatggagatgaggtcatcttgacaggatgctgcaagggtgaaggctacaacattggttttggaacttgcactgggaaggtcctgccggcacttccctgagccaacacgtctttacatcagttctcgagtccaaacactcaacaatctagcaagatgctatgtaactgaacaacgggggttgttttcgcataggaaactgatactctgttgtggaataaaatcggttcaccattttatacacattttctctctcaagaattgtgttattaaacttgtaaaaatgcaatgtctctcatctcttcatccatcgcccagtgagatttgaattctgtgagtatctgtgtatatgggcctggccgcccactagggttccatatactcttgtactcctgcagctagggtattgtattctatactgcaacatggtatcaaagctttatgtttc

SEQ ID NO: 13981 - DNA, 849 bp, Zea Mays
gcatacggacggttcattccattctccagagtggcatgcggcgcgcctggccagccttaacaagacgcacaccctcacctgggaggagttcaagaagaagcagaaggaagaggaactgaaaaggggcgagctggaggctgacaaagacaaaatgatgagagagtatagagctcaactggatgctgaaagagctcaaaagctagcaaacggaagaaatcactcaaggtcaaactcaaaatcatcatcttccaagaaagagaggaaggataaggacgcaaagaaaagaagtaaaaagaggagaaagcacaaaagttcatcagagtcaagttccagctcatcttcagaatcttcaagcagcgacgatgaggataggggttcaaggaagtccagatcacggtcgagatcaaagagaacaaggaaggaaaagaagagccggtcaaggtccaagcgcagaggcagtgaaagcgaggaggaaggcccggtacgcctctctaaattcttcgggaagtaaggagtagacgccgctgtacccaagacgcctttttcattttgaaacgtagattggtgggtttggatgtatcattcaacacaaattacttctgaaggttgagcgagccgtttaccatggtgttctcaatatgatgctcagctgttaagagggtctggtcaagttgtgtggcttctaaaaactttgtaagcaactggtaagtcattgttaaatcgctgtaccttggaggatttgatgccatatatttgagacattgaactgctatatttatgttaagactttacatatgcagtcagttgtttcagttatatgctcttttgctatatttatgttaagacttt

SEQ ID NO: 13982 - DNA, 3942 bp, Zea Mays
gcacccagtccacccaggccccagcactgccgctgccttgcctgccctcgcttcggcgctttctgctttctccagtgagccgcacccgcactaccgctgacgctaattaaccacaagcgaccgtcgccttcccccacctcctcccttcctcaaaaaaaggcggaggcgggagtggtggtggtgctcgtgggcacgcagcggagcaccctgtacagcagcagcgctgcggcagtagagagtgccattggtggagctggtaactagccctcccccctccgttcccgtcccgcgcgcagccgtctgccgagcctgctcagtgcccatcatggtgaggaagaagagaactggccctggtggctctggagaaacttctggagagtcttcaggagcctctggacaaggttcctcacagcagcctgagcgaactcaacaacctgggggaggacgtggctgggtgcctcaacagggtggccatggtggtgggcaacaccagggtcgtgatcgacattatcagggacgtggaggaccagggccacatcaccttggtagtggggcacctgagtatcacccgcgtgaataccagggacgtggtggtgaatatcagggacatggtggtgagtaccagggacggggtggtgactaccagggacgtggtggtggccgctccagaggtggaatgccacagccatactatggtgggcataggggaggtaatgttggacgcaatgttcctccaggtccgtccaggacagttcccgagctgcaccaagccccatatgtccagtatccagccccggtggtttcgccctccccatcgggacctggctcatcctcacagcctatggcagaggtgagctctggacaagtccagcaacagtttcagcaacttgccgatcgtggtcagagttccacgagccaagaaattcaagtggcaccagcatcaagcaaatcggttcgattcccgttacggcccggcaagggcacttatggggacaggtgcattgtgaaggcaaatcatttttttgctgagcttcctgacaaagaccttcaccaatatgatgtatctataacacctgaggttacttcacgtggcgtcaatcgtgctgtcatgggtgagcttgtaacaatatatagacaatcccatttgggtgggcgtctacctgcatacgatggaagaaagagcctgtatactgctggaccattgccatttacttctatggcatttgaaattaccttgcaagatgaggaagatagtcttggcggtcgccaaggtggacataggcgtgagagagtatttagggtggtgatcaaatttgcagcccgtgctgatctccaccatctggctatgtttctagctggaaggcaagcagatgcccctcaggaagctcttcaagtgcttgacattgtactacgtgaattgcctaccgcgaggtattctcctgtcggtaggtcattttactctcccaacttagggagacgtcaaaaacttggtgagggattggaaagttggcgtggtttttaccaaagcataaggccgacacagatgggcctttcactgaatattgatatgtcctctactgcatttatcgagcctctccctgtgatcgattttgttgctcagcttcttaacagagatatctcagttaggccattgtctgattctgatcgcgtgaagattaaaaaagccctaagaggtgtgaaggttgaggtgactcacaggggaaacatgcgcagaaaatatcgcatttctggcctcacctcacaagcaacaagagagctatcgtatgtgtctttcattgctggtatgagattccctgttgatgatcgtggtactgtgaagactgtggtgcaatacttcatggagacttatggttttagtatccagcacaccactttaccatgcttgcaagtgggtaatcaacaaagaccaaattatctgcctatggaggtttgcaagatagttgaaggacagcgttactcaaagcgactcaatgagaaacaaatcactgctctactgaaagtgacctgccagcgccctcaagagcgcgagctggacatcttacagactgtgcatcacaatgcatactatgaagacccctatgcactggaatttggtataagaattgatgaacgtcttgctgcagttgaagctcgtgttctgccaccaccaagacttaaataccatgatagtggccgagagaaggatgttttgcccagagttggccaatggaacatgatgaataagaaaatggttaatggtggcagagtgagcaactgggcatgtattaacttctctcggaatgtgcaagatagtgccgctaggggtttctctcatgagttggcagtcatgtgccaaatatcaggaatggattttgctcttgagcctgtgctgcctccagtgactgcaaggccagaacatgttgagagagcgttaaaggcacgttatcaagatgcaatgaacatactgaggccacagggaagggaacttgatctgctgatcgtaatactgcctgacaacaatggttctctttatggggatctcaaaaggatctgtgagactgaactcggattggtctcccagtgttgtctgactaaacatgtttttaagatgagcaagcagtaccttgcaaatgttgcactcaaaataaatgttaaggttgggggaaggaatactgtacttttagatgctttgtcaaggagaatcccccttgtcagtgacagaccgaccataatatttggtgctgatgttacccatccacatcctggagaagattccagtccttccattgcagccgttgttgcttcgcaagactggcccgaggtcacgaaatacgctggactagtgagtgcgcaagcccatcgccaggagctgatacaggatcttttcaaagtatggcaggacccgcagagaaggacggtaactggcggcatgataaaggaacttctcatttctttcaagagggcaactggacagaagccccagaggatcatattctacagggatggtgtcagtgagggacagttctatcaagtattgctgtacgaacttgatgccattagaaaggcctgtgcgtccctggagcccaactaccagcctccagttacttttgtcgtggtacagaagcgccatcacactaggctgtttgcgaacaaccacagtgatcagcgcacagtcgatagaagcggaaacatactgcctggcaccgtggtcgattcgaagatttgccatcctactgagtttgacttctacctgtgtagccatgctggcattcagggaacgagccgccctgctcactaccatgtcctgtgggacgagaacaagttcacagctgacgagctgcagaccctgacgaacaacctgtgctacacgtacgctaggtgcacccgctccgtgtccatcgtgcccccggcgtactacgctcatctggcagccttccgagctcgcttctacatggagccagacacctctgacagcgggtcactggccagcggtgcccgtggccccccacccggtgcggcacgcagcagcacgagaggggccgggagtgtcgaggtcaggcccctacctgctctcaaggagaacgtgaagcgtgtcatgttttactgctgagacgctggtgggctgccttcgccaaggaaaatgccctggagcattcccatgtacccgcactgtttcggtgatacagtactatctaacgccgattttgcgcgttaagacttccagtgatctgggaaatttcttgtacgactgttgtagtgttgtgtattcgtaatgtgatgacgcggcagttcttctaggagcttagtgccgtgtaaaatatctgttgtaagttgtaacctgtcaccctctagtgttatgtcatgatgaaccaaattatttgttgtcattccatgtacttcgccaagtatttgttgtcacgatgttctaggatgatttttttt

SEQ ID NO: 13983 - DNA, 70 bp, Zea Mays
ctcgcatcccttgggcccgtttcgccttcgcgcgacaccggctgcgagctgagtttgatttcgccgggtt

SEQ ID NO: 13984 - DNA, 2104 bp, Zea Mays
gggaccaaccgttgcggatgatttcctctcgtctcgtcccatactcccgtcctgtccgtcttcacctgcgttccccgggtcccgacacgccgctgtaccagtcccgcccgcctgcgcacttctcccacccccgcgccgcctccggcgccggcgagccctcccgacgctcctcgaacgatccgtccctgtcgcggcccttctctctgccgcttccagcccaagggtcaatctgtcaaggacacacacagtcaaacctacctctgctggcgaccgttcaggaatttctgttaaatgcaacttggggtggtcttctcaaccatcgcctgacttgaggcatcactttagaggatactcatcagcatcagaggcagttcttacttcccaatctgatgtgagaaaactgtttgttggcaatgaaaaaatcggtgttctcttgctgaatcttgggggcccagagactcttgacgatgtgcagcctttcttgtttaatctttttgcagatccggacattatccgtcttcctaggctctttcgctttctgcagaagccacttgcaaaattcatatcagaagtgagagcaccaaaaagtaaggaaggttatgcatccataggtggcggttctcctctacgacaaattactgatgcacaggctgaagcacttagggaggcattacatgggaaagatgttcctgccaacgtgtatgttggaatgcggtattggcatcccttcactgaagaagccatagaacaaataaaacgggatggaatcacgaaacttgttgtgttgcctctataccctcagttctccatatcaactagtggttcaagtctccgtttattggagagcatattcagagaggatgagtatctcgtgaatatgcaacatacagttataccttcctggtaccaacgtgaaggatatatcaaggctatggcaactttgattgaaaacgaattgacaaaatttcaagaaccccaaaaggttatgatatttttcagtgctcatggagttcctctggcatatgttgaagaagctggtgatccatataaagcagaaatggaagagtgtatcgatcttatcatggaagaactggaaaaaagaggaataacaaatccgtgcatacttgcttatcagagccgagttggaccagtggaatggctgaaaccgtacactgatgagacaattattgagcttgggcagaaaggggtaaagagcctgcttgctgttcccattagttttgttagcgaacacattgaaactttggaagaaatcgatgtggagtacaaagagttggctttagaatctggcatcaagcactggggacgggttccagcactaggttgcgaacccacattcatttcggatcttgctgatgctgttattgaaagcctaccttatgttggcgcaatggcagtttccaatcttgaggctcggcagtctctcgtacccctcgggagcgtggaggagctgctagcagcatacgactcgaagcgcgatgagctccctccaccggtaatcgtgtgggagtggggctggacaaagagcgcggagacctggaatggtcgtgcggcgatgctggccgtgctggctctcctggtgctggaagtgaccaccggcgaagggttcctgcatcaatggggaatcctgcctctgttccgctgagccgacagttctgttcatgatggggtcataattttgctgcagccgaaggaagttttgaacttctgatgctgtatatgaatcaatttgccttaaatcgtcgatgggaaaagaggagaaaatggtaaaatatggacagaattcgacggtatatcatgttatattgtacctacctacatgacatgggacatgaaatagggctcagacatgcgctatggaacttggaatacacacaaacctaacacgccacatgctgcacaaactcctgcctactgccactagtaccttgtctgtccataagtggatgcgcgttgcttttagagaataatcatatgagcggatgagcctctgcattgtcatgtggatgctatatcaatccagcattccagctcaacaatttcagggttagctttagctcaagcagattaatttttcggttggctg

SEQ ID NO: 13985 - DNA, 3328 bp, Zea Mays
taaagtggatgagttgattgaagatgaaatgaagctgagggaatctgccgtgttcagcggtaaccttggcgagctagaacggaaaactaggaagcgcaaaaaagtacttgcgactttgaaggtcttatggtcagtaatagaggatatgacaaaggacatatcaccagaggatgcaaacaaattgatatctgaagagatgaaaagggtcatgcaaaaggatgcagcaaggacggaggatgttgttccatataatattattcctctagattccttgacttctaccactaatgcaattgtgaattttccagaggtgagggcagcaatatcaactctgcagtactatactgatctgcccaggcttcctggtaccttttcagtccctgatgctaggaattcagatatcctggatcttttgcaatgtgtatttggttttcagggggataatgtgaaaaaccaaagagagcatatcattcacctactggcgaatgaacaatctcgtgtgggaaaactatcaggaaacgaaccgaaaattgatgagggtgccgtgcatgctgtgttttctaaagcccttgataactatatcaaatggtgcaactatctgcctcttcgtcctgtctgggataacaatgattcgttgacaaaggaaaagaagttgctatatgtgtgtttatactacttgatgtggggagaagctgctaacgtgcgatttattccagagggcttatgctacatatttcatcatctagcaagagaattaggggtgattctgcagaaacaaactgcagagccagctgaaagctgcaattctggtggtggcgtatcgtttcttgacaatgtcatttatcctttctatgaaatcattgcagcggaagcagccaataataaaaacgggcgtgcaccacattctgaatggagaaattatgatgatttcaatgagtttttctggtctcataagtgcttccacctacgatggccttggaacctgagcgacccgtttttctcgaagcccagtaggaaatataagggcttgctcagtaggaatcatcactacggaaagacatcttttgtggaacataggacttttcttcatctttaccacagctttcatcgcctttggatgttccttattatgatgtttcagggactgactatcattgctttcaatgatggtagttttgacaggaagaccatattgcaacttcttagtctgggtcctacttatgtcgtaatgaaatttattgagagtctattggatattctaatgatgtatggtgcctattcaacatctcgtggatctgcaatcaccagagtggcatggcgattctgctggtttactatagcttcagttgcaatttgctacctatatatcaagacacttcaagatggcacagagtcagcaacattcaagatatatgtttttgtaatcagtgcatatgtgggcattaagataattttcagcctacttatgagtgtcccttgttgccatggtttggctgaggcttgctatcgctggtctgctgtacgccttgttaagtggatgcatcaggagaataattatgttggaagaggcatgcatgagagtccccttgactatatcaaatacgccactttctggattgcaattcttggtgcaaaattttcattcacctattttcttcagataaaacctcttgtagaaccaacaagaactataatcaatttcactggcctgcagtatgcttggcatgattttttctcgaagaataatcataatgctcttacaatcctttctttatgggctccagtgctgtcaatttaccttttggacattcatgtattctacactgtattgtctgctatttatggatttctccttggtgcacgtgatcgcctgggagagattagtactgtcgaggctgttcacagattctttgagaagtttcctggagcattcatgcatagacttcatgttgaggttcccaaaaggaagcaactgctatcttctggtcaggaaatagagttaaacaagtttgacgcatctagattctcccccttctggaatgaaatagtgaggaatttaagggaagaggattatattaataattttgaactagaattgcttttgatgcccaagaatgacgttggagttctaccgattgtgcaatggccagttttcttgcttgctagcaaggttttcttggccaaagagattgcagaggactgcaaagactcacaagaagaactttggttaaggatatcgaaggatgaatacatgcaatatgctgttgtagagtccttccatagcatttatcatattctgacgtctatactagagaaagaaggccgcctctgggtggaaagaatttatggtggtatccgagacagcatttcgaagcggaccatccaaagtgatcttcatttcaaaaaactgcttaatgttattgccaagcttgttgctgtattgggaatactgcgaggtacgacggagtccagtgatttgaaaaaaggtttggttaatgctattcaagacctatatgatgttgttcatcatgaagcgttttcggttgatatgagtggccacattgaagactgggatcaaattaatttagcaagggctgaaggtcgcctcttcaataaactcaagtggccaaatgatcccaaattgaaagacttgatcaagagattgtattcacttctgacaattaaagaatctgctgcaactgtccctaaaaatttagaagccaggcgaagacttcagttctttacgaactcactgttcatggaaatgcctgttgcacggcctgtttcggaaatggtctcctttagtgtgtttactccatattactctgagattgttctctacagcatggctgaacttcagaagaaaaacgaagacggtataactacactgttttatctccagaagatttacccagatgaatggaagaacttccttactcgtatcaacagggatgaaaatgcagcagactctgagctttttggcaacccaaatgacatacttgaactacgtctatgggcttcttatcgtgggcagaccttagctcgaactgtccgtggtatgatgtactataggaaagcccttatgctgcagagttatttggagaggatacaatctgaagatttggaatctacattagggttggctggttcagctgataggcattttgagttgtcacctgaggcgcgtgctcaggctgatttgaagtttacatatgtggttacctgccaaatttatggaaaacagaagggggaagggaaggctgaactgcagacatatccttactaatgcaaaggtacatttaatttatttatgctagagatgtctttg

SEQ ID NO: 13986 - DNA, 1393 bp, Zea Mays
gttaatgggtttccagcaccttagctagaacacttgcagcacatgcttttgactgttctggaaggtgcaataagaccagattgcctctcttctgattttgaaacaagtgagtgtctaaactcacaggttggatctgcttctgtccttccatgggttcccgacactacttcagctgttatgctccgaatgttagaccttgactcagctattttgtatgttcaaaatcaaaagatggatagagatgatggaggtttcatgaaatttccgtcaaggtatacagttgctaagagcaaacaagaaacaacacctgaaacagctggtttggatctgtatgatggaaggtggcttcctggtagtggccgtaggggtcgtggacgtggaagtagaggaggtagcaggggaggcagaggtcgaagtcgaggtggaaggatcccaagaggtgttagcagctcatcaaggatcgagttcaagggtggtattgttgcttctgataaagcgccaaggaagaatgtacgccgagggcgtggtcgtggtcgtggtcgtagacgtggacgtcgaactgtgaggcctcggcagccatctgttggcagagccagatcaattccaaaggaaaatttgttgggaagctttagcatgcttagcagctcaaaggctgctaccattgaggagtctccacgaagctctggcgcagacgagtggggcttggagaccagaacgacatacactgaatgtgatgagaacagctctggatcacagtcagaagataacgaggaaaatggccagcccatggatgatgattatgaagatcaagttccagattactcaataggctattctaccggctcgaggcaccatgtaatgatgtccatgatggaccatgatagtgacgaggaggatgaagatgctgaaggtgatgagaatgtggaagaagatgcagaccttgcagttgacgatgccgatgttgagatggacgaagatgatgaaattggtgatgatggagaggatggtggcgttggaggggagatgaatgcggatgaggatccggatgctacttcatattcatccgattacagcgactaagaaagcagaaataagggaaccttatcccagattcctccctcggcatggaatgcatgtagtaccgagtaggcattcccccccgttgtgagccaaaagggagcttagatgcttaggttcgaaggagcgaggaactgttttttaggcaccgcaggttttaatagaatttctgacgcattcgacgaagtgtttggttgtaccgtggtagttgtgttactggggaattccccgagttattatacaatgtgttaagacaaaatactgtcatatcgcatctggttgccatgcgtctaactggttcacggttttaccgtta

SEQ ID NO: 13987 - DNA, 1880 bp, Zea Mays
ttcagattcagcagttcagcactttagctaaacactagaaataatgggagatgacaaccagaaattgaccctcattaagctagctagcatgattgaagtggctgcaaagaaaggcgctcgcgatctcaacctgcaaggcaaactcatgaaccagatcgagtggctccctgattcaattggaaagctcactggacttgtcacccttgacatttcggagaatcggatcttggccttgccggaagcaattgggatgctttcttctttggccaagcttgaccttcacgctaacagaattgctcagcttcccgagtcgattggggatctttccaacctgatatatctcgaccttaggggcaatcagcttgcatcattgccggccagtcttggtaggctggtgaagcttgaggagcttgatgtgagtgcaaaccatcttacctcactccccgactcaataggaagccttacacgcctgaagaagttgatcgccgagacaaacgaccttgatgagctgccatacactatcggcaattgtgtgtcactggtggaactgcgggtaggatacaaccacctcaaggccctcccggaggccgtcggaaagctagagtctctggaggtcctctctgtgcgatacaacactattaggggccttccaacaacaatggcatctctcacaaagctgaaggaggttgatgcaagttttaatgagctcgagtctattcccgagaacttctgcttcgtcacttctcttatcaaactaaacgtcgggaataatttcgctgacctgcaatccctgcctcgttccattggcaaccttgagatgctggaagagttggatataagcaacaatcagattagggtgcttcctgattcttttggaaacctgcagcgtctccgtgtgctccgcgcagaagagaaccctctccaagtgccaccaagagatgtagctttaaagggagctcaggccgctgttcaatacatggctgaatatgttgccaagaaagccacaaggtcacaaccgatgaagacaaagaagacctgggctcagttctgctttttctcccggcctaacaaaagaaagcacgaccgaatagacaccgcgtcgtgattcactgtgagactgatgaacattaagctgctgtttcctcaactctacacttctgaagagaactatcgggtgcatcgccttcgatcgctaccattgtgttgtatgggtcaacaagatgtgatgcccagaagcttttccttggacaatgctgcagcctgcagcttctaacctgtagaaccaagatggtcaggtttcaccgaacctactcactcttgtttccaccaggccaactcaactctgaatgaccgctggaagagtccaagtcttacttcagcttaagaatctagaagtggtttagtctctcggcctttttcgtatgatcgagagcagctgagaagagaactggaagattgctgaagttcggtttgccctgcagtgcaacttgtcaatattatacgtaatatacatgcatccggtgaaactaagaccttggttattactaggatttgctttcagagatcatttttatttctctatatttgagcgtatgttctttgaaacttctaagttagaactaaaatcctgcaagataccagatgtgctggattgaaaacgactgcagtcgaatcctttttgtgtggcttaatatttatttagtgcattctgagaagtttctgttgtaactagtgtactagaatctttctgaagagattcataaaacacagtattttgcatgtttttctctgataaattgtaacgtgggctattacaagcagctactcggagcatttcaggaaatttcttgttttctgtgtatttttgtatgaaaatggac

SEQ ID NO: 13988 - DNA, 7166 bp, Zea Mays
cgaaagtcagccgagcccacgtcggttcgtcggtctccaaccgacctcgtctcgtctcgtcaagcatcatctgctttctgcgactctgccgcgaagccctcttcgctttctattcatcagaccatatcgaatcaagtcagattcagggaggggaaggcaaaaccctaacctctctcactccgccgccaccgggggagcgcgaggaggacccttcatcgacccgccgcacgaacaaagctcccatggccaacctcggcggtggcgccgaggcgcacgcgcgattcaagcagtacgagtatcgcgccaactccagcctcgtcctcaccacagactcccgcccgcgcgacacccacgagcccaccggagagcccgagacgctctggggcaggatcgaccccaggtccttcggcgaccgcgccgtccagaacaggccgcccgagctcgaggagaagctctccaagtcgcgcaccaaaaagtctaagcgcgacgctgctgccgcgctcgactccgccgacctcccccgtcgcgacgccaagcgcaggcgccgcgctgcttccgcccaggaggtctccgtcctctccctcaccgacgacgccgtgtacaagccccagaccaaggagacgcgtgccgcctatgaggccttgctcagcctcatccaacagcagcttggcggccagcccctcgatgtccttgctggggcagctgatgaggtgctcgctacactcaagaatgacaaggtcaagaaccctgataagaagaaggacattgagcagctgctcaaccctatctccagccagctctttgatcagcttgtctccattggcaagctcatcaccgacttccatgatgcggcagctggtgatgcttccggtgcgccttccgccgacgctgtggacaccactctggatgatgatgttggtgttgctgttgagtttgaagaagacgaagacgaggagagtgattttgatcaggtgcaagacgagctggatgaggatgaggaagatgacatggctgagttgaatggtcctggaggtatgcagatgggtggtgagttagacgacgatgacatgcagaacgccaatcaggggctgaccgtcaatgttcaggacatcgatgcttactggctccagaggaagatatcccaggcatacggggatggggacattgatgctcaacagagccagaagcttgctgaggatatcttgaagatcattgccgagggtgacgacagagacgtcgagaatcgccttgtcatgctcttggactatgagaagtttgatctcattaagttgttgctgcgcaaccgtctcaagattgtttggtgcacccgcttagccagggccgaagatcaggaacagaggaagaatatagaggaagagatggcaagtgacccaagtttggctccgatattggagcagctacatgcaaccagagcatccgcaaaggagaggcagaagaacctggagaaaagcatcagggatgaggccaagaggctcctcaacaatgatgctgctgctgctggtgctgatggtgccagggaccacagggcagccgagtgggacatggagagtggatggctgaaaggacagaggcagttgcttgatcttgaaagcctctcgttccatcagggtggtctctttatggctaacaagaaatgtgaacttccgactggatcgtttagaacccctcataagggatatgaggaggttcatgtgccagcactgaaggctaagccctatgaaacaggagagaagattgtgaagatatctgatatgccagagtgggcacggtcagcttttgatgggatgacacagctgaacagagttcagagcagggtctatgatactgctcttttcaaaccagacaatatccttctctgtgctccgactggtgctggcaaaacaaatgtggctgtgcttaccatccttcagcagattggtctgcatatgcaggatggagagtttgataataccaagtacaaaattgtctatgtggccccgatgaaagcattggttgctgaagtcgttggaaacctgtctaagcgtttggcaggttacaatgttactgttagggagctcagtggagaccagaacttgaccaagcaacagattgatgaaacacagattattgtcacaacacctgagaaatgggacattgtgaccaggaaatcaggggacagaacctatacccaaatggtgaagctgttaatcattgatgagattcatctgctacacgataacagagggcctgttctggagagcattgttgctaggacagtcaggcagattgagacgacaaaggagaatattcgtctggttgggctctctgcgactctaccaaactatgaagatgttgcattattcttgcgcgttcgcaaagaaagcctcttctattttgacaacagttaccgaccttgccctcttgcccagcaatacattgggatcactgttaggaagccactacagaggatgcagttgatgaatgagatttgttatgagaaggttatggctgccgctggtaagcatcaagtgcttatatttgtacactcaaggaaggagacggcaaagactgccaaagccatcagagatacggcgttggcaaatgacactgtcagccgctttctgaagaatgagagtgcaagccaagagatccttggcactcatgctgaacttgtcaaaaacaatgatcttaaagaccttttgccttatggatttgctattcatcatgctgggatggcaagggttgaccgtgagcttgttgaagaactttttgctgacaagcatattcaagtacttgtatccactgctacccttgcatggggtgtcaatttgcctgcacatactgttatcataaagggtacacagatttacaatccagaaaaaggtgcttggacagaactaagccctctggatgttatgcagatgcttggtcgtgcaggaaggcctcagtatgatacgcatggagaggggataatcttgactggccacagtgaattgcagttctacctgtctcttatgaaccagcagctgcctattgagagtcagttcatatccaaattggctgatcaattgaatgcagagattgttctggggactattcagaatgctcgtgaagcatgctcgtggcttggctatacttacctctatattcggatgctccgcaatccaacattgtatggtttgccagcagatatcttggagagtgataaaacacttgatgaaaggagagctgatttgatacattccgctgcaaatctactggataggaacaatctgataaagtatgacaggaaaacaggatacttccaagttactgacctgggaaggattgccagttattattatatcagtcatggaactatttcaacatacaatgagtacttaaaacctacaatgggtgatatcgaactgtgccgactgttttctctgagtgaagaatttaagtatgtaggtgtcaggcttgatgagaaaatggaactggcaaagcttttggatcgtgtgccaatacctgtgaaagagagcttggaggaacccagtgcaaagatcaatgttctgctgcaagcatatatttctaggttgaaactggaaggcctttctcttagttctgatatggtctacatcagacagagtgctggacgtctcttacgggcactattcgagattgttttgaagaggggatgggctcaactagcggagaaagcactgaatctttgcaagatggttgataaacaaatgtggagtgtccaaactcccttgaggcagtttactggaattcctaaggagatcttgatgaaacttgagaagaaggagttggcttgggagaggtactatgatctgtcctcacaagaaattggtgagctgatccgctatcccaagatggggaggccgctgcacaagtgcatccaccagttaccaaagctgaatctttcagcccatgtccagcccattactcgtacagttttgggttttgagctgacaattacacctgatttccagtgggatgataaggtacatggatatgtggagcccttttgggttattgttgaggataatgatggcgagtacattcttcaccatgaatatttcatgcttaagaaacagtatgttgacgaagatcatacattgaacttcacagtgccgatatatgagccgctgcctcctcagtatttcatacgtgttgtgtctgacaagtggcttggttctcagacaattctccctgtctgctttaggcatttaattctaccagaaaaatatgctccaccaactgaattgcttgatctgcagcctcttcctgttagtgcattgagaaatgcaagatatgagggcctctatagtgcttttaagcatttcaatcccatccagactcaagtattcactgtcttgtataacagcgatgacagcgtgttggtcgctgcgccaacaggcagtgggaagacgatatgtgcagagtttgctatactaaggaaccaccagaaggcattgtctggcgagagcaacatgcgggttgtttatatagctcccattgaagctctcgcaaaagaaagatacagggactgggagcggaaatttggagagtttgccaaggtagttgagctcactggtgaaacggcagctgatttgaagcttctggataaaggtgaaatcataatcagtactcctgaaaagtgggatgcattgtctcgccggtggaaacagcgaaagcacatccaacaggtcagcttattcatagttgatgaacttcatctacttggatctgataagggacatgttttggaagtcattgtatctaggatgaggcgtatttccagtcatattggcagtaacatacggatcgtagcactttcagcatcacttgctaatgctaaagatcttggtgaatggattggtgccacctctcatggccttttcaacttccctccagcagtgagacctgtgccactggaaattcacatccagggtgtggatatagcgaactttgaggcaaggatgcaagcaatgacaaagcctacctacactgccatcacacagcatgcaaagaacaataaacctgccctggtgtatgtaccgacaaggaagcatgcaaggttgactgcattggacttgtgtgcgtactctagtgttgagggtgctggaactccatttcttcttgggtcaggagatgagatggatactttcaccagaggtgttgaagaagagactcttaagaatacacttaaatgtggtgttggctatttgcatgagggtctaagtgagcttgatcaggaacttgtaacccagctgttccttggtgggaggatccaagtgtgtgttgcaagcagcacaatgtgttggggaagaccattgcctgctcatttggtcgttgtcatggggactcagtattatgatgggcgggagaatgctcacaccgactatccaattacagatctgcttcaaatgatgggtcatgccagtagaccacttcaagataactcagggaaatgtgttatattgtgtcatgcacctcgcaaagagtactacaagaagtttctttttgaggccttccctgtcgaaagcaatcttcaccatttcttgcatgatcacatgaatgctgaggtggtggttggtgttgtagagaataagcaagatgctgtggattatcttacttggacgttcatgtatcggcggctagctaagaatcctaacttctacaatcttcagggtgtaagtcacaggcatctttcagaccatctttctgagctagttgagactattctgaatgatcttgaatcgagcaagtgtgtggctatagaggaggacatgtacctgaagcccctcaaccttggccttattgcttcatactactatattagctacacaactattgagcgttttagttctatgctgacccagaagactaaggtgaaaggactcctagagattctagcatctgcctcagaatatgcagagcttccgggtcgtcctggtgaggaagaattcattgagaggcttgttcgtcaccagaggttctctatcgagaaacccaagtatggggatccacatgtgaaggccaatgctctgctgcaagcccatttttcaaggcacacagtggtcggaaatctggcagctgatcagcgcgagattctcctttctgctcataggttgctccaggcaatggttgatgttatatccagcaatggttggcttagtcttgctcttagtacaatggagctgagtcaaatggtgacacaaggcatgtgggatcgggattctgtgctgcttcaagttccacacttcacaaaagacttggctcggaggtgccaggaaaatgaagggaagcccatcgagagtatctttgatctagctgagatggctgtcgatgagatgcgggatctcttacaactatcgaactctcagctgcaagacatcattgaattcatcaagcggttccccaatgttgatatgacctatgaggtccgtgagggtgatgatataagcgctggtgacaatgtaaccgtgcaggtaactctggagcgtgacatgactaacgtttcatctgaggttggtccagtccatgcgccaaggtttcccaagcctaaggaagaaggctggtggctggtgattggggacagctccacaaaccagttactggcaatcaaaagagtggcactccagaagagggcgagagtgaaacttgagttctctgctccggcagaggctgggagaaaggactacatgatttacttgatgtcagactcttacttgggctgcgatcaggagtatgaattcaccgttgatgtcaaggatgctggaggggattgatgatgaagactgtgacactatgtcgcatagaagtagaattgagtgtgtactgtaacgcgatattggaacattctgtgttgtaacctcgaacatgtggaagctgtaacttattttgcatgttgaccggtgcactttgggcgttgctgtgttatcctattctagtattgttgtaaggattgcgctcggttacacttgagccacagtattttggatcaacttgttgcttctataagcttgctgatgctataatgtttgatcgacctgttgatgcactaatggtgtgttgatgttttaacctgttctattggcaggacaggcagtaggctagttcgaaaactcaaacctcatgggggattaaggccccgttcg

SEQ ID NO: 13989 - DNA, 3740 bp, Zea Mays
cgccgccaccagagccccgagccacgacgcctccaaatcgatagggttttcgctgccccgctagcccgccgcctcctcctccgccagcgcgcccggtcgcagtaaaaggaggccaccaggcggcgaccagaataagcttcaggcgggaggaatggcgcagtcgctggagctgctgctgatccagtttttgatgccggataacgacgcacgtcggcaggcggaggagcagatccggcggctggcccgtgacccgcaggtggtccccgcgctcgtccaccatctccgtacggccaagacccccaacgtccgccagctcgccgcggtgctactccgcaagaagatcacctcccactggcccaagcttcccgcggactccaaggcatcgcttaaacaagccctcatcgattcaatcacactcgaccacagtcatcctgtaaggcgagctagtgcaaatgtcgtcagcattatagctaagtatgctatccctgcaggagagtggccagagctgttacctttccttttccaatgcagccaaagtccacaagaagatcatagagaagtggctttgattcttttcagctcccttactgaaactattggagctacttttcagtctcatctgaacaatttgcaacctattttactgaaatgtctgcaagacgaaactagctctcgagtcagaattgcagccctaaaggctgttggatcattcatagaatatgtcaatgatggaggtgacattgtaaaaatgtttcgggattttgttcccagtatcttgaatatatcaagacagtgtcttgctaatggagaagaagatgttgcttccattgcgtttgaaatttttgacgaactaattgaatctcctgcaccacttcttggagactctgtgaggtcaattgtgcaattctcgctggaagtttctgcaaaccaggatttggaaataaatataaggcaacaggctatccagataatttcatggctggtaaaatttaaagcatctttcttgaaaaagcacaagctggttgtacctatcctgcaagttatgtgcccattgcttacggaaacagctaatgaagatgaagattctgatctagcagcagatcgttctgctgccgaggtcattgatacaatggctatcaacttaccaaggcacgttcttgcaccagttcttgagtttgcttctctgagctttcatcacattaatccaaagtatcgtgaggctgctgtgacgtcacttggtgttatctccgagggttgttgtgaacatttgaaagataagttggaggattgtctgaaaattgttttggaagctttaaaagaccaagaacaaatggttagaggtgctgcatcttttgcacttggtcagtttgctgaacacttgcaaccagaaattttatctcattatgcgagtgtacttccatgcattctaaatgctcttgaagacccatcagatgaagttaaggagaagtcatattatgctcttgcagcattctgtgaggacatgggtgaagatatcctaccgtatctagagcccttgatatgcagattggttatgtctttgcagagcagtcctcggaacttgcaggagacatgcatgtctgcaattggttcagtggctgctgctgcggagcaggcttttaccccatatgccgaaaaagtccttgagatgatgaaaggttttatggtgctaattaatgacgaagatctgtgtgcacgtgctagggctactgaagttgttgggatagtagcaatggcagttggcagagcaagaattgaagcaatattgcctccttttattgaggcttctatttctggttttggattggattacagtgaactcagagagtacactcatggtttctttagtaacgttgctgaaattttgggtgatagttttacacagtatcttcctcatgttgtccctctcgtattttcttcctgcaacttggatgatggttctgctgtggacattgatgatgccgatagcattgaaaatggatttggcggtgtttcatctgatgacgatgttaatgatgaaccaagagttagaaatatcagtgtgaggactggagtattagatgagaaagctgctgcaacacaggctattggttttttcgcactacacacgaagagtgcctatgctccgtatctggaggagtcactgaagattttgatccggcacagtggttatttccatgaagatgtcaggctgcaggcagtcatatctttgaaacatattctaactgcagttagggcaatacctcctgcacatgctgatgtactagagaaacagaaggatgtccttgatactgttctgaacatctacatcaagactatgacagaggatgacgataaagaggtagttgcacaagcttgcatgagtgtagcagacattgtgaaggactgtggttttgctgcaattgagccttacatgctgaggcttgctgaggtaacactggtccttttacgccaagaatcaagctgtcagcaagtagagtcagatggtgaggatgatggcgacattgaccatgatgaagtcctcatggatgcagtttcagatcttttgcctgcttttgcaaaagtgatgggatcttattttgatcccatatttgcaaaattatttgatccgttgatgaaatttgctaaatctccccatcctccccaagataagactatggttgttgcaaccttagctgaggttgctcaggaaatgggtgctccaatatctgcttatgttgataagataatgcctttggtgttgaaagagcttgcatcatctgatgctactaataggagaaatgctgctttctgtgctggcgagatatgcaagaatgggggtgctgcagcactgaaatactatggtgatatacttcgttctctgcataatttgtttagtaactcagaatcagatgatgcagtaagagataacgctgctggtgctattgctaggatgataatggtgcagcctcagtcgattcctctcaaccaggttcttccagtttttatcaaagctttgccactaaaagaagatcatgaagaatcaatgactgtctatggttgcgtctgcggtttattattatcatcacatccccagatcctccctctggtgcctgacgtcatacatgtctttgcccaagtggtggtatccccagatgagagcgatgaagtgaaaacaaatattggcaaggctatttctcacttgatatctgtctatggccagcaaatgcagccaatactgagtgcccttccaccagcccatgcaaacgcgctggcttcatttgcgagtagaagatgaccttggaggaccagcttttctttggttccttgttctgcttgattttgttttggttttgtcgacgattgccattttctgaggatctggtcacatggatcaggccagatgggagtgcttgcattgcacattggcaagggcgagcggagttgtcaggttggcgcatgattgattatatggtgagcttggtttctctttgagatacatagttgtgcttgctttggagccctgtacggttatgagtgcctgcctgtattcaggttccggatttggttatttatgctcttgttttttatatttttttgcctgtatttgcaattcattgattgctgttgtatatagaagagagttttaaatagagagaatgtacgactctgcaactggcaaattttgtatacatactgctcataccacttgctaatgttcgtccggattgcgtaccttgtgc

SEQ ID NO: 13990 - DNA, 334 bp, Zea Mays
cgcttctggcacaataccagatggattttacttgattcatgggatggacccctttgtatggtcactatgcactgatgtacaggaagagaaccacataccctccatggaatcactcaagtctgtccgtcctgatgatccttccattcaagccattcttatcgatcgaagaactgattttgaattaggtatgttggagagttatgcttccagcattctttccagttctgctgatgccaaagatgtggtaatccaactggccaaactcatatcttcaagaatggggggtacaacttccaatgaagagaacttgctaacgaataaaagcatttattca

SEQ ID NO: 13991 - DNA, 447 bp, Zea Mays
atgtggcccagccaacactgatacaacggcccaaagcccaatattgcagccctagcgctagcggccagctgagtggaagcatctccgcctctcgtccagcgccctgccgccctaggcaccaaaacctcgcaaggcaaccgcccgccggcgccgccgtcgtagcaagagagtcagctgaggatcagaggagggggaagatgtcgttccgggcgcgggagatgtacaagaaggtggtgcggcgcgtgggcggcgaggggaagctgccggcggagcttatgaagtcggtgaaggacatgcttcccgacagcaacgtcatcatggggcgggccaagcgcggcatcttcgctgggcgacacatccggttcgggaacaaggtctccgaggacggcggcaacaactcaattttgttgcttcgctatttcgagctcaggcagagctccatcgctg

SEQ ID NO: 13992 - DNA, 775 bp, Zea Mays
ccgcacccgagttttggttacccattgtcatggatgttcatgggcacacggccaccacaccgcggcgcgtggccagcgcagcgaatccatccccatcctcatgattataaataaataataattttacacgcccccttctctctcgatttctcgcggagcggccctccacctttatcgccgccgccgccgttgctgtgttccgtctcttcgccgatggcttcggccaagagaatgatgtcaggacctcctgcttctggacctgtcccaaatgcgacaacattaacttttccttcagaagcacttgcaacatgaagaaatgtggagccccgaggccaactccgggaggtaacacgagctcatctcgcaaggacaacagcaataaggaagcccctgaaggaagctggacctgcccagagtgcaacaacctgaactacccattccgcacggtgtgtaacaggaaaggatgctcgtacagcaagccagccccggcgaacaactgaacccaaccttcgcgcatcgtcgagatattgttgtacccgtagattgtatcctagtcgtgtgcaatctttgaactgcacaaagatgtttgtgcctggagacgagagattcgattcgttacgcttaatttactattatacttttttattaaatgatgaaaactagggaagagcattatatctataaactcttagtagtctgctatacacagcaattgacatcaattgttgcagctctcgagacattaatccttgaaccacgcaacatgttctcaaac

SEQ ID NO: 13993 - DNA, 2187 bp, Zea Mays
ctgtccacgtcaaggtgtgatgattggaatcgatctagcatataatttgcactctgctttcggtaactggtttcctggatcaaagccactacttcagcaggcaatgaacaagatcatgaagtcaaatcctgccctgtatgtcctgagggagagaataaggaagggtctgcagttgtactcttctgaacccacagaaccgtacctgtcttcacaaaactatggagagatattcagcaatcaaatcatatggtttgtggatgatacaaatgtgtatcgagtcactattcacaaaacatttgagggtaacttgaccaccaaaccaatcaatggtgctattttcattttcaatccaagaacgggtcaactttttcttaaggttatccacacaagtgtatgggcagggcaaaaacgtcttgggcagctggccaagtggaaaacagctgaggaggttgctgcattagttcgatctcttcctgtagaagagcagccaaagcaaattattgtgacaaggaagggcatgttagatcccttggaggtccatctacttgacttccctaacattgttatcaaaggcagcgagctgcagcttcctttccaggcttgcttgaagattgagaagtttggtgatctgatactgaaggcaactgaaccacaaatggttctttataatatatatgatgattggttgaaaagtatctcatcatacacagcattctctcgcattgtgcttatcctacgtgcacttcatgtgaataatgagaaggcaaagatgttgctcaaacctgacaaaacaattgttactgaaccacatcatatatggccaactctgaatgatgaacagtggttgaaggttgaatgtgcactaagggacctcattctttccgattatgcaaagaaaaacaatgttaatacttctgcactcacacaatctgaaatgcgagatatcatccttggtgctgaaattgctccaccatcacagcagaggcaacagattgctgaaattgagaaacagtcaagagagacgactcagttaactgctgtaaccacaaggacaacaaatgtgcatggagatgaactcattatcacaaccacaagtccatacgagcaacaagcattcgcatccaagactgattggcgtgtcagagccatctctgccacaaacttgtatcttcgtgtaaatcacatttatgtcaattctgatgatataaaggagactggctacacttacattatgccaaagaacatattgaagaaattcatatgcatagcagatctgcggacacaaattgctggatttttgtatgggctgagtccacaggacaatcctcaagtcaaagagattaggtgtatagccatgcctccacagcatggaacacaccagatggtgactcttccagcaaatcttcctgagcacgagttccttaatgatctagaacccttgggatggatgcatacacagccaaatgaagctccacagctatcgccacaggacctgacatcacatgccaagattctggagaacaacaaacaatgggatggtgagaagtgcatcattctgacatgcagcttcaccccaggatcttgctcgttgactgcatacaagctgacaccaagcggttacgagtggggacgcagcaacaaggacaacggaagcaatccacatggataccttccaactcactacgagaaggtccagatgcttctgagcgaccgcttccttggattctacatggttccggataacgctccttggaacttcaacttcatgggagtgaagcacgacccacagatgaagtacaacatgaagctgggcatgccccgggacttctatcacgaggaccacaggccaacacacttcctcgagttcagcaacatcgaggagggtgaggccgctgaaggcgatagggaggacacattcacgtaggcgcctgttagaaactgctctgttttaacggcagtgtgtgtagctgtaacctgacttgacgggtgtcatctgttcgcctgttgcttaagcctgtattatactacctctttgttgtaagaagccctggtgagggattaaaattgtacaagtgcgcgccatggtaacagtaaaggttttgcttcctcccaagcttccaccttcaatccttccaggcttcataaatttaaattaaaaaaggtcttttaatagattcctttctttat

SEQ ID NO: 13994 - DNA, 2386 bp, Zea Mays
gttggttgaagatgttgttggaaccttggctttcatgccattgatatatccttatgaaccgtggagatttaagcatgaccgacatcatgccaagacaaacatgttgatagaagatactgcatggcaacctgtttggcaaaaggaaattgaatcatcaccttttctaaggaaggcaattatttttggctatggccctatcaggccatggatgtctattgctcactggttgatttggcactttgatctaaaaaaattcagaccaaatgaagttccaagggttaagataagcttagcatgtgtgtttgcattcatggcgattggatggcccttgatcattctcaaatcaggactagctggatggtttaagttctggttcatgccatggatggtttatcatttttggatgagcacttttacaatggtacatcacacagctcctcatataccattcaagtcatctgaagaatggaatgctgcacaagctcaattaaacggcacagttcattgtaactatcctcaatgagatcctttgccatgacataaatgtgcatgtcccacaccatatttctccaagaattccaagctataaccttcgtgctgcttatgattccatcaaacagaactggggcaagtatgtcaatgaagccaactggaattggcgattgatgaagacgatactgacgagatgccatgtgtacgacaaggagagatactatgttccgttcgatgagctcgcgcctcaggagtcccaaccaatcaaattccttaggaagttcatgccagattacgcatgatgccatcatcacagctgttgactagttgagattattcagtattgtcggcacaggtggacagtcacattttcagtgattacgcatgtcccaaaattttgactggaatactccatgttacactattattcgtgcagtaggaaagcacgtagcgtaccaaaatatttatacttcaggaaatagacaaagacattggtgatgaaaacggacagaatcgtgtggaaaacatctcttctcttgtcatttctatattttttttccggaaacagaaacacgttcaaaattcccggaattgaaaacagggttgggatatgtggttgttcggaaacaaactaatttactaataaaatacgacttgcacaggcctgctgggccgccgcaacctaagaatggacaccgtcaaatgagcccaccccttaataaaccctagcccgcctccgccgccctataatccgacgccggacgccccatgatttcgctttcttcttcccgtcgagacccaaccataccagcggcgccgcaggctgacgaggaggcggagtagagtggccggactacctcgacacctccactgcaaccatgggtatctcacgtgattcgatgcacaagcgccgtgccaccggtggaaagcagaaggcgtggcgcaagaagcgaaagtatgagcttggccgtcagcctgctaacaccaaactgtctagcaataagacagtgaggagggtccgtgtccgtggaggcaacgtgaagtggagggctctccgattggatacaggtaactactcgtggggaagtgaggctcttacccgcaagacccgcatcctggatgtggtctataatgcatcaaacaatgagcttgtgaggactcagactcttgtgaagagcgccattgtacaagttgatgctgctccattcaagcagtggtacctcactcactatggagtggacatcggtaggaagaagaaggtgcctgttgctaagaaggatgcgactgagggacaagagggtgaggctatagctgaggaaacaaagaagagtaaccatgtgcagaggaagattgagaagcgacagcaggaccgtgcactcgacactcatattgaagagcaatttggcagtgggagattgttggcctgcatttctgcccgtcctgggcagtgtggccgagctgatggtggcatttccttttattggccagctacatccttgagggtaaagagctcgagttctacatgaagaagctccagaggaagaagggcaagggtgttgcatcttagagcattcttttagctagaactgcaaaatatcttctacttgggggttttgttgttagtctttatgcatatcatttgcggacctgatgaacacttcataagtgaatcaactctcgattccaagaattgataattttcacatgcggtggttgtaattgtgatatttaggtttgctatttattgaaacttcttgtctaaagcagttttagtttaccttgaagatgattgttagaaacgagatcctatccaatctatattgctgtttggttttcactttatagctgctaacatttgattgcatagtaagaactggtcacgcgtacgacaatc

SEQ ID NO: 13995 - DNA, 373 bp, Zea Mays
tttgttttcccaagtgccaaaggattaggaactggggttgaaagttgttggagggagaggacgcctcaatcgaagctgctgtgacggcaatatctcgatgtctaaggaaccccgccgggacaaataactgttcggaggtattatagaaagtgatgagttatgccgcacaaaggaacatggaaatgacagatgcatgtgtacagaagtgaaatactagaacaacatagaggctaaagatgtctcatggtctccagagaactaaggcttcactctttgaaatcgagagcttttatctggtcgtgaatatggatagttttacaatgtgactggattttaaaatgtctaaataagagagaaatttgagatcttcaaa

SEQ ID NO: 13996 - DNA, 3213 bp, Zea Mays
tagttttctttcttgttggacattcgggcggccaaagcagcggcccccttatctccagggaccaggggaggtcgcacaccaacgcaccgtccttccctttcctcctcctcctccctctcctcggaaggtcaagtgacggtatttgtgaccatggcagggaccttactccagtcagttgccctgggaacaccatttgggggtcgcatgagaacccattgttggaggtcccatggcaccaggaggcctgcctctatgttggcagtgtcacttagccgccctgtcaagatgtcagcatttgtgggtctaagatcagtgcatagcttctcggtcacaccgacggtgtccaattccaggtcggcagttgcatcttacaggtcatcgcgacagacaagacgatctcgttttgtcactcaggcaatgtttgagaggttcacggagaaagctattaaggtcatcatgcttgcgcaagaggaagcaaggcgcctgggccacaactttgttggaactgagcagatcctcttgggtctgattggagagggcactggtattgcagctaaggtgctcaagtccatgggaataaatcttaaggatgcacgtgtggaggtggagaagattattggccgcggcaatggttttgttgctgttgaaataccattcacaccacgtgcgaaacgtgttttggagctctccttggaggaagctcgccaattaggtgtggcggctcgtgtgcttgagagtctcggagctgaccccagcaatatccgtacacaagttattcgaatgattggtgagaccacagaagctgttggtgctggagttggcggcggcagcagtggtaataagatgccaactcttgaggagtatggaactaatttaacaaaattagcagaggagggaaaattagatcctgttgttggaaggcagccacaaattgagcgtgtggtacaaattttaggcagacgaaccaagaacaatccctgcttgattggagagcctggtgttggaaaaactgcaattgctgaaggacttgctcagcgcatttctacaggcgatgtacctgaaacaatagaagggaaaaaggtcataacccttgacatgggacttcttgttgctggcacaaagtaccgtggagaattcgaagaaagattaaagaagctgatggaggaaataaagcaaagtgatgagataatactctttattgatgaagttcacactctgataggagcaggagcagcggaaggtgctatagatgctgctaatatcttgaagcctgcgttggccagaggtgaattacagtgcattggagccactacactagatgaatataggaagcacattgagaaagacccagcacttgaacggaggtttcaacctgtgaaagtgccagaaccaacagtagatgaaaccattgaaatcctcagaggactgagggaacgatatgagatccaccataaacttcgttacactgatgaagctctgattgcagctgcaaagctgtcatatcaatatatcagtgatcggtttctcccagataaggcaattgacttgattgatgaagcaggttcccgtgttaggctacagcatgcacaggtccccgaggaagcaagagagcttgacaaggagctcaaacaagtcacgaaacagaagaatgaagctgttcgaagccaggattttgagaaggctggggaattgagagaccgtgaaatggaattgaaggcccagataacagccctcattgacaagagcaaggaattgagcaaagcagaggaagagtctggagagacaggacctatggtcaatgaagaagatatccagcacatagtatcttcatggactggcatccctgtggagaaggtttccagcgatgaatctgataagcttcttaagatggaagagactttgcacaagcgtgtcattggccaagatgaggctgtggtagcaattagtcgctccatccgccgtgctcgtgtgggtctcaagaaccccaacaggccaattgcaagctttatttttgctggtcccaccggcgttgggaagtctgagcttgcaaaggctcttgcagcctattactttggctctgaggaggctatgatccggcttgatatgagtgaattcatggagagacacacggtatccaagctgattggttcacctccaggatatgtaggatacactgagggtggccagctgacagaggcagttcgacggcggccatacacagttgtgctctttgatgagattgagaaggcacaccctgatgtcttcaacatgatgcttcagattttggaagatgggagattgactgacagcaagggaaggacggtggacttcaagaacacactcctgatcatgacctcaaatgtagggagcagtgtcatcgagaagggtggaaggaagatcggatttgaccttgactctgatgagaaggacagtagctacagcaggatcaagagcctggtcatcgaggagatgaagcagtatttccgacctgagttcctcaaccgtctcgatgagatgatcgtgttcaggcagcttaccaagctcgaggtcaaggagatagcggacatcatgctccaggaggtctttgacaggctgaaggccaaggacatcaatcttcaagtgaccgagaagttcaaggagcgggtggtggacgaaggctacaaccctagctatggtgcacgcccgctgaggcgagccatcatgaggctgctggaggacagccttgctgagaagatgctcgcaggggaggtaaaggagggcgactctgccatagtagatgtggactcggaggggaaggttgttgtgctcaatggtcagggcggcataccggagctctcaactccggcgatcaccgtttagctcgtacataacaaatgacaaaattaatagcatagtttttgttcaaacacattatcatttatggttagaatatctgtgtatatgtagtggtatagtcaatggggaaatcgttcctgcctctaaattcctttttttcaagttaaggtgtttcttttgtcgcaagttaatctgcctggttattaagatattgtttacagagtgatgtgaaaagctcttgtctgtgttcaaggatacatatacagacgggtcaagtagcatgtaggcaatagttccaatataggcctcagcgttgtctttaaccgagcatccgaaaacacttgcacctaaataccgtcgcctgaaaatacaaaaaaa

SEQ ID NO: 13997 - DNA, 742 bp, Zea Mays
cccagactatacagcacagtcacacttcgacgtggtgagaaaaagcattacacaaataaagtggatgtgtacagctttggcattgttttgtgggaattattgaccaatagaatgccatttgaaggcatgtcgaatctacaagctgcatatgctgctgcttttcagcaaaagcgcccagctctccctgaggagaccccccaggagcttgtgttcatagtacaatcatgctgggttgaggatcctgccatgcgacccagtttcagccagatcatccgaatgcttgaaactttcattatgacaatacatccacctccgctttcagagccaaacgaaggcgaggaatcggaagaaacgaggtcgtcactgagcagtaggagctcctctggctcctcgctcgtttctcgcgcgacaagcaagctctcggtcgtccgccacctcttcgtctcaaagaagacaggcaatgggaaggcgtgatgcgccatgccctgagacgcttttcttcggtgctgtaaagatgctagcctaggtgatgcgcaatacaagagggaacttgttcagtgtagagtagctgttgtattgatgttacaaaaggggaaagttgaagtgcagcttttgcaagctatgtatagctcgcagctcctttactttactgaaagtccaaacagccggctttaatccgaagcgaaccgagatatatattaaatcaaacaaccgactttaattcgaagaacagagatatata

SEQ ID NO: 13998 - DNA, 856 bp, Zea Mays
aacagttccagggttgtcatttcggctgtagttgtcagtattgatcctcgacgggtatatgtcaaaagtcaagaagatgtgccatttaaaactgtaaaggtgtccactaaaggtccatcgggagaagaatatgcatggtaccagtgcacagtgaatggtggacgtgatagccgagctataggagcatatgaactagcgaaagctgtggaagaattgggcgcaggagaaatacttcttaactgcattgattgtgatggccaaggttgtggatttgacatagatttggttaaaatggtttctgatgctgtgacaatccctgtcattgcgagcagtggtgctggagctgttcaacatttttctgaaatttttgagaaaacaaatgcttctgctgcccttgctgctggcattttccaccggaaagaggttcctatactagcagtgaaagagcatctggtcaatgctggtgtggaggtcagggtgtaacagggagatccttcggtttattgaaatattcttgtttgatgtcacaactgctatcagttctgtttctctgatgtcgcaactgctatcagatctgttggtggcagctggcagtgcataggcccctgtcgagaactgcagtttggtaataaattaataatgtgatgcttaacagattaagcatccgcttcttttgcttgtgtttctatttcccggtgtggattgaccgcctccgacctgtcttgcgtcatattcgtcagctttgtagcatgttaatgttggaggccacgttgctcattcagatagaacaaactaactagcgatgaaaacgagcggaacaagatcccgccattttcattttcacaaatctgttgaa

SEQ ID NO: 13999 - DNA, 1191 bp, Zea Mays
ccccgtcgcctgcccgttcccccgtttctaattttatgaccgtcgaaaaccaaaatttagataggccacccaaatccaggtgcaaatcccaacctccctccctcccaggccccctccccacctccacctccaggcaccactggtcccacctcctcacctgcgaggatgctgctcgtgagtcaggcagcgaacggctccctctccgcgcggcggctgccgtcgaagccgccggggccgtccaccaccaacccctacccgctcttcgccaaccctcgcctcctgcgccgccgcctggcgctctccggcgctggcgccgaccaagccccgcgccgcgccgcgccgaccccagccgccgcgggcgagggcccctccgcctcctccaccgaggacccggtccttgtccgcgtcgccgacgacggcgtgccgctcgagggcgtcatccagattgagaagcccggggatgcggccgccgagtccaagctcgtctcctacgcccatggcctgcccgtcctcgacgccgagacgttcaagacggccgaccccttcattgctgggtggctgctgagcgcctaccttcttggcggatttggcgatgatgccaaagggcgcaatggcgtcggaagcgcggttatcaccgcagctaaatcatgggctgttgggataccgttgggacttgctatccgagcagtgacgtctggtcatcttccaccaactccttttatcttggtaaccatgggaagtacaggggtcttgttaactgcatggcgtgctttggtatcacaactgttttccaaccagcaaaagcagcaggatgatgtctaccggcgtggaagtccttttgagctttttgagctactcacatcgctggtgcggaggtggtgacatctgaaggctgaagcctatagaaggtaagaagggcattgttccgctctggtatccgcaatcatcaggttcagccatctgtgtctattgtgtaagtacaattttgaaggtgaagaagagcaggctaaaacctagtttggagcatttgccgaacccaaaaaaaatgtttggcaataacacgcccgcgatgttggtttagtatattatattatattcataagatgtactcatattcctgatcttccacttgtaaaattgtatccagcttaacaaatcctaatcgataagaccgttgcctcttgttcaaca

SEQ ID NO: 14000 - DNA, 943 bp, Zea Mays
attatccacggaatggaatcgaatcgtccaggaaaggggaggaccggagcgagagcgagatggtagtggtggccgccgcggccgcacgcggccgcgctgtaaagcccctgttcctcgtcctcgtccaccacagccgccccgcgccccgcctcccccgccgaaccgcccgcgcccggccgctgcgcttcctctcctgctcgacctcagcgccgccgctgttcgcagccgtcgcatccatggactcgccgccccagggttaccgcaccaacgtcggcatctgcctcgccgacccatccctcaccaagattttctcggcttctaggatcgacattcctagcgcgtggcagatgcctcagggtggtatagatgcaggggaagaaccaagggcggctgccttcagggaattgagagaagagactggtgtcacatccgcagagatcgtggctgaggctcccgtctggttaacatatgatttcccgccagatgtcagaaccaaactgaatgccaggtggggaaccgattggaaaggccaagctcaaaaatggtttttatttaggcttactggaaatgacgatgagattaaccttaatggtgatggatctgagaagccagagtttggtgaatggacatggatgacacccaaggaagttatcgaaaaggcagttgatttcaagaaacctgtatatgaggaagcattgaaacactttgccccctacctgcagtcagatccagccgcttcatcatagaagatttggccaatttgcttgcatccctgctgtatctggacccccaataatttgacacgacgcaatgtagccatgaggtgtgctatacaatttgatagtgtgtggcctgtttgagtgaattatatatgccagcattggatcctcgccctctacttagtcacataagtatacaataagtggtggaaacaaaaaataaa

SEQ ID NO: 14001 - DNA, 1537 bp, Zea Mays
accaatagtggaggaagctattggatctcaattagaggacgatgaaaaggttcgatgtgaagaagatgccaatggtaaagtcgaccaacatcactacaggatcgtggtagggatagtgatgatgaagacttccgagatagggactacgatgtggctgcacttgctagtaatttaagccaggcatttaaatatggtatctacagtaacgatgacattgacgaggctcaagcatcacttgagcgggatgatgaggatgtatattttgatgatgaatctgcagaggtagtaatctcctcccttcgccttggagacgaccaagaaagtggctcgctctttacaaattccaactggtttgcatttgacgaggacaaggcactgaatgatggtttggttagcccagaagcttccccatctccaaattcagaaatatccgcactaaaagaggatgatgaagtcattcttggcgaagtaatagatgacacagaaggttctgaaccaactctaccagtctccaacaaagacgcaaacgaagagtctggtcacaccgtcttggcaaatggtaccattgacaaacaggaagatgatatcaggccactgactccggatgtaaaagagagtcaacccgagtttgtggaatggaaggaggaagaagctgaacctggtgatgttgctgagaaggatactgcagttcctggtattgaggttgaaagtgagaagcagctgaattccatggacgatgttatgctttgtgatgccgagttaggagaggaaaagaagagtggtggtatgcttggatcttcagcacctgaggcagaagcagcatcgcctgtttcatctgacatcgattcaatcaagcacccggaacaagctgctgacagtgctgtatcagagtatccaatgggcgaacaaaatcctgagatatgaaatgaatttgagggcagcagagttccgctcacgtgatggcggatgatgatggacgtgcaggaagcacttggaactggttggaccattactgtacaagcagtttgaggatcatgtgtgggttttctgttctactctcttggaggaaggtggtcccggaacatgcatctgatggagcctcaaaggttccacttagtctcatggagatgcttaggttcgatgtgtaacatattcatggagacgcaaaattcagaaagttgacttccctgcccttttccttaatcagtggggttctggttgtgtcactctggtaaatagccgataattgaataggtgatatctggtctggctacatgtccattactgtagttggtgctatttgtacgaaagttttggctcaaatgcagtcagttgattcttgtcatatttagaacttgtttgaaatttgtgtaaacgaaaaaaatatagcttctatttttcccaggtgcttggtgcttaattcatctgttataaatatagattttattttcccctcttgttctttgttttccccagcagaacagaaaaagaaaacttcgttccttataccagttgctaaagcacatgctttttcgaa

SEQ ID NO: 14002 - DNA, 1125 bp, Zea Mays
gcgcaatctgatttcatcgaaagcaacgacgagaaaaacgaaccgttttgctctgagaggattgccaaatatgcattcgagtatgcttaccttaacaaccgaaagaaagtcactgcagtgcataaagcaaacattatgaagcttgccgatggtttgttcttggagtcttgccgtgaagttgcttcaaaatatcctggtattcagtacaatgaaatgattgttgacaactgctctatgcaacttgtttcaaagcctgaacaatttgatgtcatggttacgcctaatctttatggcaatttggtggctaacacggctgcaggtattgttggagggacgggcatcatgcctggaggcaatgtgggtcaggactacgccatctttgagcaaggcgcttctgcaggaaatgttgggaatgagaaccttgtggagcagaagaaagcaaaccctgtcgcgctgcttctgtcatctgctatgatgttgaggcatttgcagttcccgtcatttgcggaccggctcgagacggcagtgaagcgtgtcgttgctgaaggcacgtacagaacaaaggatctgggcggtagcagcaccacccaggaagttaccgatgctgtggttgccaatctggattagattccaggtgtacacggctaaaaaaggctaattctttggggtgactagttgtctagtcttgactcctgagtgttatttatcttcttacatagattttagattgcttcacatcttcaagagggattacaaggtatcccttgtttcagattttctttagaaataatattgaggaacccacgacgattcttgttcacgtgatactttgtacttatcaaggtagaggaccttgagttgcaaagccgaagggaatggatggcagtctgaaaataacatgaattgagagttgattcagattggagctttggccctgattgccactgcatactgtcactttggattattccctgagacttactgttatggaaaaacttttctgtttgcaatgcgtttgtgaaactccagggattattcaagagggatgtgctgtttgcaatgcgtttgtgaaaaactttattttgtattctgcccgttcataaactgttctgttttttttctacc

SEQ ID NO: 14003 - DNA, 624 bp, Zea Mays
tctacttctcagcatcccccgaaaaactcgaccgcaagcgtgtgtacgcacggaccgcccgcccacgcacgggcatggcagcctccgcctccgcctccccctcatcctccacaaaccctaggtagcacgggagtccctcgccgccggatccccgagaccctgcaagccgcgccgattctgtgctgtgtgctccacggctagatttctgggtgtgaaagagcgcgtttttttaacagttcttagctagggagattttgggaagggagagtgctggaataatggagccgaggatcgggaacaagttccggcttgggcgcaagatcgggagcggctctttcggggagatctacctcggcaccaatatccagacgaacgaggaggttgcgattaagctggaaaatgtgaagacaaagcatcctcagttgctctacgaatcaaagatttataggattctgcaaggaggaactggaataccgaatgtcagatggtttggtgtagaaggagactacaatgtcttggttatggatttacttggaccaagccttgaggatctatttaatttctgcagcaggaaattatctctgaagaccgtgcttatgctcgcagatcagatgatgagcttca

SEQ ID NO: 14004 - DNA, 353 bp, Zea Mays
ccaacccatacgcacccaccctccgccgccgtttttctctccccatctcgcccgccgttttcgtccttatcgatctcctcgcacctcgtggcggcacctctccccttcgatccaccaagggtttaggatcggcggcgatggcggcgaggctggcacagctgcgcgctcaggcggtgcaggcggcggagttcgcctcgaagcacggcggctcctactacaaggagctcatggagaagaacaagcagtacgtcgtgcagccccccaccatcgagaaatgccaggagctctccaagcagctcttctacacccgcctcgcaagggccctggtgctaactaatactccctatgtttcc

SEQ ID NO: 14005 - DNA, 1912 bp, Zea Mays
gacgacgacgcgacggcgatgcgatattctgcatcttgccctgatggttggcaaggcggccctgttcagaacagatgcttcatgtacatatcagcctccctttcttgggatagatccgaggctgtctgccataactacagcgggcatcttgctgcagtatcatcagtccaggagctaaacttcgtgaagtctctctgtggatcatcatccacaggatgctgggttggagggcatcactacagcactagtaccggtaacggttggaaatggtctgatgattcctctgtttggaatgaaactgtcttccttggtgagccattgcctgccaactgcagtgatcctgcatgtaaagtagccaccagcaacgatttctgtactttggtcaccaatggtcagccttcaactattactgaaaaaaggtgcagtgagtcccatggtctgatctgcaggatgaaccacgtggacagatgctaccatgatcattgccacaaggagtatttcatatccattattgctgtgagtggtttcatcctggcaaccactctagccgttgtggtttggctgcttgtctacaggcgaagcaagaaaagaagaagatcgcgagaagtgttaagtgcctcagctgctgcattggtagcaccgcaatggaaagtattcaccagtgaagaacttagatcgatcacaaagaacttcagcgagggtaaccggcttcccggcaacgcaaagacaggcggaacctatagtggaatcttaccggatggatccaaagtagcaatcaagaggcttaagaggtcgagcctgcaaaggaaaaaggacttctactctgagatccggagagttgcaaagctatatcaccctaatttggttgctgtaaaaggatgctgctatgatcatggtgaccggtttattgtctatgagtttgtcgcgaatggtcctttggatgtgtggctgcatcatattcccagaggagggcggagccttgattgggcaatgagaatgagagctgccacaactcttgctcagggaattgcgttcttgcacgacaaggtaaagccgcaggtggtgcaccgtgacatccgtgcaagcaacgtcctactcgacgaggatttcgggtcgcatctgatgggggtggggctttcgaagttcgtgccgtgggaggtgatgcacgagagaaccgtcaaggccgcgtcctacggctacctcgcccccgagttcatatacaggaacgagctgacgacgaagagcgacgtgtacagcttcggcgtgctcctcctggaaatcatcagcgggcgccgccccgcgcagtcggtcgagtccgtcgggtggcagaccatcttcgaatgggccactccgctggtgcagtcccaccgctacctggatctgctggacccgctcatccaggagtcgccggacgcgggggtcgtccagaaggtcgtcgaccttgtctactcctgcacccagcacgtcccttcggtgcgcccgaggatgtcgcacgtcgtgcatcagctgcagcagcttgagctcaagtctgcagcgtccgagcagcagctaaggagcgggacgagcaccagcgcgacgtctccaatgctgccgttggaggtccggactcctcgctgaaatgtgctgccagaaattgatagcctttttaagtactctctagctctgtaggtggtaccacattccttgtgggccaccgttatcttgatcagttgtagacttgtcatctgtaacctctaatctgctacatatgtcgtgggttttcaatgtgtgacctaaagaagctttaggcttatgctctcaagtctgaagaaacaactcatctgtatttcatagagtaataacagtagcttgtaatactatttcctatcaacacaactagcagttcgatttctatcatatttacatttggcag

SEQ ID NO: 14006 - DNA, 1062 bp, Zea Mays
gatcatggctgattggtcgtcctcgtccccggcttgttgttgagcagaccactcgtgactcgtggcctcgtggggttgcagaaaccagccctttctgtcctgtcagctactacccactggccactgcactagccgtctgcggagccgagtgttcctttctagccttcacttctcagcacggcagccttcgacccccgactgcagccgccagccgcgccatggagcaagccgccatgccgcaggttccccgcgtcaagctcggcatccaggggcttgagattggtgagctcaagaagttggtggaggaggggaaggtcaagtacatcggcttgtcagaggccagcccagacacaatccgccgtgcgcacgccgtgcatcccatcaccgccgtgcagatggagtggtcgctctggtcccgagacatcgagcccgagatcgtgccactctgcagagaattggggattggaattgtggcttacagtccaattggccgtggattttttggtggaagaggagtgatacagcaagtttcttctgaatctagtctgcaaaggcatccaagatttacaacagaaagcttggagaagaacaagcagatttacctgaaaatagaagatttggcgaagaagtaccagtgcagcccagctcagctagctctagcctgggttctgcgtcaaggggatgatgtggttcctataccagggacaacaaaaacgaagaacctagatgccaacgttgactccttgaaggtgaagctcacagctgaggacctgaaggaaattggcagccagatacgtgcagaagatgtggctggtggaagacaatacaattcctatgcacatacctcctggaagtacgcagatacaccaaaaaagtgaagttctggtcctggaaaccttgtagcaatcacaggcgtatgcaaatgttgaactatttccctgcatttgagccggaatcgtacgatgatgcatcttgtgaacatgcggcactaataaatcgagacgaagaataatgtgttttccatcagtgattatgagcagatgatgatttttatccgtgctt

SEQ ID NO: 14007 - DNA, 1180 bp, Zea Mays
gctaccaccagcctctgtgctgtacaaatccagtgattgttaccacccctcaaaagctggctttcattgatgttgccaagggagtaaggatgttctctaaactgaaggtgtgtccacaatgtgatgcattatacaagtctagcgtataaatctaaccttacattgactagtttctgtatcctcttctgtcgccaaggttccttgtgttgcggttgtagagaacatgtgctattttgatgctgatggaaaacgttattacccatttggacaaggttctggaactcaggttgtgcagcagtttggaatacctcacctctttgatttgccaatacggccaactctttcggcttccggagatactggaattcctgaggttgtggctgatccgcaaggggatgtggctaatacatttcagaatcttggggcatgtgttgttcaacagtgtgctaaaatcaggcaacaagtttctacagcggtgtcctacgatagatccattaaagcaatcagagtgaaagtgccagattcagacgaagagttcttgctgcatccagcaacagttagacggaatgaccgatccgctcaaagcgtggatgaatggacaggggagcagaaggttcagtacagtgacataccagatgacatcgagccagaagagattaggccgatgggaaactatgcagtttctataacttggcctgatggatttagtcagatagcaccttatgaccaattggaaatgctggagcggttggtggaggctccgagtccagcagcagcgtctgcagtggcctcgtcatgatacagcagaaagaatgttcagttagcaaggggcaagaaggccgacttttagctcccagaaaatttatagctctgctacaaattttgaaagaattttacagtactgtagaaccatgctcattgaattttaaaaaaaggcagcagctttcgttcctcttaaaccattgtgcagacccccgttctcactaaaccacaggctagccttgacaataccaaaccataaaagaaaacggttactgttataaagatagttttttttcccagttatatagaaaattgatataaaactagtgacaaacagaaggtgcatgggtggatctaatatgtttgttacatatgaatatagtgaatacaagtattattgataaccattgcacatgag

SEQ ID NO: 14008 - DNA, 2063 bp, Zea Mays
agacggatgagaaagcaacatgagtgttgggcctttcactttttcctttccattgagatgattggggatgattgacaaggcgcggaggcacttcacccaggcgggtcatcttcagcagtcagaccccaccgactggcagaagctgcaggaggtggaggtgcatctgggaagatgcacagatgcaaggaaaattggggattggaagagcacgctgagggaggctgatgctgccattgctgctggtgctgactcctctcagttgcttcttgccttgaggtcagaagcacttctccaccttcacaagctggaggaggctgagtcgactcttgcgagctttctgaaattggacagtgcattgccctcatcattgacagcagcagaactctcgggcatgcttgctgagtcatacgtacatattgttcgagcgcagattgacatggcattggggaggtttgatgctgctgttgctgcagctgagaaggctagagatcttgatcccgggaatgcagaaatcgggatggttttgaataacgtgagactagttgcaaaagccagagagcaaggaaatgatctcttcaaagctgccaagttttcagatgcatccatggcttatggtgaagggctcaagtatgatccctcaaattcagtgctccactgcaatcgagctgcttgttggtcaaagctagaaaagtgggaaaaggctgttgatgactgcaatgaggcactaagaatacaaccaagctatacaaaagctctcttaaggcgagctgcatcatatgctaagcttgagcgttgggtggattgtgtgcgggactatgaggcgcttcggaaggagcttcccagtgacaaggaggttgctgaggcattgttccatgctcaaatttccttgaaggcgactcgtggtgaggatgtatcaaatatgaagtttggaggagaggtagagatagtttccagtgtagagcaactccgtgctgccataagttcacctggggtatctgttgtctacttcatgtcggcaatgaatcagcagtgcacacaaattacaccttcagtcaacactctatgcactgaatgcccctcggtgaattttctcaaggttaacatcgacagcagcccaatggtggcaaaggcagagaacgtgcggatagtcccgacgttcaagatatacaaaggaggggtgaaggtgaaggagatgatctgcccgagcttgcatgttctgcgctactccgtgcggcactattctgtatccagttcttgagaagctttaggtaccggtaccccaatttcccatttttcactaatgcatagagctccccgtcaaacttgcaaacaccactagcagcctccagaacattttcaccaccagcataactactcccctcccctattgagcatgagcataacgggctaagactgtctggtggaagagccccccctcaattccccacctctcctgtcaatttcgccttttcaccgttcatataccaacccattcaattcaatatctttgttcatgttccgggctctctccacctcaatttgtactttgaatactccatttggattcacctcatcatagtccataggccagtaccctgcttctcaaggaaaagggaaatgtttgtaatgtcgtgtagggtttagcggtagcgtctatccattaggggagggggacggcgggagcctggggggttgtagtttttcgttacatgtacataccttataggaaaaaaacatgagataaatccattggaagatttgttccctggagaaaagagaaatggtggcatcggattgagatgagattttggcggttggggtcaggtaacagagctactagctgttttgagttcctattagtctttatctacctatatctatctttagagggagagagagagagagaggtgttaagttaactgatgatgcagacatggtttggtgtccattgaagacgatgatgtcatgtccttttgctgcttctgttggttttatggcgctgatgataccatatatatgctaccatttccatgaataaaaaaaaaacattgcaacattcgttc

SEQ ID NO: 14009 - DNA, 1349 bp, Zea Mays
agttctagtcaatagagtcgaactataaatcgtttgtttgaactaagagagacccagatagcaattaaaacttttacagacatactttaaaattttatagacttgcaaccgaaatacactttattctttcttcagcctagtccgactaccgactaagaccgactcagctccggcgaccctcaaaccgcaccagccatggacgggccgcgttggacggaagaggtggacgacctggtcgacgccggcgacgtcgacggcgccatcgccctccttgaggatcaggagctgtcagagaaatgtccatcacaagagtgtgcaacgggttcaaaagactcagaagtctcagctaatactaataaaagcaatgaagatgaggaggatgattgggaggctattgcagatagtggtgcccttgatgacacactagtgcgctctcttgagcaaggagctagagtatcttcttgcagctcccccgaaaaaagtagcaccccatcttcagggcccaaaaggagggggaggggctcatttctttacaataagagtgttttgtacagtgaccagtgtggttcggaaagagagttggataacaaacagtctaaacctcaggttggatcaaaggatcatgtgaatgagccagagaataatgctgttacagctgctacacagtttgggacaaggcatgtccttgttttttatgactttccgccaagtacacgcacaacagatctggaaaggatttttgagaagtttggggatcacggggttgccattcgctggattaatgatacttctgcacttgctgtttttcggactccatcagctgctaatgaggctcaagcttgcatacctccaagatacaaagtacggtcactgaagccggatgatgatctattgacaaaaatagatggtagagacctagatccgcccaagccaagaccaaagacatctgcaagaacggctcaaaggctaattgctcatgggatgggattgaaacagttcacaaactttgggtctgatgagttgaagaaacaggagggagagaggaaggacagaattgccgctagacaagcaatgcgtgatgaggcttggggttcagattgatggagaacatactatgattgctggtcgcccacatcatgtctgcgagtttgttacattggtgttttagatgcttgtactctttgcatggtcaaatgttgattttgatacagagaaatctgacgcgatgtgtatcgtagtggcgacgtgtacgccaagcatgttgtacgggcagcaagggattaggatgagatttttctgaactgaaaagcaaagcacgcgcagcactatattttgcgaccttaccacct

SEQ ID NO: 14010 - DNA, 2097 bp, Zea Mays
atagaggaaggtcctcggacaatggttggaattgcaacatttgattctgctattcacttctacagtcttaaacgtgctcagcagcagcctttgatgctcatcgttcctgatgttcaagatgtatatacacctcttcagactgatcttattctcccagtttctgagtgccgggacaatctggagcagttgctagaaagtatcccaagcatgtttgagaataatagggttgctgattctgcttttggagcagctatgaaggctggcttcctggcgatgaaatctaccggcggaaaacttctggttttccaatcagtgctgccatcacttgggattggttctttatcagctagggaagctgaaggtagagcaaacattacaactggtgacaaggaagcccataaacttttgcagcctgttgacaacaccctcaagacaatggcactagaatttgctgagtatcaggtctgtgtggatgtattcctcaccacacaatcctatgttgatattgcttctatatccgttgtgcctcaaactacaggtggccgggtctactactactatccgttttctgctctttcagatccagccaagctcttcaatgatctcagatggaatatcagtagaccccagggttttgaggctgttatgcgtgtaaggtgcagtcagggtctccaagttcaggactattatggcaatttctgcaagcgtgttcccaccgatattgatcttccagcgattgattctgacaaaactgtgatggtcacgtttaagcatgatgacaagttacctgaaaatgtggaatgtggcttccagtgtgcacttctctatactactgtatatggacaaaggaggatccgagtcataaacctttcactttcatgcacaaatttgcttgccaatcttttccggtatgctgatttggagacacagttttcatgcttcctgaagcaagctgctaatggcatcccgacatctccattacctcgtattcgggatgaagcaacaaatacatgcataaatattcttcaatcttaccgcaaacactgtgcatctgtaacttcatcagggcagttgattctcccagaggctctaaaactgctgcccttatatactttggcactggtcaaaagcttaggcttgagaaccgatgggcgattggatgaccgttcctactggatatctgtagcctcgtcagtttctgtagtactagctgttcctttggtgttccctagattgattcctatccacgatctcacatcaagggatgacgatgattctcttatacccagtccccttatgctcaatagtgagaatgtacaagaggatggagtttatttattggaaaatggtgaggatggtttaatttatgtaggaaacatggtaaatccggctaccctggaacaaatattcggtgtctcttctttggctgcattaccagcccagttggcgttggagcaatttgacaacgaactctcgaggaaggttaacgaagttgtaaatgaaataagacgccagaggtgctcatacttgaggttaagacaatgcagaaggggtgaaccatctggtgattttttccggtcatttttagtggaggacaaggcgcctggcgtcttctcctacgtcgagttccttgtgcatgtccacaggcaaatccaaagcaagatgacctgagggcccaagatcctggttgtaacatttcggtcagtagatggattgtatgtaccccgggagtttgatttctgcataaggagacagcaaagtggcgattccatatcaatgtggagcataaagagtgctcggataatagaactcaggaatagaggcttgtggtgtttacagcaccgtttttggagtgggtggtatatgtgttgtatacagagatgagaggggtggagctttagtttttgtgttgtcttttatcatcgtgcatccttgtttatctcatgtgcaaaaagtgttggattatgttggttggaaggttatagaggtttcgtaataaaatgcacctagctaatcgatagtatgaatcagatatactataatttaactattatgtttgcctattcgaatttaaccctgtgatgatgttttgtgatt

SEQ ID NO: 14011 - DNA, 76 bp, Zea Mays
cccgtctagccaggtttagctagacccttagacactgccgaggtgaatgtctagggatccactacgaggcctttac

SEQ ID NO: 14012 - DNA, 153 bp, Zea Mays
ttttatttttttttttttgttttttttttctctttttttttttttttttattttttttttttttttttttttttttttattattttttttttttttttttttttttttattttttttttttttttctttctttttttttttttttttgttttg

SEQ ID NO: 14013 - DNA, 1170 bp, Zea Mays
ctgatccaacggctagcaagcgttgacgtgtgagctccgccggtacgcgcaccagatcgagtgtacccgtgcacgaggcgccggcctggagtcgcggtcgctgccgcatggccctggcctccctcgcggcctcgctcccagtcgccgccaccgccgccgcggtgagattcccattccgtttccgcatcggtcgcgccatggcctccgccgccgcaggggcctcgccggcgagggtggccgtggtacagatgacctccgtgggggacgtcgacgccaactacgccacctgctcccgcctcaccaaggaagcagctgcttctggagtgaaatttctttgcttccctgaggtcttctcattcattggatccaaggatggcgaggctatgaagctagctgaaccattagatgggccaataatgcagagatactgctcacttgcaaaagaatcaagcatgtggctatctcttgggggttttcaagaaaagggacctgatgattctcaccagtacaatactcatgtattaattgatgacactggaaaagttaggagctcatatcgaaaaatacatttgtttgatgttgatgtacctggcaatatggtgtacaaggaaagtcgtttcacagccgcaggtgatactattgttgctgtggatagcccttttggacggttggggcttactgtttgctatgatttgagattcccagagctttatcaaattttgcgttttaagcatcaagcacaggtattactagtgccatctgcattcacaaagataacgggagaggcacactgggaaattctcctccgagctcgtgcaattgagacacaatgttatgttattgctgctgctcaagctggaaagcacaatgaaaaaagagaaagttacggtgattctataattattgacccatgggggacagtgatagctcgacttccagatcggctctccactggatttgcagttgcagatcttgatttgtcaaaagttgaggctgtgagaactcgaatgccaatttcagagcaccggaagttcgacagcgattggaaacccacgcctctttagtagctgagggtttattttgtgtttcctatgtttaatgtgcgtatacacatatagttgatatattcatctatgcataattattaccacaggtttggtcaaaaaaaca

SEQ ID NO: 14014 - DNA, 367 bp, Zea Mays
ccctagaacccacacattgattatgcaaaaagaaaagaaacgacaattggtattgaagaaatgtagatatttaagaaaatatttcagaatgtatggaactaaataactataacactagtgattgttaagccaaagcactaataacaagtcaaaagtaagaaaaataggagcaatggagaacatgacaaggggaagtaattactgacaatctcggtagcaaacagaaagactaatagatctccccatcctctccaagttcaccatcttccagctcatgtgctccatttcttctactactatctcggtcctttttatgtcttttgtgccggttttcactatctgaatctgagccatgtgcatgctgcat

SEQ ID NO: 14015 - DNA, 1514 bp, Zea Mays
ctttggcgccagcatctggtaacagtagtttccgttgctatataaagggaaggtaaggcaggagtgtgagggcaggctaaccgaggagctagctagccagcaacgcgtagcaagcagcgcaagcaaagctccgagcgcccggccggctagcttcgccatgaacatgggtggaaggtccccggcggcgacgacgatccggtgcaagtactgcagcgcgagcctgaccgtgtgcgccggcgagcgcgccatccagtgcgcgcaatgctgcggcgtgactcgcatccggcggtcgctgtcctcgcggctcccgctgccggcgctgacgaggccggcttccgtcgcgggcttcccgccgtgcggcggccgcggcaagaagcgcgccgtcctgatcggcatcacgtacggcggcgcgcgccggggctgcggcgagctgcggggccccatcaacgacgtcaagtgcatgaggcagctcctctgccagcgcttcgccttccccagcgacggcatcatcatgctcactgacgaccagaaggacccgttccgggtgcccaccaaggacaacatccggatggcgatgcagtggctggtgcaggggtgcagcagcggcgactccctggtgttccacttctctgggctgggcgcgcaggtcgccgacgcggactgcgacgagcaggacgggtacgacgaggccatctgcccggtggactcgttccagaagggccccatcctggacgacgagatcaacgagaccatcgtccggccgctggtgcccggcgccaagctccacgccgtcgtcgacgcgtgccacagcgattccgtcctcgacctccccttcctctgcaacatgtccaggaccgggaactggcagtgggaggatcaccgtccaccgtcgggcgtctgcaagggcacgagcggcggccaggcggtgcttatcagcggctacagcgacggcaaaagcaagttcagcatgacgccggaggcctgcgcggcggtgggggccatgacccacagcttcatcaaggcggtggaatgcgagccccagggggtcacctacggccgcctgctcacctccatgaaagccatcatgaccaacgccggcggctgcaaccagcagctgcagggcgcctgcgcacccgcccgcaaggtcgtcaacttcagcggcgtgcaggaacctaacctgtcttgctcggagatgttcgacgtctaccgcaagccctttgcgctgtgaacctcctctgcattgccattgcctttgcagactaccacagattcccgtctggactctatatataaattaccgtgacggaataataaaccagacggatttatattatatatgatgatatgtcataatgtgtgccttaattgtcttgcggccaataatgtgtgtccatgtgtcgatcggttaccggccctgagccaagcttatagcctgtggaccgacgactttgttgaccattataaatacaatgttgataatgtttatacgtgtcgagtttattatgaaaaaaaaa

SEQ ID NO: 14016 - DNA, 366 bp, Zea Mays
ctcagtaaatgtacaatgattctccaggcatcactggttaaggatccagctgtgtcagttaatcgcataatatggagtcttgatggaaccttgtttggtgttgcttattcaaggcatattgtacaaatttattcctataatggtggcgacgatattagacaacacttggagattgatgcacatattggtggtgtaaatgacattgcatttggattctaccttgcctgggcaacgcaacattttcactctttgtgcttcttgaacttcttccttcatcgacatcctaaagaggatattaactctagaggaggtaaagcatcccagtcagttatcgaaactacccttatgtcttgttgtaaaatttaa

SEQ ID NO: 14017 - DNA, 1316 bp, Zea Mays
gattttttccgaccttcctttataaaaagatggaaacgagtgccgagcatttcgggctgccactgccgccaccgtcgcaggccaagggcaaggacttcaagaagggcgccaacttcgccatcaccggcgcgacggccctggagtactccttcttcaaggcgcacggcatcgaccagcgcatctggaacaccggctccatcaacacccagatcggctggctccaggacatgaagccgtccctctgtaaatcggagcaagactgcaaggattacttcagcaaatccctgttcgtcgtcggggagttcgggggcaacgactacaacgcgccgctcttctccggcgtcccattttctgatgtcaagacttacgtgccccttgttgcaaaggctatcgccaatggcgttgagaaactgatcgagcttggggcaacagacctcctggtgcctggcgttctcccaattggctgcttcccgttgtacctgacgctgtacaacaccagcagcaaagcagactacaacgcccggaccgggtgccttcggaggtacaaccgcctggccttccaccacaacagggagctgaagcagcagcttgacgagcttcagaagaagtaccccaagacgaagatcatgtatggagattacttcaaggctgcactgcagtttgtcgtcaaccctggaaaatttggtgagttctctccctttctctgtctgcttctccaagtatatctcttggtggctggctccaaaggcattccgttccatgaaatgaaacgaacactgtgagctgctgcaggttttagcacggccttgcaggcgtgctgcggcgcaggagggcagggcaactacaacttcaacctgaagaagaagtgtggcgagcagggcgcgagcgtgtgctccaacccgtcgtcgtacgtgagctgggacggcatccacatgaccgaagctgcgtacagaaaggtcgccaatggctggttgaatggcccgtatgctcagcccccaattctcaagtcatgatcgagattactaggctgtgcgtaataccgccgcagctgcatgctgcggctagagatatatatgaggagtgtttcaggcaatagatatgctaagttatggtaaagctatttggtctgttcattggaagatctgtataaactgcgccggtatagatatgttcccagctgaaatggctctagcacagatgtgcatggcatgttctctgattcttttcatttgttctaaaaaaatattgcggcagtaatatgagttgataaaagtaactaaatttctgcaattttatcaggcttcaaagctaccatt

SEQ ID NO: 14018 - DNA, 1137 bp, Zea Mays
gatggaggccaaatatatgtgttgaatgacacgatcagaaagaagctggagttccaactgaaaatatactctatcttggaggaccaaacatcgcctcggaaatttataacaaagaatatgcaaacgctcgaatctgtggatccaacaagtggaggaagcctcttgctaagtttttgaggcagccacatttcattgtctgggacaacagtgatcttgtcacccatgaggtgatgggtggcctgaagaatgtctatgcaatcggtgctggaatggtggcagctttaacaaacgagagtgcaacaagcaaatctgtatattttgctcattgcacgtcagagatgatattcattactcatttgctgacagagcaacctgagaaactcgctggtcctctgctggctgacacgtatgtaactctcttaaaaggtcgcaatgcatggtatgggcaaatgcttgccaagggagagttgagtcctgacatgggtgatagtatcaaggggaagggaatgattcagggtatctctgcagttggtgcattttttgagctgcttagtcaacccagcttaagtgtgcagcacccagaagaaaacaagcaggttgctccagctgagctatgcccaatcctgaagaggctttacagaatactgataaaaagggagctcccagcaagggacattcttcaagccctgagggacgaaacgatgaatgatcctcgggaaaggattgagatggcacaaagccatgcattctaccgcccgtctctccttggaaaaccatgatctagttagtcttgtagattagtagaatataaacggacgctgtgctgcaggtttctccactgtgcttgctgtccttgtgtccgagctacatggggatggggctttgtcagttgtcgaattctttgtgcttcctcgttgccatggtgtacaagagattactgaaccaataaatgttctaagtgcatattatatgaacacccaatttgaaagtacccgaggaagatttcttatgcatggatttgtttggtccaacgtcatatgctagtttgggtggcaacatctatattctcatgattgtagattattattcaaggtatacttaggttttcttacttcaaaacaagactaaagttgcatc

SEQ ID NO: 14019 - DNA, 6434 bp, Zea Mays
catgcttcatttgttgagcttctgcggcaagttgctggtttgcgccgccgtttgttttcattatttgcacatccagctgaaagtgtgcgagagactatttctgttataatgcgtacaattgctgaggaagatgcaatagcagcagagtccatgcgtgacgctgccttgaaggatggtgctcttctgaggcatttactaaatgctttcttctttcctgctggagaacggcgtgatgttagtcggcaacttgttgctctttgggctgattcctatcaacctgcacttgatttgctatcaagaatacttcctcctggacttgttgcttatctgcatacacgttcagatgaagattcacggagccagtatgatgaagcaccgttgagcagaaggcagagacgaatacttcagcagaggagggttcatggtactaaaactatggcagtacaagaacaagggataccccccaatggtgttgaggatggggaacccttcaggcacatcagtgccggcacttacggaggagcagatgttcatcagaggcatgttggcctgtactcttccacccactctccttcgccaggtataaacattgatccttctcacactgtttcagttccacatggttctgtacctgaggccctttctgaaaataatcaacaaatcgaggcaccacagctggattcacatgtttattcagtggactccaatgccaatggcaatcttgtgagctcattgcattcagatttttcagtccctgcacaggttgtggtggaaaacactcctgtgggatctggcaggctcctgtgcaattggtatggattttggagggcattcagtctagatcacaacagagcagatttgatatggaatgaacgcactagaggggaattgagggcagcattgcaagctgaagttcataacttggatgtcgagaaagaaagaacagatgacattgtccttggaagttcagtcactgaggatgctgctggtagtgacaacttacctcgaatttcatggaattatgctgaattttcagtgagttacccaagcttgttcaaagaagtctgtgtggggcaatactatttgcggctcctgcttgaaagcggaagcaactatcgagcacaggattttccattacgtgatcctgttgccttttttagagctctgtaccatcgatttttgtgtgacgcagatattggtcttactgtggatggtgcagtacctgatgagttgggatcatctgatgattggtgtgacatggggagattagatggctttggtggtggtggaggatcttctgtgagagaactttgttctagggcaatggctatagtttatgagcaacattataaagttattgggccttttgatggcactgcacatattactgtcctcttagaccgaacagatgatagggtgttgaggcatcgtttgctactacttttaaaggccttgatgaatgacctttcaaatgttgaagcatgtgttttggttggaggctgtgttttggctgttgatttgcttactgttgcacatgaaacatccgaacggacagctattcctttgcaatctaacctcatcgcggcaactgcatttatggaaccttcaaaagagtggatgtacattgataaagatggcacacaagttgggccacttgaaaaggatgcaataagaaggctgtggtcaaagaagtcaattgattggacaataaaatgttgggcttctggtatgtctgactggaaaaggttacgggatatacgggaactgcgatgggcactttctgtaagagtacctgttttgactcctacccagattggggacactgcattatctatattacacagtatggcatctgcacgctctgatcttgatgatgcaggtgaaatagtaactccaactcctagggtgaaacatatattgtcaagtccaagatgccttcctcatgtggcccaggctatgcttactggggaacccagcatcgttgaagcagctgcctcattgcttaaggctattgttacaagaaatcctaaagctatgattcgattatatagtactggtgccttttactttgcattggcgtatcctggttcaaatctcctatcaattgcacagttgttttcggccacacatactcatcaagcttttcatggtggtgaagaggcagcactatcttcatctttgcctttggcaaagcgtagtgtactgggtggactactcccagaatctttgctgtatgtcttggagcgcagtggcccttctgcttttgcgggtgcaatggtgtctgattctgacacaccagaaattatatggacccacaagatgcgagcagaaaaccttattcgtcaggtcctgcagcatctcggtgactttcctcagaaattagcacagcattgccattcgttgtatgattatgctcctatgccacccgtgacttatccgaatctgaaagatgagatgtggtgccatcgttactacctccgtaacctatgtgatgaaattaggtttcctaactggcccattgtagaacacgtggagtttttgcagtcattgttggtaatgtggcgtgaagagttaactcgtcgtccaatggatttatctgaagaagaagcctgtaagatactggagatttcacttgatgatctcgtgcttgttgagaacggtagcagcaagcggccatctgacttaagttcggctaattccggaaacaaaactgaaaacattgatgaagagaagcttaagcgccaataccgaaagctagcaataaaatatcatccagacaagaaccctgaaggaagggagaagtttgttgctgtgcaaaaggcctatgagcgattgcaggctagtatgcagggattgcagggaccacaagtctggaggctgctactcttgctgaaggcacaatgcatcttgtacaagagatatggggatgtcttggaaccattcaaatatgctggttatcctatgttgctaaatgcagttactgtagataaggatgacagcaattttctttcatctgatagggcccctcttcttatagctgcttcagagctgatttggctgacatgtgcatcatcttcattaaatggagaagaacttataagggatggtggtatccccttgttggcaacacttctttctcgctgtatgtgcattgttcagcccacaacaccggcaaatgaaccagctgcaagaatagtcaccaacataatgcatactttctctgtcctcagtcagtttgagtcaggaagagttgaggttcttaagtttggtggccttgttgaggacattgtgcattgtacagaacttgaatttgttccttcagctgtggatgctgcactgctgacagctgcaaatgtttcggtgtcatctgagttgcaaaatgctttgctcagggctggatttttatggtatgtgctacccctgctgcttcagtatgattcgacagcagaagagaatgagatatgtgaggcacatggtgttggggcaagggtgcagattgctaaaaatctgcatgctgttcatgcaactcaggctttgtctaagctttctggtctcagcagcgatgatatactgtacccagataacaaacctgcatacaatgcgctaaaggctcttcttactccaaagcttgctgacatgctgagaaaccacccacctaaagagttattatcaaatctgaattcaaatttggaatcaccagagatcatatggaattcgtccaccagaggggagcttctcaaatttgtagaccagcagcgtgctagtcaaggccctgatggttcatatgatttgacagaatcacagtctttcacctatgaagctttatccaaagaattgatcgttggtaatgtatacttgagagtttacaacaatcaaccggattttgaaataagtgaccaggaggaattttgcattgccctgctcaagtttatagcagagttagtacaacagtggaattccgttaacttggaggagacgattcatcaacatggttcagttattgaagcatctatttctgaaaatgatcaagtcagtgattcaactattgaaggaaaaatggacaattcatcaggaaaacaaagtacagatggagattctgaagttattataaacctccaatgtgggctaacatcacttcagaatcttcttacaagtaatccaggcttagctgctgtttttgctaccaaggagcgtctggttcctctttttgaatgccttgcactccatgtttctcctgaaagcagcatcccacaaatctgtttaagtattctttctctgttgactaagcatgctccttgtttggaggctatggttgcagaaaggatgagcctcattttgctatttcagatactccactgcaatcctccttgcagggatggagctcttgctgtactatattctttagccagcacaccagagcttgcctgggctgctgccaagcatggtggtgttgtttacattcttgaacttatgttgccacttcaagaggaaatctctatgcagcaaagagctgctgctgcatctttattgggcaaacttgttggacaaccaatgcatggccccagggtggcaatcacccttgccaggttcctgcctgatggtttggtttctgccattaaagatggacctggtgaagctgttgtttcttctcttgaacagacaacggaaactcctgaactagtatggacacccgcaatggcagcttctctttctgcacagttagcaacaatggcatcagacctctaccaagagcagatgaaaggacgtgttgttgattgggatgtacctgaacaagcatctgggcaacatgtaatgaaggacgaaccacaggttggtggaatttatgttagactttttcttaaggaccccaaatttccactgagaaaccctaaaagattccttgaagggctcctagatcaatatgtctcctctgttgctgctacgcattatgaagcaattgctacagacccagagcttcctttactactgtctgcggcattggtttccttactacgagttcatccagcacttgctgaccatgttggctacctcggttatgttccaaagcttgttgcggctatggcttatgagggaagaagggagactatggcatctgggcaggctaccagtgcatcgaaggcagaacctagcgaacatgacaactcagctcactccgaggccactgtacagactccacaagaacgtgttcgccttagttgtttgcgtgttctgcatcagcttgcgtctagtacaacttgtgcagaagctatggcagcaacaagtgcaggaactcctcaggttgtaccactgcttatgaaagcaattggatggcaaggtggaagtatactggcattggagacattaaagcgtgtagttggtgctggtaatcgggctcgtgatgctcttgttgcacaggggcttaaggttggtcttgttgaagtactccttggtattcttgattggcgtgttggtggaagacaggggctctgtaatcaaatgaagtggaatgaatcagaggcttcaattggacgtgttttggctgtggaggtgcttcatgcttttgcaaccgaaggtgcacattgtgctagagttcgtgaagtcctgaattcctctgatgtatggagtgcttacaaagaccagaagcacgaccttttccttccatccaatgcacaatcttctgctgctggaattgctgggctcattgagagctcatcatcaagactcacttacgccctcaccgcaccgccaccacaaccttcattggtccgtctgccatcttcttctccctctccaccatcagctcctgcaaaccctagtggacggcattcttatcagcgtttgtagtgcaaaacggaacatgttaatctcaacccggagtgtgaaccatgaaggcaccatggtaacggtttctagagtgaggccaccttgagtgggcttgttactgccaccaaatacagattgtgcggttgtgcctccattccccaccaatgagcagctgtcagtggctgcatttcagtacatagcattgtacagttttccattacaacggggtcagggtcggggtcggttttgcgtttgttcatgtaaagcatatgatcttttttgtaacataatagatgtcaatagaataatggagctggaaattgtagtatcgattcattgctgggtcctgggtggatgcactcccttgttaggataacacgactttcttggacaagagaaatggatgttttttgttttgtttgatcagcgtcctgtagcgtcagggtatatttggttccctgtctaactcgacttttttgttagtcacaaactaaacaatgacacagttagtcacaaaccaaataactccttaaccttttatagtcatacgtcgcaaacttctggcaatggtgtgctattttatttgtaataaaataacaaagcaaaattca

SEQ ID NO: 14020 - DNA, 1343 bp, Zea Mays
accagtacagccagtggcaggcagcggtgtcaccggcaaaaaaattcgaaacgagcggtgtctgcctatcactgccatttcgctcgcgaagaaatcgcgaggggaagcgtgccgagctgagcaggcaggcggtagtggccgagcgaaagcatccccgatctcaacgtctcgtagtcgtagctgctgcctctcactcagggcaatggagagggcggtgccggttcggaagccgcacaccagcacggccgaccttctctcctggtcggccacggcccctgacgcatctgcctcgccggccgcgtcctcccgccccagcctcaagccggccgccgggattacgcctgcgatgttcggcgcgccggtcaccgagcaggaggccgaggatctgagcaagagtgaaaggaaattttgctccggatcgaagttgaaagagatgagtgggagtgggattttcgctgagaagagtgaaaatggtgactcagaggcttcaaatcctgataacaagacttccttgaggatgtaccagcaaactgtgactggaataagccagatttcatttagtgctgatggaagtgtttcaccgaagaagccgtcgtcaatacctgaggtggctaagcagcgagagcttagtggtaccctggaagatgctgatgctaaaatcaataagcagctttctgaagccaagaccaaggagcttagtgggagtgacatctttggtccgcctcctgagattcctgccaggccattggctgctcgtaacatggagctacaaggaaatgtcgatttttcacttccacagcgaagcgtccacacatcagttaaagtatcaaatcctgctggaggtccgagcaacatctcattcagtgaagagcccgtagtgaagacagcaaagaaaatccacaaccagaagttccaggagctgacaggtaacaacatcttcaaggaggacgtcccttcctcagccgagaagtctctgagctctgcgaagctgaaggagatgagtggcagtgacatcttcgccgatggaacgccagctccccgagaatacctcggcggcatccggaagccccctggtggcgagagcagcatcgcgctgatctgattgtcctggactgctttaattcggaccggctgtagctcccatcgccactaaagctcgcagagagtgcatttctcgacctctcgattctccatccgtgttgggatcataatttatgttgggtatcgttagtctaatataatgtagagtcagcagaatctgactcgtatcgtctgatacgctgggattatggcatcataggatgttttacttgtgctgttgtttgacgcaaaaggtccatact

SEQ ID NO: 14021 - DNA, 87 bp, Zea Mays
ggtaaaacgctcttgggaaggtaaggaattcagatatcgagcttgtcaagtgatcaggtgcacctgcagggttgtctgaggtccgtt

SEQ ID NO: 14022 - DNA, 136 bp, Zea Mays
cccacatcgtcagtgaggtcctcggggttgttgcggcaataatgggggagaggaggaggtttcctgctagcgcttgcttgctcgccctcgccgcagcggtggtgttgcaggtggcagcggtggtgctcgtcctggt

SEQ ID NO: 14023 - DNA, 1413 bp, Zea Mays
tgagtttcaacaccctccttcagctcactcatgttttacaggatggaacgacgaaactcgacagcctctatctaggaaagttccacttccttcctccaggataaatccatacaggatggtcattgtgctgcgattgattgttctaagcatcttcttgcactaccgtatcacaaatcctgtgcgcaatgcatacccattatggcttctatctgttatatgtgagatctggtttgctctttcgtggatattggatcagttccctaagtggtttccaatcaaccgggagacgtaccttgataggctggcattaaggtatgaccgggaaggtgagccatctcagttggctgctgttgacattttcgtcagtacagtcgacccaatgaaggagcctcctcttgtcactgccaataccgtgctatccattcttgctgtggattaccctgtggataaggtctcttgctatgtatctgatgatggagctgcgatgctgacatttgatgcactagctgagacttcagagtttgctagaaaatgggtaccatttgttaagaagtacaacattgaacctagagctcctgaatggtacttctcccagaaaattgattacttgaaggacaaagtgcacccttcatttgttaaagaccgccgggccatgaagagagaatatgaagaattcaaagttagggtaaatggccttgttgctaaggcacagaaagttcctgaggaaggatggatcatgcaagatggcacaccatggccaggaaacaataccagggaccatcctggaatgattcaggttttccttggtcacagtggtggccttgatactgagggcaatgagctaccccgtttggtctatgtttctcgtgaaaagcgtcctggattccagcatcacaagaaagctggtgccatgaatgctcttgttcgtgtctcagctgtgcttaccaatggacaatacatgttgaatcttgattgtgatcactacattaacaacagtaaggctctcagggaagctatgtgcttccttatggaccctaacctaggaaggagtgtctgctacgtccagtttccccagagattcgatggcattgacaggaatgatcgatatgccaacaggaacaccgtgtttttcgatattaacttgagaggtcttgatggcatccaaggaccagtttatgtcggaactggctgtgttttcaaccgaacagctctatatggttatgagcccccaattaagcagaagaagggtggtttcttgtcatcactatgtggcggtaggaagaaggcaagcaaatcaaagaagggctcggacaagaagaagtcgcagaagcatgtggacagttctgtgccagtattcaaccttgaagatatagaggagggagttgaagcatgtattcatgctgtcaaattttt

SEQ ID NO: 14024 - DNA, 371 bp, Zea Mays
ataagtgagaagacggtaggcccaaccatttcttatcagtactctacacaagcagaagccggactaggcccatcaccaagacccactgaaccctcgccgtttcgtcgcacccaccaacacgagagatgagctccggcggcgcggacaagcccggcagtggcggcggcgcggtgaagacgccgtcggacttcctcaagtccatcaggggccgccccgtagtcgtaaagctcaactccggcgtcgactacagaggtatattggcttgtctggatggttatatgaacatcgcaatggagcagaccgaggagtacgtgaatggccagttgaagaacaagtatggcgacgccttcataaggggcaacaacgtgcag

SEQ ID NO: 14025 - DNA, 114 bp, Zea Mays
taccgtgaacaaaaatctgggtgtcatcatgtctactaaaaacgttaatagaaactcgccctccacctcccccagccaaaccatcacccccagaggcactgatcttgccaccac

SEQ ID NO: 14026 - DNA, 859 bp, Zea Mays
caagtcattacctctcctttaggtcgtcgctgataatagaggaaaatgcaaaccaacattggagttccatcatcaacaagcttgaaacaccaaccaagacagtcactcctgttattccgcagtgtgatgggattcaagatgactacaatgatcaatttttctttccaggagttccaactgaagattataatacccctggagaatctgctgagtatcgagctcctacacctgctgttggaacaccaaaaccaagaaatgatgctggagatgataatgatgatgacgatgatgatgaagaacctcctcttaatgaagacgacgacgacgacgatgatttagatgaccttgaggaaggggaggatgaacctaacacacaacatcttgtacttgcacaatttgacaaagtgacgaggaccaagaatcgttggaagtgcactttgaaggatggaatcatgcatttgaatggtagggatgttctatttaacaaggcgacaggtgagtttgatttttgactttttggatgaagatgagctattttagaagcagctgtatggacatatcttgtcttagacataaggacggggaggtgacgaagtgttcttggtggggtgctggcagtatgactgcgtcgtgttttcctattgagactttgtttcaccctcttgtttgtcaccgcaattgttatcgctgtaaagaagttaccgcttgtgctgtggacattttctgagatgggtgtctcacatccgcagcgtaactaatgctagttatacatttttgtctctaaagtcagttttggtgctgtatcatgttcttccggcgctcttgatggccgtagtggtgcgtatgcggaatctctttt

SEQ ID NO: 14027 - DNA, 141 bp, Zea Mays
tgttcttgtcaatttgtgtttcttgcgctactgaattgtttttagacttgagtaatgtaaataattctatacaaatattgtatgcagatcataatgtattaatatgcagatcgtaattgctattagttcctttatattttg

SEQ ID NO: 14028 - DNA, 974 bp, Zea Mays
atgccgtgttgctcatctgttacataccggttccagaagttgggtattcgtcctccaaaaggggttcttttgtacggaccaccaggaactggcaagacactcatggctcgtgcatgtgctgcacagacgaatgcaacgtttcttaaattagctggtccacaacttgtgcagatgtttattggtgatggagcaaagcttgtccgggatgcattccagcttgccaaagagaaagctccttgtattatatttattgatgagatagatgccattggcaccaaacgttttgatagtgaagttagcggtgatagagaagttcagcggacaatgttggaattattgaatcaactggatggattcagcagcgatgagagaataaaggtcatagctgcaactaaccgtgctgacatccttgaccctgctctgatgcgatctggacggttggaccgaaagattgagttccctcacccatccgaagaagcaagagctagaatcttgcaaatccattcaaggaaaatgaatgtaaatcctgatgtcaactttgaagaattggctcgctcaactgatgacttcaacggagcacagctaaaggcagtttgtgtagaagctggtatgcttgccctacggcgggatgctacagaggtaactcacgaggatttcaatgaagggatcgtacaggtccaggcgaagaaaaagtcaagcttgaactactatgcttaagctgtttgtcaaaacatatggaccataaggtgtttgtaacactactgtatgaataatcgaagctatgtttttaatgcaagatttttacagcatataagaccccacgccagcacacctgatttttttttgtattttagctcttttcttgaaaagtattcacgtttagaccgttggatgatttaatctcatttttgtaccctttgctcggcgtcacagcctgtggcgccgaggtaacatagtttagcgccacagatttt

SEQ ID NO: 14029 - DNA, 3164 bp, Zea Mays
gcaatatatagaaccagtgattactttgttctcactggctgtccattcgaacaaatgctgttagatttgcagaagaaagtgcgatctgatatcagtgcagaatattggctacagaagaaatgtgcatatccggagaggcaactttttgattgggggctgatgcggatacggtatcctttatccatgtatggaataggagatatcctttcaatggatgctgatgatgttcaccgcaaaaagagatttacagagaggatgtcaagactcgaagaggaagaaaaaaatcaggcagatattaggaagaggaagttctttgcagaaattctaaatgcttctagggaacaccaggtgcaattaggcactacattcaagcaaagaaagcagcggaatgatggagtccaggcatggcatgttcgggcacgtcaacgtatctcacggcaagagaaaaataggttgaatcttctgaaaattggtgatcaagtagcatatatgaagatggttgaggagagcaagaacgaacgtctgaaaatgctccttgacaaaacaaatgagcttcttgaaggaattggaaaagctgtacagcgacaaaaagatgctgagcatgttagtcagcatgaagggagtgaagtgccaaaagggtcagagtctgaggattgctctcaaatctcaggcgtcaagagtgaatcacctggggaatctccttcagatgacgatgcagactttgctggctctgcagatgaaagtaaattcaatgcaggtcgtagacttgattttactgtccattccattgaagaaaaggtgacagaacaaccatcagctctcgaaggtggggaattgaggccatatcaactggagggtctccaatggatgctttctttgtttaacaacaatttgaatggcattctggctgatgaaatgggtctgggtaaaacaattcagaccatagctttgatagcttatctgttggaaaataaggaggttgcaggaccacacttaataattgctccaaaagcagtattaccaaattggtctaacgaattcaaaacctgggctcccagtattgggacaattctgtatgatggtcgtccagaagagaggaagcttttaagggaaaagaattttgatggattgcaatttaatgttttgctcacgcattatgacttgatactgaaagataagaagttcctaaagaaagttcactggcattatttgattgttgatgaaggacatcgtctgaaaaatcatgaatgtgctcttgctcgcacactagtttcaggatatcagatccgccgcagactacttttaactggcactccaatccaaaatagcctacaagaactgtggtctttgcttaactttattctgcccaatatttttaattcatctcagaattttgaggaatggtttaatgcaccatttgcatgtgatgttagtcttaatgatgaggaacagctattaatcatacatcgtctgcatcaagttttgcgtccatttttgctgaggaggaaaaaagatgaagtggaaaaatatctccctgtcaaaacacaagtaattctcaagtgtgatatgtctgcttggcaaaaagcatactatgaacaagtcacaagcagggaaaaggttgcactaggatttgggctcagatcaaaggctctgcagaatctgtcaatgcaacttaggaaatgttgcaaccacccctatctatttgtagagcactacaacatgtaccagcgggaggaaattgttagagcatcagggaagtttgaattgcttgatcgtctacttccaaaactgcagagagctggtcacagggttctgcttttctctcagatgacgaaactgcttgatgttttagaaatatatttgcaaatgtacaatttcaagtacatgaggcttgatggatccacgaagactgaagaacgagggaggttactggcagattttaataagaaggattcggaatatttcatgtttctcctcagcacacgtgctggaggacttgggttgaacttgcagacggcggacactgtcattatatttgatagtgactggaaccctcaaatggaccaacaagctgaagaccgtgcccatcgtatagggcagaagaatgaagtgcgtgtgtttgttcttgttagtgtcggctccattgaagaagagatcctggaccgtgcaaaacaaaagatgggtatcgatgcaaaagttatccaggctgggttgtttaacacaacttccacagcacaggacagacgagcattgctgcaggagatccttaggagggggacaagctcgctgggaacagatatccccagtgagcgcgagataaatcgtttggctgcacgaactgatgaagaattctggttgtttgagaagatggatgaagaaaggaggcttagagaaaactacaaatctagacttatggatgggaatgaggttccagattgggtattcgccaacaatgatttacccaagagaaccgtggcagatgagttccagaatataatggtcggtgcgaagcgacgtagaaaggaggttgtctattcagactctttcggtgatcagtggatgaaatccgatgagggatttgaagacattccaaaggcgactcagaggtcgaagaagactgcttactcatctgacatccaagttgagtttagtgaaaggaggaaaagacctaggtctgtagaaaacagcgcagacggtgtgagcaacccgacgtggacgcctgacaaaggaagggctggagtttcatcatacagcaaggacgagactgaagatgatggcgaagacgaagtcattactagcggcttacaaaagggaaacagtttcacatggaataccctaggaagaagaaggtcaagccacttcagttcgtcatcggactcgagagggcgcccaacattctaatggcaacatacatgaatgttatggcctcgacctgttggttgatggaatacccttgtagagcagggctgcgactatgactgagtaccttcaagcttatgaactttattaggattactagtatactgtatggacttgttggcatgaatttgtaactcctttaaatattaattgtttaaacaactggtggtgtttgctatcataccgcgcctacatgtttttatttttttgctaatcaaagtttttgtggccaggttttattggtg

SEQ ID NO: 14030 - DNA, 1591 bp, Zea Mays
agatgttatccctccacatgaaatcggtgttacctttgaggacattggagctttagaaagtgtcaaagatactctgaaggagttagtgatgcttcctttgcaaagacctgaactttttaaccgaggacaacttatgaagccgtgtaaaggaattttactttttggcccacctggtactggaaagacaatgcttgctaaggctgtggcaactgaggctggtgctaatttcataaacatatcgatgtcaagcatctcttcaaaggttgatggcatgctgggaaggcgggagaaccctggagaacatgaagccatgcgtaagatgaaaaatgagtttatggtgaactgggatggtctgagaacaaaggagaaagaacgtgtattagtacttgctgcaactaacaggccatttgatcttgatgaggctgttattaggcggcttccaaggaggttgatggtgaatttgccagatgcatcaaataggagaaagattcttagtgtaatactagccaaggaagatttggcagacgatgttgatctagaagctatagctaacttgacagaagggtactcgggtagtgatctcaagaatctttgtgttactgctgctcatcgtcctattagggagattcttgaaaaggagaagaaggagagagcttcagcagaaacagaaaataggccattgcctctgtcgcacactagcaatgatgtccgtgcattaagaataagtgatttcatacatgcgcatgaacaggtgtgtgcaagtgtttcctcagattccagtaacatgaacgagcttgtgcaatggaatgatctctatggagaaggcgggtcaaggaaaaagacaacgctaagctacttcatgtagctgatgttgcaagtatatcgggagaagtgccctggcacaaagcagaaatggttggaggcagttgggggtgtgtatcgggtgcagttggaaaagagctaggttcacctgccatccatccattgagagaattgatggctcaggtggagcggaatggagtagtatacacattggttgctgcctccactctgggccatgtatcatgcatctggacatgacggatggtctggcttgcagttgtcctaacaacagttttgagtgcaacatatcactgtctgggaaagaaaagaaaagaaaatataccatttgtgttgttcccactccacaggaagcacggcgacgacatcgcccaacaacccttttccatcgtttcttaaaaaataattcattatttaggttgtaaacatttagagcctgtgcaagtgtacagtatgagcatcaggagtattaacctagtgttgatgtctatacctaatctaatttattgattagaatcatttaacatgaaatacatgattattttgtatcttcgtgccttcgttaggttgataatggtcgaattaaaactaaccttgtggttatgatctctgttcacatcgtgtacaataaatagagagggtcggtacacttagattcgatccatctcactaaagtgaaggctgttgtcgtctatcttattgttcttaagctgacccccatcgttctaatagttaatctcatggctagggt

SEQ ID NO: 14031 - DNA, 1255 bp, Zea Mays
cctccgaggacgggggaggcggcggaggacgaggacgcggcaaggatgagccgcgaggggaaggtcagcgtcaccagcaaccccggggagacgcccaccatgagcatgccccggagcaagcgccaggacctcgacctcaccgtcgacgacttcgaggaggacgagatcgaccctgagctgcgctactccttccagcggaacagcaggtttctgaagagagtttttagcgtggacacacttgtcaagcctctccctcctgtaatggcatacagcgtatcccgcaatataaacttcttcttccggatcttcacacagttttgggatgaagaaggaattgccaatgcccagaagtcccttggactggggaacgaggacggctcccgccgaatgcgctgatcgtggtcaaaccaagttttctgtaccgggttcagaactcttttgccctagacactggagacgtgttatacgcctcgaaagacatggcatgggacatttttagggaaatttggatccataccattaaaagatcaccactttggatccataccattactatatcacttacatgtggttccacatgagtcaatgacatgtggggtccatggtatatatctaaagtttggatcttttaatggtatagatccaattgttccacatttttaaggttggcttgcaattttgtttatcctagtgtgtctgtttcatgtatgtttgaagtccagatcttgtgcttgcaaaatagaggagtcgaggtggcacatcgaactccaggccaatggaacgaaatgcctacctgttcatttccacttcaacagttccattgtatactagtcaaagacgagcttgggcatatctttttctgcttcattcctccttttcctttatgatcattagtattgttatccttttctatgtctcccaatatgctgaagaaaagcaaatcatgctgtgcacattggttggaccttggaccaggaggactcccctgtctggaacccatcacatttgtatcttttatccttccagcagcagcaaatctattagcacggagaaatggagttgggtgtatgtaacgtggcagacatgagcaaagtggtcagccacattgctaattgactgcatcgttgctcttagatcaacgcaacgaatctagctagaagctagctaacttgtgtcgcagctgcattggtcgcttttggtgttccaaagattcagagccaaaggcagtggtcctggacacgcctttgttttcttt

SEQ ID NO: 14032 - DNA, 1833 bp, Zea Mays
tccatgggctctggtggtgcactgggaaatgacctgacattgtttcagagctagtccgccgtacaagtacaaggatacagccgcaggcccgcagaggaagaggagagcctactctcctgccatggccgcgccgagtccgctcccccgcttcctgatactcctgctcgccgtaacctcctccgcgtttgccgccgccgcggcaaccggggctccggtggtgggggaggactacgtccgtccgccgccggcgcggtgccaccgcaaggcactccttagcctcttcccttggagcaagaaggaggagtccgccgcctcctccgatccgcagcaggtgcacatttctctagctggagaaaagcacatgagaataacatgggttaccaatgataactctgtcccatctgtggtggactatggaactaaagaaagtacatacacaatgaaatctcaaggagaaagcacatcctacagctacttattgtatagttcaggaaaaattcatcatgttgtcatcggacctcttgaagataacactatttattactaccgatgtggagggcagggtccagaattccaatttaagaccccgccctcccaatttcctttgtcattggctgttgttggtgatcttggtcagactagttggacaacatcaaccctgaatcacattaagcagtgtgagcatgatatgcttttactccctggtgatctatcttatgctgattatatgcaacacttgtgggattccttcggcacattggtggagccacttgctagcaaccggccttggatggtgacagaaggcaaccatgagaaggagcacattccattttttgagtcaggatttcaatcttataatgcacgatggaaaatgccttatgaagagagcggatctagatcaaatttgtactactcttttgaagttgctggtgcacacatcataatgctaggttcatacacagattatgatgatagctcagatcagtatgcttggctaaaggctgatcttgccaaggttgatagaaagaggacaccctggctcattgtgttgttgcacgtaccatggtacaatagcaattgggctcatcagggtgaaggcgacagtatgatggcttcaatggagcctttgctgtacgctgctcatgtggatatggtaatagcaggtcatgtccatgcttatgaacgtgcggagcgagtctacaattccagacctgatccttgtggcgctgtccacataactatcggcgacggtgggaaccgtgaaggcttggcccgcaggtaccgtaacccgaagccagcgtggtcggtcttcagggaagcgagctttgggcacggcgagctaaagatcgtgaactccacccatgcccactggacctggcacagaaacgacgacgaagagccggtgagaaccgatgacgtgtggataaactctcttgctggttcagggtgcatccaggagggcagccgtgaccgtgagtcgaggaagatcctgatgtctccttgatgcttagcagtatagcttgggcctgcgatgtactgtgtatataatgcgtgctacttgataatctaacacctagtaaaagttaatgcgtcgtgctgcttgcctgcgtgtatactggagactggtttgatctggcgcgtttgctgctcttgttgtgttgtaccactatggatgtttgtagcaaagtgacatacgacggtgttgtaatggactgaagatgaatagatgatgttccagtaaggagtgttttgccgtgtctaggaagatacatcaaaatataaatcactccctccttatcaaaatacagttttttcttgctttcttttttttct

SEQ ID NO: 14033 - DNA, 948 bp, Zea Mays
ggcaggtcgtcgctcgccagaggtcaaggtacttcaggcagaaaaggaagcactagggcactgcatgctgaagacccgtcaaatattcacattggagtaggatgcgactcatgtggggtatatccgatacgtggtaagagatacaaatgccaggactgcactgagttaataggctttgacctttgcgaagcctgctacaactccagttcaaagctcccaggacgctttaaccagcggcacacccctaatcacagaatggaagttgacaattcagcactcgtgcataggatactgagacaccatggcatacccgaggaaggccctgagggactgatgatggaagtggttggtcctgatgcaatggtgcagatactcattgataatcaaggaatggaggagggcaatgacgagggcccaggagaggcggccattgaagaaccagttggttctcttggctcaatgtcgcgtctgtcgcatctattcatgtataatccagaaatggaggatggcaatgacgaggactcaggagaggaggcggccattgaagaaccagttggttctcttggcgcaatggcgcctctattcatgtatgatcaagaaatggaggacaacgaggaggatcaggcacactagatgcagattgcaccagctgcagcgaagcctttgttttgtgttgctggggcggctctacttatgtaatgtggaatggagggattgcgcaagcttaaaagtatggctggatcggccttgttttttaactggttctctagttactgccatctaatagccaacatttttcccgcttttgtaaatccgtgcagttgtttgtttcaaaggaaaatgcaataaggatatgcagaactatattccttattttaaactctactcctttcgtcccgtgaagcaagtcattttaggctatccgcaaccattacctctaaatttttt

SEQ ID NO: 14034 - DNA, 653 bp, Zea Mays
gttaatttggctcaagttctttaatgtttctgctgatcaaaggtcaagattgctcagggcaaccgagagacagaaccaaacaactgataggctcagagatagccatagaactatgctggagactgaagaacttggtgtctctatcctgcatgacctgagtcaacagcgccagtctctcttgcatgctcatgatgtattggacgaggtggataacaacgtcggcaagagcaggaggaccattggaggcatgatgaggagaatggatagaaacaagtggatcatcggtctcatcatagcagttcttgtcttggctatcctcgtgattctgtatttcaagttcgtgcactagtggattgcgttgcgtacgttgcatggacggtacgtagttttctactgcgaccagaacgaagaggaaggcagctgtgaatttgcttctatctacattttgcgatttcctgtatttattttcagttttctatttctttttaaatcatatttctgggggtgtgctcgtacggtaccggatgtgttgtgtgaggaaacaagttcaggccatgacgcagagttttgtatatctgattggtttctatttaaaagaaaaactgaacggataatcaataactaagcatatttgggaattttgctgcagcttt

SEQ ID NO: 14035 - DNA, 426 bp, Zea Mays
tgaagttgtatgagatcgttccagaaagtgaagagggagcacggtgccctgaggcagaaactagaggcctatttccagctgctacgacaagctggtcctgctggagctgccaccaggcctggatgtaagaactaggagttgcaggaaaacggagtatgacccaagaagatacctcactacaactgactggcccagtggccctgctgcgcagcaattaggggtcagcatacgaagcgaaacaagagatgatatgcatggatatgcacaaaactgtaataagagattgttttttcaagaacaaaaaaaaaatcagaggagaggaagggatgggaaccttgtgtagtgagtttacaagctttactgaaagatggtattattgtctcatgtgtaatatattccttccattttaaaatatatttattctta

SEQ ID NO: 14036 - DNA, 415 bp, Zea Mays
gcacagacgacaaatttggccaaccgttcgactcagcattcaagactgcaatcaattcgagccggggggcctcttgaccctccctgagttatatcattcattcattcattttttcttcttctttcccctctccagctacctagatagatacattttttttttaatttcgagacaaaaactacatcgatacataataacctatagcttttctcaatggcccttgtggtggcaatcacaaagcccaaatgcaacgaatacccggcctcacatcaaatcaaatgaaacaaaccctcccaagaaccgaccgcctccatccaggatctagctaatgtggtagcagtaatacagcaagcttttgctatctcctccggtgctgatcgtacgatcttcggctatggctcgggctgtagtaagg

SEQ ID NO: 14037 - DNA, 1621 bp, Zea Mays
ccaccgatgcatgctcaagccgcgacaacgctatctctctacactctcatccgatcttccgcaaacgcagcctgcctcagcctcacacgcatttcaggctgtagccatcctccgacttgtcgtcgtcttcgtcgtcgtcgctgctgctgctgtcgtcgccgccaccgacggccatacctgccctggagaactggagcgggccctgccgagacccggactgcgagccgctgctttgctcctgagcagcccagacgccatccaccagcatgatcgactggctcaccggagccgccgccgcgccgggggaggatcttctggagatggcttttcacttcatcgttttcgagtggggaacttttttttatttggacaaattaatggcggtaaagctaggcgatcggtctcacactctgaccttgagggccacccagttcgtgcaaagcggcaacgaaccgccggtgaagctccggtgaccagcaccgccttgccttcctgcttgcttgctgttgctgctgagcctgcgagtgcatgttgttgacctcggagccacatggtggcatggtggtgccacaaaatctggcgctggcggtaccggtaccgctggcagccaccaccggaggagaaatcggcaccgccgccttggttgccggcgacaacgataccaacgacaggccagagctggcggagctgtcttctcttctgaacaacggcggcggtaggggttgtggcaccgccaccgccgaaacggccgcccttatcggcgtgggtgcgccaccacccaacaacttgggctccggcggcgacgtgatttcactctgttgctctttgtcagactgtacggaaataaaccggtggtattcaatcactctgaatttttttaaaaaaatctcacggcacggcacatagtaaaacttgaaatacgtggatggagagcaatattatgatgagaaacagcaagcatagcgaagcagagtagcctgcctgtgttgtactacctcgtccgatttggcgtcgctgtccacccacaactgagctgtgctcatccatttccgtttgtcgccgtcgtccaccgtcgccgccccgtcgtcgtactctcctctcttggcagcctcctccttcaactcgtcgatcactgcagggcaatccatggccgcacaggcacaaaccagcgcgtcagcgaagcggggcagagaggaaacggagcaagacagacggcgacgcgtatactataggagagaaccgagaacgagaggcctctagtcctcaccgtcggcgaggaggcgaaggcagagcgggagctcgcgcctgaacacctcgatcttcctgcgctccacctcgaggctcctgatgcaggactggatccccgccggcgcagcgcccttggccatccctccggcgctccgcgcggcgaacagcctgaggtccagccccagatccaggcccatcccgatctccccgacgtccagccccatgcacgcgagaaacgagacgagagacgagaggcagccaggaatctttcgcgtagaagaatcggcgaccggaaggaaggaaccggagagaagctgagaaagaggcggaggcctgagggtgagggtgccggtggggtggggtgggggtgggt

SEQ ID NO: 14038 - DNA, 1608 bp, Zea Mays
tagctagcccgccggcgtgacgtgcaccgcgcacgcgtccatttcgcctaccacttccgccgaccagctgtatctctctggctttccccttctcttcgtcgccgctcatcacaagcctgtcgtcgtcgtaaacacagagagggagctcgtccatgtcctcctgattcctcttggcgatcgagggagtggccgaccggcgataatctagctatagccagcctcgccatgcctcgccagaggaccctcacctccgaggcggccggcgggcggctgctgctcgtggtggtcgcggtcctgctatgcctgtccgtgcctctggggcgtgcggcacccccgggcgcggaggtcgcggagttccctgggttcacgggcaaactcccctccaagcactacgccgggtacgtaacagttggtcaacatgagcaacgaaagagacacctgtactactaccttgccgtctctgaaaggaacccaagcttggatcctgtggtcatctggataaatggcggtccagcatgttcagggtttagtgcatttctgcattcatttggaccttttcgaatggagggctcccaagttcatatcaacgacggtccacgagtagccgtgaacccttactcatggacaaagatggctagcctcctcttggtcgactcgccagcaggtgtgggctactcgtacgctgatcatgaagatgactacaccacagatgacacaagcagggtagcggacctgtatgactttctgtcaaagtggttcgctgaatacgcagaatttctgtcgaatcctttctacgtagctggatgctcgtacagtggagtgatagtacctgtacttgcacacgaaattataaagagaaatgaagaatccggtggggtcaagatcaacttcaagggatattcactatgtaatcccgctattgatgttgacatagagaacaatgcacatgttccatatgcatttcgaatgggtttgatttcagatgaattgtttcagagtttagttactacatgtaatggaaagtattggaataactccaatccatcatgccaagagaacatggagcaattttatactcaaatcaaaggtattaacatggagcatattctatgtccgccgtgtcgatacaagatggggataaccaatcaattcattgaatatgattctggtcaaatgtttgagagcctttcgaaaacctccaagcatggtttagaatgcaatgatcaagagttggcccttgagaaactctttgatacaagatcaggtagagaaaaattgcatgccaaaaaggttgaagtatcaggaccatggaagaggtgccccaagcgtgttctgtacacgagggatattctaacattgatagagtatcacttgaacataacatccaaaggatatagagtgtttatttacagtggagaccattccttgcttgttccttttacttcaactttggagtggctaaagaaactaaactacaaggaaatcgagaaatggcacccttggtacttggagaatcagattgctgggtactcaattaggtacgagaacaatatattgtttgcgacaataaagagaggtgggctccacatgatagccgtagccgcgaga

SEQ ID NO: 14039 - DNA, 628 bp, Zea Mays
gaaaatcttgctaccggcctagcatctgcacagtatatcaggactgcaagaagttcaaggagttggttgaggagattgctgagtcacttacagagaacgaggacaaggaaggtcaagatggctcatccacggccggattgctggagaagctcactgtgagcgagggcaaatctgaggaaagtggcaagtcggagtccactgattctggcaaagtgaccgaaaccaaagccgatgcagccccagccgagtagttggtgtggttgcacgcagatcctccccgtgctgaatcagttcctctgccctttagccatgaaatatgtttgctaatttttttggggcgagttggagcagtctcatgtgtttgggtttgttcttaaaaactttgagttaattggggttggaacgttcggtatgcaagtgtagtatttcactgcgtggatcgttatggattgcggtaaattcatataaggtgcatctattttttgatttctttcagtacacatacatgtgttgtgctaatactttacggctttacgccactgtccacggggagagttgaatgtttgtctagattggtggatcaggtgtcttagctcatgcttatacacgtgatagaggaatttggcaa

SEQ ID NO: 14040 - DNA, 1497 bp, Zea Mays
catatcctagaatattcgaatctatatttgaattcagattacaaggtagtgaattgtgacatgtattcgttcctatccgatccgtcgtttttgagcactaggtgcggtcactgtgacgcgtggacttggcttcgcccactgccatcgtggacccacgtcatcagcaagtgtccatatccaccacccgacccgacgaccgcttgccgtccgatccgtgtgctcccgagggcaaggatggcatttcgccacgcgagatatttttcggtggcctgcacaggccggcagtgcagcggccaaaacgaggtcaggtcagtcacgctgggccccgcctcacgctcccgtcctgctccgggtcccaacaaagccgtccccgggaggtgctcgtgtgctcgtagcgcggtggcgaccccgatgccccgcatattccactgggcgtccgcgccgtcggatgggatcaggacggccgcggcggccccgcgctcggctataaagacgctgcgggggacgcattccctctccgtgctttcttagaggtgggttggcttctcctccccctccggttcgggttcgggttccggatcgagatggcggcgtcggatgttgagtaccgctgcttcgtcggcggcctcgcctgggccacggacgaccactccctccacaacgccttcagcacctacggcgaggtcctcgagtccaagatcatcctcgatcgggagacgcagaggtcccgcggcttcggcttcgtcaccttctccacggaggaggcgatgcggaacgccatcgagggcatgaacggcaaggagctggacggccgcaacatcaccgtcaacgaggcccagtcccgcggcggccgtggaggcggcggctacggcggtggcgggcgccgtgatggcggtggcggctacggcggtggcggcggctacggtggcggcggcggctacggtggtggtggcggcggctacggcggtggcaaccgtggcggcggctacggcaactccgacgggaactggaggaactgagcggtggggcccgcgcggccaagttatcctgttcgctaccgtgatgtttaccctagtccagagggtttatcttcgttcgtgtcgtgtttgttgttgcccatctgtgtttttgattgcaaggtcgctctgtgtcagttgttagtgctgtgttcatcctcggtttcagcagacccatgcatcaaacagcatggactgcggatcgatggatgctgttacccccgtcaggctttattctaagttaatcttaaggaaaaaatggtgcttcttggtgctgcaaaatggttgtgctcatctgaaaagctacttactctcgctttgagtgcgaatcaaggcaaaggttgccagtttttcaaacaatgaatgattctttgctttggaatgaaaaaagtagccgccaatcaacatgaatctatgggggaaaggcgatctgacgtaataattacaacatcccaatcagtgagcaactgaacataacatt

SEQ ID NO: 14041 - DNA, 2978 bp, Zea Mays
atcctgccttgagtgttcgtgcaacgctgcccctgccgcgtcgtcttctggaccgcttctccactccgcccagctcgcagtcgcagctcgctcaaagcagcacagcagcaagcagaaggaagaaaaagagcagcgagagccgagaagagaagcgcgccgccgctcgagctcatcccgccgccggacacaccgcatggccatgaggcacagggcgcggtcctcccccacctccccgctcaccccgtcctccagcgcaagaacaaacaagatacttggtttctctgtatctctcatcctcatcaatctggcttcaattatggagcgtgctgatgagaatctccttccagcagtttacaaggaagtcagtgcagccttcaatgctggtcctgcagatctgggatacctcacctttgtaatgaactttctgaagtcaatagcatctcccttggcaggtatccttgctctgcactatgatcggccaatagtgcttgcaatagggactgttttctgggccttatcaacaggggctgtcggtgttagccagcgttttgggcaggttgcattctggagagccgtaaatggcctagggcttgccattgtaataccagcgcttcagtcgttcattgctgatagctataaagatggtacgcgtggtgcagggttcggtttgttaagcctcattggcgctgtaggtggtataggtggtagtattttggcaacaatcatggctggaaaggactattggggattcccaggatggcgtgttgcatttatgatggtcgcacttgtcagcttgataattggaattcttgtgtacttatatgcgactgatccaagaagaatacctggcaatcgccttcttgacgaagatgagtatgagaggttgcatctatcaagcaaagatgttcttcctccgccttctatctggagggattcttgggtggcaacaagatctgtcatgaaagtgaagacgtttcagatcattgtcctgcaagggatcattggctcgttgccgtggactgctatagttttcttcacaatgtggttttgacaacaacagctcagcagcactgaacagcctcttcgccatcgggtgtgccagcggagcatttattggcggggtgatagcagatcacctgtcaaagtacttcccagattcggcacgggtcatgtgtgcccagtttagtgccttcatgggcatcccgttttcttggatcctcctcacagtcatcccccagtcagttgactactggttttggtggatcagtggaccagaacgcagtcctcgaatttattgatgctgggcatgacatgatcctggcggcagattcctctgcctctgatctcattcgtggcattgcaacagagtgtggggttgattttgatgaggatccagaggcaatggttattgaccatatgaactatgccgtcacagatgttgaaggtgatcacaccttgattgctggtgacgatcttatccattcggatgtgatactagggtctgaaaagattgaggctcctgtattgtttcgaggaattggacacatggctaatccatcaaacagtttggttctgaaggttctatcagcctctccatcagcatattcagctaatccaaagactaagttagcgtctcctccatcgctcactgggtcagctatatcattggtttcggttatgcaggcaagaaataatgctcgggtgctgttatctggatcactcgatctgtttagcaaccggttcctgaagtctggtgttcaaaaggctgatagcaaaacaagatatgagagagctggaaacgagcaatttgtggcagagataagcaaatgggttttccatgagaggggacatctaaaggctgttaatgttaggcatcacaaggttggggagaccaatgaaccaggcatgtaccgcattaatgatgacctggaatactctgttgagatctatgaatggtccggaacaagctggaagccgtatgttgctgatgatgtgcagcttcaatttttcatgatgagcccttacgttctgaaaactatgtcgactgacaacaagggtttgtattcaacaaccttcaaagttccagatgtttatggagttttccagttcaaagttgagtaccaaagactgggatatactggtctgtcttttacaaagcagattccagtacgtccttacagacataatgagtatgagagattcataacatcagcgtacccatactacaccgcctcattttcaacaatgggtgctttcttcgtattctcgtttgtgtacctgtaccacaaataaaggactcatgggagcgcacaagtctctggaggctgacgtgaccaagatctgtgggcactgaatgttgtgctataagccaagagttacccggcgccaattttatggaaccatgtttttgtactgccaacttagataacatttgacgaccgtgaccgcactcatgggaaatttactcgtgctaggatgttcgatctgcccccacttcttttttttctttcttggaccctttctgatcagcacttgtcagaacgtttacagtctatagcactgaaacgtgattttggaagtactacacccccagtaattttgcactcgtgcccagttctgatttctgatcctgggtgtggacttcaaagtctgcctattatacttccgcaattgttcgtgtttataacctggacgcacgtattttttttcacgggcttattgaacatgatgctcgaagagtgcactaaacatgccatgcacgtattttttttcacgggcttgttgaacatgaatgctcgaagagtgcactaaacatgccgcttcatgtacagaattcgaaatttgtaatgttatatgagcattttctcgggcagtggatgcattttaggtgccgtttggttcacatttgtcatgtacatttgtcatgtaatgggtaattgataacgttaaaccatgtttatttaagtttaactgtaatt

SEQ ID NO: 14042 - DNA, 76 bp, Zea Mays
gccgtttcttgctcgtaatagagagaaatgggagaaggagtaacagacgagttcaagcactattaacaacggacgg

SEQ ID NO: 14043 - DNA, 660 bp, Zea Mays
gtatcatcctgctggcgcggcacaagacgccaccgagccaagaatttgcatcctcatcctgcggctgtcagtgtcaagcagccaggctcagggttatcagagcacccggaatggacacactgaagatacctctaataacggaacacaccacaatcgatgatgtctctgtctgggagtggtctggctctgcgtatgatgaaggggctgaagcgtctgaatggttctccacttactttgggaagccaagtcgactagtgcgcttcaaagaagcatcggaaactaggccaaccgatccagattatgcccaaggttataagatcatgttcaccgattgcttcccatttctgatagcttctcagggttcactggatgcactaaatgagattcttaaagaacctgtaccaatgaaccgcttcagaccaaatattttagtggatggatgccacccatactcagaggacctgtggaaaaccataaagataaacaacctaacattcctaggtgtgaagttatgcaaccgctgcaaggtgccaaccattaatcaagaggatggagtacctggtactgaaccaactgaaactctacagacttttcggtccgaccaagtgcttcgtccaagccacaaaaataaacgacaggatcactgacaatgacgatgga

SEQ ID NO: 14044 - DNA, 1141 bp, Zea Mays
gtcctctttcagctcggccggagctcctgagacgcacaggtcagggatgaaatagaacatcttctagatgataatgaagacatggaacatctgtatctaacaaggaagcaagtacaaaaccaacaggttgaggctttaatgtcatctgctgcttccaacagcattgttcttgccggaacaggtgtgcccaggctgaactctagcttccggcgtagcctgagcattgctactagcatgcatttggataatgatgtggaggacctagagatgttacttgaggcctacttcatgcagctggatggaattcgcaacagaattttgtcggttcgggagtatattgatgacacagaagactacgtcaacattcaactcgacaaccagcgtaacgaactcattcaactccagcttacacttacgattgcatcctttggcatagctgccaacactttcattgctggagcttttgcgatgaacatcccgggctctctgttcaacaccgatggcagcctcttctggccatttgtcgggagcacctcatctggctgctttgtaatcaccgtcctcttgttggggtatgcctggtggaagaagttgctgggtccttgaacatgaagcaagatggcagagagccttgtcatgcttgcagaaaggaagaaggcgtcctatcctaaggatattagagaaccgtggggatagcatgaaaacctgtatataacatctcaacagtgttcataagatgagtacgtataatatatcattagcataaacgagatgatgtgatgatcgatatacttccttgttaacatcattagctggcaactgaaaaatgttgccatgaaactatattatccagcagcggctggctttgtgtacaatttgcttttctttctgttttggaggcaccatcttctgtgcttcagtttttggtcaattggcaggtgatggttgtttagccactatagccgcatctcgtgcccagtctcactgatcgttcttctctctcacctgacgaattgtaaactctcatgatgagttggttgctgagttgagccctatctctctttgtttcaacagatcagctcttcgaatatttttgtgagcgcgttggttgctcagttgagccctatctgtttttgttgtc

SEQ ID NO: 14045 - DNA, 646 bp, Zea Mays
aggtcgcagtggcgcagtgagtgcactagtacgctacgcacctttccttcgtgtaataactccagctacttcctgtctagtgtctccgtcgaccgtcgctgccagccagccacagcaagctccgcacgaccgccggtccgccgcctaccagagcgagctcatctctcagccgcgccggggggcctcctcgtcacgccggcgcagcccgcgcttcgttccaccgtagtttgcccggccgtgctggggcaaaaaaaggtccgggcccacgtgttcccagacggagcgagaggacgtcgatcggtcaggccatcagggaccagaccagacaaagccaaaggggccgcggatcggtaggcggccggcgcggatcggaggaagaagggaggaggaggccatccagttggagtacttggagaggtagcaggacgacgatgcttggaggccgtcccctcttcgtgctcttcggctcctccatcgtgcagtacagcttcagcaacggcggatggggcgccgcgcttgccgacatttacgcccgcaaggctgatgtcctgctaagaggatatattggctggaacacaaggcgggctgttcaagtgatggacaaagtgttccctaagtttaagcttttgggttgaactggtgtcat

SEQ ID NO: 14046 - DNA, 369 bp, Zea Mays
tctcaccgggagcgaaggtggggacgaggtcggacacggtgttgggcgaatcgctggcgttgaagtccctccggtgagaaactgtgtagcctccggtccacaatcccaccaggcaaggccatgacagacatcctggtggccttatttatccgcacggcccatccccgagggatctacatcgacgagccagagtcttccccatggcgaacatcattctcacacttccacccatggcggtcgggtatgggatgactcgaattcgggtgccagctcgatggaaggaggggagggggtacagagacggcttttaatagggcagaggagcgcccaggttgttgcgaggcgtgcaccacccgcggaatccgcgcg

SEQ ID NO: 14047 - DNA, 487 bp, Zea Mays
tgaggaaatacaagaccataatattggtgctagcataccttctgatatcgtcgtcgtcgtccgcaaccgctcgagtgagcgacctgatcgacaactgggggagcgaccctttcccgacgatggcgaacggctccatcgccatatccttcatggcgttcgcggtgttcggcatctgctccctcatctccgcgtacaacctgttccgccgagacatgtagccgccagccgctctcgtcaacctcttgttgcccttccattgtatttgtggacacgagttttcggcgcggacttcacattgtgctgtacgtgtgtgtatatgtgtgtgtgtgatgggaactctgaactgctagcaaataatatatctctacacggtgaagggcagctcacttgtatggtgaaccgaatgtgggaaaaagaagttctagtggctctgaatcgaagtagttttgctgcatggcatcaagaccaaaggtaatcgattggtggc

SEQ ID NO: 14048 - DNA, 1324 bp, Zea Mays
gggacatgcacatcaactgagcattagtgttgcaaaagcaccataaatcctgaaaaggcccgggaggagtttcggacagtaagtcaaaaaaatggaggaacaggagtaaaagatttcatggatagcatgggccttggggtgcttgttgagcagcttggagagttaaaattgggggaattgttggacacaccaccacctggcttggatgaagcaattgcaatttctaaggttatgcaattccttgaagcacaagaatacagcatgtttagtcgcattgtatttgacactgcccctacgggccatacactccggttattatccttgccagatttcttggatgcgtccattgggaaaatcttgaagctgaggagtaagattgcttctgcaacatcagctattaaatcagtatttggacaagaggtccaacagcaggatgcagcgaacaaattagagcaactcagagaaaggatggtcaaagtaagagagcttttccgcgacacggaatcaacagagtttataatcgtgacaatcccaacggtgatggcaatcagtgagtcatcaagactgcattcttcgttgcaaaaggaaagtgttcctgtaaggagactcattgtgaaccaagttctgccaccttcaacatcggactgtaaattctgttctataaaaagaaaggatcaaacgcgtgcattggatatgatacggactgacccagagttaaaaggtttgaacattatccaagcacctcttgtggacatggagattagaggtgttccggctctcaattttttgggtgatatactgtggaagtaacttcagttatgggaaacaggatcgcttataagggtgcttaattggccaatatcactgttagcctgctgcacaattgcactgctctgcaactagcaatctgtgggctcttctggttgtttccagctaacaattgcacaataagcttaagttgtttccagctacaatacagcacaacacattctccatggtgcgttaaatctgagtagaaagcaccaaattggagggttttgctgcactcctgcactagcatttgatgacctgttactcttggcagtgatgcagattggatttagccccaaattaggctaattgaagtgaaatgctgtaatatttatccttttatcaattatccccaagattaatagcaacacttgtggccttttggttcggcgactttgtaaaactcttcgtttcttatgtgccatctcaattttgtacaagaaatgtgttttctcttctccctcactggggcagttattcaggatattttaagctttggtttagctgccttgca

SEQ ID NO: 14049 - DNA, 1480 bp, Zea Mays
caaattgggtgtctatgtatttacatgctgttataaagcaattcagtactactggctatgagcggtcagattccattgtaattgatgaggttgaactacagagacatcaacagcttgagaaattgtatacttctactcgttctgtaagggatttccagaaggacatagttagagcagctgaaggtttggtgtctattggaaacaaacatattgaagtgggaacaaaattttctgaggactgctatagatatggaagcgaaaataatgcaagcgacgaagcccttagaaaagcagcatcactatacggaggtgctttgagaaatattgagaaagagtatgaagatttcaacagaattttatcttctcagactatagacccattgagagcaatggctatgggtggacccctggaagatgctcgtggtcttgcacagcgctatagcaggatgagacatgaagctgagatcctctctactgaaattgctagaagaaaggcacgggtaagagaagctccaattgctgagcacactacaaagcttcagcaatcagaagctagaatgatagagcacaaagcaagcatggccgtgttagggaaggaagcagcagctgcacttgcagctgtcgagtctcaacagcaacgagtgacccttcagaggctggttggcacggcggaagcagaaaagttattccatctgagattagctgctatacttgatgacgttgaggcagagatgtcctctgagaagcaaaggagagaatctgcaccacctatcatatcttcacataagcgtgctgagaaagctcagtacttccttgctgaggtaatgcataatttcaatggaaccacggagaaggaactgagcttaattgttggcgattatgttgttgttcgtcagattgctcccaacggctgggcggaaggagaatgccgagggaaggctggctggtttccggctgcctatgttgagaggcgcgagaatatccccccgaataaagttttccctcaagtataagatcataagaggggtcatctgtttccactgataagcagtttggtttggcattgaggagctgcaaggctgtatctaacttctgattggtttgatgctccgtatggcgtatcttgtgcatcctatgttcttgtggtggtctagacttggaataagatatgtcggcacgtgctctgcgcctgtgcctgcgcgcacattgatgaagatgtcgctttgcatgtgtccgcagtgtgctactgcttgcggcagcgtaggtcatgttgaatgagctttcctttactgacagatttcgagtgtaaattggttcttgcacttttttttcgttagggtgtatcagtagttctgtacaatatgtttttaatgagaccattcggccatcagagctttgatctgtctcctaaccgcaggattttttttttcagaacgcttatttcacattttagctgtcagaagttgatttttttttcttt

SEQ ID NO: 14050 - DNA, 1618 bp, Zea Mays
  misc_feature (1)..(2): n is a, c, g, or t
nnattatcagttcttcttgtatcagttgcttcgaggtttgaaatacatacacacagcaaatgtattccatcgagatctcaaaccaaaaaatattctggcaaatgctgattgtaagctcaaaatatgtgattttggcctagcaagagtagctttcagtgatactccaaccgcgatcttttggacagattatgttgcaactaggtggtaccgagcaccggagctgtgtggatcatttttctcaaagtatacaccagcgatagatatatggagtattggttgtatatttgcggaactattaactggaaaaccgcttttcccggggaaaaatgtggtacatcaacttgatataattacagatctcatgggaacaccttctccagaagcaatatcgaggattcgtaatgagaaggccaggcgctacttgagtaatatgaggcggaaaaagcccataccttttacacagaagttcccaaatgcagatccacttgcattaggtttgttagagcgaatgctagcttttgagccaaaagacaggccaagtgctgaagaggctcttgctcatccttattttaagaatatagccaatgtggatagagagccttctgcacaagctgtcacaaagctcgaatttgagttcgagagacggagagtcactaaagatgacataagggaacttatatatagagaaattcttgagtatcatccaaagatgttgaaagaatttattgagggaactgagtcaagtggtttcatgtacccaagtgcagtagataattttaaaaagcagtttgcataccttgaggaacattatgccaagggatctacgggaactccacctgagaggcaacataactcattgccacggccttctgttgtctattcagacaaccaatcacaaagcacggccaatataacagaggatctttccaagtgtataatcagagaaaatgcacagaagtcacagcaatataatgcttcagttgcaaataaatttccatcccatgttcctcaaggtgctgctgcaaggcctggtaaagcagttggttcggtgctgcagtacaacctctctcaagcatctgctgctgagcaatatgagcagcgaagggttgctaggcacccagcagttgccccaaacaacatcccttctggaagctcataccccagaagaaatcagacctgcaagagcgagacaggcgacactgagaggatggacgtgaaccaagctgggcagccgaagtcctatgcagcaaacaaactacctgcaactgttgatggtcgcggcggccattggtagatctccgcgttgtgtaacacgttatcagcatctgttacttgtgctaagcgctacattattctgacaaattcagaaatgtagttctgtacagatccgtattctttccccggattcctaagtactgtagaacggtgctcgaaatcgctgggtttccacctcctgtcgctattcattcactgaaagatctgctggctggtggagatttgtcagactgaagtatactggaagctcactggcagcagcgggaactcaagcaagcagagttcttgactgacgttgtcatttgttcttcagcctgttgacactcaaaacaatgaatccggc

SEQ ID NO: 14051 - DNA, 1664 bp, Zea Mays
atcttttggttcgttctgtggaatgatcctttgtttgatcaagtacctattatcaaccatgtttggacgcatgccaaggaagagtagtaacaataccaagtattacgaggttcttggtgtgtctaagaccgcaagtcaggatgagcttaagaaagcatacagaaaagctgccataaaaaaccatcctgataagggtggagaccctgagaagtttaaagagctgtctcaagcttatgatgttcttagtgacccggagaagagggagatctatgaccagtatggagaagatgcccttaaggaaggaatgggaggaggcagcagcagtgatttccatagccctttcgacatttttgagcaactttttccgggttctagcacctttgggggtggtagctcaagaggacgcagacaaaagcgtggtgaagatgtggtgcatactatgaaggtttccttagacgatctgtacaatgggacaaccaagaaactatctttatcgcggagtgctttgtgctccaagtgcaaggggaaaggatccaagagtggggcatcaggaacatgccatggttgtcgtggtgctggaatgagaacaatcacaagacagataggccttggcatgatccaacagatgaacactgtttgccctgaatgcaaaggatcaggtgagatcataagtgacaaggacaaatgcccaagctgtaaaggaaacaaggtagtccaggagaagaaggtgttagaggttcatgtggagaaaggaatgcaacataaccaaaagattgtattccagggtcaagctgatgaagctcctgatacggttacaggagacattgtttttgtcttgcaacttaaagaccatccaaaatttaagaggatgtacgatgacttatatgttgagcacacaatctctctcaccgaagcattgtgtggcttccagtttgttcttactcatcttgatgggcgacagcttctgatcaaatctgaccccggggaggttattaaaccaggtcaacacaaggccattaacgatgaaggtatgcctcagcatggccgtcctttcatgaagggccgtctgtttgttgaattcaacgtggtgtttcccgagcctggtgcgctctcccctgcccagtgccgatcgttggagaagatccttccgccgaaaccagggagccaactgtcggacatggagctggaccagtgcgaggagaccacccttcacgatgtcaacattgaagaggagatgaggcgcaggcagcagcagaagaagcaggaagcctacgatgaagacgaggaggaggatgctcaaccaagggtgcaatgtgcccagcagtaaaatccgtgttcgttggaactgttctccaaaagtttcagcaggattttttatccatctgatcatctcgattctttttggcaaaaatataatcgttttataaactttaaactgttagttccatcctagtgtcagggaaaaaatgagagcccggaatggcatgttccttgtttgaactgcaatgcgtgattggtgttagttaagctctgctccatgttattttgttgtacccgtgaaaaaggtatcatgttcatggtgtgctactatttttgatgtgtaagaaacattgagcttgctggtagtgatgatttgtgatgcaccctggggtgctggctcaaaa

SEQ ID NO: 14052 - DNA, 2106 bp, Zea Mays
tgctttgtttcattccacggcggactgacctgttggttttgatatagagtctctctctttaacattccatgggcatgaccttattgtggattctgagttggagctgaactacgggaggcgatacggtttgcttgggatgaacggctgtgggaaatctactcttctcacagcaataggctgcagagaacttcctatccctgaacacatggacatataccatctaagccatgagattgaagcttctgacatgtccgcactgcaagctgttgttacttgtgacgaagaaagagtgaaattggaaaaggaagctgaaattttggctgcacaggatgatggtggtggtgaagctttggaacgtgtttatgagcgtctagatgcaatggatgctggaactgcagaaaagcgggctgctgaattattattcggtctgggctttaacaaacaaatgcagacaaagaaaactaaagatttctctggaggttggcgtatgaggattgctttggcaagagcactttttatgaatccaacgatccttttgcttgatgagcccacaaaccatctagatcttgaggcttgtgtctggttggaagagacactgaagaaatttgaccgcatacttgttgtcatatcacactctcaagattttctaaatggagtgtgcactaacattatccatatgcaaagcaagaagctcaagttatacactggtaactacgatcagtatgttcaaactcgctctgagcttgaagagaatcaaatgaagcagtacaaatgggagcaggaacagattgcttcaatgaaggagtacattgctcgcttcggtcatggttctgcaaagcttgctcgtcaggctcagagcaaagagaaaactcttgcaaagatggagcgaggtggtctcacagagaaggttgttagggacagagttctagtgttccggtttacagatgttggcaagcttcctccgcccgtgcttcaatttgttgaagtcaagtttgggtatacaccagataatctcatatacaagagccttgactttggtgttgatcttgactctagaatcgcattggttggtcccaacggggcagggaagagcactcttctgaagcttatgactggtgaccttgttccattagatggcatggttcggcgccacaatcacctgcgcattgcgcagtaccatcagcatctggcggagaagctggacctggacatgtcagccctggcttacatgatgaaggaataccctgggactgaagaagaaaagatgcgtgccgctgttggcaggttcggcctgtcaggaaaggcgcaggtgatgccgatgaagaatctttctgatgggcaaaggagccgcgtcatctttgcatggctggcatataggcagccgcaactgctactgcttgatgagccgacaaaccatctggatatcgagaccattgactcactggcagaggcgctgaatgagtgggatggtggtttggtcttggtgagccacgatttcaggctgatcaaccaggtcgctcaggagatctgggtgtgtgagaatcaagaggtgacaaggtgggaaggcgatatcatggatttcaaggcacacttgaagagcaaggctggtttatctgattagaatgcttttctagtaaccatgaactttttaactctgtatgatgaagtccctgttttacagtagcgaactatcaaatatactgttagggatagtttggtaactacaaatccggagggggttggaggggctagaatccccttcttattcaattttgaataagtctattctctccaatcctctccggttttctggctcccaaactaaccccttcgggattgaagggtattgaagaggaaattagttcatttccaccttaattccctcccaatcccgaaggggatttgaggttcacaaagtagcgaatgtgtcagactcctacttccctcgcaaccatactaccttgtactacctgaaatttttatttatatatatatttgaaatgttattatgtgttccgtaagctttgtaggttttgtaagtttggatttgtcaaagttactgcatattatgatcattgtgaacatacaacttaactttagtccaaa

SEQ ID NO: 14053 - DNA, 1036 bp, Zea Mays
atctgatatggaattatgattgtatatgattgcagtgcatcgtatcagaatatcctaatagttgaatatttttttaatatttaaaaaaatttagcttttcgctggcataatacatgcttaccggtccgagatgttctggatgcaatttcgatattccgatctggattggcagatcgcagttgggccggcccgacaaaacgacttaatagacctattcagtaagcccaaagagccagaccctgcgtttccttacttcctggtaaagaaagaagcgaagccaggtacttgttgttgagcgcggagagaggagaggcgcagagcatcgacgatggcgagcggcagcatgaagagggagatcagcgagacccacgacaccctccgcttcggcctcaatgccggcgtcaaggccgacctcgcgccgccgcacccgctccagtccagcatccaatcggaggccaagttctgggcggacaagaagaagtttgggacagaggccatctacggatccgccttgaacatccgcaaggatctcgatgcccaaatcctctcaaggttccaaaggccccctggtgctttgccatcatctctgcttggatatgaggcactgacaggttccctagatgattttggttttgaagattatcttaacatgcctcaagattctgaaggtttccgtcaacctgacatgcaccacggaatggaggttcgccttggtttgtccaagggacctatctgccctagcttcagttgaggcagtgaatgtagttctgcggttctgccgcacgttgatgcaccttagtccagtacactcgggtcaataaaagaccacattaggatggtgaaacggcttagtggaagcattgactggggtgcaggtcggcgcgagcccggctcttatgggtgtaggaaccaatcacgccgattgtgaagcatcgcagttgagcttcaggatctctgcagctgcaggtggcttcttccgtactcgaattagagatgggtccgtaggcttcaatcgaagttacaatcagggaagcga

SEQ ID NO: 14054 - DNA, 264 bp, Zea Mays
ccggagcccggcggcacgggtgactcgttcgcggtctgttttgtttaagggtcacggcaatgatccttccgcaggttcacctacggaaaccttgttacgacttctccttcctctaaatgataaggttcaatggacttctcgcgacgtcgggggcggcgaaccgcccccgtcgccgcgatccgaacacttcaccggaccattcaatcggtaggagcgacgggcggggtgtacaaagggcagggacgtagtcaacgcgagctgatg

SEQ ID NO: 14055 - DNA, 1748 bp, Zea Mays
tacatactcttcacatgctcccatgttcttgtaagaaattctggaacctctttcacttgcagcctatgcgtgatcagaagggtgatgttcaatacttcattggggttcaattggatggaactgagcgtgttcgagaggctgctgcaaaagatggtgccatactggttaagaaaactgcagacaatattgatgaggctgcaaaggagcttccggatgctaatttgagacctgaggatctatgggctaatcactcaaaaccagtcttgccaaagccacatatgaaggatactgcatcgtggagagccatccaaaaggttcttgagaacggtgaaagcattgatttgaaacatttcagaccagtaaggcctttaggatctggtgatactggcagtgtccacttggtggagttgcttggcacaggtgaatactttgccatgaaagctatggataaaagtgtcatgcttaaccgaaacaaggtccatagagctaccgctgaacgacaaatccttgatatgttggaccacccattccttccgacattgtatgcatcatttcagacaaagacacatatatgtcttattgttgactattgtgctggtggggaactctttatgctccttgataggcaacctatgaaggttctgaaggaggatgcggtcaggttctatgctgcagaagtggtcacagcacttgaatacctacattgccaaggtataatctacagagacttaaagccagagaacattttacttcatagagatgggcacatttcattgacagactttgatttgtcttgcttgacatcctgccgaccacaagtgtttcttccacacgatattgataagaagaaaaagaggaggaagagcaggagtaatcccatattttttgctgaaccaatgcgagcatcaaattcttttgttggtacagaggagtacattgcaccggagattattaccggagctggccatacgagtgctgtagattggtgggcgctaggaattcttctatatgagatgttatatggttatacaccgttcagagggaaaacaagacaaaggacatttgctaatattctgcacaaggatatcagatttcctgcgagcatacaggtgagcctggcggcaaggcagctgatataccggttgttacaccgagaccctgcaaataggctaggttcctatgagggcgctatggagatcaaacaacaccccttctttcgtggcataaactgggctctagttcgtgccgccacgcccccagagctggaggctcccctccaggatacattggaggccacactgcctcctcctgcagctgatggggctcacaccgatatgttctgatcatacattggtccatgatgctacatgttaatttgcttaaaggaagaaaaaatattagatgatgaagatgcatgactttggcatagatgagaacaataatgtatgttaaggactaattatcttgatccatctatgcatgctcacaattagaataagattggatgtgtatattgtttctgtggttgcaatatacgcacgagtctatgaaaggacctatggatagcttgaggggatgacagacactaggcatgttgattagtactccctccgtttcgttttacaagtcgtttccaacagcttcgtgctgattaaggaatctatgaatcaatgattctgccctcccacaagcctcggcttaggccttggcatttcgtccaaccttatccggtaaacacctgctgtaag

SEQ ID NO: 14056 - DNA, 1353 bp, Zea Mays
aacacaaggcaaaaaagatatccatctcccctccgttctcaccaccgacagccggacacgcctcgtctcgtccccgctcccataaacgcagaggctcacgcagacgcctcgctcccgtgccaacgagccaagcccaaacccaccaccaattcaaccgcgacccagcccaccgccccgcacgccattcccacctcctcccccctcaccactcagatctccccgcgcgcccgcgcgcgagctcgttcgtgcgcggccgccggcgttggcgacgacgaccgaggagccatggctgccaagggcggcgccacgccgtcccccggcggcacggggcccgcggcggggaacggccgcctcttcacggtggggctagtcacggcctggtactcctccaacatcggcgtgctcctgctcaacaagtacctcctcagcaactacggcttcaagtaccccatcttcctcaccatgtgccacatgtccgcctgcgccctgctctcctacgccgccatcgcctggctgcgcgtcgtgcccatgcagctcgtgcgctcccgcgtccagctcgccaagatcgccgcgctcagcctcgtcttctgcggctccgtcgtctccgggaacgtctcgctgcgctacctccccgtctccttcaaccaggccgtcggcgccaccacgcccttctttaccgccgtcttcgcgtacatcatgaccgtcaagcgcgagtcgtggatcacctacctcaccctcgtgcccgtcgttactggagtcatcatcgccagcggcggcgagcctagctttcatctgtttggattcatcatgtgcataggagcaactgcagcaagggcgttgaagacagtactgcaaggaattcttctgtcttctgatggggagaagcttaattctatgaatctgttattgtacatggctccaattgctgttattttcttgcttcctgcaactatctttatggaggataatgttgttggcatcacaattcagcttgcaaagaaggatttcacgattgtttggttgctactgttcaattcttgcttgtcatattttgtcaatttgaccaatttcttggtgaccaaacatactagcgcactgactctacaggttctcggaaatgcaaagggtgccgtggcagtcgtcatctcaatcatgatattcaggaatcctgtgtccataacaggaatgctcggttacactctcacagtttttggcgtcattctttacagtgaatccaaaaagcgcagcaacaagccgtgaccaccctagaagacagccggacttcattgctaaaagagaaacggtcgagtttctcagcacatggagaaggtcggagtgcaaacgtgggacagc

SEQ ID NO: 14057 - DNA, 1605 bp, Zea Mays
aactcaatacagaaaccctggtctgaaagccctcactccaaatctcgcgcactgtcagctgacgccaccgcctgcgccagccctcgccaagccgagcacggctgccatcggtctcgttcggccatgcgccgcgcggccactccccacctaccctagcccacggcgcggcgccggcgcgtgcagcggcgccgcacagccgatcctcgcgccccgcggcctctgcctctccgcccgcgccagcctactgccggactcgccgctggaggaggagtaccggagatgcagggccggccggcacgtggccgcggccgggaaggtggcggcggctgatggggccgtagaggaagcggggggagggctcgtcaagacgctgcagctggggtcgctcttcgggctctggtacctcttcaacatctacttcaacatctacaacaagcaggttctgaaggttctgccataccctataaacatcaccacagtgcagtttgccgttggaagtgccattgctttgtttatgtggatcaccggtatccttaaaaggccaaagatttctggtgcccagctttttgctatccttcctctagctatcgttcataccatgggcaatcttttcacaaacatgagccttggaaaggttgcggtgtcatttacacatactatcaaggccatggaacctttcttctcagttctcctttcagcaattttccttggtgagttgcctacgccttgggttgtgttgtctcttcttccgatcgttggtggtgtggcattggcatcccttactgaggcctcctttaactgggctggattttggagtgcaatggcttcaaatgtaaccttccagtcaaggaatgtgctaagcaagaaacttatggtgaagaaagaggaatctctcgacaacattaatctattttcgataattacagtcatgtcattcttcctgttggccccggtaaccttacttacagaaggtgttaaagttagtccagcagttttgcagtctgctggtttgaacttgaaacagatatacacaaggtcattgattgctgcatgctgcttccatgcataccaacaggtgtcatacatgatcctcgccagggtatccccagtcacacattcagtgggcaattgcgtcaagcgtgtggtggtcattgtgacctcggttctgttcttcaggacccctgtttctcccatcaactcactcggtaccgggatcgctcttgctggagttttcctatactcgcaattgaagaggcttaagcccaagcccaaggctgcttgatcatagacctttgcaggtccatccaatagaacttttgaagttatgctatgccattggaatgattagtgagtgccgtagttagaatgatgtttaaagaagagctaccacttcagcagataatttgtgacttgcttgcattttttggacggatttgttcgtgtattaataattttgcagtgacgatacttctgttgtgctgtttataatcttctgaaactgaactgagttgttgcattggactatcttcaatcgtgacactaatttaatagagtagacacgaaaaaaaatactttggtggaaaggtaatatttggaattatgttt

SEQ ID NO: 14058 - DNA, 660 bp, Zea Mays
ctgtttgaaagttgttccttctgggattaaaagacattccacgagctacagaggatattaagcaaaactaatgggaaggtcattggtgatgtaatgacctcttcacctttagcggtgcgtataaatactaatcttgatgctgctacaaggttgctacttgaaactaaataccggagactacctgtagttgatagcatggggaaattagttgggatgattacaaggggaaatgtcgtcagtgctgccctcaaaataaagaagaaaactgaagaaggtgcttgaactagactgctcgtcactgcttgcttggggttaatcatgcagccatttggcattgaattcattgaagcattgattggtgatgttcaaagtgtagctacagaattttgttctcaatactaggtagcatactagtgtagcagtgtgtaggttcatattcactgtttttcatcgtatccatgaacatttttattgatttgcataatggaatcaagagcttgtgatacgataaaaaccttgaattgatggaaacgatgacttgccctaaactattagagggtaaactattagggggtgtttggttcgaggaatcactccgttcaaaatgagatggtgcattatagatccattcctcaaaattggtggatgacctcattcctt

SEQ ID NO: 14059 - DNA, 76 bp, Zea Mays
ctgagattgatagccttcgtgagactatgctaaaggaaacccatgactcggattattctattcatactgggagcac

SEQ ID NO: 14060 - DNA, 372 bp, Zea Mays
agatagttgtttaaaagtcaaaatccttgctggtggccgagggctgggaactttcaaaaagcggactgcaaggtggtgtccatattgttaaggctgaggaagctgaattgattgcaagtaaaatgttaggccagattctgataacgaaacaaactggtccagagggaaagattgtgagcaaggtctacttgtgtgagaaactatctcttactaatgagatgtactttgccatcacccttgataggaaaactgctggtccgctcattattgcttgcagcaagggaggaaaacactatagttgacctcaatgttcaaaggatggccagggttgcaggctgtagtttctttttaattgtttgcatgtatgcagtg

SEQ ID NO: 14061 - DNA, 841 bp, Zea Mays
gtctttctcatgcgctcaaacagagtcgttgtctacctcggtcattcctcattcgcgaaaagaaaaacacaaggcgaccgcagagggcaggacaggacagagacgccgaggctaggcagtccatctgttggggtggccagtggggatctcgccggccgggaggtctggggggcgggggctgccaaacttcgccatattggtgaatcactgaatccgcccctgccagcaaccgttctgacgtggcggggtggggcaggatccaaatggcggcggcaatagaggaactgcggctcctgggatccatccctgtactggaaggtccgggagaggtcgacggcgtggtgggtgaggaagggcgaccgcgaggcggcggcgacgacgaggagatcctgcgattcatggactcggtggacagctacctgctcctcatggactccctatcctccgctcttcgtcagggctggcttgacctggcaagtgctcgccattctatgggcacatcacgcgtttcgagtacactgtttgatcacaaggagcagtctgctgccactaagcttcaagttgttgatcatgatggcctgaaatcatcagagtcaataccacactttgctctatcaaagtggtctttgcaagaagaatgtcactccacctatgatctcagtgagagagattttactgagccaaagatgaggcatcgaggatcagttactaccccagaaaagggaaaccatgaaagtgcaaacaccacaacactgtctacaggtgctgatgctagcaatcgtgttttatgtgcttgagttaccagtggctgaaatttgccccttgatatgcttgatccaag

SEQ ID NO: 14062 - DNA, 2591 bp, Zea Mays
cgattcgttcagcttgctcccaacaaattcgttggaggacaggggaggggcggggtcgtccgccgctggttctgtagtcagccaggtatcagcgtttgaggctaaaaaatggagcactgtacagcttttatatgtacttcagcacagtggcctcactcaataacgaccactcgacgagtggcataccatagatctgcaaattcaagtttctcagcaccccaaaggagaaggcggtcaacactctatgtcatgaatgccgcatcaaccagtgctccaatttcacctcaaaacataacccaacttccacggacgaacagcacagttatcaaaagtatatccagcgacaaacccagcagtgcaatggagcaacttgatattgaacgtggtgtctgtattccgttccgaaagtacactcctgaaatggtcaggaaaaaagtattggattcaagaggttccatactgtcccttgcgagccggggagtggagataatttggaaacttggattttactggtcatctcttgtgtatgactttttggttggacaggatgaagaaattgttccatatcgtgcccggcagctccgtaatcttttatgtgatctgggcccatctttcataaaagcaggacaggttctagccaacaggcctgacattattcgagaggattatatgaatgaactttgcatcttgcaagatgatgtccctccattccctaaccaggtggctttttccataatcgaggaggagcttggccagcctatagagagattgttcagcaaaatttcatcagagacaatagcagctgctagtttgggccaagtttaccgagccacacttagagaaactggcgaggatgtcgctattaaggttcagagaccagggattgaaccaataatataccgagatctattcttgttccgcactttggcttcatttttgaatgggattagtcttcagaaactagggtgcaatgcggagcttattgttgatgaatttggcgaaaaacttttggaagaacttgattacactcttgaagctacaaatattgaggacttcctagaaaattttaaggatgatccaactgtcaagatacctcaagtgtataagcagctttcaggttcccgtgttctggtgatggagtggatagatggaattagatgctataaaagaagctggaatcgatatggaaggttttctcacggttggagtgagtgctgctttgcgtcagttacttgaatttggtcttttccatggagatccacatcctggaaatatttttgcaatgcgtgatggtcgtattgcttatgtcgacttcggaaatgtggccgttcttagccagcaaaacaaacaaatcctaatagacgctgttgttcatgctgttaacgaagactatgctgaaatggcaaatgacttcacaaggttgggtttccttgctagtggaacagatgtagccccaattattccagctctggaatctatttggcaaaactcagcaggaaaaggcttggcggacttcaatttccggagtgtgactgggaagttcaatcagcttgtctacaactttccaatccgtattccagaaaggttttctttggttattcgttcattgttgacacaagaaggaatctgctttacactaaagcctgattttaagtttcttgaggttgcctatccatatgtagcaaagcgtctgttgacagatccaaaccctgctcttcgtgaacgcctgattcaggtgctattcaaggatggggcattccagtggaaacgactagaaaaccttatagttcttgccaaggagaatgtgtccaagatgagtagcaaccccgcactgaaaaagaatagtttgcaagctgtaagaaatcgacagttggagagcaaacttgatctcactgaaacaataaaagatggagcacggatgttccttatcgatgctggtatcaggagacaacttatactggctttcaccgaagactccagattgcacgtagaagagcttattgatgtatacagactggttgaagatcaaatagatatgccttcagttgccgtcgaggttcttcaagatttaccatctgttgcgcgtgatttcatgctttcctggagtgattccatcctgtcagatcgccagtactaacgatcttttacaactagaagagaaagcaagcagagtgaatagggccctgcatggttatggtatctcgatataatctatacaagaaaaatggctagacaagaattcctcctcgctgtatacagtttctttttcctttgatttttgtatagcaaaatatgcaatgcgcagttaaattttttcgttttgccttgatcttgtcgatttctcagcacaagccatttgtttagtatagcgaatgggatcttttatgtaaatgagctcgtgattggaatgtaatagaaatagatgtatacagctagcattcaaatcaaatatatgcgcaagcatcaaaggcgtctgaagtgtgtttatcaatggcacatgattgtaccgaggaaatagttacttcttcggaacaaaacatttgtttaccttttctccactattgcattttatcaatggcactgtttttttc

SEQ ID NO: 14063 - DNA, 2763 bp, Zea Mays
aaaaaaatcccgctttccaaacaggggctgccagaaagcttaccatcctgcttgcgtggggaaagatagcggcttcctcaattcagatgaagaattcatctgtgaatggcatacttgctttatttgtaaagggcgttcacgttattattgcttttgctgtccgtggcaagccttttgtcaaaattgcgtgaaacaagcagaattcgtcccagtcttgaggaagacaaagggattctgcaccaactgtttaaggatggcaatcatgattgagaagaatgttgatgttgactccgatggggagagggttgatttcaatgacagggcaacttatgaatttttattcaaggagtattgggaggagatagttaaaggcaaggagagcatgactctggataagcttgaaaaagcatatgcttttctgaaagaaaaactaaactgcaaacaagatctagatttagaaaaggttcatgatgaagaacacagttcagatgatgattttgtgggcaatagtgatgacgacgatgacaacaagccatcttccacaaccaaatttaatggaacatcgaatacaatgaaattcttcctgagggaagataggccaatgaagaatggctatgtgggctggggttcaaaagagctcatggagttcctttcctctataggcaaagatacattgaattccctagatcaacatggtgctactgaagttgtgaaggtgtacattcaacaaaaaggtctcttagcaagagataagaaaaaacttgtcatatgtgatgacaagctcaagattttgtttaggagatcaaaagtgaggtacaacaggatatatagcttgttaggtaagcatattgctgtgaatatgacatcagaggatgaaacttttgctaactctgatgataacaatgaaacatttgtgagaaagaaagctcgtattgggaactacagttccagtactccaaagtgtactccagaaataaacaagagatgttttgctgctcttgttcgccataacattgatttaatctacttgaagaaatctttggttgtggatctactaagggagccggatacatttggcagcaaagttattggctgttttgtgagaataaagattgatctcaacgattatagtttctacatgcataaaaaggtgcaccaacatagaaagttgtatcagcttggactagtaacaggcaccagtaaatcccctgaagaatacaagataaatgatgtatcaacagatattcttttatgtatttccagcatacctgacatcaaaatttcaagtttgtcagatgaagaatacgaagaggaagaatgtcaagaccttcggctgctggccaagaatgaatcctttaaaaggcctactgttggggatctagaggagaaagcaagaagtttacgtagggagatagtgaatcattggatcagtaaagaactccagaggctagaaagattaattgacagggcgagtgagaaaggttggcgcaaggaaaagtttgaataccttgataagaaacaactcttgcgcaagccatctgaacaacaacgtttacttgaagaggtgcctcaagttattccagagacagaagataataaagatactgaatttcaagttacaggacaagacaaacctattcaaaagagtactgtcgctttacaaggtaccaatggagagagcattgtttctttgaaaaaaggctcagaagaaaaatgtacatatgtgacaagggcttcttttttgaagagccacacagggaaaaaatccaaaggtactgatggggagagagatctttccttggaaagtttatcggaagaaaaacctgaagttaataaggcccacaccgatggtggtacagctgtaatacacaatcaaaatcggagcactacagctgctattgctgcgctaccaaagtatttgcatcgccatgctgccactgaagccaataatgctggtgatatttcatctgttcaggagctggatggtgaaggtgttaaagctagcacggatgttgatacaactggaacagatgtccagcacgggagcattgaagctactaaagccaacgctgctggtgatgcacctggagcattttttcaaaagcagtgtgctaaagctgctgatgttattaccattgacgacgatgacgaggacaacagtcatcgttgttataaagaagaacaaacagcagtagttgatcttgaagctgattatgctggggataaccatcccgtgcagcttgaggcaaatagtcgaggccataaacacgtgaaggtgaaggagcgcatttggtattacattgatcctcagggtgatgagcaagggccatttacaatgcagcatctgagcatctggtggagcaatggcttcttccccggcgacttcagggtctggagaacaggccaaactagtaatgacgccatcttgctcgtggacgcactgcagatgactaggtaggctagttaggagcctcgtagaagactagatgtatttatgtatcgcggaaaaagcgggggggcttcgaggcagatatatgtgttctgctggggtgtacatccttctgtgttatatgatatgatgatgacatcctatccccaccatcacctcacccaccaatcaaaaacatcttgccaaacaaaacaatggttgtttgatggcaaagaggatttgttgggatgaaatatttgtggactattcagtatccctgtgctgtgacaatgctactgaaaatctggttctttggcatgttaggctgtttaacg

SEQ ID NO: 14064 - DNA, 929 bp, Zea Mays
ccaggagaagaaaaatgaagaacaagctgggtctgaaagtgatgatgaagggaatagcagaccttcctttttgtctgtgaaaaagactgctggttccttggacaaggaactagctgcaagtggatataccaggaaagagcaagtggagatggacaagtacattgaggaagatgctgaaagacatgattccagctcagatgatgatgacgacgacgacgacaatgacaaggttggtgatgctgtgtctttggtttccttgaagatagaccaggacgattctgctgagcctgattgtaatcttgcctcaagggattcagatgtgcctggaactttttctgaagagaatgaaacaagctgtagcagtgagaagagattggaaagtccctcgggtgacaatggagaggctatgaaaccgcttgaatctgagggcaagacgctttcccagaaagacgacaacaatgatgatgactcatcagaggatgctgatgaagaagaagaagatgccgagctcacgaaacaattgaacaagcaaaggaaaaaggcaatagcagctgccagtggtcggagaaggccagtgtcgtccaggaacgcctgcaaggacaagggtaagggcaccatgaactccaaaatccagaggcaggcgtgccagtggtgatggtcactcgaatgtctgcagtgcctctttcgacaatcgtaaagtagaccaagagtaggattttccatgagggtagaaccgagggatccctgtactagaatcaactctggttttattcttttatcacatgtcgtatacctttttgtacacggttatggtgagatcatttgagttatgcttgtgtttataccaactgaatagctgagcgtactgccttcttcaagagcccgtactgctgccaatgccattgttcttgagcgctttccaatataat

SEQ ID NO: 14065 - DNA, 236 bp, Zea Mays
ttgggctggccattccctagtcctccctccaccagagaacccgcagcgcccgccatggccgtctccgattccctcgcgcatccagggctggcgatcgtggtcatgggagtcagcggctgcggcaaatcaaccgtcgcggcaatgctcgccgaagccctgggctgcagcttcatcgaagcagacgactaccattccgaggcaaacaaaggcatccgctctcaactcgtgcgcaaacc

SEQ ID NO: 14066 - DNA, 718 bp, Zea Mays
gaaaaaggacaatggctctctgtatctcatccttatcctttccccacgattccttctctcctctcttgcgccgccgctggcccagcgcggccgccgtgctccttctccactcgtgcttcccaagctgcttcgccggaagcaatgcgagggccctgccccggtggaggcgtctcggcgtcttttgccccgagcttcaacggctcccgcgccatgatctgtaaattgcacgagacggatccgcatttcattcatccaaacagccaaaacggggccgttccgcgcaggcgacagggctacgggaggaatttgctatgctagccaggcggttgaattgctgcccactttgtaccctgaaatcgtggtccgagacgcacggctcgaggactgctgggaagtggctgacactcactgcagctcgttctttcctggttacaagttcccgttggaccttgttctccggattgatcgttacattgctctcctctctggattttcagttccacccggctgcatgaggacttgccttgtggccgtcaattctaattctgtaaatagtagtttcaacatcgagtgtggagatgctacagatgccaactttgagaaatacaatctcagtagaggctccgtagctggcattcttacacttgatacagtggcagactatcttccgagaaggggacccctgaagcagagaaggcacccccccctctccatccct

SEQ ID NO: 14067 - DNA, 1499 bp, Zea Mays
gttgagttttgtgggagaaaatagtgaaaacggttgagggaagttgaagcaaaagtctaagcaaaaatgttttacgggggatatgcttaccatggcaactcgtttgagcaaacataccgttgttatccagcatcgttttttgataagccacacctggaaggcggtgataaagtaataatgccaccttctgcccttgatcgtcttgcttccttgcacatcgagtaccctatgctatttgagctgcacaatgatgcaacccagcggatttcacactgtggtgttttggagtttgttgcagaagaaggcatgatcatcatgccctattggatgatgcaaaacatgctgcttcaagagggtgacactgtccatgtaaaaaatgcgactcttcccaagggcacatatgtgaaattgcaacctcacacaactgattttctggatatttcaaacccgaaagccatcttggaaaaaactttaagaaatttctcctgcttaaccacgggagacagcatcatggtagcctacaacaacaaacaatattatattgatattgttgaaacaaagcctgcttctgcggttagcattattgagacagactgtgaagtggactttgcgcctcctcttgattataaagaacctgagaaaccacgacaaccaacagttcctgcaagcaaggcacctgctgaagatggcaacactgcagtggaggatgaaccaaaattcaaaccatttactggttttggaaagcggttggatggaaaagcctcaaaactgcaagcatcagaggttccttccactgcactttctgcaccttcagattcaaacaaaagagcaaatcagcaaatctcagcacccgcagcttcaggagctagcaattacagtcgacagaaaactgggaaacttgtttttggttcaagtgcaagcaacaataaggaaccacaaaaggctcctgctaaagaggagcaacccgcaaagaaggacgacgagctgaggttccaagcgttcagcgggaagagctactcattgaaacgttagctgcttcagttaaccttcaaattcgccgctactctttcgtttcgtgcatggtgggtgttctggcacctggtcaccaccatgtagatatgaattgaagtatgtatatgcttatcttgatggaaacatgacagtctgtttatttaagcccaaaagtttaaaacagcgctattgttcttacccagtgtgtgttttggaatctgctcctgttaattttcgggccatggtttcggattagtagaccaaagcaggatactgaacgtgtcagcaatcattattagcggcagacgagatgtgatgatcgttgggccctgggagtttggtcatgtaccaatattatagaccgtactccaagtctccaatactgattgctgaatattgaacgaggagcaagtaaacaagctccttcaggtctcagttgccattcaaaaaagttgcaccggctttacaacgcagcataggtgactcgt

SEQ ID NO: 14068 - DNA, 565 bp, Zea Mays
ctctagataccataagttacatgacaaagctctgccaggacaaacggtaggttgctccgtatggttgatgggttgaacttcaaggatttcgttgcgtttctttctacattcagtgcaaaagccagccttcgtcagaagatcgagtttatattcaaggtttatgacatcgatggcaagggaaaaattaccttcaaggatctgctagaggttttacgggacctaacagggtcattcatgtccgaggaacaaagagagcaagtggtaactgaagttctggaagaagcagggtacacgagggattacgcattctcgcttgaagattttatccagatcatcgaccatcctggccttaagatggaggtggaagtgccaatcgactagtgaaatgtggaaaacaagcttccggttttgtctgcagaacatggttagtgtcgtgtagcagggcaatatgaccgttcactttcgtcatcttctttgtttccggtccacttgcctaaacttttgtaacctttgttgacttggccttttcgaatatatcaaaaacaaaacaaattttgccctgcta

SEQ ID NO: 14069 - DNA, 1326 bp, Zea Mays
aaaagcttgtggtggtatcacaggtgcttgtatcagatatcaatataggttatgaagaaatagttaatactcaggttcttgctttcaatggccagcctgtaaaaaatttaaagaacttagcgaccatggtggaaaattgcaaggatgaatttttgaagtttgatctggagtatgaccagattgttgtcctcgagacgaaaactgcaaagtctgctacccaggacattctgacgacgcactgtataccgtctgcaatgtcggatgaccttaaggcctagacgcctagtagtgagaggtgggagcatgatgcagccctgggccatcaggtgggccaacagcttgggccacattttcggttgaattgattagcgcagcatactacctggtccgggagcaaaagaaaccccaatgtttctgtgttacatgaattaaatgttttttgaggggtttatcaaagagcagactgtctaagcttccccattatagaaggtttgagggagtaccactgtcagataacgataaactggagatgttacagcagaggtgtgaaagcgatagtagctagtaagaatccgatttttttctattcacatgattacattacaactactacatcaaattattaacggtaaaggaatcattggtaaaatatttgcatcttgtttctggacaaataagatcgcaaatatttaagggttgtgtaccaaagttatcccctcatcgcttggttgtcctcatcatgccgtaggtgttctctcgattagtatggaagagtgtagctggcttccagctcaagcgatgagggaatttggattctggccttagaccatggcaccttccactcctgctttggaagcgtctgtatccgttagcgctgagaggcacaccttgccttcactcctctttgcttccctctcgcgatatgcttgcaggttggtagtggtagctcgtccggttccaatgtcttttatttcgttcaacaactatctagatgtacaagtgccattgaccttggcgacttcgcttccgcatggtttgtttttgtcgtccgttgtgcaagattactactcgagtactaaacttgatagaatagaatcaatcgagtctctggtctctattttatgtcacacaacaatacatgtcattggtatttataaaggtcgtcgtcttcatcatttcattattttctagtgtaaaatagcactaaactgtttgcttacaagtatttttgaagctcttctcaacgaaaggaggtgtttataccatgtccttggagttttcttgaactcacacaacacattgaataacctataaacatgatcaaga

SEQ ID NO: 14070 - DNA, 1994 bp, Zea Mays
atttcctctccggtctattctctactcttcttccccagtcctccctactcagtacttacctcagcacgccactgctcgaaggcggagcgcctccaaaatccatcccaatcccaaatcctctgaattcggacgccgctcgccccacgcagatggatgcccgcccctcgattcgcccgcgctgagcatccgaacccggttcccgccgcctcggctcattccggcgctgaaagattcagctccgcgcttccggccgccggagctcgatggcggcgcgcggcggcgaggcggcggcgtttggcgcggagaccgaccgcggcgacttcgaggtgtttcgcagtggctccgcgccgcccactgtcgagggagccctgggcgccgccggggccgacggcggccttctcgtggacgacgacctccgcgccgacccggcgtaccagagctactactactccagtgcgcacctcaacccgcgcctcccaccgccgctcctgtccaaggaggactggcggtcctcgcaccaccgcctccgctccgcgggcttcggcgggatcggggacggcaggaggcagcagcagcaggcgtcggctgccgaggggactgtcggcctgcccgggatcgatcttggtcgccagaggagcttctccaccatctttcaggctatagaagttgttgatttggagctgcagactaaaatggttgcggagctggagggccatgtcatgcgctgtgtgcgtgatcaaaatgggaaccatgttatacagaaatgtatagagtgcattcctcagcatgctattgagtttattatctcgacattctatggccaagttgtaatgctatccactcatccatatggttgtcgagttattcagagggttctagagcattgtgatgatcctaaaacacagcaaataatgatggatgagattctccagtctgtttgcttgctggctcaggaccagtatggcaactatgttgttcagcatgttctggaacatggcaaaccccatgagagatcagctattattgagaagctaattggccaaattgtgcaaatgagccagcaaaaatttgcctcaaatgtcatcgagaagtgcttagtctttggaaatcctgtagaacgtcaggttctgattggtgagatgcttggatccactagcgaaagcgaacctcttgaggtaatgatgaaagaccagtttggaaactatgtggtgcagaaggtgttagaaacttgtgacgatcagcagagagagatgatcctaacaaggataaagacacacctgaacacactcaagaagtacacatatgggaagcacatagtagcacgcgtagagaagcttgttgctgctggagagaagcgccttgggcttcaaccagcatgcaccgccgcctgaagggcaaactctctagttgtacagctaacagttgctaggtttgcactcacatttttttctctctactaaaaaccctatatgaaggccccttttggcctcgccggaaaataaacactgtatgtttgcgcgaagagtgtacattaattctgtagcacaagacccatggggcggaatcaatggaggagtgatgcgtgtgagtccgaaggctgctgtaaagaggaagaagatggatggaaggagtgagaagcatgtcggttactctgccgctgtacaaattaaacttagctcttagagtgaggagaaagtaagctgttagctgtctgtctaaaaggaaaaaaaagaaggaaatggtgaggccatcagctccctcctgtggcttttcctgttgtctgtctggcctttgttgtaacataaagctgaggcgcactagcctgccttcgttttcacagttaagctgaagttattagtatcagctttcttgaactgtttggtatgtaatccaggtccctgatgtctgactgttttaattgcaatattcatcaccctgataaacttactttttgtttgttcttgttgagatgttctgttgtaaatttcttttct

SEQ ID NO: 14071 - DNA, 122 bp, Zea Mays
atcccctcgttgtgccccatccgctctcgggttacgatgtcctgtgcgccaccatccggttgggccgttgcagagtggacagttgacgccgacccgttagtgatggggggccagggttcggg

SEQ ID NO: 14072 - DNA, 1205 bp, Zea Mays
ctcggaagttttgcgtaccataacttatgcttcactagttagtgattcctgatacatatcatacagattttgatggagattatgaagggtgtaaatcaaggaacttcttcgggtccctatgacattgcacttattcaagctcagattcggaatttagcgcaagaagtcagagatttgacattgtcaaagcccattaccatactgaatggcaaatctgactcgggaggcagtttatcatcctacatactgccagcagcagcagttggagcaatgggttattgctacatgtggtggaaggggttgtctctctcagatgtcatgtttgtcacaaaacacaacatggcaaatgctgttcagagcatgtcaaagcagttggagcaagtttcatcagcactagctgcaacaaaaagacatctaactcaacggcttgagaatttggatggcaaaatggatgaacaagtagaggtctccaaagctattagaaatgaggtcaatgatgttaaagatgacctgtctcaaattggatttgatgtcgaatcaattcagaaaatggttgctggattggagggaaagatcgagttacttgagaacaaacaggacgtggctaatactggtatctggtatctctgccaagtagcaggcggtttaaaagatggaataaacaccaggtttttccaggaaaccagtgagaagctgaagctctcacattcagctcaacctgaaaacaagccagtgaaggggcttgaatttttttcggaaagcaccatggaacagaaagtagctgactccaaaccaattgcggtgacagtcgacgctgagaagcctgagaaaaccgctgctgtaatgggcaccacagtgcacaggtctatcaggttctcatatcggaaggcaggccttgctttgtgatcaaatcctctccgcttgagatgcacgtggccttcctggttgctttttcttttttggcaacaaccttcctggttgctttgtgtgatggtcagaaaacatagaagaataacctgcaactggagtgacagaatttcttttccccgcagtagacaggtgtgcgttatttggttggaattatctccagtccactatcaattttttttccttggattttgattcattttatgtttcgatttgttgccttatatactgtaaagtcattggaaagaataaataaaacacgaatgttttttgtcaaa

SEQ ID NO: 14073 - DNA, 642 bp, Zea Mays
gtcatcgagcacctcccatgtagcttcttccgcagtttgatgagcagaaggaccaggttgcagtcgagcaaattttgcgggtggtattcttggacgctgagcgcccgagcccacaaatggacaaactcaagcgccagctcgctgaagcagaagccgcgctggaggcacgcaagaagcctccggaggacaatggcacccgtattgtcggcgaaggccttgtgatcgatgaatggaaggaacgaagagagagatacctcgctcgccagcaggaagaaggcgttgattcagtgtagacacagaggaagccctgcagaccacactgggcgcgcgcgcattcctgatcaaaatggatttggagcagccaagcaacgatgaggccttgtgtaattaggatttgagcttcacgctggatgtagatgatccagccactgcctgataataataataataataatacgccctttcctaagccatgtactcgggtgttgttgtggagtgtgtggatgtgatacattccctagctgtattaaaagtgtaactgtaatatcgaaaggcacactccatcatgccacggggggcaattcttccgtccacttgctcatacgactcaccataataaatttatgtgtgattcagttgtca

SEQ ID NO: 14074 - DNA, 1254 bp, Zea Mays
ctcaggcgaaaaaatctcatttttgctggggcagacctggaaataagaccaaagaaagaatttgatactgaaagagaggcaaagaaagaagcatatgagaagtcacatcctaataagagcagtcatggtgaaggctatccaaaaggtctgattctggccttcaagctgaagaaaactgcagatgatggtgagacaggaaaaagtggtgggggcaaagtagatgacactgaccttactaagaataatggagcttccgatgctacagagaaatccagtgtagagaatgatgagaagatcactgagaataaaggcaatgtgagtgaggagcaggccgatgccgttgaggaattgaaagggctgtctgctggggaaactttacaatctgttcccaaggttgataaaagcccttcaaataaagatcaagatataatctcgagggaggatttaaaagaagaattcactaaatttggcacagtgcggtatgtggacttcagcattggggaagattctggattcattcggtttgaggatcctgcagcagctgacaaggcccgtgcatttgcagccattgcagatgaaggtggtttgactatgaaaggccacatagtcattttggaacctgtgtctggtcaagctgaaaaggattattggagtgcaattcggggcgttcaggagaaatataaagatagccgaaacaacagaggacgggactggaagaacaaccgaggcggaaagcagtttggcggtgggaagcggggtcgccacttcgactcccgtgacagggcctccaataaagctcagaaagtttagatgcaggatatagatttaatctccatatataatgaggaaaacattattttgcgcttcttcagtttgcatcgtggaattgtcatttgttttttatgtttattttctctttgtgaatgttggcctgcactttgaagagcaatctatgaaccacgaggcatgcagcatgctgataatggaaggggcttggctccctctatggttgttcaagtatattgtactattactcattagttatactaattctaaaagtcatagtaaaataacggcttagttactaaggtaatacaattttctattgtattgttctcaaattattttttattgtttaattctacatgagtaagtaaaataaatataatgtaaatcattatttttgtaaacaatatcttattttatctttagtttaaataattaatatttgtctaaaataaaaaataaaaaaaa

SEQ ID NO: 14075 - DNA, 145 bp, Zea Mays
aagcctgtctctcattcggggattctagtgccggctactctcatcggggccacttggagcaggcggcattcgctccgtactgctgctgatttggtgagcgcggggagccgcgggatgggagatctggtggaggtggcggctgtgg

SEQ ID NO: 14076 - DNA, 513 bp, Zea Mays
ggattttcgccccaggcacactctgttttctgtactctgttctctcccttgtccccatgcatacagcatacttcagcctctctctcggttctcccgggcccctcgcgtgcgctctgtctctgtcgccgtcgccgtcgccgccgccgccaacctacgccaagtgcccagatctccaccctcgggaccttcgccggcagcgaacacccaccaccagctgatatagggcatttacccttttgtgactatggcactagcggctatctataaccttttcatcattaacaaatcaggcggccttatatactacaaggactatggttcagcagggaggatggataccaatgacagtctaagattagcaagtctgtggcattcgatgcatgctatctcccagcaactctcccctacccctggctgtactggcattgatctcttacaagctcataactttgatctccattgctttcaatccctcacaggttcgtaaacttggataatttttttctcattgat

SEQ ID NO: 14077 - DNA, 1865 bp, Zea Mays
gtgatgctcgggtggtgattggcattgtcactcgggctcttctttgttctcgtcgtcgtggtcaccatagagcgcgtctgcaagcgctcccaccccaaaaccccgcggacgcaccgacgcgcgagccataatgcgccgccaaagcctcgccaccgtactgctgctcctggtggccgccgcggccctggccgcccccgccgctgggcactttgagtcctcctgccccttctacgaccacggcggccacggcgaaccacacgaacgccacgaccatggccacagctgcggcggcggcgcggaccatgagcaccaccatcaccatcaccacggccatggacacggcgagatccagcggctgctcccggaggagatggcggaggaggcggatctcgagctcgagtccttcggttacgaagaccatgaccacggccaccaccaccaccaccaccatcaccacagccacggcgacatggagacatcgcccatgggcgtgtggctgagcgcgatggggtgctcgctgctggtcagtatggcgtcccttgtctgcctcgtcctcttgccggtcatcttctttaaggggaaaccgtctaaggccatagtggattcgcttgcagtgtttggggcaggagctatgcttggagattcatttcttcatcagctgccacatgcttttggtggagggcattctcactcgcatgatcatgagggtcatgatcatgctcatgctcatgagcatgcacatgcacactcactgcaagatctatctgtgggtttgtctgtactatttggcattgtactgttttttattgtcgagaagattgtgaggtatgttgaagacaattctcaaaatggggctcatagcatgggtcatgggcaccatcatcataatcataaacggcacgattctagcgataaagccaaattgaattaccaaaagagtgatactgatggtaaagacattgatcatgctgaagaggaaccttcggttaatgataccactggaaaaataagtgatggccatgaatcagaagctactatacgcaagaggagctcatccaaagccactgatggagaagccaccaattctggaagggatcctgcccctgaaaaagcaccatcaatttcaaactctaacttagtgtttggctacctcaaccttttctcagatggtgttcataacttcactgatgggatggctctcgggagtgcctttctgctgcatggttctgttggtggctggtctaggactttatttctgcttgcacatgaacttccccaagaggtaggagattttggtatccttgtgcggtcaggcttcacggtatctaaggccctattcttcaatttcctctctgcgttggttgctcttgctggaacagcactagcattgtctttgggtaaagatccgggacattcctccctgattgagggtttcaccgccggtggtttcatttacattgctgtcgcgggagtcctaccacagatgaacgaccagaaaacaaccatcaagagctcagtagctcagctgatctccctggcaatggggatgctggtcgctctaggcatttctctggtagaataatctgaatccccatttcaccacttgcagctttaggtccaaccgagttaccccaagtcgatataatgctctagcagctccagactagaagcagggttttctgatcctctcgatatatagtaccaaaaagttttttttttttgaaattttggcatctggttatagattgcctcgcatcggtgttatttgaaggcaacccgtcgcactaactgaatactgtacaactttatggccggctggctgatgtcggctcatgacaggatcaacagcatatagtggaaaaaag

SEQ ID NO: 14078 - DNA, 490 bp, Zea Mays
ttcaatcagtgttgggcaaatttttttgaactgaatattgtgagaagtatgccaaaccagaggacgctggtatcactccggaagacaagtccagtgatgaagagcttagcgaggaggaagacgactccggtgatgaagctatacttggcaatcctgatccctagtctgagttggaagaagccagtccagctcatcaatacaatgtttattgcagaaattgcaattaaacaaaaactgaaaaacaaaaaaactttggatggcatgtaaataagtgtaccttgtatgttctccaatgttgtttccttcatttggctgatcgaaattctgattgctcttacatccccccccccccccccccccttcccgcactcccacgcgtcatggtttgcagtcgatctgtgctttggtttcggaggaatggaaaagacaaggctgttactttctgttctccattggatgttgccgtggactcaataggtgtggattgctt

SEQ ID NO: 14079 - DNA, 859 bp, Zea Mays
ccatatccgtccgttgccctttaaagtgtcccatgggcacatctaggacccggcccaaatcccccgactcctcgcttcctcccgttccgtcgccgccgcgcgcctcggagaagagatagaggcggccgctgcatcgaccccgcgccacccccgcctgcctcccccggcaccgatcgggtttgatcgatggcgtcgaagaggatcctgaaggagttgaaggacctgcagaaggacccgcccacctcctgcagcgcaggtcctgttggtgaggacatgttccattggcaagcgaccatcatggggccttcggacagcccatttgcaggtggggtattcttggtgaacattcacttcccaccggattaccctttcaagccaccaaaggtgtctttccgcaccaaggttttccacccgaacatcaacagcaacggcagcatttgccttgacattcttaaggaacagtggagtcctgctttaactatctcactgctcacggacccaaaccctgatgatcctcttgtccctgagattgctcacatgtacaagaccgacagggccaagtatgagtccaccgcacgctcctggacacagaagtatgccatgggctagaagcaaggctaaaagctggccaaactggtgaatgtgccggaccccaaatcgttatcacctaaataaccagtcaagtcgcaagtatgaatggacttttgaggaccattgtgccctgttgaactcatgtattaccttgtgaagtccgttgtgtctggtttctacctgaccgtttcgttatctgatgctgtttctttaatatctgatgctgcttcattaaccatacttctatatggtttgtggtaaagaaaaa

SEQ ID NO: 14080 - DNA, 362 bp, Zea Mays
aacatctcgccgtcatcacgtctctctttcaacttcgttcgcaagaagctcagaacagaacccatcaaaagcgaggctgcgagagagagagagagagagagagagagagagcgagagagagagagagagagagagagagagagagagagagagagagagagagagtgagtgagggaggcgccgccgcgccgacgccgagtcctttctccatcctgcatctgccgctgtttccgacaggatgtttctcacgaggacggagtacgaccgcggggtgaacaccttctctccggaggggcggctgttccaggtcgagtacgccatcgaggccatcaaggtgaacacttcttgtaggtagagggcga

SEQ ID NO: 14081 - DNA, 1403 bp, Zea Mays
aaactcccccaactgacggccacctcgaacggaaggggatcccccttaattatgagacaattattgctgaaattattttttttcggaatccaatgaggtagtatttgtgtgattgtgtccaggccctatacataagccgccatttgcagtccggacgcagccccgttcagtcccagcccaggccgacgacggcagagagcgagccgccgccgccgccgcaccctcgtgccaggttacacggtgtgaaaatgtcaggaagggctttgaaagatctcaatgtttctcagtcagcagacctggagaacggaaaagacaattctgtgaaatcctgcatcaccaagcctgtgttgaatggcaacaaatgtgccaacaaggaagaaaaggctccgtctgcttgccacgacgctgtgactaatggaaatgcggctgccattgcagatgtggagtacattgattctgaaaatctagtagatctcccagatgtcgatgcagctctaagtaccttagctaaaagattggattcaaaggactgggttatgacatgtgaagctctcaacaatgttcgtcagttggcaatgtatcacaaggaacgattgcaggagcttctggagcctctagtccctcttatcgtgaaatctgtgaagaacccaagaagtgctgtatgcaaaactgcactaatgacttgtgctgacatctttaaggcctatggtgacttaatggttcactcaatcgatccactgctagtacaactgtttctgaaggcttcacaagataagcgttttgtctgtgaagctgcagaggcagctcttatatcgatgacaagttggatctcccctttactactcttgccaagaatgctgccttacctcaagaacaagaatccacggatccgagcaaaagcatcagtgtgtttcagcaagagtgtaccacgccttgatgtggtgggaatcaaagaatatggtatggataagctcatccaaattgcggcaacccaacttagcgaccagcttcctgaatcaagggaggctgctcgcaacctggcactggaactgcaagcattctatgagaagtctcaggcctcaacttctgacgaacacgaggtcgaggcctctgcctcgccagatgctgaatcatgggaggctttctgccagtccaagctctccgcattaagtgcccaagccattcttcgtgtgacctctactactacaaaagacatgtccctgtgggtatgatgaatatggaaactaggaggaggattggtggagaaggcgccggatgtggatgctgaggtctgaggatgatggttcagctattgcctattgcgaactttctttgtgtccaggtgtcactggatgttagaaagcctcaaagccatgcgtaggggagattttgttggaggtata

SEQ ID NO: 14082 - DNA, 483 bp, Zea Mays
agaataaaggctggactatccagcatgtcgactacaaggacgcctcggagaaggaagagatcaggatccgcggatttaagttggagaagattgagcagctagaggtgaactacacggagccaggaaaccatagcttgagtgcatgaaacaaaacattcttggttgacccgactagcttcctaccgattgggaatagttcgcattgcctcccagattctgggaggccattgccagcataagttgaagctgttgtattttagttcaaaattaaactagtggatgacaaatatttaagaatggaggtagtaataaggagccaagtgcttcaccaatcattccaaattcaatattctttatgtatatacgtactatttcatagccaaacgttttctcctcacctgtgtaatcggagttgattatttatctgggatctgatgttcatgttacaattttgaattttagaattgtgtgtgtattagttat

SEQ ID NO: 14083 - DNA, 1309 bp, Zea Mays
gtgaggggtacatatggtagctttgttcagattgcaacctgccttggaattatagtatcactactcattggtacacctgtcaaagatattgatagatggtggagagtgtgtttctgggttgccgttatcccagcaactttacaagctctcggtatggagttttgtgctgagagccctcagtggctttataagtgtggaaaaataagtgaagcagagatgcaatttgaaaagcttttaggtccccttcatgtaaaatctgccatggcagaactttctagatatgaaagagtagatgatggagaaagtgtcaagtactcagagttgttctatggtcgccacttcaatgttatccggcataaattctgtgttctatttctcatcaactgtattcagaagtgtgggggtgccctctaaccttgccaacatatgcatggggatttctaatctatcaggatcaattgtagcaatgcttctaatggacaagctaggtagaaaagtgcttctttcagggagttttcttgggatggcttttgcaatggggcttcaggctgttggagcaaaccgtcagtatcttggttctgcatgtgtatatctttcagttggtggcattctgttgtttgtcttgtcattttcactaggagcaggccctgtcccaggacttcttttgcctgagattttccctaataaaatccgagctaaggctatggctctctgcatgtctgtacattggatcgtgaacttctttgttagtttgatgttcttgcgtcttctggagcaacttggtccacagcttctctacacaatattttcgtcagtctgtgtggtagcctcaatatttgtgaggcgccatgtgttggagacgaagggaaagactttacaagagatagaggtttcactcctgcaaccacaataaaggtacatatttgacgtggctggaaccttgggcaggctgtttgctgaacagaaacaagctggccctgcagaagttgattcctgaagtcatcggcaacgccctacaaatggtctcagggaagttccagatatgcgcctgcgacagctagggcggtgtttccatagagcatcatgtactgaagttatgcctgtatcgcccgccctagataggatattttcatacttgtgttgtcatctgttctatctatgagtcgtaatatcagaaaaaaaaggtactactgttttaccgttgatgagcacagttgaaaaaaggaactatcatcttcattttacatgtatgtactcagtaaccatactccgaataataacactgcatggagattccttgttagacggt

SEQ ID NO: 14084 - DNA, 907 bp, Zea Mays
atcaggctcctgtcttcctcacccacgcacgggatcctgaacgccgtgagctggggcctcctgctgcccatgggcgccaccttcgctcggtacctcaagacgttcaggtccgccgacccggcctggttctacctccacgtggcgtgccagctggccgggtacggcgtcggggtgtccggctgggccaccggcatccacctcgggaacctgtccaaggggatcacctactcgctccaccggaacatcgggatcacggtcttcgccctcggcactctgcaggtctttgcgctgttcttgaggccgaagaaggagcacaagtaccgggtgtactggaacgcgtaccaccactcggtggggtacacggtgatcgtgctgggcgtcgtcaacgtcttcaagggcatggccatcctggacgtggagcggaggtggaggacgggctacgtcgccgccgtctccgtgctggccgccgtcgccgtggcgctggaggccgtcacgtggggcgtcgtgctgcggcgccggaagcaggaggaaaagacctccaacgccggccgcttgccgctgtctatgtaatatatatatatatacctcatcgtcgtcgtcgtcgggggcgtctcactatatatctatctgatctgatctgatcttcagagtagtaggccttacgatgggttgggttagctagctagtgtgtgtatcttcattgtatggtaggtgtctctgtgtgtgtgtgtatactgcacgttcgtatactggagatgagtgagtgtgataccggccggcggcattggtctttggctgttgcctttttgtttctgttcgttcgtgaatgctgatctgatcatgcacttgcgttctgggatcatgctattttggctgctgctccatctcgcaaagaggagaaaaaaaa

SEQ ID NO: 14085 - DNA, 3618 bp, Zea Mays
ccctatccgcgtaccgccccccgggcgatcgatcgaacgcggctagcctcgccgccgacccgtcgaggcagccatggcggagatcgccgaacgggccgtcgcgggcgaggtgccggaggagccgcggccgccgcacggggaggaggacgacgaaggggaggaggagggggacgtgtgccggatctgccgtaaccatggcgacgaggatcacccactgcggtacccgtgcgcctgcagcggcagcatcaagttcgtgcaccaggactgcctcctccagtggctcgaccatagcaactcgcgccagtgcgaggtctgtaaacatgcattctccttctcacccgtgtacgctgataatgctccgacaagacttcctttccaggaactgatggttggtgttggaatgaaagcatgccatgtgtttcagttcatccttcggcttgcctttgttctctcagtttggctcatgattatcccattcataacctattggatatggcggttaacatttgtgagaagtctcagtgaagctcaaaggctgttcctcagtcacatcagcgctcagttgatccttagtgattgccttcatgggttccttctctcagctatcattgtccttatatttcttggagccacctcattacgagactacataaggcatttgcgtgaacttggtggacacgatgctgagagggatgatggtgggcgtgaaaggcatggtgctcgggctgttaggaggctagctggtcctaataatagggttcctgcagatggaaatgttgatgaattagcagaagcccaaggaatcggtgctggtgaacttctgaggagaaatgctgaaaatgttgctgctcgattagaacgacttgaggctcaggttgagcagatgcttgatggtctagatgatgcagatggtgcagaggacgttccttttgatgaacttgttggtatgcaaggccctgtcttccacttggttgagaacgcaataacagttttggccagcaatgctatattcctcattgttgtgatctttgttccattctcattgggaaggattatcctgtactatctatcctggtttttctcttcggcttctactcctatgctggcaaaagtgatgcccttcacagaaacagctatttctatagctaatgatacattaaagagcgcacttaatgttgtgaagaatttttcttctgacagtaataatgaaggtgttatcgggcatgtgattgaggttgttactcaatccttgaagataaatgccactggacttagtgtaattcaaggcactgggaagaacagtctgatgaaaggaacaacaattgcctcatcttatctttcagatctgacaactcttgctgttggatacatgttcatcttctgtcttgtgtttttgtatattggatcactggctttacttcgatatgccaggggagaacgttttaccattggaagactctacgagagttgaattctttacaatgtcacccttggcgagctcatctatccattggctagttggtattgtgtatatgcttcaaataagcatatttgtgagccttcttcgaggggtgctgcgcaatggagttctttattttctgcgggaccctgctgatccaaattacaatccatttagggatttgattgatgaccctgtgcataaacatgcccgacgagttcttttgtcagttgcagtgtatggaagtttgattgtgatgttagtcttcttacctgtaaaagtggccatgagagtagctccttcaatgtttcctctggacataaccatatttgacccattcactgagattccagttgatgttcttctgttccaaatatgcatcccattcgctattgaacatttcaagcctcgtgcaaccattaaagctcttttacatcattggttttctgtggttggttggggccttggcttaaccgatttcttactgccaaaatctgaagaaaacggtgggcaggaaaatttgaatgcaagggcagaaagaagagacagaggacatggtgggagggaaatggtcgccccacaggttgaacaactcatgatacaacatgttgccgcagaagataatggcaggggggattcaaatgaagccaatgatgtaactgaggactctgatgtagatgaccagggagactctgagtatggctttgtgcttcggatcgtgctcttgcttgtactggcatggatgacattactaatattcaatgctggaatgatagtttttcctatctcacttggccgtctggtttttgaggctgttccccgcctgccaatcacacatggcatcaagtgcaatgatctgttctcctttagcattgggtgctatattctctggagtgtggcagctgggaccagatatgcgattgattacatcacatcacgacagctggggtttttggtacaacagatctgcaagtggtgctcaattgttttgaagagctctgttctcttgtcgatatggatctttgttattcctgtgctgattggactcctttttgagctgctggtcatcgtacccatgagggtgcctattgatgagagccctgtcttcctattgtatcaggattgggctctggggttaatattcttgaaaatatggactagactggttatgttggatcagatggcacctttggttgatgaaagctggaggtcaaagtttgagagagttagagacgatggcttctcccgtttaaagggtctgtgggtcctccatgaaattataatgccgatcgtgaccaagctccttactgctctctgtgtcccatacgtccttgcaaggggcatcttcccgttgctgggttacccactcatcgtgaactcagcggtgtaccggtttgcctggcttggaagcctgatcttcagcgccctcttcttttggggcaagagatttcatgtctggttcaccaacctccacaactctatcagggatgaccgctatctgattgggcggaggctgcacaactttggcgaggactcacactcacctgagcggagtgaatctggagcaagtatagggtcagatgatcaggacagagatattgtactgcgagatcaggaagaggaagtggggttgaggatgaggcgcaataatatgcatgcaaaccaacaacctaggtttgctttataagtaggaagtagttttggacaaagagctcataaccatggtataagcttcggtctgcaggttctgcttgtgctttgtaatgggcgttgtagagtgagtttatgtgttagtgataggaaatagtctaaggactgttctacgataaagcctggagaaagctgaagtggctggtgattacaaaactggtggcaactcccattcctgtggtagtcctggctaactgtaaatatcgtttgacagagcattaccatgccaactcaatctgttgtgatcctcttgtaatgactagtgagttaaggtgaactgttgggtagatacgagatactagattattatcgcgttcactcttttttttttgggtcccatctttgtttttttagaaactgcaattgcattctgtttatatcatggagcatctagcggcttgaaatgaacaagaacaagatgcatgggcagtgggcagtattggttgtgg

SEQ ID NO: 14086 - DNA, 123 bp, Zea Mays
tgaacgcccgagcaacgtgcatggctggcttacatgtccccatgcacgctccacacatcagagtcactagcaagttttagctggcatcgtgttatcacgtcaaagcgacaagcaggaaatgat

SEQ ID NO: 14087 - DNA, 136 bp, Zea Mays
taacatggacactttggcttggatgtttaattagtacatgcacatgctttgtgtaggatgtcttcatctgagcctcaagttgatgcaaccactgagcctgagagtcaattaaagaggaaatcaagtgatataggat

SEQ ID NO: 14088 - DNA, 1586 bp, Zea Mays
gaggacacaaacatcgccaccgccgacacgctcacgaataaattccaagctgcatatggaaaacccttgctagctgccaaagattctaaatgttcagcaaaggatgctgaagctggtattcttgcaatggaggcactgcataagcaggtcatgccgtttctactgagaagaacaaaggatgaagttttatctgatcttccagagaagataatccaggatagatattgtgatctcagtctattgcagctcaaactttatgacaaattttccagctccaatgcaaaagacgagatttcaactatagtaaaagcaaatgaactggaggaatctgcacctcaaccaaaggcaactcggcatgtgtttcaggcattgcagtacctattaaaactatgcagccatcccttgcttgtaactggggagaaccccccaaatcatcttgtggatcttctgaatgaaataggtctgggatctggcagtgagcttcatgagcttcaccactcacctaagcttgttgctcttcaagaaatacttcaagaatgtggtatagggtcagaaatatctagtcctgatgcttctacagctgttgggcaacacagagttttgatttttgctcagcataaggcttttcttgacatcatagagaaggacctgtttcaatctcatatgagaagtgtcacatatttgcggctggatggctctgttgatccagagaagagatttgaaatcgttaaagcattcaattcagacccaaccattgatgtacttctgctaacaacccatgtcggtgggcttggcttgaacttgacatctgccgacacattggtgttcgtggaacatgattggaacccaatgaaggaccttcaggctatggacagagcacatcgattgggtcaaaggaaagtggtgaatgttcaccgtctcatcatgcgtggcacccttgaggagaaggtgatgtctctccagaggttcaaggtgtcagtcgccaatgctgtcatcaatgctgagaactcgagcttgaagaccatgaacactgaccagctgcttgatctgttcacatcaacccctgcttcaagaaaagcaagcgacgagcagagtaagaggaaatctggtggcaaaggcttgaagtccattcttaatggtctggatgagctttgggatcagtcgcagtatgccgatgagtatgatctgaaccagttcctggcgaagctgaacggctgagccaccaccggctggctcgtgtacagtgtataaagcaatttggggcaggttaattttgttgttgctgttgtttgatagaggaaggaaaagattagatgctaacagatataggtggtggttggggttacgatctcaatttttttggtttccatcttcctcaatttttgttttgaggagttgtatatactctgctcacctataatcaaagctgcagctcttatcagaatttcccttgattggtcatggtgactgttccatgtactttgttctgccgcggccgtagctatatggactgctgcagctgcaattcatagaaacaaaatacttcatagaaacaaaatattgtagaagccgcatttggattaaag

SEQ ID NO: 14089 - DNA, 795 bp, Zea Mays
gaatgagaagaagaatgggaggaggatactgatgagtatatgcaaaagaatcttccttctgaacttgatgacatttctggatggactgaggatttgttcactgccagaaaaagtgcaatcaatttacttggtgttatagcgctatcaaagggtccaccagttgcatctgcagcatcaaagcgtaagaaaggtgataaaaataaagggaaatctgaaatgagctcaattggggagttattggtcatcccattcctgtcaaagtttcctataccttctcatggtgaggatgcatcatcagtagcagtgcagaattatttcggtgttttgatggcatatggaggcctccaagatgacatgagttctagtatttatcagtccttaatgaagtcgttgaccatggagtatgtggaggacataacttgttatccggtttgtgcctctgcttctgttgctattgcagaactcatcgagaatagttatgttccacctaactggctcattcttctgcaagtggttctgaaaagaataagtactggagatgaaaatgagtctgctcttctgttcaagcttctgggcacaatagttgagggtggacaggaaaaagttctgtctcatattcctgaaattgtatccaacattgccagtactgtaatggagctccggctccctgtcccagatccttggcctcaggaaaacatagaatggaattcaaatttggtggcggcaaaatgtggagacttgaattcatataaagttaggcttaacattagtgcaaacagttgtattttagtttag

SEQ ID NO: 14090 - DNA, 2102 bp, Zea Mays
gtaaaaccatgatatttccttttttgatgaagaaacagtaggagatctgacaagtagacttggttcggactgccaacaagtgtctcgtgttataggcaatgaccttaacctgatttcacgcaatttacttcagggtgcaggtgcattaatttatctgctagtcttatcttggcctctcggattgtgtacaatgtttgtttgtgcaactctatcagcaattatgctagttcatggacggtttcagaaaagggcagctaaatttgcacaggagttcaccgcaaacgccaataatgttgctcaagaggtgataactttggttaggacagtgcgagtatatggaacagaaaagcaggagtttaaaaggtatgcaaactggcttgataagctgtatgatgtgagctttcggcagacagtggcttatggaggctggagcctgagcttgaactatctataccattctactcaggtcattggagtggtgattggaggcctagcaatcatgtctgggaagttaactgctgagcagttgacaaaattcacactctatgctgaatggctaattttgtccacatggtggattggggacaactggtcctccctgatgcagtctgtcggagcaagtgaaaaagtttttcgtttaatggatctccttcctagcaagcagcttagctctgaaggcctcaagttagagaagttgaaagggcaaattcagtatgctgatgtatcattttcatatccatcaagacctacggtaccaattttgggaggcttgaatttaacactgaatccaaacgaagtagttgcaattgttggtcttagtggaagtggcaagagcactataatcaatttactacttagattatacgaacctacaaatgggcaaatactaattgatggtgtcccgctcactgagcttgatatcagatggttcagggaaagaattggtttcgtcggacaggaaccacgcttattccgaatggatatcagctctaatattaaatatggttgcccaagagatgtcagtcatgaagaagtgatatgggctgcaaagcaggcctatgctcatgacttcataatggctttgcctgatggttataacaccatcgttgatgatgctcttctcagtggaggtcagaaacaacgtgttgctattgccagggcccttctgagggacccatctatcttactgcttgatgaagccactagtgcgcttgatgctgagagtgaacattatgtcaagagcgtcatcacaaaagttagtcgagattcaaaggctaaaagaactgtggtaatcatagcacacaggctatctacaattcaaacagctgatagaattattgtgatggaaaatggtaatattgtggaggatggtaaacacattgatcttattgagaagggtggtctatattcaagattagccaggcgacaaaatgacgatctcaagtagccctggatcacagaatgtggtttagtgcacgccttctttttaaatggaatggcagaagggagagtcgtctgtcattagtgtattctttgcaagaactgacctggacccaggagctcgaataagctggcattgtttttcccatgaaccagaaacggtttgtgactgatcaaaataaaccaaaacggtttcccccacgaggacgagcacattaagcatcgagagcggcagtatggagaacagacttctaagaggtccagtattgtaaaagtagcttccataacaaagtgtatatgcgtttttatcttgttatcgggaactctgaaacttatcttacactacacacggaggaaacgctccaattttgttacgagcactgtgtgccttatttcctgaattttcgtgtaaaaatgtactccctgcgtcccaaaacagttgacgttataatatttatagttaaacttgtaacttaaattattagcaacataaattattataaaaatatatttaaagatctattgaaatattttttttggttgttttaggatcgggggactatgccattcacgtagaatcgtgtttgtattttacgaagaaattggtctccttgttacgatgcactatgctttgccctggcagccccttcatccatgataac

SEQ ID NO: 14091 - DNA, 2998 bp, Zea Mays
acccccgtcctcagtcacgccgcacctaacccttcgtcagtttcagtttggcacctccgaagcttccgtccgaatctctgctgcctccttcctcggccaggcttgcgggcgatggcggcggagcagaccgccgagcagttccggggccaggcgcggctgccccacttcgcgtccccgcggcgctacgacctgcgcctcacgcccgacctccccgcctgcgtcttcactggctcggtggcggtttccatcggcgtggccgcgcccacccgcttcctcgtactcaacgcagccgagctcgacgtcgcgaccgggggcgtcagcttcgcgcctcagggctccgaccaggtgctacaacctttggaggttaccaacgtgccagaagatgagatcctgattattcgcttcaatgaggtgctttctatcggggagggaactttgacgattgcattcaaggggactttgaatgataagatgcatggattctacagaagtgtgtatgagcttaatggagagaagaaaaacatggctgtaacacagtttgaaccagctgatgcaaggcgctgcttcccttgttgggatgagcctgctttcaaggctgttttcaaaattactctagaagttccttctgagacgattgctctgtcaaatatgccagtaattgaagagaaggtactagggtccgtgtttacacacaagtcggtaagagtgcgcaggggaggtttgctctagaggttgccttgaagacattggtcctgtttaaggagtattttgctgtgccataccccctccccaaaatggacatggttgctattccagattttgcagctggagccatggagaactatggcttggttacataccgtgaaacagcattgctatttgatgagatgcactctgcagctgccaataagcaacgggttgcagttgttgtagctcatgaattagctcatcaatggtttggaaatcttgtcacaatggaatggtggacacatctgtggcttaatgagggctttgcgacttgggtgtcttacttagctgcagatcagttctttcctgaatggaatgtttggactcagtttctagaggaatctacagtaggtttcaagttggatgctcttgcaggttcacatccaattgaggtggacataaatcatgttgatgaaatagatgagatatttgatgctataagctataggaaaggagcttctgtcattcgtatgctgcaaaactatcttggggctgaggtctttcagaattctttggctgcatacatcaaaagatttgcgtattcaaatgcaaagactgaggacttatgggctgcccttgaagaggggtctggtgaaccagttagaacattaatgcattcatggaccaaacagcaaggttatcctgtcattaatgtgaaactcaaggatggaaagttccaactggagcagacacaatttctttcaagtggatctacaggagttgggcaatgggttgttcccatcacactatgttgttgttcctactcgcgccaagcgaagttcctttttcatgggaaacaagaagattttgatttgtcagcgtccgggtttacggactgccaaaagaaagatggcttctggattaaacttaatgtcaaccagactagcttctatagggtgagctatgatgaggaacttgcagcccgacttcgatatgcaattgaaaccaacaaactgggtgcagcagacagatatggcgtacttgatgatgcctatgccctctgtatggctggcaaacaaaagctagtctccttgctgcatttgatttctgtgtacaaggatgagactgagtatactgtgcttgcacacataatcacgacaagtctgcacattgccgagatgatggttattgctgctccagaggagttggttcatctgaagaagttcctaattgatttcctggagccatttgcgctgaaacttggctgggatgctaagagtgacgagggccatctgaacgctttgttaagaggtacactcttaaccgctcttgcagaacttggccatgaggctaccataaatgaagctgttcgtcgatttaatgtctttctggaagacagagagacaccactcctccctcccgatgttcgaaaggcagcatatgttgctttgatgcagacagtgagcaaatcaaacaaaactggctatgaatcactactgaggatatatagggaaaccgatctaagccaggagaaagttcgttctttggcatcatcccctgaccatgatgttgtccgtgaagtattgaatttcatattgtcacctgaggtgaggaatcaggacgcaatatttttgctaagaggggtgagttcaggggcacacgaggtagcatggcaatggctgaaggaaaactgggattacatattgggagcctactctggaactctgctcacctatttcgtcaacataactgtctcgccactggccaccgatgaacatggtgatgaggcggaggagtttttcaagagcagaaccaaggcgaacatcgcgaggactgtgaggcagagcatcgagagggtgaggatcaatgcccaatgggtcaagaacatcaaggccgaggctgacctcggcaatgttctcaagaagctggcttacaagcactgatcagagacggtccactttcatttctgtgttaatcctagtaccgagatgtaactttgttctctggaataagtggattaataaagggcactttcgtttgtgtgtcgtcctgagctgccttgtccgtagattcttacaaactgttctgtgcgaaagctaccatgatagatatgcgtcgaattgattgattctatatcctgataattgattgtgtatcgcccatgtcgcacaggagaacggtaaatttgttccaatgattgtctgactgcgagttggcttccaaacctgcacttcatcattattttagggtctgactctattactccctccgtttcgttttagttgtcgctggatagtgtaaaattaaacta

SEQ ID NO: 14092 - DNA, 1368 bp, Zea Mays
cctgcaaatatgggaaggctgcttcaaaatcgcgacctggtgactcagttggacagctctcaccactgaaccagaaaagggagatttttcaagatcttgctccgctgctttggcactcatttggcacaattgctgcgttactccaggagattatatccatttacccgtcactatcaccccccacactgtcacctggagcatcaaaccgagtttgcaatgctcttgcacttctgcagtgtgttgcatcgcaccctgagaccaggatccttttcctaaatgctcatattccattgtacctgtaccctttcctcaacactaccagcaaaacgagaccttttgagtacctaaggcttactagcttgggggtcattggtgctcttgtcaaggttgatgatactgaagtcatcagttttttgctgcaaactgaaataattcctctgtgcttgcgaaccatggagatgggtagtgagctatccaaaactgtggcaactttcatcgtccaaaagattcttctagatgatgttgggctgcgctacatttgcgccactgctgagcgtttctttgccgtaggcagtgttttagcaaacatggttgtttcacttgctgatcagccctccacaaggctgctgaagcacatcattcgttgttacctccggctgtcagataaccctagggcttgtgctgcattgcagagctgccttccagacatgctcaaagatgggaccttcaataactgccttagggatgatccagcgacaaggcgctggctccaacagctcctgcacaatgtgactggcggaggcatgggaggtgctcctcaaccaggaatggatcccatgaacatgggaatgtgatgtgcattctagttgttgcaattcactgcaataacacatcacctctcagtgaattacaactagagaagatctggccactgtccagatgaaacttagtatggtgtagcctgactttctgccggggtaaaaataggaatgttgtttggtattgccataagctaagctgtagaaacaagatcggcaggcttctgttattgtgttcttgcaccggagctcttgtgcgttgacccttcagaacctgagaacaaaggaggaaacccccgtcccgtgaagctttgtcgcagtgccgatcgatcaagatcttgaattgcttcagatgatgccataagaaagcatactgaaaagaagtgtatgccgtgtgctatattttacgagtttatgggttgcttttgtctttctagtggcgtcgtgtaacaaagtccgctgttcttaatttgttcaggtaacaattaattaatccagcaatattttttcccaggttaccaataataatataaaaatatattctataaaa

SEQ ID NO: 14093 - DNA, 198 bp, Zea Mays
tcacctgaaattttgccacagtctcaggcgtcctcaggagaccctggggagattctgcggcaagctcagctgcttccttgtattttgtctgtgcaaacagttcctggaatctttgcacaacctgcagtacaattcagaattccatgaaaacccttagaaacttgacacatataagtttgataaatcagtttgtaacct

SEQ ID NO: 14094 - DNA, 669 bp, Zea Mays
acgacatataatttggaatggagggagtaattcttcaatggaagtggctctaattatattaaagaaagatgttgcgcgtgcaggaacagagcaaacttgggcgcttatggcgacggtgatggatcctggaaggatagtggactttctgatttgtgaatcctagacgtcatgttttcgaaagagcgcatggaacctttttattcttgtccggagtcaaattgttggctgctgttcagggatatcttagttttggcagtttaggtttgggcctttttataaaatttaggcattctagtgagaacatcggttggattggatggtcaatgctgagacttttgagaccatgtgactcaaaggttgctatgatggagctgtcaaaacgtgcttcatgcggaagactgaaaagcgattgttcatgggtcatcgtagcatcttcggtcaatattttcttggattgtttggtttcgcaactactactctcagatttatggacttgaagggcttttgtatttttgtcgacatgtaagagcgcatcacataatactggatttacctgagaattcatgtgagatacatctagtttctggcacttaaaagttcaactggtgtccgtggaacccaaacccatttgagctttaccaattcttattactgttatcacgttagccg

SEQ ID NO: 14095 - DNA, 1253 bp, Zea Mays
agggcaggcagaatattacgcacgcgtgttggagtatttttaaaggatctcacgttacatgtggaataacatcaacaaagttgggggggaaatgtcgagaggcaatttttttttggcacagagaaaaaagaagttgcaataggcggagcggagagaagctttagataccttttcggccacccatcatatactctgtctgctgttcttccctataaattcgtcgacctctccatatcacagagagatagagagagagagagatagacaggagagagagagagaggggaagagagagagagagagagagagagatagatgtggtaactcaagaactgttcttatgcatgcagcagccataagcattgctactagcgtctcctgcacgtgctgtgtcgtttccagggtttcatgcggggcgaagcagctggtctctgccgcctgaacgccgccggaatctgcgaggcctccccgagctgcgtgcgtcgtcggataaggcagccggcacggcaatgccggttccgcttgctccgtacccagctcctccggcgccattcacgccgcccaatggggcccagagccagctcgtctgcaccgggtgccggaacctcctcatgtacccagctggtgcgacgtcggtctgctgcgccgtctgcagcaccgtcaccgccgtgccggctccaggaactgagatggcgcagctagtgtgcggaggatgccacaccctcctcatgtacatacgcggcgcgacgagcgtgcagtgttcttgctgccacactgtgaacctggctatggaagcaaatcaagtcgcgcatgtgaactgcgggaactgccgcatgctgctcatgtaccagtacggggctcggtccgtgaagtgcgcggtctgcagttttgtgacatcggttggaacctcacctggtgcagagcagaagcccagcagctgagctgatagtgtccctgaaagtgctgtgagaccacctatgaaaaggatgctttgagtgcacatgtatagagttcttccctgaagcgattctttcactttcttttcttttgttttcttttgttttcttttcttttttggttcctcctcaccatctccaccccacccgtccacttctgcgttccttcgatggatctcgcgagcccgcggaataaatgagagttttggatatatagctagggcttaacctcgtcgacttgtctgtaaaatcgaatgagacatatatataaacctatgttgttttccttgttaacaa

SEQ ID NO: 14096 - DNA, 1637 bp, Zea Mays
tttgttgaggtcgacataaacaacaaacagagaaaattggaaaagaggaagcttccccaaggcacttcagagtaccaggctgcttggattgttgaggacacagatgatgaagataacgactctgatgatgacaaccagactgaatctggaatggtcattgatgagcaaggtcactcagaccaaggaagtgatggttcagatatagatgcagtgtctcactttacggagaagtttgatggagaaactattggggatactgagatggcagatgaagaaaatttgacgaaagaccagatagaggcagagattaagaaaatcaaagaagctaatgctgatgatgaagaatttcctgatgaggtggagacaccattagatgtcccagcaaagaagcggtttgcaaaatacagaggactaaagtcatttaggacatcatcctgggatcctaaggaatcgttgccactggactatgcaagaatatttgcatttgataactttacaagaactcaaaagcatgtctttgctaaaattgctgagttagatggaggcatgaagaattgtgctcaagtgggatcatatgtaaggctttatgtgaaaaatgttcccactgatatagcctccaaactctgtcatccatcaagaagaatacctgtggttgtttctggtcttcttcaacatgagtccaaaatgtcagttcttcacttcagcataaagaaacacgactcttacgaagctcctatcaaatctaaggagcctttgattttcaatgttggattccgacaatttactgcaaggccactgttttcatccgacaacatcaactgcaataaacacaagatggagagatttctgcaccatggccgattttcggttgcatctgtatatgctccaatttccttccctccacttcctctaatagttttgaagaacagagatggcgagcaacctgccattgctgctgtaggttcgctaaaaagtgtggatccagaccggatcattctgaagaaaattgttctgaccgggtatccacagagagtctcgaaactgaaatcgatcgtgcggtatatgttccacaatcccgacgacgtaaaatggttcaagcctgttgagttgtggacaaaacatggtcgtcgtggccgcatcaaggagactgttggtactcatggtgccatgaaatgcttattcaatagcagcattcagcagcatgatactgtgtgcatgagcttgtacaagcgcgcgtatccaaaatggcctgaacagctctaccacgtataagattgcttgacgtttggctggatatgtaccagcaggcagaagcagaacgacgggaatgaaacagccttggagcttgcgtgccgtttagcttaaactaaatattttaggattaggaaaatgttttgttggtcgcctgagctaggaggccgaattttgtattggtccttcatatacttttgaacattctccttggacgtcctttattttagtatcaaatttaaattcaagtttaattgcacgttgagataggatattgccaacttaagctttaacatgttggcatatgtgctacacgcaatcatcggagggtcttctttatcataagaaatagtaggaggtggaatagggtcctcgctgacgaacca

SEQ ID NO: 14097 - DNA, 131 bp, Zea Mays
gatgcggttatgagtacgaccgggcgtggacggaattcggtcctccggattttaaagggccgccgggggcgcaccggacaccgcgcgttgttctttctcttccggccgctggaccctacctccggctgaac

SEQ ID NO: 14098 - DNA, 93 bp, Zea Mays
tttctaaagtttagatataagcctatctcaaattcatggggtgggggatgggaaatgattttatacagtagtagaatttgtttctactctata

SEQ ID NO: 14099 - DNA, 109 bp, Zea Mays
taatatctggtctaatacttgtaacatcagtctcaccaccaaatacggcgcacctagacagccgaattactcactccgacctacttagacggacgttcccgtgttttgc

SEQ ID NO: 14100 - DNA, 2820 bp, Zea Mays
ttctcgatatctggttgttttttgtatggttcttcaagtcaattcaagagaaaagctcttcagcattcacaggaaacctctgccattagaaccttctttacttctacgtgaggctaataggcgcagggcttttctctctgctggaaatttatctgagctttatgattcatctgatggttcaggtttagatgcaaattcaaaacttcctcccaacagatctgcttctaacttaatgacaagaacaatgtcaggtccagcaacgtccgagacttcactgccagttgatcgtcccatgaggttgtcagaaattcatgttgcagctgagcatgcactgaaacaaacgatatcagatcctgattttatgacatcactttcatcactagaagaatttgagaaaagatatatggagcttactaaaggtgcagctgacaattaccaccgatcttggtggaaaagacatggagttgttcttgatggagagatcgcagctctgttctttaagcatggaaattatgacctggctgtgaaatcctatgagaaagtttgtgctctctattctgcagaaggctgggaagagctgttggcagatgttcttcctgatcttgcagaatgccagaagattcttaatgatgaagctggttatttggcttcttgtgtaaagttactatcgctggacagtggcttgttttcatctaaagagcggcaaggtttccagtcagaagttgttcgacttgctcacagtgaaatgaaacatcttgtgcccctagatgtctcgtcactaattacatttgctggaaatgctggtccaccactagaattatgtgatggagatcctggtacactatctgtagcagtttggaatggcttcccagatgacatcacactggagtctctcagtttaaggttgtcagcttcttctagtgcagatgaaggtatcaaggcaattaaaagttcagattctcatgttctagtaccaggtagaaatatcatctcttttgacattcctcgtcaaaagcctggctcctatgtgttgggtgctctcactggacagattggcaagctgtcattcagatcacatggattttcccaagatggtccagttgaaactgatgaatttatgagctttgagaaaccgacaagacctgttttgaaggtgagaaaaccaagggctttagttgatattacacctgctgtgtcctctgctttgcttatgaatgagctccaatggattggattaatcgttaagcctatagactattctttaaaaggtggaatattgcatatcgatgctggcgctgaactgaaaattgaggagtctcagatgattgaaatagaaatttacgtaagtgatatggagtgtgctaattctgccaacagctccatcaaagctggaaaggttgaaaaggtacctattgaaaatggaaagatagaacttcctgattgggctagtgatgtgactactcttgtttggtttcctgttcgtgctattgatgacacaattgcaagaggagaatccctagtgtctcagaaacagagcgttgtagatgggatgagaatgattgctctcaagcttgagtttggagttttccgtaaccaagtgtttgaaaggaccattgcagttcattttactaacccattccatgtaagcacacgcgtcgtggacaagtgcaatgatggagctctacttctacaggtgatattgagttccggagtgaaggccacactgcatgtaaaggatgtacggttagatcttcaatctggatttgatcacttgggcaaaggagatggacggccagctttgagtttattccctctggttattgctccttcttccaaagctggaattttattcatgttacggttaagtggtacaaaggatgtggacgacgcagaaaatgcagacagcacgctgaatatcacctacgggatatctggtgacagaaaaactggagcacattctcctatacctgtcaaatctggtgattctgaagaacttgtgttcaagattgcactcagactgaagcgacctgtcctggatccatgtgtagcagttggattccttccattttcaactgactgcctgagggttgggcagttagttaatatgaggtggagggtcgaaaggctgaaaaccccggaggatgcatccatatccattgacgaaatactttatcaggttgaggcaaacccgcagaactggatggttgctgggaggaaatgtggtcacgtatcgttgtcaaatgagcaaggttcaaggatggagatcacggtgacatgtgtgccactggtgtctgggtacgtccacccaccgcagctggacctgccggaggtgggtgaggcaaacattagctgcaacccagcagggcctcacctggtgtgtgtccttcctccagccatcagcacatcctactgtataccagcgatatgattcttcctgggctgacagtttgctgccatttacacatagatgagccatagtatgtttttgccgagacgtgttttttgtgtgtagacatgtttcactggaatgtgtttcttgtaattctgttgtgccatgatcagtgtacaattctgcattgactgatggtacatgaaactggttccccagtattccgtgaaactgcaagccggatttgctgtgttcagattgtgttgttgcagactggttgcctttcgtaaatcagccagattgtatccttattaggtcgttttcatatctctgaggaatggatgattctagaatgattcttagatcgtttgtgttttactccgtccgttccaaaatatagttctttgtagtcctcttttttcgtccatgtt

SEQ ID NO: 14101 - DNA, 2885 bp, Zea Mays
tcttcaactcttcacgagttttctctgcgagtgagagactcagcacataatgtgcagctattcaagtcatcagatttggcacctgtttcttcgatctttgcctcaccacatgttaatccaacaaagggaactaaagttctgatcagggacgaatctgttcagcttcctcatgaattgcactcacctagcagtgtcagaactcggataggcacctcaggctcttttagaatgatcagatgcaaagacattgtgccagagaattgtaatatcacttgtcaactaaacgaggcatctattgattcttcagatcatacatcaagctctacaggccaattgactcaatccataaaagatgctgctggcagtatggaaagcgataaggatcaatgcgctggtggtaaaatagaccttaccatgtcccaggagtgcacaggcctagaaggtatgaaccttgatgagagtagcccagacagaatggattcatcacattctgggatagttgttcatgaaaaccagctatctgaacaaaacaatgatgaacctgcggcatataatggggtttacatgattacacaccaatcaagtagtgatatgctgactttagccgtaccatctggaacagaagcacaaccaatgaatgatacacaaaaggctgataatccctacccttgtgaatccttgttggatgttcagtcaagtggaaattgcacccaaaattctgtgcatgaaccccatctgtactggaacggggcagttgaaggggctgcagtagcttatactccccaagcacttcctggtgctttgcaaagtcagttgatgccatgtaacaagctcaatgagccaaaagattacatgcctactgagcaaaatgctttgtcacagcatttacgtggcatgcgtaggcgcagccttttcaatgaaaaggctgggcttagtaataaaggtgtagacaaagcttcagatcatcatcctgtaaattcaactacccccaaatgcaaaaccatttctggtgacaactcaaagactctaagaacccccccatgtgcattgcctggtattggcttgcacttgaatgcccttgccgcaactgcaacacctaaagagaaaatagtccctcaagacattcagtctactataaatgaatcaagtaacttgataggccctgctggatcttctccggcaccttctgagcaaaacattataaatgatgatttcactcaaacaactgatgttgcaaccgctgaagcttctagtcagggtagtcccaagaagaaaaggcataagtttgatagtggtgatggcacttcatgcaagcgttgtagttgtaagaagtccaaatgcctgaaactttactgtgagtgttttgctgctggagtctattgttctgagccttgttcgtgtatcggctgtatgaacaaccagagtcatacggaaactgttctatctacgcggcaacagattgaatctcgcaatccattagcatttgctcctaaagtaattcatacatctgagcctggtctggaactaagggacttctccaataaaactcctgcttcagctcgtcacaaaaggggatgcaattgcaagaagtcgtcatgtctaaaaaaatactgtgaatgttttcagggtggtgtgggatgctccataagttgcagatgcgagggctgtaagaatgcttttggaaaacgggagggggctgccgtgttaagcatagaggaacctaagcagggattggaagaaaaggatgtttgtgtgaaagaagagaaaagtgaaatcgagaaacagcttgttgtctaccaaactcctgatgatgctcctgctgaaaatgtactgaccacaccttccatggtgcagtgcagacccttggcttgtcgtccacccccaagctccaagaaaagctccaaaaaaccacgatcttcaacaaaactcactggacatccttcgcggttgtgcaacttacaagctcctccgaagaccgacactatgctctccccattcgaaaactacgcggaaatggtccttggtgatagcacatcggatatcctcaagggaaattcatctcctcaaacttctgttaaagtggtgtcaccaaacaagaagcgaatctctcccctgcgaatgggtaccgggctatctccaatctgtaggagtggcaggaagctgattttaaagtccattccttctttcccttcccttggcggtgatgtaaacaatgaggatccagaaaccaagttgccagccccttgaatttaccatattttgtcactggtttatttctaccataccatctgatagtggacagccaagcgactttcctttcatcatttctatctctctcgatcaatgattatttatgtactgctataataatctgccgcgtgctggcaaaattctgcctccctagaacaaccaatggcatttggtttgctggtaaattatctcttggctccgtgtgttccctgtggctgtctgtctataatttatgttcattattttgttccggagaccgaagaatctgaggacttgtatgtatctgggatcaagatgtgaatctcgcatgtaccagatgacagaactgttaagacttatatttgtctgaggttaaactgcaagacttttatttaagctagaactttgatcactataggatatggcatgatatagcagggctcttgagatgcattctcttgtgcgtgcttggtaactgtagtcgtgcaactgttgacggcgtttgttcagaacaagtggttgatgaatttgaagatggtttagggagtgggaatgattttgtttgtgtgcgtgcgaacttgtaaaatctccgtgtatgaactggcaatgcttttatggtattgatcatctgcggtgtgttaactgagtgcaaaata

SEQ ID NO: 14102 - DNA, 1642 bp, Zea Mays
aacatggggttttctagcactgtgcttgctcttggtggtggtcgattaagaatgcaagtggctatcaagatgctgcagaaagggatgtcgagagatatgagcggtcattcaaaatgcttcctacagcgcacaagaaacttcttttccacctcggtctgaagtaccaaagtctgagatggtgtatatccatgaatgcatcttttatcatgaaaatgcttgaggcgtttgaacctccttttgacatgagtcaaagcaatttatcattggatgagcagcatgatagtcccaaagaatataccaagagacatgaaccttcaagagaaactgataataataagggaggggaagatcacatggcaggctgctcccagcctgttggcaacatggggatgtctcaaggtgcaggcattgcatgtaatggtgataaaaatacgggtgcagcagcttatttccaggataaagatgtctctgcatcttctgctattgaaaatgtagcactgcggcactgcacagcttcatcgctcaagttaaatgttcctccaattgatgttgacaaggtaagatgcatagtaagaaatatcgtgagagattggggtgatgagggtcaaaaggaacgtgatgagtgctataagcccattcttgaggagcttaatcgcctttttcctaaccggagcgatcagaggcctccttcatgtcttgtccctggtgctgggcttgggagattggctcttgatatatcttctctgggttttgtaagccaagggaatgaattctcatattacatgctgatctgttcaaatttcatcctgaaccacactcaagaagctaatgagtggtccatatatccttggatacatagcaactgcaattctctttctgacaacgatcaacttcgtcctgtttcatttcctgacattcatccctcaagtgcaggtatcacagagggattttcaatgtgcgctggggactttgtagaggtctacagcgaggaaagccaagaatctgcatgggatgctgttgtaacttgctttttcctggatacggcacacaatatcgttgaatacatcgagatcatatcaaaagttctcaaggatggtggggtctggattaacttgggtccccttctgtatcactttgctgattcatatgggccagatgatgatatgtctattgaattaagtttggaagatgtgaaaaaggttgcttaccattatggatttacaatggaggtggagaaaatgatcgagactacttacactgcaaacatgaaagcaatgatgcagaatcggtaccgtgcagcattctggacaatgaggaaagatgcgtctcggtcaaaagcttgtaagcctcgttgaagtgaagatcatccatggcggacgatcagttcgtgccatcattattcactgttgtattcaaactccacacaggccgtgccagaccaagttagatagatatatcagatgagctgcctgattcacagaatataattggcttaacataggaaaggaggtgctgagccacgctagctagctcatccttttctcctatatcacagatattcaaactgtactatgaactctgtaagaatgagcaataaactaagcagacagaagttaaaaatagaagtaacagaaatttagaa

SEQ ID NO: 14103 - DNA, 1132 bp, Zea Mays
ccaaagccgtcgctccacagggtgctcgacgtcccggctcgagtgaagcttgttgagcaagatgaggaagggcattgcaatgcagaatgcaagaccattgagcgtgcatgtcaggaggtgataggatatgctgataccgatgttgctgagtttgtatacaaaaataacccctcggtcgatcagcttatgaaatttctctgcaaagatctttcgaaagcatgtgccaaggacccaccgccagttccaaaagatcgtgtccctggggaaccatttgcaaggaagccatcaaaggatgctgagatggaaaagatattgagatcaatggagggtatgccgggagccccaagcatgaaaatgtactccagggacgatctgatgaaaaataactttggtactgaagacgacgacgaggaggatgatgaagatgaggatgacaacttcccaaagaacttggggaaagctctgaaaaacaagggctctcaaaagaaagatttgaaacagcaagtcgtgcagcagttcaaggataccagcaagaagttgaaagggcatgtaaacaaggtgtccggtatggtaaagaaatggtggaaaggggcaaagaagcctgccaaatccagcaaaagcaaaactgagctctgaagcattgttgaatcacgtcagtaaatctcatccgtcttccacttctcctggagcaaagttttagatggttatcggaagataaaagttacagcaacgcaaccagggcttttgttagagagtttagctacataaaacgtgtacaattgtttgtttttaacttctgttatttgcagtgtacactagtaaaagaactgaactccgatgatagtttttttccagattagtcgtgtcccaattggtcgttatagtgtttgatactctataaaactaaacagctggtgacgccagggaattagtttattggctatgcataatcgaacttttcactaattaatgacttgctgtcaagtttatctgtgctgctggaggttcacacaggtagacattgcccaaatttgtgtttgttccctaaaattatcttgtccccgttgagaagagaagtattattctagagtcacacaagctgaaactgaatcggccccaatttggaaacggg

SEQ ID NO: 14104 - DNA, 552 bp, Zea Mays
gctagatttagttgtttggctatagtttggctgaagggagcaagatggatgggaacaggatagctcggttttcggtcacctggaggggcagccaacttgatgtggatgcggatccaagttgtaccgtgaaagagtttgggcaactgttgcaggacttgactagtgttaggccagagacgttgaagctcattgttccacgatctacaaacaaaggctccaagctgatcatgccattttcggatgcacattcgagattgacactgaatggagtgggtattagcgagggaaaacctatccgaatgatgggagtttatgatgatgaaatcgaggaggtatccgacaatggcaaaagacctgaccaacgcattattggatttgatgaagaagaacagcggcttaggcaaagatcattaggcaggccacagatttcactcaaacttccccagggacaatacatcttctgcgattttcggacgcttcacttacctgggattgagccggatcctgcgcgctcgcaaggtccaaagcgaacaaccagctgcagacgaatct

SEQ ID NO: 14105 - DNA, 859 bp, Zea Mays
gaaaaggggggaaaagaaaaaaagaaaaagttcccgtcttcggtcttcccaaacccccaacatccatgatccatctcatcgacaccccctccgctctccttatcccttccattcgcccaaacccccgccgccgtgacccctgccagcccgcggccttcccctcgttctaggcttcaactgccggcctcgtgtcttctgggcaagtgaagagagagatggcgtcgccaataccgcgcgagtgggtcgggctgcagcagtttcctccggccacccagaccgagctgcacgagctcctcggcaagctcaaggaggaggatgtgagcacattgacaattctggtgatggggaaaggcggagtggggaagtcatctactgttaactccatcgtcggggagaggatcgccactgtcagcgctttccagtctgagggtctgagaccgatgatgtggtcgcgcacaagggcagggttcaccttgaacattatcgacactcctgggcttattgaaggtggatacattaatgagcaggctgttgacatcattaagagatttcttctgggcaagactattgatgttctcctgtatgtggatcgtttggatgcgtacagaatggatacacttgatggacaggttataagagccatcaccaattcatttggaaaagatatttggcgaagatcattggttgtgttgacccatgctcaactctcaccacctgatggaatcgagtataatgatttctttacaagaaggtcagaggcacttttgcgatacatccactcgggagcaggaatcaagaaacgagaatatggggaggtcactgcagcgtgctgagcgagagggtaaccagccagccttat

SEQ ID NO: 14106 - DNA, 1148 bp, Zea Mays
ttaaggctgaggttaaaaaagagctttggccttggatgggctgttggatcacaacctctgttttgggctcttttcataagctttgttcttgggactgcatattcaatcaatctgccgtaccttcgatggaagagatttgctgttgttgcagcactgtgcatattagcagttcgtgcagtgattgttcagctggccttttttctccacattcagacttttgttttcaggagaccggcagtgttttctaggccattattatttgcaactggatttatgacgttcttctctgttgtaatagcactattcaaggatatacctgacatcgaaggggaccgcatattcgggatccgatccttcagcgtccggttagggcaaaagaaggtcttttggatctgcgttggcttgcttgagatggcctacagcgttgcgatactgatgggagctacctcttcctgtttgtggagcaaaacagcaaccatcgctggccattccatacttgccgcgatcctatggagctgcgcgcgatcggtggacttgacgagcaaagccgcaataacgtccttctacatgttcatctggaagctgttctacgcggagtacctgctcatccctctggtgcggtgagcgcgaggcgaggtggtggcagacggatcggcgtcggcggggcggcaaacaactccacgggagaacttgagtgccggaagtaaactcccgtttgaaagttgaagcgtgcaccaccggcaccgggcagagagagacacggtggctggatggatacggatggcccccccaataaattcccccgtgcatggtaccccacgctgcttgatgatatcccatgtgtccgggtgaccggacctgatcgtctctagagagattggttgcacaacgtccaacatagcccgtaggtattgctaccactgctagtatgatactccttcctagtccttgccagcaccagtgacccaaacttggtcggctgagctcagcgctcagcagctttacgtgcatctgcgccttgacttgtgcagtgggcgtcgctagcatgaatgatgtatggtgcgtcacggcctgacggttcgtcagtctgggccgtgttttgtgtccgaggaagatcgtctgtcagagatctggattgcctcgctgct

SEQ ID NO: 14107 - DNA, 463 bp, Zea Mays
gtttatttttgtggccccgtgttgcgttctcctgttcaccccgcgtcgtcttcgctctcacgatccctcggcagtcggcgacggctgggcgaccgccacttccgccttctcttcctactgagcgtctccaggcacgcttctgaattcggagttgccagcattcgctcgaggtgccggaccagatctcaccatcatgcaggctagcgatagattcaacataaactctcagcttgagcatcttcaagccaaatatgttggtacagggcatgctgatttgtctagatttgaatgggctgtaaacatccagagagacagctatgcctcttatattgggcactatccaatgctagcatattttgccattgctgagaatgaatcgatcggaagagaacgttacaatttcatgcagggatcggatatatactcaattcttgtcaaagaaccctttgtgtatagaacagaa

SEQ ID NO: 14108 - DNA, 1501 bp, Zea Mays
gttctgttcatgctagtgcagccatcaaacagctatcattactcaattactccctggaccagcagcaattgttgttgggagtggcttggctctgtcatccacagctgttgtcttgcaagtattgcaagagcgtggtgaaagtacgtcacgtcatggacgtgctacattttctgtgttattgttccaggatttggctgtggtggttctgttgatattaatacctctcatatcacctaattcttcaaaaggaggggttggtttccaagcaatagcagaagccatgggaatggctgcagtcaaagcagtagctgctataactgccataattgctggaggtcgtctgttgctccggcctatttacaaacaaattgctgaaaatcagaatgctgagatattttcagcaaatacactccttgttatttttggcacaagtcttcttacagcccgggctgggttatcgatggcacttggagcttttttagctggtctgttactagcagaaacagagttctcattgcaggttgagtcagatatagctccctatcgtggtcttctgttaggacttttctttatgacggttggaatgtctattgacccaaagctgcttctgtcaaacttcccagcgatctctgtgatattgagtctcttgataattggaaagacattgttagttacatttgtcggcagggtgtttggggtttctgctatagctgccattcgtgttggcctcttgcttgcacctggtggtgagtttgcttttgttgcctttggagaagctgtcaaccagggtcttctatcacctcaattaacatcgttgctatttttagtcgttggcatttcaatggctctgacaccatggttagctgctggagggcagtttctggcatcaaaatttgagcagcatgatgtgaggagtttattgcccgtggaaagtgagactgacgatttgcaagaccatatcattatattaggctttggacgtgttgggcagatcattgcacaactcctgtcagagcggttaattccttttgttgcacttgatgctggaagtgatcgggttgcagctgggcgtgcacttgatcttccagtgtattttggtgattctggaaagcagagaggtactgcacaaaaattggagctgaaagagcttgtgctgctgcaattactttggatactcctggtgcaaactacagagctgtctgggcgttgaacaaatatttcccaaatgtgaagacatttgttagagcacatgatgttgatcatggtgttaatttggagaaagctggtgcaacggcggttgtccctgagaccttggagccaagtcttcagctagctgctgctgtccttgcacaagcaaaactcccaatgtcagagattcaggaaaccatcaacgagttccggaatcgtcatctgtcagagcttacagagaaagcttctggcaaacaaaaggatatgcagcgaaacatggcaaaccagatttcttaatggtagtaattcaaag

SEQ ID NO: 14109 - DNA, 2898 bp, Zea Mays
cttccatttccacaagacccttgcgtgctctctctctctcctcttggcgacgactgggtggcaggtgcccaggtcttcttgggacccttcgccggcgacaagcaccaccaggttcagtcatgagtgggcttctcatgagcttccctaagtgatgcttcatatgttttctaacatgtaacatctcccgatgttatccatgtactggatatatccttagaagtcagagatgcagaagtctgatcatcatgagcagaagctaacttcaccaagagggttaatccataagatacttcgtcgtacaaatagcaggcgttctcccactgcagctgaccaacaaccttctcctgtatctccagaaacaagcaactcatcaatattctcaaagcaaaaggatgttgatgatgccatcaaggattcagaaaagctgagcacacatactatcagaattgaagatgagaaatctgatttgctagggtctgaaatttattctggaaagcttacattagataacaaaacaaaaagttcatcaaatgaacagtctggatcaggatctagtagcaattgctttgatgctaggctcagcactgaagccctaatatggggttctaacatccttaagcttgaggatattgtatctcttgcaggtttcaagatggaagtggtaaaaactacacatgctgggcatgcaaaatctcttgtatcaactattgattttagtacctgtcctgatggtattgtatgtgtgggtggtgatggaattgtaaatgaggtcctcaatggtcttctatgcagagatgatcaaaatatgtctgcctctgtaccaataggtataatacctgctgggtctgataactcacttatttggacagtcttgggtgtcaaggatccaatttctgcagcattgtcaattgtcaggggaggtcttacacctattgatgttttttctgttgaatggattcaaagtgggactatgcattatggtacaaccgtatcatattttggttttgttagcgatgttcttgagctctcagagaagtatcagaagcattttggtcctttacgatactttgtagctggttttctcaaattcctgtgtttgccaaagtacagttttgaattggaatatcttccagtatcagatgttaatggcgccgagcataaaattttggtaggacaagaaaaggttgacgcgtctgatctatatgatgatgtaattcggagatcaagagcagaatgtttaccacgcgcctcaagtttatctagcattgattcaataatgtctacaggcatcatgtctggggcagagctggaggtttgtagtcctcgtgcaaataatgaaccttctgaggttgttcgtggacttgatccgaaatcaaagcgcttatcgttaggaagagctagtacatttaaagaaccagaagaagtgctccatccccactcccatggtacatctactcccagctggcgtagatctaagtcaaaatcaaggactgaaaaggcaaagccaggcttgtctgctacacacgatgcaaaatcttctaaggttaatgcagacaaagaggacacatcatccacaatttctgatcctggacctgtggctgtatgggattcaggaccaaagtgggacgatgaacctaaatgggataatcaacctaactgggaacccgagacttcaattgagctccatagccctcgcgaggatattgagcttggtctgactaaggagctggtacctagtttagatgaaaggtggacagttaggaaaggacgctatcttggtgtactggtgtgcaaccattcatgcaagactgtgcagagtctgagctctcaggttgttgctcccaaggctgaatatgatgacaattgtttggacctgctgttagttggtggaagtggaagactgagattactgaggtttttggtgcttttgcagtttggaaagcacatatctcttccaaatgtagaatatgtaaaggtgaaatctgtgaggctcaaagcaggcccaaatacacacgacggatgtggtatcgatggcgaactactccatgtcaaggggcaagttcgctgtagtttgttgcctcaacaatgtcaattgatgggcaggccagtgaaaaaccctgtacagtagctgtaaatacactatgcggactgtctgcagctctgaggtcagcccagaatcttgcacctgtggtgtgtacaagcggcgaaccatggattttcgtctgcatccacatgtcagtaattatattcagaagtgagaacatgaacatcctagctggcactcagctccagagatgtacatttgtggttgacgagcagaaggtgctgagtgggtgctgtttcatccatatgtaaagccaaagcctatctcggacagcagcttgttgcgcacctcttgcttttgcctttttctcgtccgatagaatgcatctactatacagccatcctgatgagtgtacttggttgctccagaacatagtgtccacctccaccagccgggtgtctttggaggttccctgatgccggccacttgatactcattgtagggacaacaccccagtgcccgtgtccttgatcagtctgttgtgtttgcgaagtgtgaataagatataggactgtttgattcccggtacagcgcagggtttcagcagaaagggctggatggatgatgttttgtggcgatgctgcctcgttgagtctttaaaacgggtgtaactcttcttcttttgtgagtcgtgatgatgtatgaaccgtgtactgatttgtaaaccttgcctggcaggcatacaactgtttctgaggtgtggtattctctgccggggaataagcagcgtagcttctcctttcgtacgctgccagcaaagcagcgctcgtgctagtatgaacaacttacaccag

SEQ ID NO: 14110 - DNA, 1748 bp, Zea Mays
gctgctgttactcctcagctcctgcaagaatattaacagctcaatatgcattacaatacatctgagcatgccaggagaagaagaggaagcatagaacctggagttggtaagtgggtctcgtacctgaaccgagagaagaaactagatacattggtaggccatagaccagtcgctcctgttgctcctaaaggattgtatctctatggaaatgttggaagtgggaagacaatgttgatggacatgttctatggggccactgaaggtgtcatcaaacacaggaggaggtttcactttcatgaggccatgcttgaaatacatgatcatatgcatgatgtatggaagagacgtgatgatgacaaatctattcactcaagtgctttcagttggatatcaagccttccttttgacacaaaaattaaggagtggttgattggcgaagagaagtacaaacaacagacacaggaaaagcacatccttttggcagttgctgacaagtttttggttgatagacaggcaaataaaactggagcaagcattctatgctttgatgagatacagaccattgatgtttttgctgtggtagcactttctggcattctaagcaggctgttaagcacggggacagtacttgtagcaaccagtaataaagcaccagaagatctgaatcaggatgggatgcaaagggacatcttccttgagttattatcaaaattggatgaaagctgcaatgagattcttgtgggtactgaaaaggattatcgccgcctaattccgacagaaggctcaactgaggttcactatttttggcctgccacttctgatgctcgcagcatgtatgaggctatgtggcatgacataactgaccaatcaggagaaaatattgtttctgtcaccattcctgtaatgtttgggaggtctattgagattcctcaaagctgtaatggtgtcgcaaggtttgacttcgagtatctatgtggtcgcccagtcggagcagcagattatatagcaatagctaggaactaccatacaattttcatatcagaaattccagcgatgagtatgaagatccgtgacaaggcaagaaggtttatcactcttatcgatgagttgtacaaccaccactgccgccttatatgcctagctgcctcatccattgatgatctttttcaaggaactgaggaaggacctctttttgatttagagagttttcagtttgaaaccgagtccgaagggacaaagctgaggagggatgttttggcggaaggcaatgctggctcaggaccatctactaccggccttgtggcgatattgtctggtcaagaagagatgtttgcgttccgcagggcgatatcacggcttatcgagatgcagaccccgctgtatctggagcgtgtgctggctgtacatccctcgttccgtcgtcctggtcttgcaagaaataacaggcctgcagttcctcagcctgctccggcggtttgaggtttgacagcctcgcgctgtaccattgctttatttcgagtttcgtgtgacaaggcaataaaaccaaccagagatggtaacagtgagacattgtaaatgattgtagaaaggttgtgattattaataagttaaaatttactattttaaacttcaacaggttacacatactatctgtcatttcatcttatattttaaactttactctacgaacggtacagtctaccatttaaaactatgttttggatgactatatggataacctggtggac

SEQ ID NO: 14111 - DNA, 933 bp, Zea Mays
cctccgtcgcgtcaaatttgctagcagtgccctgcttgtggtggtagttaaggtgcattttagtggatgaacaagacaatgtcatcggccatgagtccaagtataactgccatctcatggagaagatagaagctggaaatgtcctgcacagagctttcagtgttttccttttcaactccaaatatgaattgctactacagcaaaggtctgcaacaaaagtgacatttccacttgtctggacaaacacctgctgtagccatcctctctaccgcgagtcagagttgattgaggaaaattgtgcaggggtgagaaatgcagcccaacgcaaactatttgatgaactgggaatagttgctgacgaattacctgttgaccagttcatcctccttgggaggatgctttacatggctccttcagatggaaaatggggcgaacacgagttggattacctcctgttcatggttcgtgacgtgaagctcaacccgaatcctgaagaggtggccgacgtcaagtacgtgaaccgcgatcagctgaaggagctgctcaggaaagctgatgctggggaagatggcgttaagatgtccccttggttcaggctggtggtggacaacttcctcatgggctggtgggatcatgtcgagcaagggactctgcagggggcagcggacatgaaaaccatccataagttgtaagcctgtagtcttgtagatccgcgaagcacgtgctgtgctccgttgagaaataagcgtttctgcaggtgtttgcgctgcctttgttttagccatcattctgatggaaatagtcgataaagtcataatagagtgttcttaaatagggaacagaactatttatattgaaacccgtctatgatgtgtaaatttctaccgaatgaatggaattatggaaatcatagtaattggcgagcaaaagaaa

SEQ ID NO: 14112 - DNA, 1816 bp, Zea Mays
caacactgtcttccaatgcaagtgactgccccgacccatcatgcgccaggcgaatcaaaccactacctgatttgtttaccccccgaaatttgccgtctcctcgtctcgctcctctccctgcgcagcccccagatccggcaccgcccgctcctcgatccccgcaccccacgcccgcaggtgttggcaagagttgcctcctgttgcggttctctgatggttccttcactacaagctttattaccacaattggtattgactttaagatacgaacgatagaattggatggcaagcgtataaagctacagatttgggatacggcgggccaagaacgcttccggactattaccaccgcgtactaccgaggagctatgggcatcttgctggtttatgatgtcaccgatgaatcttcttttaacaacatccgaaactggattcggaacattgaacaacacgcctctgataatgtcaacaagattttggttggcaacaaggccgatatggacgaaagcaagagggctgtacctactgcaaaaggacaagcacttgctgatgagtacgggatcaagttttttgaaacgagtgcgaagacaaacctgaatgtggagcaagtgttttttctccatcgcacgtgacatcaagcagaggcttgcggagactgattcaaagccagaggacaaggcaatcaaaattaacaagccagaccagggttccgaggcaccagctgcccagcgatctgcttgctgcggctcataagcagatgcacgatggccatagcctttggttatttgacattatttatttcccgcttggctgttataggaaggatttgaagaagccacttatgatataccgatgtggttgtactcgtggttgcttccattctttgaagcaaccacctcttgctgttgacgtagctattgctattgctgggagctattgcactcttgcattggatccgttggaaaaactctcccctccctacagtgtgtaatgaatgaaatccatgtcgttgggtttgcatggaataacgtgtcgctcttgtgtgtgtgttttaagtgtcgccgttccttgataatcgaatttgttgggaccaagaatatatctacctggaatgtctgtatccacagaaagtctggatcttcgatttaggttaaaaggaaacgtatctggaaatagaccgctgcatgttgtaatgtttgaaaaaagagtaaataaaacttgtacagttgtatatactataattgtaggcagcttgtcaaagaggagggcagtccagtatcagcgatttccgttcgcagtgcgctgtgttgccgagcacggcgtcattccggcacttggcgcagttccccgacggcgccaggctcaagtccaaacagattccgctggcacagccagcgccgccaacgttggcttcctcaaccgacgtggcgtccccagagcggagctcacattcggactcggctgccagcgaagtcctgcggtgccgacgcatgtggccgcccagcgcctggccgaccgcgaactcgagcccgcagatggggcagccgtgcagcctcggccccgccgcgctctcgcgcggctcatccagcctcgttcggcgtagtagccccgggtcgccgacgccgtaggggtaagggtagggcttggggcgcctgtggctggcgcggtggccgcccagcgcctggaacgtcgggaacctcctcctgcacgtcttgcactcgaacacgcgcccgcgcgcgccgagccccgccgccgccgtcctcgcgccgccctgttgccgctgcgagaggagcatggggacggcgccggtctccat

SEQ ID NO: 14113 - DNA, 1668 bp, Zea Mays
attgacttctgtagtctgcatcagataaacaagcagatgcagaatagagatacttctctcatgcagggcacaccatatactcacattcatgagatagttttctccacaatcgataagccaaagctccttagtcagctatctgcattgctatctgacattggattgaacatcagagaagcacatgttttctctacccatgatggctattctcttgatgtttttgttgttgatggctggcctgttcaggatgctgatggtttgcacaaagcactggaagcatccattctaagaaatgagggttcatggtctggttcatctcattcctcagccgctgaaagaacactgcccttccaagttaaaggtggtgagtgggaaatcgacaaacgacttctgaagatgggagggatggttgcttctggttcttgtggggacttgtatcacgggacttaccttggtgaggatgtagctgttaaagttataagagctgagcatttgaataagaatgtttggaacgagtttacgcaagaagtatatatactaagagaagttcaacataaaaatgttgtgcgattcattggtgcatgcacaaaaccaccccaattttgcataattacagaatacatgtctggaggaagcctatatgactttgtgcacaagcagcataatgttctaaacctcaggactttattaaagtttgcagttgatgtatgccgagggatgtgctacttgcatgaaaggggtatcatccatagagacttgaagactgcaaaccttctaatggacaaagatcatgttgtgaaagtggctgattttggtgtagctcggttccaggatcaaggaggtgtcatgacagctgaaactggaacatacagatggatggcacctgaggttataaaccatcaaccctatgataacaaagcagatgttttcagctttgctattgtcatctgggagctgataacgtctaagatcccgtatgaaagcatgacccctctccaagcggctgtaggtgtgagacagggattgcgcccaggacttccaaagaagacgcatccaaaggtattggacttgatgcagagatgctgggaagcagacccatctgcccggcctgctttcccagacattttagccgaactggaggatcttttggcacaggttcagggaacaccgggaaagacggcccatgctccatcaaataactcgaacacgaaagattaacccccatgcacacatacctgacgtttttctgaattcagtgatctgccatgtttaggattcgagtcgctaattacgaggaatgtagcatatcgatttttttccctggatggttttgcttgtgtacatttgaacaatcttcttggggcctattttttatggtcacctcattgttcttacataggggaaattggctcgagcgtttgggaggattacgtattatgacaacggctgataatttaccgcctacaacatgggtggatatttttcatgcattattatcccagtagctgccattccaagaaaggcataatgctttactcgccttaggttccttttggaatggacactggcgtgttcagctccagtggtcaaagcaccactccctcccgtttagaccttgttcgattgtttccattatagattacatgagattagaaaaaaattatgaaa

SEQ ID NO: 14114 - DNA, 546 bp, Zea Mays
agtttggggaatgggcatctgtcagaaaagatactgggtggatgacggagtcttacatgcatctaactttttcatttctcatttttttgggcactgcttctgttagatatgggcaatgttgagggatgttgcatagggaacgcaaccttgtgtgctgcagcatcagaaaccagcaaagtttcaatttccattctaatgaagcgatgtgaggttatattgggtcaatttttggccgatgaaaatgatctaggagaacatcctttgcctagtgtgagggttgaagaaacgatctgtgttcttcaagagcttgctagactaattatagacattgatgcagcgaatactctcaacatacctccatatctgaagcaagctttgggggaaaacaaatcccatggacgggctcatttattgtctttgcttcccactttttctgagcttgttgtctcaagagaagctagggtacgggagcttgtacaagtgctgctcagactcatttcctcggagctgggactacatcagctgacgtaacaactaatgatgaaa

SEQ ID NO: 14115 - DNA, 1488 bp, Zea Mays
cccagactcaaatcaaatctgccttgtctctgctgccccagccccaactctgctccaaagcttcaagcatcagcaaccccctccaccacctcttcctcctcggtcctcacctggagttgtagcaagcagcaccacatcatatcacagcagagcagagagtggggtgaagcagggagctgggcaggagagccccaacggcctgtcctgccgcggccatgcgtttctctgcgctgctcctcatcgtggcgctgctctgcctcggcggcggcggtggcggccgcgtgacggcgtccaccgaattcaacttcccggcggtgttcaacttcggggactccaactccgacaccggcgggcgcgtggccgccggcttcgagtccatcttcccgccctacggctccagcttcttcggcgggcccgccggccgcttctgcgacggccgcctcgtcatcgacttcctcatggaggcaatggatatgccactcctcaacgcgtacctggattctctaggcacgccaagctttcggaccggcgttaattttgctcaagctggatgttcgatcacaccagcaaagccgacatcagtcagcccattctcatttggtctccagatcaagcagttcttcgccttcaagaacaaagtcactaagctcctgtctgaaggagatatgcacagccgatacattcctcagcaagattacttctcagagggactctacacgttcgatattgggcagaatgaccttgctgagcttcctatgcctctttccccaaagctgactaattggtgtacagggatcctactctgatgtaaataaactgtatgaccaaggtgctaggaagttctggattcacaacacgggccccctcggttgcttgcctcaaaacattgccctcttcggcaaagacccatcccaactggacgagctccactgtgtggcgaagcacaaccgtgccgcaaagcttttcaacttacagctgcacgcactttgcacgaagctgagggcagaattcgatggagccagcatcacttacgtggacatccacacgatcaaatacagcctgatcgccaactactctcgatacgggttcgagcacgccactcaggcgtgctgtggatacggaggcccacccctgaactacgatggtaacgtaccatgtggacacacggtgtctctggatggtaagatggtcaccgcaaaagggtgcagcgacactactgaattcgtcaactgggatgggatacattacacggaagctgcgaatttccatatcgcctcgcagatcctgaccgggaagtattctgatcctccgttcgtggataagatgccgttcgtcataaaacctagattctgattggcatacaattttccctctttactcacccactttacagcaccggttgcagatacgatgtatacttattacttgccaataaccatatatagcttgagtaaaaaaatcatatatacggcttggtttcaaaaaaaa

SEQ ID NO: 14116 - DNA, 1390 bp, Zea Mays
ccaggaccaaaagaatgcactttaatggattggtggcgcctctcttttcaattttgggatgatgggagaattccgacaagaacttcgtgatggatttattgaagcttgtcttcatcttgttaaccgtgattttgatgctttagcaaaagactttgtaacccttggtttacttcctccaactgcccagaaaggtgaagtcacaaaggcattgacaggtgtatttgagaatgctgttaacagaggagttcagaatataagctttggagatctgtcaggaaatcttggacgaacaatgtataaattcaagttccagataccgtcttacttttcccttgtaattcgaagccttgctgttttagaaggtatcgcaatcagcttcaatccaaagtataaagttctggggagttcatatccatggattgcaagaaaagttctcactgacagttcaccaaagcttcgatcaactttgcagactcttctttataaggatggcactttccaaattgatcgcctggaatctttgttaactgagtcacttcgtgcaagaacagagcaatcattggtcagaaatgaacaagatgtcgacagtacgagatatgcaattaagcaagtcttgtcattcacactcgctgaccagggtgcctttgtgaaggacttacttcttcaggagattgctaagggaatagatgcacttggtgtagccacattaagttctgcaacgtctgcagcagcctccagattgccattcggtggtggaccatccccattgacctcactagatgacgaagatgccacaaacttaagaaatctgtatcgcctgctcctacttttatctaaggtttctcagaaggaaaatccatctccaattcctgaatataacagtgccatagagaaggaaggtggtagcacggatgaacttgctcttgcgctgtatggaatgacctctctgccagaatttcttccagttctttctgtcattcctgagcttccaccggagtcccaacagcagttgcttcttctgccagcggatttaaccaatcgtattttatctcgggctctcgcgagaaccattagaagactcatgtaaagccataggtgcagaaattttcggtccctgcttaatttttattttactattctttttggttcactgctagaagatggggatttttttagcatctcatctacaacccaagatcaatcccttttttgttatctacgattactatgtacatattgttcaaactaaagcaggcattgtaaatggcccatgttgttatgcacatatggtgtaactgataaactttaaatatatgtgaacatagaaataattctgtaatgcaatttgcctcgaaagcatggattcatgtcattttcttgtttcaccatc

SEQ ID NO: 14117 - DNA, 1695 bp, Zea Mays
cctaaatactcttcagtggagataacaccaaataaaggcagtatactttccaagattatttctgttactgtgaggaccattcagaaagatgctgaggaaaagaaagcttcatttaatccccgaccatacttccgattgtttataaattggctctatgaccttactactactgatggccatcatgatggttctaattttcaggttttgactgcatttgccaatgcattccacttgctacaacccttgagagttcctgcctggagctttgcttggcttgagctggtgagtcataggagcttcatgccaaaattgctgatgtccaattcacagaaaggttggccgttttttcagcggttgcttgttgctcttttcaaattcatggaaccatatctgagaaatgctgaactcccagaggcggtggaccttttatacaaaggaactatgagagttttgcttgtattactgcatgactttcctgaatttatttgtgattaccacttcagtttctgtgatgtgattccttcaagttgcattcaaatgcgcaatgtcattcttagtgcttttccacgtaacatgagactgccagacccttctactcctaatctaaagattgatttgttggctgaaatttcaatagcaccacgaatcatgtcagatgttgatggtaccctcaaatcaaagcagttgaagactgagtttgatgaatatctcaagaggccggaaggctcttcctttctaagtgtcctgaagcaaaatttgctgctgcctcagaatgaagcagctgttgctgggacacgctacaatgtgcctctgatcaattcacttgttctttatgttggcatccaagctgtgcaacaactgcaacagaacaaggctaatgcatctgcatcagtgcagcagattaaacatacgcctacgatggacagtttccagattgaaacagctaccgagatgttcacaaatctcataacaagttttgatacagagggccgctaccttctgttgaatgcaattgcaaaccaactgcgctatccaaatagccatacacactactactccttcatcattctgcatctatttgctgaggctacccaggagattatccaggagcaaataacaagggttcttctggagcgtctaatagtgaaccgcccccatccttgggggttacttattacttccattgaattgataaagaatccgcgttacaacttttggaaccggtcttttacacatagtgcacctgagattgagaaactgtttgagtcagtggctaggtcctgcggcgcaaaagctgtagatgaaggaatcagtgtgcaggatggcagtcactaataaagtaatttgctttgttagtgctgtttttgtgctatttcgcactgtaaattgtgtgctaccctatctgggcttgtacagaccacggaaatacatagtgcgtcacgtcagctatttgggtgcctgtgctttgcctggtagctaggaattactattgatcgccagatgctccaggtgcaaatttttccgtggactggttcacttatttgattcaactatgtcagaatggtagatggtgcgaacttcagcttagatagtgagttgagttgcaggcatgtttgtaaattatatttttgatgccattctgttttctcagagaacggaacatttcaagatcagtctatactcctatgccgtttt

SEQ ID NO: 14118 - DNA, 3248 bp, Zea Mays
atagccttgttgtcaatatctatctaagatgaaaaaatccggcttgccctctatgtgcagaaggctgccatgaccttcattgatggtgccaagcacaaagactaccggatcacagaggatatcagaaacgctgggttctccataaacccagacgagctggcatcgatcacaagcaagcacgacgcgaaagccttaaagatgcacggcggggtggacggggtgtcgaagaagatccggtcggcgttggaccatggcatatctgccagcgacctagacacgaggcaaagcatctacggcgtcaaccggtacgcggagaagccttcgagaacgttctggatgtttgtgtgggacgcgttgcaggacatgactctgatcatcctgatggtgtgcgctctgctgtctgctgccgtcggtctggcgtctgaaggctggcccaggggcatgtacgatggcctggggatcatgctcagcatcctgctggttgtcatggtcactgctgtcagtgactacaggcagtcgctccagttcaaggagcttgacaatgagaagaagaagatattcatccatgtgaccagagacggatcccggcagaaggtctctatctatgacttggcggtcggtgacatcgtgcatctgtccatcggagaccaggtgcctgccgacgggctgtacgtgcatggatactcccttttgatcgacgagtccagcttgtcaggcgagagcgagccggtctatgtttctcaggacaagccattcatcttggcggggactaaggttcaggatgggtcagctaagatgatggtgaccgccgtcggcatgcgcaccgagtggggaaggttgatgagcacgctgagcgagggaggagaggacgagacgccgctgcaggtcaagctgaacggagttgcaaccatcattggcaagatcggcctgttgtttgccacattgacatttgttgtcctgatggttaggttcctcattgagaaaggtttgacggttggtctgtccaaatggtactctactgatgcgctgactatagtgaactacttcgcgactgctgtcactattatcgtcgtcgctgttcctgaagggctgcctcttgctgttactctgagccttgcatttgcgatgaagaagctaatgaatgataaggcacttgtccggcacctttcagcgtgtgagactatgggatctgccggaaccatctgcacggataaaacgggaactttgactactaaccatatggtggtcgacaagatatgggcatccgaggtctcaaaatcggttaccgatagcagtagtttggaagatctggcttctgccgtttctccagccacattgagcctgcttctgcaaggaatttttgagaacaccagcgcagaggtagtcaatgagaaggatggcaagcagactgtcttgggaactccgacagagagggcaatatttgagtttggcttgaaactggaaggtcttggtgctgaggataggacctgcaccaaggtcaaggtcgagccgttcaattcggttaagaagaagatggcggtgctggtctcgttgcacgatggcggctcgtaccgctggttcaccaaaggcgcgtcggagatcgttgtggagatgtgcgacatgatgatagatggcgatgggaacagcgtccccttgtcagaagctcagagaaagatcgtcttggatactatcaactcctttgcttcagatgctttgaggacactgtgcttggcgtataaggatgtggatggtctcgaggacgacgacgacgatgcagatagcccaacaagtggtttcactctaatctgcatttttggcatcaaggatcccttgcgcccaggagtcaaggacgctgtggaggcctgtaagtctgctggcatcgtcgtgagaatggtgaccggtgacaacatcaatacagccaaagctatagccaaagagtgtgggatactaactgatggtgacctagcaatagaagggccagaattccgcagcaagagcccagaagagatgagggacataatacctaagattcgggtcatggctcgttctttaccgttggacaagcatacccttgtgacgaacttgcgaggtatgtttcgcgaggtggttgctgtgacaggtgacggcacgaatgatgctccagcgttgcatgaagcagatatcggccttgctatgggcatagcaggaacagaggttgccaaggagagtgctgatgtgatagtgcttgatgacaatttcacaactataataaatgtcgcgaggtggggtcgtgcggtttacataaacatccaaaagttcgtgcagttccagctgactgtcaacattgttgctttggtcatcaacttcgtctcagcatgcattacagggagcgctccgctcacagcggtgcaactgttgtgggtgaatatgattatggatacattaggagctctagctctagcaacggagcctccaaacgatgacatgatgaagagaccacctgtcgggcgaggggaaagcttcatcaccaaggtcatgtggagaaatatcattgggcaaagtttgtaccagttggttgtgctcggagccctcatgtttggcggggaacagtttctgaacatcaagggcgcggattccaaatctgttgtcaatactctcatattcaactccttcgtgttctgccaggtgttcaacgaaataaacagcagagaaatggagaagatcaacgtgttccgcggcatggtcaccaactggatcttcatcgcgatcatagccgcgacggtcctgttccaagtggtgatcgtagagctgctcggcacctttgccagcaccgtcccactcgactggcggctttggctgcttagcgtcggcctcggatcggttagcttggtcgtcggtgccgtcctcaagtgcataccagttgccaaatcgaacggagctcctgcgagtcccaacggctacgccccgctccccagcggtcctgacgacatttagctgaagaagaggggatgcatggagaaaagaagttgcatccgatttttgcgtcttgtttggaataagtaatgaaccactggctaggctcagctttagcagattgttctatatatatatatatatatatattgtcctgcaattacacgatcttcctgtttgctgattgttctatatatgaatgaacgcaatgcaaggcaccattatttccacgagccatggccttaaggaaacgaagttcttggccaactctatggtctcattatataccaaatttt

SEQ ID NO: 14119 - DNA, 5556 bp, Zea Mays
cgacattgcccctacccccacctcccctcgccctgcgtcccgccaggccccctgctccccatgcccggtgcgcgcgacggccaccatggcagacagctcttgggcgactgtggccgccagtgtccaccccgccaccagcgtcgccacctcacctgtctccaccaccgaagcgcacgccaccagtgtcgcgaccactccttgcgcgtacgacgccttctcagttggcacgacctcttctcgcgtgtgcggcgcctggggctcgcccggcttcggccacctggtgctggccgccgccgctacccaatccatctccaacctcgccacaaccgtcgttcccccctccacgttcgatctggacgtcgctgggacccatgccgacatgctaagcgcgtcccctgcatctgcccgctctttgccaccgtcggtgggtactctagggcccatgcgccctccaggcttcctatgctcctcacggtgtgccgccgacgccccctacacagctcctcggcgtcccctccactgttgttgtcttcccgcaacacgactccaccttctctagcctcgacagcatgtcctccctcggcgtggtcgtcgatgcggggctggtgcacggcgagccccctactgcccccctttcccctgcctcgacagccctctacaccgcctttgcaggcatgggcgtggacacccatgtccctgcagcccccatgccctccctgccatgccggcggtcctcgctgccccgtctccggcacggtcgttgctctccgggcaccccttcatgtagctgggctcatccatgggggctccttccccatgtccccctcagtcggttattccgacgacacatcctacaatgtcccaccgccctcaacgcctgcggcttcgcccctccaatcgattccggggacccctacctctgccgcagtccctatgagagcctttgtcatgcctgtcaactcgtcttccctttcctacctcctcgtctagggctgctcaagcctttgatcttgttcattgtgatctctggacatctgttttcagtctctgtggttacaaatactatctggtaatcctggatgatttctctcattttctttggactttttctctgtggcagtgcggctcaagtccgacacctttcacactctcacccatttctacacctaggtctccaaccagttccgtcacccggttcgtgccctctagtgtgataatggccgccagttcgataactccgcctctcgttccttctttctctctcacggtgaaagttacgcctctcgtgtccctacacttcccctcagaacggccgggccaaatgaattattcgcaccaccactaacatgatccgcctcctctttcagccgtatcttcttgccagctattggacaaaggccctgaatactgctacctatctccttaaccgccttccctccaagacggtgagtcaccccactcctagttcgccctgtatggtacaacccacttttatgtccaccttcgtgtctttggctgtgcctgctatcccaacacttccgccactgctcaacacaagctctctcctcgctccactcactgtcttttccttggttactctcctgaccacaaggggtaccgatgccatgacctcctcactcaccgcaccatcatctctcgtcatgttgtttttgatgaggaggtttttccccttgttgacccctcctccccaccccccgacgtcgatttccttctcgatgctgattgtgtcgatgctcgtcttccgttgccctatttcacgcaaccccgtgcggcctcgcccgcgccccgcacgaccctatcgattctgcctgtgtcggatgtggctccaccgactccgcctatgccatgcgcagccccgtcgccgcctccgccacatcgcgtggacccaacgtcccctgcgctgccaagcatggccccattgtcgttcgttgaggtagcctcttagccgcgcttcgcggtcctcgttcacatctaccagcgatgtggccgggtcgatgccccggctccctctcgcgaggagccgcctgtataccattcgattgctctccatcgggaccccaagcatgtccacccgatggttactcggcgtgctgttggtgtccttcaacctatcaaacgcctagttctcacggtgccctcctctctggtgctcccccctgtgccatcctctgtccgtagtgtgctcgtcgaccccacctggcggcgcgctatggaggagtatgaggccttacaggcaaaccacatctgggacctgtgccactccccttcggcgcaaatgtggtcaccgggaaatggatcttcaagcacaagctaaagacggatggctccttggatcggtacaagtctcgctaggtcctgtggggctccatccagcgtctcagggttgactatgacgagactttcagccccgtggtgaagcctgctaccatccggactgttctgactctggctctgtcatggtcctggccagtgcaacagcttgacgtcaagaatgccttcctccatggcactctgacggagacggtgtactacactcaatcggtcctggtcagtgcaacagcttgatgtcaagaatgccttactccatggctcactccgacatggtctgcaagcttaaccggtccttatacgacctcaagcatgcgccctgggcttcgtatagccgcttcgccagtcgccaccttcgtgctctcccatggttttgtcgaggccaaggcggatacctccctgttcgtcttccgtcgaggcctggacacgacgtacctcctctatgtcgacgacattgttctcacgacctcctccctcgagctcttgcggcgcatcatctcttccctcaagcaggaatttgcgcttaaggacttgggtgagctgcaccacttcttgggggtcaccgactcaccgtggaacaccagtcctagcgcctgtttctccaccagcggtattaaaccgtcgacatcctcgagcgcgcatgcatgattgactgcaagccctgtgtgactctggtggacaccaagggcaaggcttcctccgacgatggtggccctcggttgtcgatcccataggatacctgagtcttgccgaggcgctgcggtactcgtcttcacccggcccgacattgcctacgccgtctagcaggtatgcctccacatgcataccccgcgggagccgcatctcaccgccatgaagcggatcctgcggtacctccggggcaccctcgacttcggcctcctccgccactccttgaccactgacctcgtctacatcgacgctgactggatcggcttccccgacacgcgtaggtccactacaggctatgtcgtgttcctgggcgacaaccttgtctcttggtactcgaagcggcaaccagtcgtctctcgctctagtgctgaggctgaccgcgccgtggctagcggtgtggctccgtcagctgctccaggagctccatagttcgctgacatggagcacgctgggctactgtgatgtcagcgtcgtatatctctccatcaacctcgtctaacaccagcgcacgaagcatgtcgagctcgatctccacttcatgcgtgagcgtgtcgccattggagatgtgcgagttcatgtaccaaccacctctcagttcgccgacgtcttcaccaagggccatcccacgccggtgtttgaggagtttcggtccagtctcaacatctatcatggctagagttttgactgcggggggtgttagatgtatttgtgtgtggctgtcattgtattgggccaaggcccacctactctattattaatacatcacccaaccttattgagagagttagggtttcagtcttttccagaatgcaatattatctaagacacatatggatttgcttctctcctcaagttgatagacacatgttttttagaatgctaccttttttaatgaaaagtaggaagtattcctctgatcctataaccctatatattaatatacatgcatataaaagagtgattgtcacagtaagctacatttacattaaaatttgaatctttgtaaggtctactgttggcattggatgtcaagtagtatgatgaaagtttattttgttattatatctaagattgtgcttaaaactggtaggggcatttcacttctaggaaaagaaaaaaaaatcctactttgacctcttttttttatatcctggctggtttaggttatctgagatactgagaccagctagctatcagttagttatacttatgcacattctttgctccataagtattctttatcttcctatgttggcattttcaatttgagttgttgtcacctgaatttcaatacttcatattctataaataccccccccccccccctcaaactaacatatttcaagtatgtttgaacaatgaacagttggtagttctctaaaaaagtttaaggatcttgcaggtttcctgcttctgacaaggcctccaagatgaggaatcttgatgcctcgttgcttccgcaaaccaacaagaatgttcagcagcaaagtgaagtcgatgtgaagcttgcatcaatgctctatgaagctttacttagccttagagaacagataatggaggagtgtaacgaaggattcaatgcgtatcacatattcaaacacgttgaaggaaatgagtatccgagtaccgagaacaaaagaagagcttttggatataaacggcctcggcaagacaaaggtcaagaagtacggggaccgcttgcttgcaaccatcgaggacttcctcagcaaacacccaaatccaaggagaaacagcggcggaggtggcggcggcaacgagcactccgatgcggcaaagaagcgaaggggctccaccgccatctctgcagcgagttacggcgactatgacttcgacgaacgcacgggccagcagtccaagaagcgcgcggccaagacgcgaactgtctctgcccacggcccccgctgcacggacgccgatctcgatgggcctgaggtggtggaggtggacggcgagctgcgcagcgtccggaagcccgtggcgtatggcaatggcagggttcttcccaagtgggcacccctctaacttattccaggaatttgggtacgtcaagtagagtagagtaccgctagggaataggaatgtaggcttgcacatatgtaatctcccaggttggctcgtgcacatgcagcgatgcagtgatgtcaagggttttctgtgatgcagttgtacattggaactgtggcgtcgaatgtacgtccagctggtacacgcgtcaaggacatacgagaccaggagcaagagttccgttgcttgcttccgtgggcagcatcgcgatcgcagtgtcggccacctgttgcccgaaacatcttggatgcaggtacatcttcgcacgcgtgtaccatcaagcgaccaaacttgaattaacatcatcgccatcatcatccgatggctactgtagtaatgtatgcatgtatgctgacgttggactgaccttaaacatttctcttgcatccagttgtcctaggctgtatataggtctagcaagtcttaagggtc

SEQ ID NO: 14120 - DNA, 1367 bp, Zea Mays
agctgcacacttcactaatctgagcttaactggcagctcagtccatggacgatatgctgaacgcaaaggagctggtccaatgggagaatggcttgtcattcaatgacatagcggctaggcaggggattcgcatccgcagacactgccgccccactgcctccttgaaggagatagaggaggagctgggagccccccttaacatcctagagaagatcatttgggacaaggagattgaagtagctgaggggcatgctaagaagcctcttgaggaggtgattcaggctgcaacgaaagcccctccttcaagagacttctatggcgctttagaagctgcctacaagcgtaatggggtgcctgcattgattgctgaggtcaagaaagcatccccgagtaggggtgtgctcagggagaactttaatcctgttgaaattgctcaagcttatgaaaagaatggagctgcatgtttgagcattttgacagatgagaagtactttcagggaagctttgataatcttgaaaaggtgcgcagctcaggagtgaagtgccctcttctctgcaaggagtttgtcattgacaagtggcaaatctataatgctcgctctaagggtgctgatgcaattctactaattgctgctgtgctaccagatcttgacataaggaaatttcttcagatttgcgaagagttgggaatgacagctcttattgaggttcatgatgaaagagagatggaacgtgtgctgaagataaatggagttaagcttattggtatcaataaccgaagccttgagacatttgttgttgatacttcgaacaccaagatgttgctcgagaaacatggggatatcatcagggagaagggaattttggttgttggtgaatcaggtctgtttactccggatgatgttgcttatgttcagaatgctggcgtttctgctgttttggttggggaatccctggtgaagcaagagtgccctggacgagccattgttgggttatttggcaaagaactgctgcactgaatgagaggacaaagattgtagtagtacatggtttggtggtgaggtgttagtgctaggctgctagctgttagccatagcatcatttgcagtaatagcattggttttattaataataccaccgaatgtgacatgcagaataaaaataatgttcaataagttccattcagtgattttctttagttcagtgacaaacgaatgcgatctgttcatgacagagggggatctcccaagctagttagcactatgttttttttttaaatctgtaagtggatttgacgggtctaaattattggaaaccctaactaggattggagttgggagatatattacataatagagttatatgcg

SEQ ID NO: 14121 - DNA, 1369 bp, Zea Mays
caaatcctcaacacctgcaccagcacggttgacatcatcaagaaaaagcagcagtcctcgtgatcacttggctcaatctcagcaatgatgtttatgactcggatacaggggctgatagggacaagaaagaatctgttgtcagcattactggcagccgagcaatgacacaaaatgcggcgaacttttcccttttcctcggctttgcagggctactttgggcctttgcagaagccaaggatatcagattcattttattggtgatctctgcaatcttctgtggttatgtttaccagtgtcctccattccgattaagctaccaaggactaggcgagccgttgtgtttcgctgcatttggtcctttggcaaccacagccttttacttctcaaacagcagcttaaatacttcgagcggaggagcggctcttctccctctcactaaaacagttatagcttcatctgttctcgtcgggctgacaactactctgatactcttctgcagccatttccatcagatcgatggagatctcgccgttggaaagatgtctcctctggtaagaatcggcactaaagcaggatcgcggatagtgtcgattgggattgtcatgctttacattctcttggctacgtttgggacatgcggatctctcccgccatcttgcattgtcctctgtgcccttactctgcccatgggcaaaacggtcgtggactacgtgctgaaacatcacgaggacaacgcgaagatattcatggcgaagtactactgcgtgcgcctgcacgcgctgtttgggatggcactggcctctggtttggtcttggcccgaaatggtatattagcctgacagacaggctcataggcggcgctgaaatccaggagagggtccagagcaccctggagtttcagaatcagcgagcaccctgttcctcaatttatgttctgaatctgaactacttctgattcgactatcgaacaggccgatgagaatggggcgcagtactgagcagctgcagttttgccaagaaacggtggagggaatgggccctaggagaagtagaactactacagcgtcagaactcagatgcacaccggcccgtatcggacggcaagttcggtgctcgagttcatttggttcagcgtccttgtacgctttggtccgctctcgggggcttgcttgctcgtgcacggtcagactgccgttgcgccggggtccgggggatgccagtgtatgtatgcatatggattgaatcccaagcaaggacgagtcatgcactcatgtacaagcattacttctgtgcacagacgaccatacagattatatgagatctcactcacaccttttttttttgcatttggtttagccagcgaccggta

SEQ ID NO: 14122 - DNA, 4939 bp, Zea Mays
atcgaggtgaaggtttgcaacgggaagcttctgcacgtagttgcttcacgaaagggtttctacttggcagggaagccacaaaacgtaagccactccctggtggacctgctgcaacagctcagcaacgcgtttgctaacgcatatgaggcgttgatgaaagcttttgtggaccacaataagtttgggaatttgccatatgggttccgtgcaaacacgtggcttattcctccaatatatgttgatcccgccacaaagtgcccagcactgccagttgaggatgagaattggggtggaaatgggggtggctgtggtcgtgatggaagatatgatcgcagatgctggtcaaaagagttctctgttctgtctagaatgccatgcaaatctgacgaagaacgggtgatcagagaccggaaagcttttcttttacacaatctgtttgtagatacagcaatttttagagctgcatcaacaatacggcgactcattgatcagtctatgaactcaattggttcccgtggtactactcatggttcaaacgtatttgaggaacatatcggcgacatgaatataactgtgaagaaagatgaggctgatgctagttcaaaggtggacgacaaggttgatggtgttgccttctgtaaaacaggtgctatggatattgcacaaaagaatcttctgaaaggtttaacttctgatgaaaatgttcttattaaggattcttccacactcggagtggtgattgtcaagcattgtggatatacagcaactgtgaaggtttctggacgtgcaaaggacagtaatgatgttaaacaaacacatgacgtctctgataattttgatggaatgctgaacattgatgtgcctgaccatccagatggaggttctaatgccttgaatgtcaacagtctaaggataccactccaaagtgttacgcatccagaaactgttgttggtaagcagaaccctagcccaaagtctcatgcttataaccccgcaaggaaactggcatgcaaaatacttgaggacagcttggtaaagcttgatagcatgcctagcataaattctagaattatcagatgggaacttgggtcctcctggctacaacagttacagaaaaaggattctccggcatctgagaatgttaagcggaatgcaacaaaggctgataaagaatcagctgtcaaaggtcttggaaagcattttgaacaattaaagaaaattaaaaagaaagaatgcaacattgacggttccagttctgagaaggaagaatgtaacagtaactgctcgtcaatgaatggtatgcaagtatcagataagatatctgttgatgaaacgaataagggagctgatgtaagcaagttaatgtcagaggatgctttctttcgcttgaagagtttgggagctggccttcatgaaaagtccctcgaagagctcacaaagatggcccataatttctatgatgagactgcactcccaaagctggtggctgatttcgcgtcccttgagctttctcctgtggatggaagaaccatgaccgatttcatgcatacaaggggacttaatatgtcctctttaggtcgtgtggtagagctagcagagaagctcccacacatccagtctatatgcattcatgaaatggttattagatcctttaagcacatcgtccgagctgttattgctgctgttgatgacatgcaaaatatttctgcagctatagctgaaactctaaacatattacttggatctcccagacttgaaaatggtgctgacacagatgcccatattgacaataatttgcgtttgaaatgggttggactggagctagttgcaagagattatgatatgaatagccctaacccatttgacaaatctgacattgtcagcattgttcctgtatgcaagcatgtggtctactcatctattgatggtcgaaacttactggaatcatcgaagatggcattggataaaggaaaattagatgatgctgtgagctatggaacaaaggcattgtccaaaattatagctgtttgtggtccataccatcgactgacggctaatgcatacagccttcttgctgtggtgctttatcatactggagattttaatcaggcaactgtatatcaacagaaggcacttgatatcaatgaaagggagcttggtcttgatcatccggaaactatgaagagttatggggatttatctgtcttctattatcgccttcaacacattgaaatggctctaaagtatgtcaaccgtgcactatatctgcttcagttctcgtgtgggctttcacacccgaattcagctgccacctacataaatgtggctatgatggaagaaggcatgggaaatgttcatgttgctcttcgatacttgcatgaagccctgaagtgcaacaagaggttgctaggagctgatcacatccagactgctgcaagctaccatgccatagccatagccctttcaatgatggacgcgtactccctaagcgtgcaacatgaacaaacaaccttgcagatacttcaggagaaactagggcaagatgacctccgaactcaggatgctgctgcatggctagaatattttgagtcaaaagcattagaacaacaagaggcggctcgaagaggcatgccaaaacctgattcatctattgcaagtaaaggacatcttagatcttcttgacttcataagcccagaccaggaaagaaaagaaagggatatgcaaaggaaatgcaggcgtgcaaagaataatatcagagctcatcatggtgaatcagttgaagagaaggagaattttcagcttgtttcaggatctcctcttgaagcaagcaaagacagttttcaagaagaaaaactggatgtgcatcctcctgctgtattagaagaaaattatgctgcccatgatgagcataagcaatgtgatgttttatcaccagaagaatattctgatgaagggtggcaagcagctagtatgagaggaagatctgcaaatgtaaggaagaaaagcagtcgcaggaaaccggctcttatgaaattaatggttgatcattttgaaggtagtcatacaggttctgtgtataggactggtttacaacctcaaacaaaaggagacaaagaagattctgtaagtgctcctagccagctttcatttggaagttttttgaaaaccgacaagttgaatggggattccagcattgctgaagataagacgtgcaatggtagcgctaaccaagaacaacggacaaagctaacaggaattaacaggccaaccagtatcgcttccaaattcatatcatacaaagatgtggctgtttcgccccctggcacagtattgaaacccattttggagaagaaggaagcaaaggagaaagatagtggacgtgatattgacctagcactgtcatccgaggaagaagataaaaagtttacagaaaaagagaaagaaaagccaagtgaggacagtagcaaagagattctttcaattcagcgagatttagagagtcatgcagaaatacctcctgacagcaacagtgatgaaggcccatctgcagctagtaaagcgtctggaagcaaactgtcagcttcagctcctccattcaatccaggatcagtgttatcaatgtcccagccatacagcacggtggcagtatatgatgccagtgctatccttcaggcaataccaagtcaagcaatggagattctcccttctgccattgacactagagtgcctcgtggtcctcggtccaccttgtactatcgtactgggcattccttccaaaggaaacaaggttacacgcacagccagagcactattgtaaggggtagctactcccccacaaccatgaatccacatgctgctgaatttgtgcctggaaaaacttcgcaacaatctgatgtggctgacagagaacccagtcctgctaatcctgtggccaattctgatctggatgttgtatcgcagaccacagatgaagcgagggccgaaacgcctgccacagaaaaggcaggtcaggttgagaaagtcgtttcaggtaaaggaaaggaaaacagggggaaagacatcgtgagaaactcatacaaaacagaacttgcaaggcaaattttactcagtttcattgtgaagtcggtgcacgacagtttaggtccctcccgggctgaaccagagaggaagccaagtggatcagatgaagctagtaatgaacagaccagcgtcttaggcaagaacgcttctggttctggtcgcaaagatccagataaacaagagaaagcgacggaggttactaagggcctgaaggatacagagggattcactgtcgtttcaaaacgccgaaggcgtccccagccgttcatgaaccccataaatggcctatattctcagccgtctatttgcacctctgtcagttaaggtcattgcgttttcgaagacctgcaatattttgagagatggacctttgccttcgcctttgcctttgcttagaggattggtagcagagattttccctatccaagtgagctgtgagcagcgagcatttagttaaactgtacaaaaggtttccgggataccctttttgtaataaaagaaactgatgtattccgcagtagctgtagcgctggatataatgttcctttgtatgttatatatgacagaatcataggaaatagcagatgttaagttaatccgatattcagtggagcgcccttgtgctttatgatgttcctcatgttgtgagccccagttaatcattgcaatttgcaaatatgctgccagactgccagagcagaagaaactgaatcttctaggcgccaagagttcgaaatcttattcatggaggcatgtctttggataccttgccagcgggtgagcagcacttcactgagaagcaattgcagctgcagacccaccagatcaccagaccaccggggcccggacaggcgtgaa

SEQ ID NO: 14123 - DNA, 1318 bp, Zea Mays
ttatttgccatatggctgttggttacaactccattgaagctgaagactgggagcttgctactaatggtgaagaaatgagcaagttggaagcattgcttctagacaagaaccgtaaaatggagcatgagctaacacaactgaaggttaaaatatcagagaaaacaagtgttcttgaggaagctgaaaaaaggattgttgaactaacttcaaaggttgaagagcagcaaaagctgattttgaaacttgaggatgacatactaaagggctacagttcaactgataggaggggctcactcttgaatgactgggatattcaagaaatcggctcaagtgaagcatctgagggctctgatccaaggcatgcatcggcagatcaagatcaaagttcgatgctcaaggtcatttgcaaccagagggatcgtttccgtgcacgtctgcgtgaaactgaggaggaactgaggagactaaaagagaagcatgagatgctgactgttgaactggaaaaaactaaagctgataatgtgcaactgtatggaaagattcgatatgtccaagactatagccacgacaagattgtttccaggggaccaaaaaagtacgcagaagatattgaaagtggttcttctgatgttgaagcaaagtacaagaaaatgtatgaggatgacataaacccgtttgctgctttttcaaagaaggaaaaggatcagcgttataaggaacttggtttaagagacaaaatcacacttagtagtggccgttttgtccttggtaacaaatacgcacggacgtttatattcttctacagcatcggattgcatctccttgtatttacattactgtacagaatgtcagctttgagctatctcaacacaacaactcagcaggatgaaatcattctggatgctggtaatcagaggctaacgcacatgctttaggccaagttccatataacagtagaaaaagaggctctctgggttttgatctatagaatctttggacaggatcgttgctgagattgctattgatttgtttgctttgtacccttaagcgccttgatatgtttctgtagataaaaagaaaaaaaaacctgttttgggggcaggcgtgggtgcggcatgagctttgaactatgtaatactgttgtactgccaatttaccattttgttggtaaatgaaagcacacttgtcacaaaggtatacggtatgccataccatcactacatcgtttagagtgaaatgcctctaaactttttctgcattctcttctagctctatgaactcatggaatggtcattcgttattttttttcactttttaa

SEQ ID NO: 14124 - DNA, 1419 bp, Zea Mays
tttagacctaatgtccctctataaacaactgcaaaagagaagtcattgccgcatctaatgtctattgttttaagcttggcgtggtggagcacatcttgcctgacagcccctttgcgtcccccagcaaggcctccactcaaaatgggagcatcatcagcaatgcggcttcatccctcttccccccgcctgcatccaccatggagctgcccccgtacagctcttgcttcttccaggcgcccaggttttctcctgggcatgaagccattgggctgtgaatacagaacaaggggagggggtctgctttcctctaatctggactatcggtgaccccgtcaagtggaggcaagagttaggaagctttgattaacaaatactaggtgtatgttcagagagagggacagcaacaacagcaaccaaaaaagagagagagagacagacaagtctaggttgttttagctctaggccctaagtatatgatgatagcagtcgtataaataacagtgttttagtaagtatctcctgccgggtatgaagactcaagaacaaaggtcagatctcgcgtatgctcgtttgtagcagtgtggatctgatacaggtaattgaaacctttagatggtggtagggctagtagtgagcagtagacgacaactagtcctggcagccagttgtagtgaggtgacatggctgcatacagacatccaaccaaaggaaacagagggtgtggtgtggaaagaaggggagagtggacaaaagccagacatggctggcgctgctgctgcataggcacaggcacaggcacagggaaaggtgatgagacgagaggggtggggtggtactctgctgggaccggcgcactcacgggtgcggagaatcagcttcgcctcacgagcgatgcagcagcggagacacagacacctctcgtctgcgtactgtttcgcccatgctcttgtcttgtacgcatgcagcagcgctccttgtcctttggctccatcgatgtattacctgctcttcttttcaactaggagtttagcggacaaagaaatgaaaaagtaattagcagtcatttatcttggtcaatggagtttatgttttggttggttcttactgctctcttgtttctaaactatactccctctattctttttttatttatcgtggtttagttaaaaataaactaccgggtaacaaatatttgaaaacggactaacttctagagttcgtacaaagttattttaagtttcactggaatgttaattactggtgaaaattggtaccgatctttgtgatagtaaagagtacaacttctaccaattcacctaagaaaatgaatttttttttgctctgttctgttctagttgggctaaaagttgctagattctttacgcttgtattagattttgtgcttaggatccaaatata

SEQ ID NO: 14125 - DNA, 1218 bp, Zea Mays
ggagctaaaattttgaaggagaaccccagaccacctcggcccacggacccacggaccatagcccagaaaggaccaaggtggaagaaacaaaacgaaaggcggtgtcagctgctcctccacttcccgtgtttctaactccggtggctccaccactagcaacccgtgcagcgagcccaccccgaccactgccatgtcgaggcgcggcgactgggtctacgagaacaacggcgggacctgcgtggccatcgccggcgccgattactgtgtcgtcgcggcggacacccgcctctctgtcggatacagcatcctcacgcgcgaccactctaagatctgcgacctggctgacaaatgtgtactagcatcttctggctttcagggtgatattaaagctctgcacaagaacctagctgccagagaattgctataccaacaccagcataacaaaaggatgagctgccctgccatggcacagctcctctccaataccctgtactacaagcgcttcttcccatattacgccttcaatgtgctcgggaaagggtgtgttttcacctatgatgcagtaggttcctatgagagaactggttatagtgctcagggaacgggatctactttgattatgccagtcctggacaatcaactaaaatcaccaagtcctctattgctccctgccagggatgctgtcacaccattgtcggagtcagaggccatcgatctagttaaggatgtgtttgcatctgcaactgagagagacatctacactggagacaagttggaaattgtagtcatcaacaaagtcgggactaagcgcgagtacatcgacctgaggaaggactaagccaacgcttcagttgtgctgcagctgtcatttgcttcggacatgtttcctagtctggggatttatgtctaaagccgttgcttgcatagaaacatatgttattacttgcatatgtcctgtaccagggttcagtcagcttgttttttttttgttgaaacaaattgcttggatattgaagcggtacttactggcggaaagtctatatttggttgggagcttaacattaatggcctcatccgaaatgtcacaatcacaagtctctttatatctcttctactcattcggattcgaattgccttttgtctttaaagatctttaacttttatgtagtacctcccttttaaattatatgatgtttttagtttcttttagtatattgt

SEQ ID NO: 14126 - DNA, 3563 bp, Zea Mays
cttttggaccctatagtggtatttctcattccaaaacaggcgtggctatggctaaaccctaaacccgcgaccgcactggcctttcctcccgccggcgatcaccgaagccaaccatggccgccaccgtcgcctccgagcactccatcgatcgcaagctctccgcgctcgtggagcaagctcggccgagcgcggcggccatgctcgccgccgccgaggccgttgacgccgtcgcggagctcatcaagagggtgccacagcagcaagcgacgccggaggccgcgcggggttttttgagggacctgggactggaaaccgagaagctttccttcaccttccgtccgccggaggtggtgcgtctcgccgggagccacgcggccggcgcggtcgcgaggcccgaagtcgctgccgacctcctcgtacgcttgccaaaggaatgcttccacgagaaggatttcctaaatcaccggtaccatgcaaagaggtgtctttacctctgtgtcgtcgagaaaaacttgaggtgctctaaattaatccgcaaagtttcatggtctaccctccaagatgaggctcgaaagcccgtgcttcatgtatatccagcgaccgaaattgtagaccttcctggattccatgtaagaataatcccaactgcggattctttgttcaacgtttcaaagttgaatgtatcaacaagaaataatgtccgtgcatatacaaaagatggtgtaaacctacccacaccaaagtataattgtagcatattggaggatatgtttttggaggaaaatgcaaactttattagtagcacctttgctaactggaaagctttgcaagaggccttggtgttggtaaaggtttgggcacgtcaaagaacttcaatatacacacatgattgtctcaatggatacttaatttctgccatccttgtgtttcttactgtggactctggaggaagcatgattactagatcaatgaccacaagacaaattttccgtgtattgatgaattttttggcaacttccaaggcgtgggcaaagggattggtgattcaatcaatgaagaagcgtacggtcaccaaagaggacattgccacttgcctgaagacatttgatgttgccgtatttgatatatctggccacattaatttggcgtttcgtatgacaaggtctgcttttttagagcttcaagatgaggcagtttgcgcacttagttgccttgataaatgcagagatggtggacttgaagagctttttatgaccaaagtcgacttttgtgcaaagtttgacacatgtttgaggataaacttgaaagggaactctaaggttactggattaagctattgtgtggatgacgagtcttggagaattcttgagaaagatgttcagtctttgctgcaacaaggacttacagatagaacaaagatgatccgagccctatggagaagcacaccttctgaatggaaaatagtggaaggtttctcagaatttggcagcagtccgcttctggttggtatgatggttagctcattggaaaagagttttcgccttgttgatattggtccaaaccctgagaaccgtgttgaggctgttaaatttaggaaattttggggagagaaagctgagcttagaagattcaaggatggaaatattgccgaaagcacagtttgggaatgccaatcctgggagaagcatacaattattaaaaggattgctgattatgtgcttatgaaacatttgtcgctgcagaaggatgatttgattcatgttgttgatcagctggacttttgcctcttagttgatggccaagatccggtctcgtcttctggagctttgcttgaagcttttgatactattgctaagcagttacgtctcttagatgatattcctcttaaaatatctaccgtgcaacccctagactcagcttttaggcacacttctgtgtttcctcctgaacctcatccactggcatacggaaggaattctcagaggctaccgaaattcgcaacaacttgcataagatctttagaagttatgattcagctagagggatctggtaactggcctttggatcccgtggccatggagaagacaaagactgcatttcttttaaaaattggtgaaagcttggaggatcgaggaatgtttgtttcagccagtgaaaatgaggtgaatgtccttacatctggatattcattcttactcaaaatatttcatgaaagaggtttagtgatgcaaaagccagttggagatgacaagacacaaagtgttctatcagaagataagatgctttttcagcggagccagcactctagtatgatcaatggtttgcatggtcgttaccaggtgtatggaccagtagttaggctagcaaaaagatggatttctgcacatctattttcttcatttatctcagaggaggcagttgagctggtagttgcacatatatttttgaagccattcccattccatgccccatcttctcgggttgctgggtttctcaggtttttgcggttgttatccagttttgactggatcttttcacccatggttattgacataaataatgacttcaacctgatggatgagaaggagatcaatgataactttatgctgagcagaaaatcttatgagcgaaacccccatgatatagagcctgcaatgtttcttgctacgtcatatgataaaacatctgaagcatggacaaaacagtcaccaagcaagtcggttctcaaacgggtagctgcttatgctaaaagcagtgcggagcttttaacaaatcttatgcttcatggtccatcaggggaatatacatgggagtgcctgtttcgaacacctatgagcaactatgatgctgttattctcctccatcaagagaagctttgttgcccccaccacgtactttttcctgctgagaaccctgacggtaagctggtggtctggggcaaaccaagtaaagatttctgcccctatatgccactgaacaaaggggcagtgaaaggtttgcatgatgcaagagagaaactcttggtaaactttgacccgactacatacttcttgcgagacttgaagtgcgcattctccaagaccttcaagctgtggtatggttcagttggaggagacgctgtgggtcttacatgggagaacccaaagaagcgtggcagagaggaggctgatgaggctgctcccgagccgacatctatccttaaggaggttggagatgttggtaaaggtttagtgaggggtgtgtaccttgtcaaggcaccaaagtttcagtaaactgacagggcgtgtgcaactgaagatctgaccaacaaaccgatgcacaagaaggaagacttccaagtgttggtagtcttccttccatccagggcagtgtttggaggctagcaatgggggatggggagcacacgcggtagtcatggtcatggagttgtaaacgagtcaagatgtgctgtgtttagaccactattactagtacacagctgccaaaagagaaatgaaggttgtagaacctcttattgaaattttgactgtgtagtatatgagtcaagatgtgctgtgtttaga

SEQ ID NO: 14127 - DNA, 1172 bp, Zea Mays
cctataccaaactttccaattacctctctcagaacaagcgtatcaacaatatgtggagctgagaacaggcatcatgttgcgggatagtaatagtcaagcaggttcctctacatactttgcataaagcacaaccctcaaaggaagaaagttccgcaacaacaccaacgcattacaccgccaaaaaaaaaaacatttgaagcaacgttatgaccaaagtgaattctgcatgcggcaatgccagagtttgcgtccgatgaccagagagctagagcatgcatgtccgacacagtgccgtgcagacctcgagcgtctgatgcgaagcatggtccccagcctggtaacaacaaggcactgacgatttgaggaacacatccacgggctcacgagtcctagtgatcaccatcgtctccctgtggcttctgtgaccgcattctccgcatccatttcctctggctgagcgtcgcctcatgcggcgccgagcagggtgagacagcagtcctctggtgatgctgcgccgttgccgagcagcttggcagctccgcgggaagcgcggcggccgtgctggtgaaggcgttgaggacgaggaaagcgagtatcgtgctgcattgcattgccatcgttacacagtatacaatacagtgtgccagggaagcagctcatttgattttgtcactgagaggcgcgacgatggcgggcggcgtgttggggaaccaggtgagcacgagcctgacgacgagcaccgtgttgtaaaggttgaggaagttattgatgccgctggccaccaccgtcccggccaccgagtccccgagcaccgccgcgaagcagagctccccggacgacagcaccgtggcacgccgcgccgccaccagacgcctcctgccctgggagaaggaggagaggtgggagtgggcggcgaagagcggcttcaggagcgggtgggcggccgccgcggacgcgagctcctcgaggcggcgggcgagaggggcgaggacgtcggggccggggacggggaacgtgcgtgttcgggggacgcccgggaagggcaggtggcgtacggcgaggaggagtggcggcctcgaggaggcgtggtgctgagccgggtcggcgctggaggcggccattggtgtgtgtggtgcttcgaggcggatggcagaccgcagacgagaggttac

SEQ ID NO: 14128 - DNA, 1012 bp, Zea Mays
gactggtcaccggaccgcgcggcgcccgcgaaaatgacagcggcgagcgaggtgcggaggggcatcaacctcgtctatggcggcggcagcatcggtctgatgggcgtgattgctcggacggttcgtcacggcggctgccatgtcctcggggtgattcctaaagcgctcatgcctattgagatatcaggtgaaagcgtgggagaggtgagggtcgtggacgacatgcaccagaggaaagccgagatggctcgtcagtcccaagccttcatcgctctcccaggggggtacgggacgatggaggagctgctggagatgatcacctggtgccagctcgggatccatgacaaaccagttgggttgctgaacgtggacggctactacgaccccctgctcgccctgttcgagaaaggcgccgccgagggtttcatcagcaccgactgcagccagatattcgtctcggcgccaaccgcgagcgagctgctcacaaagatggagcaatacacgcgggtgcaccaggaggtagccccagcgacgagctgggagatctcggagctcggctacggcagaggaggagacgccggcgccgccacgccgccagcagcagcagcaggaggagcagaagagggaaaaggcggctcgtagcacccacatccatctcctgaagcgttaccttcctccacctactgcttgctgatgtgatgacgcgtctgttacggtttcctggcaaatttgtttcgtcaaagtcgacctctccaaagtccaaaacccggttgaaccaggtgccgggtcgggacgtactggggagacgacgatgatatctctgtgttgggtgcttggattgtgtaagcttgctgctgctggtactattcttgttttctttactttttccccggtgtgtggtgcttgtggaaatggaatctgtgctggtgcattgcagtgcagctaccctaccccgtccccggccccggggacgcacgcgacgacgtcacacacaggtgcgcccggccactga

SEQ ID NO: 14129 - DNA, 2081 bp, Zea Mays
attaatatcagttcgtagcccacacagtcgggtaagaataaaaaaggtcgccctcatccaatccaatccaacctgtccacttccgctccacaaccccacgaccaataaaaaaccaacggaaaatatcgtacagctgactggtccagtagattagatgcgaatgaatttaaaaaaacaaggggatcacggaatctgggcccaccgctccctcgcccacttgtattaaaaggaagggcctccatctcaactctcatccatctgctctgctccggtccgttccgctccttcctccccctatctagctagccttcccgttcctgcatcgcggcggagatgggcgcctccaccacgccgctcgcgtcggcggcggcgctgcttctgctgctgctcgcgccgctcgccgcggcggcggacagcatgtcgatcgtctcctacggcgagcggagcgaggaggaggcgcggcggatgtacgccgagtggatggcggcgcacggccggacctacaacgccgtcggcgaggaggagcgcaggttcgaggtgttcagggacaacctccgctacgtcgacgccgcagagggagaggaggctcggtgacaggtacctggccggcgacaacgaggacctgccggagtccgtcgactggcgggccaagggcgccgtcgcggaggtcaaggaccagggcagctgcgggagttgctgggctttctcaacaatagcggctgtggaaggcatcaaccagattgttactggcgacatgatctccttgtctgagcaggagcttgttgactgtgacacttcatacaaccaggggtgcaatggaggtttgatggactatgcgtttgagttcatcatcaacaacggcggaatcgacaccgaggaggattacccttacaagggcacggacggacggtgtgatgtcaacaggaaaaacgccaaggttgttactatcgacagctatgaagatgtaccagcgaacagtgagaaaagtctgcagaaggcagttgcgaaccagcccatcagtgttgcaattgaggctggtggcagagcatttcagctctacaactcgggtatcttcacaggaacctgtggaaacagcgttggaccatggtgtcacggccgtcggctacggcacagagaacggcaaggactactggatcgtgaagaactcttggggcagcagctggggcgagtccggctacgtcaggatggagcgcaacatcaaggcgtccagcggcaagtgtggtatcgccgttgagccgtcgtaccctctgaagaagggcgccaaccccccgaaccctgggccgaccccgccttcccccaccccgccgcccaccgtctgcgacaactactactcgtgccccgacagcaccacctgctgctgcatctatgagtacggcaagtactgcttcgcctggggctgctgcccgctcgagggcgccacctgctgcgacgaccactacagctgctgcccccatgactaccccgtctgcaacgtcaagcagggaacctgcctcatgggcaaggacagcccactgtcactgtcagtgaaggctacgaagcgcaccctggccaagccgcactgggctttccctggcaacacagctgctgacggcatgaagagcagcgcatgagaaaaacgcagcatggcattaggccgccaacagccagcatgattagagcccccctgcatgcagaatgatcacccggtcccgtagttcacgacgaaagcatggctgggcggccgctgtttacggatttacttatatcactatagtaggtactcctcctgtacataagcctgaaaaaaaatgggttcagttgtttatggaactctgccaaatttgcttttgcatgccatgtaaaaatccagctagctcttgccaagcttcccctgcgcagttcaacaggactgcgattgatattcggtgtaatggaagtatttatcggaacaatcagcaatgttatgctatattcatttcttggacgtgaacaatagattggtcgatcccagttctcagagcggtggcgcagggggatggtccgtctgaggccttgcccaccaccaaacaagaggaagcggt

SEQ ID NO: 14130 - DNA, 1704 bp, Zea Mays
gtttatgatactgtctacctatatcaaatcctacttagagattaggagccactcctatcatggaacttatgattgcagcgagaaaagcagttcctgagttgcaattggtgtatggcattgctgttgacagagtctacactggcacacttatgacatcacttgatatggcaggattatctattaccattatgaagtccggcgaaagcattttgaagagacttgatgctcccactaaagctccagcttggcctgttggttctgaaggaaaccgtccaccagcaaagtttcctgttcctctaccaccatcaccttcaatgaaggatgacgagattcttgctccatctcaggagctgagcaagcaagggtgtatcctggaggctgttattgaagcaagtgctactgaaattatcaatctcatggatagcctaaatgaatgggacagtaaagtgggcgatggtgactgtggaagcacaatgtatagaggtgcaacagctattcttgaagatatgaaaaagcgttaccctatgaatgatgcagcgggaacaataaatgaaattggggcaacaatccgaagggtgatgggtggaacaagtggaatcttgtatgccatactctgcaaggctgcgtatgcaagcttaaagcagagctcaactgtcactgcgaataaatgggctgatgctttagaggcctccattgctgctgttagcaaatatggtggtgccagcgcaggataccgcacaatgttggatgccctaattcctgcttctgctgttctgaaacagagacttgaggctggggatgatcccgtgactgctttcatcgcgtcttctgaagcagcatcagctggcgctgaatccaccaaacaaatgcaagcgaaggctggacggtcatcatacatcgctccagatctcctggcctcaatccctgatcctggtgcaatggctgcagctgcatggtacagagctgctgcccttgcagtgaagaacaaagtgcacggttcaaagagctagtagcatacgcaatgcttcattgctagacccaaaatagactgacaggaaaaatcactggggcattttctcactccccttagatttggtttccgcttgtgcttttgcatgggccgagaaaaaaaatgacttccatattgtctcacccttctcacatcatacaaagagatgttcaaagagttcgtcgtccgtacaagttaagggaagctatgcttttgcactgccgtgatatctcagcatgctgtcagtgttggaatgaccattgtttaatttgcccgagtttcgttttaatggctgagcccatgctgtcagtggtgggaatgatcgttgtttattctgcccgagtcccgtttcaattgtgcgcatttcggtaggatgtttaacaaaaaaacgttgtctttgaccgaggggtagtttgcactactgttgacttgtaatgttttttatcttgatcaatggcttgctgcatggtttctttctttctgggcaagattctcgaatggaacctaagacgtctatttatcgaggttttgcatatcatgaccaaattatcttgaggaaaacttgttactcgtacttgcctttgtatgcctgaacatctaattgtttttgtggttccgcaatttgcactttgatagcccgtaaataaaatattcaaatggagagatgcctatttaaaaaaaaagaaaagcaactg

SEQ ID NO: 14131 - DNA, 1181 bp, Zea Mays
ctcagagctagcctccaagctcgcaattatataagcatcgtcccttgcaactttccagaacttttgtccccctccctcctccacacctctcgttctctccccctccgcctgctccctctcaggagcgcgcgcgcgcgcgcccagatctagggtttcgtccgcggcaagatgagcagcccgcatggcggtctcgacgaccagatcgagcggctcatgcagtgcaagccgctcgctgagcctgaggttagagctctttgtgagaaggcaaaggagattctgatggaggaaagcaatgttcagcctgtaaagagtcctgttactatatgcggtgatattcatggacaatttcatgatcttgctgaactcttccgaatcggtggaaagtgtccagatacgaactacttgtttatgggagattatgttgaccgtggttactactctgtcgaaactgtcacacttttggtggctttaaaagttcgatatcctcagaggatcaccattctcagaggaaaccatgaaagccggcagattactcaagtgtatgggttctatgacgaatgcttaaggaagtatggaaatgcaaatgtctggaaaacctttacagatctatttgattacttccccttgactgcattggtcgagtcagaaatattttgcttgcatggtggattatcgccatccattgagaccctcgacaacatccgcaactttgaccgcgtccaagaagttcctcacgaaggtccaatgtgtgatcttctgtggtctgatccagatgatcggtgtggctggggtatttctcctcgtggtgctggttataccttcggacaggatatatcagagcagttcaaccataccaatagtctaaggctaattgctagagctcaccagttggttatggagggattcaattgggctcatgagcaaaaagtcgtgactatatttagtgcacctaattattgctaccgctgtgggaacatggcatcaatcttagaagtggatgattgcagagagcatactttcatccagtttgagccagccccaagaaggggagagccagatgtaactcgtaggacacctgactatttcctgtgacgcaaaagtgatgtggatcatgcagagcgaaggtatgtagaattatgtaccataatgctgatttatgcgtgagcaagactctctacttg

SEQ ID NO: 14132 - DNA, 1624 bp, Zea Mays
ggagtttgtgttcccgacctccagcctcctggaaccaggatagggacagagacggagccacggtcgcacagagcagtcttagctccggccacggccaccgggagtagctctggccatgaggacctcaacggctacctgtgctatcctccctccgcctacctgctcctcccgtagtttaccgctccgcagcttcatcggtctccggtggtccgccccccgtttccaggttagggagcgagctggtgcgtccgtagcggttgtcaatggcaagccgggatgcagcttcagactcggagtacctactttaaatgtttgtcaatctcgccaaaggtctgttgtcattagaaatgaacatgctcaaaatgctgaccttccacgaaaatattcaaaaagagagaagaaaccatttcctatcccagtgctggagttaaggcgccgagcaaaggagaggatgaaggcagcacaagggaaaccgaaacaaccaatgcctccaccaaaaaacggaatgttagtgcgtagacttataccagttgcatacaaagtgtacaatgcaagaattttgctgatcaacaacttgaagaggcttatgaaagtagtaccagtaaaaggctgcaagtattgcagcgagatacatgttggatctgttggacatcctttccgaacatgccgaggaatgtcatcagatcaacgtagaggagaacatgactggggaagtactctagtggaggcagttttcttacccgtcgaagcctatcatctagaggaccgtctagggaatcgcattcctcatgatcagaggtttactgtaccccgcattcccgctctcgtggaactttgcatccaagctggagttgacctccccgagtaccccacaaagcgtcgaagaaagcctatcattaaaatcggaagaaaagagtttgttgatgcaaatgaagacgacctaccagaaccagagcctgacagatttaggcagccacttcttgaggaactacgttatgatgagattattgctccatctagcccagaggagacggtggctcttgccgaggagacacttgaagcgtgggaggccgttcgggacggagccttgaagcttatgaagggctatgcagtgagggtttgtggatactgccctgaggtgcatgttgggccaactggccacaaagcacggaactgtggagcttttaagcaccagcagaggaatggacaacatggatggcaagcagcggtgctcgatgacctgatacctcctaggtacgtgtggcacatgccggaatccggggaagaactgcagagggagctaaagaccttctacggtcaggcaccagcagttgttgagatgtgcattcagggtggcgcaaaagttccggagaagtataaagccactatgagactagacataggaatcccctctagtttgaaggaggctgaaatggtcgtctgatcctcccaatgatctgggcagatttgatcaacctgtaattgagttttttcctttgtgttgaaaagatgatgtcgtcaccaagctccatcgtggcttgacataggttgaatctgttagccaatgtgtatatatcagaactcagatgagatgattctcgttcggttttctttcaaaaaaaaa

SEQ ID NO: 14133 - DNA, 768 bp, Zea Mays
tttaggaacatccctactcggaaggctcaccaaatcgtcctacgcttctgcctcctcctccacgagggtttatgaccaaatgcctgagcctagatgggttatttcaatgggcagctgtgccaacggtggtggatactaccattactcctactctgttgtacgtggatgtgaccgtatagtccccgtggacatctacgtccctgggtgcccaccaactgctgaggcactgctgtacggtgttcttcagctccaaaagaagatcaacaggcgtaaggatttccttcactggtggaccaagtgaagcatgcttctgctgttgctcgcttgctacgtttctttgcactcgacctacctgtcttatctgaaataaggacggactttgctcggattcacaaatttgttgtgcctggaaggatgtatgcccaggttgtgacgaacatataacttgtgtacttggagtcagttcgcctgtaatggacaccagacctgctgtgaatctgtttttaagcttccattgtaatacagcaatacaccatatacttgtatgttaatacaccatatacttgtatgttaatgggtatcttccccggttccccctaccattgggttgaccggttgagatacaggcttacaaatcttgtcttttaggccatgtttggtttctttagtctagggactaaagtttagttaggggactaaagtttagttcctaacatgtttggttctaggggctaaaaatagtaaaatgtactaaatgactcataagaa

SEQ ID NO: 14134 - DNA, 1432 bp, Zea Mays
acaaaatggccctgctttcacatagtagagttctacggatggaactggatatacaaaactttatgcagaaccctcagctgcaggagtttgaattccagaactttccgacttcttacctccgctgtgctgctcatcgtgttgcacaacattatggcttagagactatagtagcagatagtttagtagaaggctcagttagcaggattgttgcaagaaaaacagcagaaagcaggtatcctgcaatttttttatcagaagttcctagcaatcaagcaagaaatgatcatgaaacagctgagaagcttaagtttgtcatttatcaaaggcccaaagcattccaaaatggaagcgctgattctagaaacaagagtggtgtaccaaaaactgttgatgagagaatagaggaatataataaagcacgagcacgcatcttcaatggttccatttctgcagattctgatgctgcaagtattatgggaactctttctactggcaaagatgaaccagtaaatgttgacccttctgttgatgaaaccaaagtcagcacaatgaacagtcgttccagagttgctgtttttaaggatactgaaaaggatcgtagtgacccagactacgatcgaaactacaaaaggtatgttaggagctcagtgcctggcttcaacttgagcccaggtgtttttaactttgttgtgcctcagtttatgcagtatgacattggttatgtgcaatctcctggcatgtccacaaaccagcatactatgtactttggccagcctgatctaacaatagggtcttctggagctgctgtttatcgacattggccaaccccaacaatgatgtatccccattgctatgataatgttagtccaatgatgtctcaggttcctctgtaccagtctttcaaccatgattaggagattctgcttgctggaaagttgggaacaattctctgttgaacttgctatgttgtgttgtcctatgttaagtggagttcctttagattcgagccgtttttattacaaaaaattgtataaggagtcctaattcgttgaaactatttcgtgaactagtctggaactgtgatgcttgtctaatgtctagttctcgtttgcaatttgctcccggtttatagttagtagtgtgctgcgactggtcttgaaccgtgtcgcgtggtcgtactggtagaaccaggttgctacttgccagcagtcattgctttgattccgattttttatttaacttctttttaatcaagtatttcaaataatctaccctagaagttacttttacatctagttgtgccagaccacaaggacgacaaaataagattgttaaaatatgaaatgtaaatagaatttgccattgtttttcccattgagtttagagttcaaatgtcacaccggtatattccttaaattttcttatattcctc

SEQ ID NO: 14135 - DNA, 100 bp, Zea Mays
agccagcggcaagcacgagcgctgaggtacaaccggcaacactcggcgagcacgcaatgaggcacacaacagcgacgacagtcgaatcagcaacagagtg

SEQ ID NO: 14136 - DNA, 971 bp, Zea Mays
attgcactccaatgctgcaattacaatgcaatgaccggggtttgttagtgagctagcacgcgtggcggctcctggagggacaataatcatcgtgacatggtgccataggaacctggatccatccgaaacctcgctaaagcccgatgaactgagcctcctgaggaggatatgcgacgcgtactacctcccggactggtgctcaccttcagactatgtgaacattgccaagtcactgtctctcgaggatatcaagacagctgactggtcggagaacgtggccccgttttggcccgccgtgataaaatcagcgctaacatggaagggcttcacctctctgctgacgaccggatggaagacgatcagaggcgcgatggtgatgccgctaatgatccagggctacaagaaggggctcatcaaattcaccatcatcacctgtcgcaagcctggagccgcgtaggaggaggccaaggagcacaagttactagcacaggcacaggagtgccaagtgcaataatgtagatccgtggcaccatcgccgtctactcatctatactgcaccaaaatcaacattctcctaggacatgttaaataattttctgccactcgtcgagatatttcaaattcactgttccacacgcttccgttactgtcgatctacacgtcgcggcctcccctacctttcctttccatcccagagtcgctttcttcacacaagcatttgtacgtccttgtgtgctgggtctatgagtacttgggccgaagtctgggcacgtgcccaacaggcatccatatatgggctccgccacttcaccccacccgtttgtagatccttgtttcgagtttcagggtagagtattatttcacaccttgtttggccgacacgtcataagtggataagcttctatactttttctgctgttcctggatcatcgtctctaatctagctccagtgaaccggacattgtatgttc

SEQ ID NO: 14137 - DNA, 1600 bp, Zea Mays
gcgtgagagggaatgctatattttgttcaaacgcaacatatatactgccagcataaattgtcctagcgtgaaaattggacaaatttcacagttcgccaatcgaacgcaacgacaaccaccagtccgtcgccttgcatcgacatcgatcgataacctacgcacggaaccagctgctaggagtgttttcctttcctatatatagtgatgtttgattgtcagctccacaaatcgataggctaaggaagctccatcgatcctgcgttattttgccggtaattgattgatagatggcgtcggagaagagcaagatcctggtggtcggcggcacggggtacctgggcaggcacgtcgtggcggcgagcgcgcggctgggccaccccacctcggcgctcgtcagggacacggcgccgtccgacccggccaaagcggcgctgctcaagaccttccaggacgccggtgtgacgctcctcaagggcgacctgtacgaccaggctagcctggtgagcgcggtgaagggcgcggacgtggtcatctccgtgctcggatcgatgcagatcgccgaccagagccggctcgtcgacgccatcaaggaggccggcaacgtcaagaggttcttcccgtcggagttcggcctggacgtggaccgcacgggcatcgtggagccggccaagtccatcctaggcgccaaggtgggcatccgccgcgccaccgaggccgcgggcataccctacacctacgccgtggccggcttcttcgcgggcttcgcgctccccaacatcgggcagctcctcgcccccggcccgcccgcggacaaggcggtcgtcctcggcgacggcgacaccaaggcggtgttcgtggaggagggcgacatcgccacgtacacggtgctggcggccgacgacccgcgcgcggagaacaaggtgctgtacatcaagccgccggccaacacgctgtcgcacaacgagctgctgtcgctgtgggagaagaagaccggcaagacgttccggcgggagtacgtgccggaggaagccgtgctcaagcagatccaagacgggcttcgagatcgacccggccaagggggtggacgccagcgaactgtacccggatgtcaagtacaccaccgtcgacgagtacctcaaccgcttcctctgagcctgaggtctcaacaaacaggacgtcacgtacggccgcgccggggccatgatgtgtggacgtcctcatcgtcagctgcttacctaaacatcactagcagcataccgtagtgtacgctacggtagaaatggaaagacaatatgttttctaaataataagatagattaaggttcatgtcaaaagggatttatgatgagttatatcacattgttgagctaacaaaaaatatgcttaaaagagtaacattatcatagctacaatatcttttgaagccacctaaattctcacgcgaataagatgtttctgtatagcttccgaaatgtcgtctttagatttctcgtgcttcaacatctttatcaagaatttcgtcctcggtgcatctccttcctacacaaattattacaattcattgtcctaaaataacaattaattattcttctctttatcc

SEQ ID NO: 14138 - DNA, 2247 bp, Zea Mays
cgttgtcttctctagcgacggcgaggcttgagcgctcacgtcccggcgttcccgtgccggtggccaagccagcggccgacgagatggactacctcaggacggtggttccgtcacaactcttggcagagcgcggctccaatcttgtcgtcatcaacccaggatcgggaaatgtgcgaatggggtttgctagtcaggatgtgccattcaatataccacattgcattgcccgacacatcaatccacaagagggcgaagaaccaagattctctgtgcgcgatcagatgctcaactgccatgctacttcatcgcagaatgcagagcgggagagtgcatatgatattattgcagcactgatgaaaatcccatttttggacgatgaagaaatgccttcaccgaaccaaccccttcctccaaagatgggacgtgttgatggcttctcttcgcagcaaaacagagacgataataaattcacttggacagatgtgtcagagagaattattaagccatccacaccattcgataggtcagtatacaaggatgctgaggaagatactctgccaagcacatctgatgatgataatggacaggactttaaagagaataagtataaagaaatgatatttggagaagatgctctgaaaatccctccttcagagtcatactgtctgagtcgcccaattaggagaggccattttaatgtgtcccataattattcagtgcatcaggttttagaagatttacgcactatttggaactggatactgacagaaaagttgcatatcaacccaagagacagaggtctatattctgcaattcttgttcttggggagacatttgacaaccgagaaataaaagagatgctgtctattgtccttcatgatttggggttcagcactgcagttgtacatcaggaagctctatctgcagcgtttggaaatggtttatctacaacttgtgttgtcaacattggtgctcaagttacacaagtagtttgtgttgaggatggagtagctttgccccacacagctctggcgcttccatatggtggagatgacatctccagatgcttgctttgggttcaacgtcgccatggcacgtggccaaacttccaaactgatccaatgagcaatcctatagatatgctaatgctcaacaaaatcaaagagtcatatagccaaataaagactgggagcattgatgcagctgtccttgttcattcatatgataatgaaaggtctggtggacatcagaagacaagactatcagcaattaatgttcctcctatgggtcttctttacccaagggttcttgttccagaagagtaccctccacctcctcgatcttggttccaagactatgatgacatgctggaggatacctggcaaacaagtgatggtctttaccctagtgggaatggtgggtttggcatgtgggacagttatccgatgtttcccactagattaaagaaatttgataacattggcctcgtagaggccattattagtagtgtactttcaacaggacgtgttgaccttcaaaagaagctgtttggtagcattcagttggttggtggtgcagcttctacagctggccttgcacaagtgctggagcaaagggttcgcactaaaatttcagcaaaccaatctattgagaaagttgaggtgttgcaatctaggacttatccattatttgttccatggaaaggtggagtgattttgggcgtccttgatattggtaaggatgcgtggattcatagagaagattggattaaaaatggtgtccacatcgggagtggcagaaaatataaggattcctattttcttcaggcgcaagtaatgtgctactacaacgtataacagtatcttatttccgagctacacacgaagacttgcacttatacaggttgttcgaccgtccaaaccatcctagaatatgattggtggactgcgattaaattgcgtacatgatgcatcagttctatgcatgctcgctgctgtctgttcggaggtcatcaactcgggacctggactaagggccttgtcgttcgctcaacccctatgaaaaagtttggctttctaaagatgtagtagaagtactcatttattccctgccaattgaacatttcaaatcttcgtatggtgttaatgaaaaatctgatgtttggattcgtatttatttccaatgataatgtatatgtgcattctcgactgttttggaaagaatgaaaaatcctcgtccgtttgcgta

SEQ ID NO: 14139 - DNA, 3171 bp, Zea Mays
gcaaaaccagcgcacgaacaccgtttcccaccccgctcgcagttccgcgaaccggtcgtccgctcgcaagcttttgccgcgatgcccgagcccgaacaagcagcgccgcgggcccgaggccgtccacgtcccactcgcagctcctccattcccgcgcgtccgctccaccgcaacgctccgcgaacccgttcccttcaaagcggtcacctcctcccccgacccctcgctggcgtcgcctcccatctcctgcctgcccttcacctcctgtccaccctccccctgtcgttcccgcaattccggctcacatgaccgtccgggccgcggccgtgctggtggccaccgccgcgctcgcgctcctgctcccgggatgggcggcggcggagtggagcctcacgaagaaaggcagcgtcgtcacctacgatgggcgctctctcatgatcgacggcaagcgggacctcttcttctccggcgccatccactaccctaggagcccgcctgagatgtggccgaagctgatcgagcgggccaaggagggcggcctcaacacgatcgagacgtacatattctggaatgcacacgagcctgagcctggcaagtacaattttgaaggcaggttcgacttgatcaagtacctcaagatgatccaggagcatgacatgtatgcaattgtgcgcatcgggcccttcatccaggcagaatggaaccatggtggtctgccgtattggcttagagagattgaccacataatattccgggcaaacaatgacccgtacaagaaagaaatggagaaattcgtgagattcatagtgcagaagttgaaggatgctgagttatttgcatcgcaaggaggacccatcattctaacacagattgagaatgagtatgggaacataaaaaaagatcatgcaacagatggtgacaagtacctcgagtgggcagctcaaatggccctcagcacacaaacaggagttccatggataatgtgcaagcagtcttcagctcctggtgaagtgatccctacatgcaatggaaggcattgtggagacacatggacacttcgcgacaaaaacaagcctatgctttggactgagaattggactcaacaattcagagcatatggcgatcaagtagctatgcgttcagctgaggacattgcatatgctgtgttacgattttttgcaaagggtgggtcattggttaactactacatgtaccacggaggaacaaattttggaaggactggcgcttcttatgtgctgactggatactatgatgaagctcccatggatgaatatggtatgtacaaggagcccaaatttgggcatctcagggacttgcacaacgtaataaggtcatatcaaaaagcattcctctgggggcaacattcgtctgagatattgggtcatgggtatgaggcacacatctttgagttgcctgaagaaaagctatgcctctctttcctttccaacaataacacgggcgaagacggaacagtgatcttccgaggggataagcactatgtgcctagccgttctgtctccattcttgctgggtgcaagaacgtagtttacaataccaagagagtgtttgtacaacacagtgaaaggtcattccatacctcagatgtaacaagcaagaataaccagtgggagatgttctcagaaacgatcccaaagtatcgtgatactaaagtcaggacaaaggaacccctggagcaatataaccaaaccaaggacgatactgactacttatggtacaccacaagctttcgcttggagtcggacgatttgccctttagaaatgacatccggcctgtgcttcaggtcaaaagtagtgcacacgcaatgatgggatttgctaatgatgctttcgtaggatgcgcgcgcggaaacaagcaggtgaagggtttcatgtttgaaaaaccggttgatctgaaagtaggtgtgaaccatgtcgtattgctgtcgtcaactatgggaatgaaggatagtggtggtgaacttgctgaagtaaagggcggcattcaggagtgcctaatccaaggtctcaacactgggacgttggatttacaagtcaatggctggggccataaagctgcactagaaggtgagtacaaggagatctactcagaaaaaggtttgggcaaagttcagtggaaaccggccgagaacgaccgggcagccacttggtataagagatactttgatgagccagatggagatgatcccgttgtacttgacatgagctcaatgagcaagggaatgatttttgtgaatggcgaaggagtgggtagatactgggtctcataccgaactcttgctggaactccttctcaagcagtgtaccatatcccgcgtcctttcttgaaatccaaggacaaccttttggttatcttcgaggaggagatgggcaagccggacggcatcctcgtgcagaccgtgacgagagacgacatatgcctgtttatctcggagcacaacccgggacagataaagacgtgggacacggatggtgacaagatcaagctcattgcagaggatcacagcaggcggggcaccttgacgtgcccccctgagaagacaatccaggaagttgtctttgccagcttcggcaacccggacggcatgtgcggcaacttcactgtaggcacttgccacactcccaatgcaaagcagatcgttgagaaggaatgcctcggcaagccatcctgcatgctgccggtggatcacacagtgtacggcgcggacatcaactgccaatcaacgactgccacgctaggggtgcaggtgagatgcggaggcggcaagaagggtgcctgagaacaagacggatgctgctaattgacgtttcagctcgtttgtttgttcgtcccttcggtttggcactgatgcttatgacccattggtctgccattgcaattgaaatgtggttggaacgtgcttgatcgggaactaacatgaaatgagtgaagggtagatgctgatctgaaaaatatgtgtgttcccccctctttccttccatgtcgtgttgtttcaggtaaccgtcacaatatatataggtggtcccctttggaatccggggattattccgtttgctgtatttttttctgtgaaaatgaactgattcctgtcaattttctatatgatttatgattcatctgaaattcctgag

SEQ ID NO: 14140 - DNA, 2253 bp, Zea Mays
ttggcatttgttgtttcatataggtgcaacttgatgttactccaaaggttgaagaaaaaaatcaagaaagggaaaagaggcccacaccgttcttggaataacagcctggttgtaatcaagggtttaccaaaacttacaggatctattgatcgcatgcctacaaaagcgtttgctggtgatttaaagctgcttacactaaatctgagaaaccattccgaatatgctgtgaagggtataaaaatgaaacttagcaacccaagatttttaattcccggcgattcatcggacattggcctcaagttcccacactgcttaaagaggcacgtgcaatcagaaagcagtgttgtatcagccaaaactatgaaggacaatttcaagagtctgctctttgcatttcctcaggatatagaaattcaagcaggggcagcactctcttggcctatttggtttcatgcggcaactcctggaaatgtttctctttatatatctctgtattacgaaatggggagttccagtgatattaaataccgtacactacgcatgcacttcaatcttgaggttttgccgtcacttgacgtatccttttctgtaagcacgtcctcatcaagattgcaagagtatattgttcgcatggatgtcatgaacaagactccatcagagtcatttgtgcttcatcagttatcatgtgtcggtgataaatgggcagtttcagcattggcggcgtgcagttcaatcaactctgttgaaacagtatcagaaaatcaggctgtgtcgtacttcttcaaaattaaggattgtgaggcggattcttgtaaagaggcagaaagtgattcctgcacaagcgatatggctttgtgtccaggaagtagcactgatctgtttgacattgcacgatctccttttgttgattttcaccatcaagaaagatgcaggcaagtgaagatggcaaaggggccatgcagccttcttgattttgttctaatctcaaaggcagttgataactcttccaagcctactccagacttcgaactactttctcatcacacatgtcattgcagtgctctaagccagaaccctatatggtggcttatggaagggcctcggacaattagtcatgatttctcaaagtcttattgtgaggctaacctccaattggtcattcacaattcagaagctcataagattttggtgagagtggtcacttttgatgtaattccagagaaaaccgtccatcctcatgactcaaccagtgctcagggtggatggtatgatgtatcactggaaagtgacgtaaaggccatctctagttccaagagtacacatcaagagaagcgatcttcgaagagcattccaccatatgtttggtgttcattgagttgtgctcaaatcgagctccaacctgacagttgtgctagagttcctctaaaagtgtgcatatttgcaccgggcacatacaatttttccaattatgagctgcaatggaaagtgcatctatctgagggaccacatgtgggtgaaaatgagaaccggttatctggcggtggtctaggctatcctttctatgtcactgtccttcaaggtgtctaagtaattatcaggattcaagaagtaccttcttgagcgtcaatatagaccagtgcaaaactcaggaactacacccaattgcaacgggctgatgataataggtgccagccagtccagtttgtgcaaagatctgccccggaagttccctgactgaatatacttggatacgctcatggttctgcttcggtaccgatatatttacacgtcattttgaaggatgagttctggtgagtacatgtatacaattgtcgctgggaacaaaaactaacggtaattgctggtggatttttggcagacagaatataccgatagaagttttgcttgtctaattgttgatggtggctagtaggagcatatactattcctgtacatcctgtttaacttgtcgctgctagacgatttcgcaaatgtagtatgtagtggtagatggatccgataaattttctgtaattttgacgaggtaatcaggcaatcgtctcgagattgttgttgtatgggcgacagtattttttcattgtttgtacaatccttttaaaaatcatcgtctggccttgagcctttatgccatatgggtatatgttgattccccttttcagttcctcgtatcgacgtccagctgtccacatcaggtgcaagtgtctgaggggtgctgttatttttgatattttc

SEQ ID NO: 14141 - DNA, 1568 bp, Zea Mays
ttggttggagtctaaatacacatcctgcagcacggtgatgttgatgccacaatgctggcatgcattgcattttcctgccccaatttacagtccctggatatcagcatggccaatagcgcggtcaacaggataactggggatgagctatctaggtttgtttcagagaagcgatctctgtcagttcttaaactagatggctgcagcagccttggttttctcaacatcagctcttcaagcctctcaacactttggatgtcaggtctttgttcccttaccaaggcggtcatgaactgcccaaatctgaccgagctatcactggacttccccaaacagaataacgattccaccgacctggctgctctaattgatagtctgggccgcacgtgcccaaacttgagaaacatgcacgtctcgtcgatccgcttatgcaacgaagccgtgtttgctctagaaagcgccaatctcaggggcctatgcatgctgtctttggttctaggttcaaaaataacagatgcagctgttgcatctattgttcgttcatactcaagcttggagctgcttgatttaagtggatctggcattaccgacaacgggcttgggatgatcagcaaagcattccctgacaccctaacacgcctgctcctggctctgtgccccaacatcacgtcgtctggtgtccaggtggctgcagcacagttgccgctcctccgtctcatggactgcggcaacagcatatgcgccaacccccagcctgaagctgggagatcctacttcggcgacctgaccggcgggatcaagttctgctctaagttacctgtccagaagaagcagcagcagcagcaggctgcctgccagaagctgatcataaagcacggcgccctgaagaagctcagcctgtggggctgttcagcgatcgacgccttgtacgtgaactgcccggagctggtcgatctgaacctcaacgcgtgcacgaaccttcatccagagcggctgctgatccagtgccccaagctgaaggacgtgcacgtcagcgggtgccgcgacatgctgatcggcgccgtcaggaaccaggtcctgaacgagttcgcggccgccgagccccggctgccctgcaagcggctggccgacgggtcgaagcgcgtgcacgtgccccacttcatgatcgagcagctggaggagcaggagaaatggggcgggccgcggaagagccagtgcaccgtccacctcacataggcagataggctaggccggccgctgggcgctggcgagtgctactgctggcctgtgaagtgaggccctggtagtcggcggcgcccgcgtcctcgccgtcgaggagctgctgcggcgtcgattcagcgagcctctagacccccctgtatgttccatccagactagagtgccatgatccttctgttcatgctgtgtgtgtgtgtgtttaatctgtggagtctgtaggataataacggggtgcaatgcaaacgtgcccgactcctgtactttgaaaccgtattttgctcttgttcatctaggacaataattgccttcggttttccccagattacttttgc

SEQ ID NO: 14142 - DNA, 1624 bp, Zea Mays
caaatttcagcaaaatatgttaatgcatatgaaatttctctttgtaatttgggatcaagcctgtggatggacgaaccctcggtggacttcagtgctgaaggtgttagtagcagatcaggtctctgccaaagcacctgtttaaatcctggttgtaagcatgaccgtgcttgctgggaagatgattatgtcaaggctgtaatatctcatgggcaagatgatttggcggtcgatgaaattggattggctcttactgaagtgatgcatgcatatgatgatgacaaatggtcaagtctgtatgaagattttgacgacggtgtcggcgatgaaccaattcttcctctggaatcagattcaactggtgattttgtggacattgactccgcatcacctacctttcctagtgacgatgcaatggaatcatcaattaccaattcatttgctcggaattgttcaattaattttctgcaatgaaaggaacacgtgtgaagaagggaatcacgacaaagttgagcgtttcttgggcccctgatgtatacgaccctcctattacttctgactcgcacacggtgaaagggcaccatacgagttcaactaagggtaactacaaatacaagacctccaagagcagcagtaccactagaaggaaaaaggacaagaagcattctaggcacagtagtagcaatggaggtggcagcaaaagagacaagaagcattcttaccgcagtagtgccagcagcagcagagctattaccagtggttctcaatattgtgacgcatacagtggtggtggcatcaacagcagaactgttcctgaatctgccaagatatctccattggtggtagctgaaaatgtcacaccgcaagagatggttcctgtactgaagacactggaaccaatcaaatgtactaccagctgcggcaaagagaagccatttgccttgctgtcgcgccagttttcccctgcaaggtacaaggggatgttcaccttttggaaccaaaaccaactggcttcttgacaatttgctatgcggaagctcacctgaaagtttccttgccaagggctgttcggatcccctccaaactttagagcttcaaaaattttagagcattttagctcacttttgaactctaaagctctaatctaaggttgaccaaagtttagatctaactgagctttacctctaaagtttagagaaggaaatctaaacatgctctaatttgattgtatcaaagattgttgctattgttctcttcgttaccatgtttgtttcgcctgtctgaaacttcagagatcatgttttggaaaattgcttggcaaagtgcttgtgttgtattatttgcacacctacattgtaggggctgattcagtcttctgtgcttttgttatgttgtatcacgacataggttgatttattaggagatttgtttggaactatggaaaacacgcatggaacaacatgtcagtatttgtaaaaaaagagtcgctcattgcggtgaagttgaagaagttatcaagaggcaatagcgcagttagtcaaacatgaaaatagcagcagcagaagaaaattattcttcttatggcaaaaggtgtcctaagaaagaacaaaaccaagaaatattgcta

SEQ ID NO: 14143 - DNA, 1274 bp, Zea Mays
tgttctttaaggaatcataaccttgagttccctgtcagaatttgctgttttgggctttgaattgggttactctatggagaacccaaactcattggtcatatgggaagctcagtttggtgatttttccaatggagctcaagtgatatttgatcagttcctgagtagcggggagtcaaaatggctccgccagactggccttgtggtttgtcttcctcatggatatgatggccaggggcctgaacattctagtgcaagattggagcgctttcttcagatgagtgatgacaacccttatgttatacctgagatggatccaacactgcggaagcaaatccagcagtgcaattggcaagtcgttaatgtaacaactcctgcaaattatttccatgttctgcgtcgccagatacaccgggactttaggaaacctttgattgtgatgtccccaaagaacctccttcgccacaaggactgcaagtcgaacttatctgaatttgatgatcttgcgggccaccctggattcgacaagcaagggacacgcttcaagcggctcattaaagaccagaataatcacaaggacctcgaggagggaattaaccgtctagttctttgctctggaaaggtgtactacgaactggatgaagaaagaaggaagacggagcgcactgatgttgctatatgtagagttgagcagctctgcccattcccctatgacctcatccagcgcgagttgaagagatatccaaatgctgagatcgtgtggtgccaggaggagccgatgaacatgggagcgtacagctacatcaacccccggctgctgacggcaatgaaggctctgggccgtggtggcatcgaggacatcaagtacgtcggcagggccccgtcggctgctactgctacgggcttctactcggtgcacgtgcaggagcagacggagctggtgcaaaaggccctgcagcgcgaccccatcaactacccgttctgaaagaaacgagacccctgtaaattcttggaaaattgggcaccttttgattttgatatacctctatagagagagcaggccttaaggtatgcctgtgctgctgtgcagccatttgttgaaataatcgtttcggactctacagtaccgcattatatagtttataattccatgataaatattgtataagtaattattgattaattaatattatttacttcctccgtccacaaatgtttatcgttatgatattcgtgctagaagtttaactgaatttatagaatatataagtgatatt

SEQ ID NO: 14144 - DNA, 1624 bp, Zea Mays
gtcaagtgtttgtgactggagcttgcagagtcagctaagttgcagttttcatgccgggactacagtgatcatcttgcacttgttcgtgcatatgatggatggagggaggctgaaagagaccgtgctggttatgactactgctggaaaaattttctttcggtgcaaacattgaaagcaatagattctcttcggcggcagtttctctttcttctgaaggatactggtttggttgacgaaaacatgactatgtgcaataaatggagtcgtgatgaaaatctagttcgggcggtaatttgtgcaggactgtatccaggtgtttcctctgttttgaacaaggagaaatccatctccctcaagacaatggaagatggacaggttatgctttattcgagttcagttaatggtaaagaaaccaagattccattcccctggctagttttcaatgagaaggtgaaagtgaattctgttttcctccgggattcaactgctatatctgattctatactgttgttattcggaggctgcataaaacaagggggcttggatggacacttaaaaatgcttggaggttatcttgagttcttcatgaatcgcgatcttgcttcaacttatgtgagtttgaagagagaacttgagaatttaatccattgcaagctccaaaacccaaggatggatatccaaacgagtgaagagctgctatcagccatccgtttgctggtgactgaggatccatgcagtgggcggttcgtgtacggccgacaggagccaagatcaaagaaagcaaagacgatgctttcgccatcctctctgagtgaggctggtggcaacggaggggataatgccaagaaccagctccagacttacctgacccgggccgggcacagcaaccccacctacaagacgaagcagatcaagagctatctcttcagatcgacggttgagttcaacggcatgcagttcgtggggcaaccgtgtgcaaacaagaaacttgcggagaaagatgccgcgagcgaggcactgaactggctcacaggagatggtggagcgattactgactctaggggggctcaggatgcagaccccatgtccttgctgatgcaaccaccgcgtaggcgtcgacatagccatcgtcggaggaactgattagcacgacatgcttttcttcctttttgatcgttttcttatttatgtagcattcgagaagcatagttaagcatagaaggtagcgaggaaaaaatgttatagactcttgaaatgtactacaatagttttgacgtgcagtgcctgtgaattttagagcatggttcgtcagtggtgacggtgagtgatgggctgatggcgtgcgagaatcgcagagaacactagctgtaacggtcgaagggtgatccaattttttttttgctgtgggtactgaattcattatttgttggcgccatattaactgaagagttatgcgtagtgggcaagggcagccacgatgtatgtatttagactaaggtagtctaaatgagggggctcgtgtcaggtatcattgtatgttgtcagatgcggagaactggagactaagactatccgccggttttctctaaatttctaactctatatcaattttttttgtcacatc

SEQ ID NO: 14145 - DNA, 981 bp, Zea Mays
agaagcacacaagctagcaattgaaaaaaaaaacaggcaaggaaaatggctccgaccgccgccaaggacagtggctccgccgatcgctggcgcgaggtgcaggcgttcgaggacagcaagctgggtgtgaagggcctggtcgactccggcgtcaagtccatcccggccatgttccaccacccgccggagtccctcaaggatgtcatttctccaccagctctgccctcctccgacgatgcgccggccatcccagtggtggacctgtccgtggcgcggcgcgaggatctggtggcccaggtgaagcacgcggccgggacggtgggcttcttctgggtggtgaaccacggcgtgccggaggagctgatggccagcatgctcagcggggtgcgccagttcaacgagggctctctggaggccaagcaggcgctctactcacgggaccccgctcgcaaccttgtgacgaatgaccggtacaagagcgtggatcaccgggtgccggctaacaagagcagtgacacggcgagggtctcggtagctgccttcttcaaccccgacgagaagagaaccgagaggctgtatggccccattccagaccccagcaagcctccgctgtacaggagcgtcacgttcccggacttcatcgccaagttcaacagcatcggactggacggtcgcgtgctcgaccacttccggttggaggacgacggccctactcgtcttgctgctcctgcacaccacgtctagtcttgttttcgttcgatcgaacaaacagttctcgtcgtcgtctcttttatttttcctgcaatctgaatttcgagttctccaaataaataagggtatccattcccttcatccgcagagcgcgcggatgccttcactagcagctctagttttgctatgtatatagctgtgtgtgtggtacctttgtgactcatatattatgcaataaagtatgctttctcctcgtgcctttgtgcctca

SEQ ID NO: 14146 - DNA, 3738 bp, Zea Mays
ataaacactgtacgagatcactgaccataatcattagcaatttagcattagcctcagctggcgtaccgtcgagtccattcccacctttctaccccttccagaaacctccaggatccgactccaatcgaatcgccaaagcagacaggggcgctcgcgggggcgccgagctcgacggggcgagatggccgggaacgactggatcaacagctacctggaggctattctggacgctggcggggccgcgggagatctctcggcagccgcaggcagcggggacggccgcgacgggacggccgtggagaagcgggataagtcgtcgctgatgctccgagagcgcggccggttcagccccgcgcgatacttcgtcgaggaggtcatctccggcttcgacgagaccgacctctacaagacctgggtccgcacctcggctatgaggagtccccaggagcggaacacgcggctggagaacatgtcgtggaggatctggaacctcgccaggaagaagaagcagatagaaggagaggaagcctcacgattgtctaaacaacgcatggaatttgagaaagctcgtcaatatgctgctgatttgtctgaagacctatctgaaggagaaaagggagaaacaaataatgaaccatctattcatgatgagagcatgaggacgcggatgccaaggattggttcaactgatgctattgatacatgggcaaaccagcacaaagataaaaagttgtacatagtattgataagcattcatggtcttatacgcggggagaatatggagctgggacgtgattcagatacaggtggtcaggtgaaatatgttgtagaacttgctagggctttaggttcaacaccaggagtatacagagtggatctactaacaaggcagatttctgcacctgatgttgattggagttatggggaacctactgagatgctcagtccaataagttcagaaaactttgggcttgagctgggcgaaagcagtggtgcctatattgtccggataccattcggaccaagagacaaatatatccctaaagagcatctatggcctcacatccaggaatttgttgatggcgcacttgtccatatcatgcagatgtccaaggtccttggagaacaaattggtagtgggcaaccagtatggcctgttgttatacatggacactatgctgatgctggtgattctgctgctttactgtctggggcactcaatgtacccatggtattcactggtcattctcttggcagagataagttggaccagattttgaagcaagggcgtcaaaccagggatgaaataaatgcaacctataagataatgcgtcgaattgaggccgaggaactttgccttgatacatctgaaatcataattacaagtaccaggcaagaaatagaacagcaatggggattatatgatggttttgatctaactatggcccggaaactcagagcaagaataaggcgtggtgtgagctgctttggtcgttacatgccccgtatgattgcaatccctcctggcatggagtttagtcatatagcaccacatgatgttgacctcgacagtgaggaaggaaatggagatggctcaggttcaccagatccacctatttgggctgatataatgcgcttcttctcaaacccccggaagccaatgattcttgctcttgctcgtccggatccgaagaagaatatcactactctagtcaaagcatttggtgaacatcgtgaactgagaaatttagcaaatcttacactgatcatggggaatcgtgatgtcattgatgaaatgtcaagcacaaatgcagctgttttgacttcagcactcaagttaattgataaatatgatctatatggacaagtggcataccccaagcaccataagcaatctgaagttcctgatatttatcgtttagctgcgagaacaaaaggagtttttatcaattgtgcattggttgaaccatttggactcaccttgattgaggctgctgcatatggtctacccatggttgccacccgaaatggtgggcctgtggacatacatcgggttcttgataatggaattcttgttgacccccacaatcaaaatgaaatagctgaggcactttataagcttgtgtcagataagcacttgtggtcacaatgtcgccagaatggtctgaaaaacatccataaattttcatggcctgaacattgccagaactatttggcacgtgtagtcactctcaagcctagacatccccgctggcaaaagaatgatgttgcagctgaaatatctgaagcagattcacccgaggactctctgagggatattcatgacatatcacttaacttaaagctttccttggacagtgaaaaatcaggcagcaaagaagggaattcaaatgctttgagaaggcattttgaggatgcagcgcaaaagttgtcaggtgttaatgacatcaaaaaggatgtgccaggtgagaatggtaagtggtcgtcattgcgtaggaggaagcacatcattgtaattgctgtagactctgtgcaagatgcagactttgttcaggttattaaaaatatttttgaagcttcaagaaatgagagatcaagtggtgctgttggttttgtgttgtcaacggctagagcaatatcagagttacatactttgcttatatctggagggatagaagctagtgactttgatgccttcatatgcaacagtggcagtgatctttgttatccatcttcaagctctgaggacatgcttaaccctgctgagctcccattcatgattgatcttgattatcactcccaaattgaatatcgctggggaggagaaggtttaaggaagacattaattcgttgggcagctgagaaaaacaaagaaagtggacaaaaaatatttattgaggatgaagaatgctcatccacctactgcatttcatttaaagtgtccaatactgcagctgcacctcctgtgaaggagattaggaggacaatgagaatacaagcactgcgttgccatgttttgtacagccatgatggtagcaagttgaatgtaattcctgttttggcttctcgctcacaggctttaaggtatttgtatatccgatggggggtagagctgtcaaacatcaccgtgattgtcggtgagtgtggtgacacagattatgaaggactacttggaggcgtgcacaaaactatcatactcaaaggctcgttcaatactgctccaaaccaagttcatgctaacagaagctattcatcccaagatgttgtatcctttgacaaacaaggaattgcttcaattgagggatatggtccagacaatctaaagtcagctctacggcaatttggtatattgaaagactaaatctttgatctttgctggtcagcagaggaatcaaagcagtaggaatgtaggatcgaggagagtgacaggacttcccctctgtgcacttcgccgaaaagtaataatgggattgctatgcatggcccttgttgtacactagaaaattgggcacgcaaacttgtgtcagtttttccgctgttgcgaaattcagtgatggtgtttttgtaactataccaacctgtgtcagttttgccgttgttgcaaaactcagtgatggtgttttttgtaattattatacatccgaataataagactggtgtttccagacagactatgcaagctaaggggaaatcacgattttcctagatcaaatatgtaatatgttcttttccgatgca

SEQ ID NO: 14147 - DNA, 1886 bp, Zea Mays
ggaatggcacccgagggttctcagtttgatgctaagcactatgattctaaaatgcaggagctgctgagcactggtgagactgaggagttcttcacttcatatgatgaagtttttgaaagttttgatgacatgggccttcaagagaatcttctgagaggcatttatgcatatggtaggctgggagtcttctgtttatcttctgttttagcgagtttttctttacatggtattcctcgtactacccattcttcgatgtgtaggttttgagaaaccatctgcaattcagcagagaggaattgttcccttctgcaaggggcttgatgtcattcagcaagcacaatctggtacaggaaagacagcaaccttctgttctgggatcttgcagcagcttgactatggtctggttgaatgccaggccctggttcttgctcccacccgtgagcttgcacagcaaattgagaaagttatgcgcgcacttggtgactaccttggtgttaaagtccatgcatgcgttggaggaacatctgttcgtgaggaccaaaggattctcgccagtggtgtgcatgttgttgttggtacacctggtcgtgtgtttgacatgctgcgtagacagtccctccgccctgataacatcaagatgtttgttcttgacgaagctgatgaaatgctttctcgtggtttcaaggatcagatttatgacatcttccagcttctgccatccaagattcaggttggagtcttctctgctaccatgccacctgaggcccttgagattacccgcaagttcatgaacaaaccagtgagaattcttgtgaagagagatgagctgacccttgagggtatcaagcagttctatgtgaatgtggacaaggaagactggaagctggacacactgtgtgacctgtatgagaccctggccattacccagagtgtcatctttgtcaacacccgccgcaaggtggactggctcactgacaagatgaggagcagggaccacaccgtttctgccactcatggtgacatggaccagaacactagagacatcatcatgagggagttccggtctggctcctcccgtgtgctcatcaccactgacctgcttgctcgtggtattgatgttcagcaggtgtccctggtcatcaactatgatcttcccacccagccagagaactacctgcatcgtattggtcgtagtggtcgttttggtaggaagggtgttgccatcaactttgtgacccgcgacgacgaacgtatgctgtttgacattcagaagttctacaacgtgttgattgaggagctgcctgccaatgttgctgaccttctgtgatcaatttcaagaaaaaacaaaacaaaaaagggtggtgaggaacctggtaaggcttggttttgtcgaaataccgtgggagagggggtgataaggacggtggggtttctatgttgaagtcgtggtcatggacaatttgtgattttttctcctttatgccatgttttggaatttttgtagctgcctaggccttgtggtaatgtgctgctgtgggggttcattagtatgaagaggaagacgctgctggcgctgagtctttctctttattagtattttgtttaaaactatgtatgaccgaatggtggtatttatttgtgtcatccttgactcttattctgctgcaaccagatgtatcgtgccatgtctgcaccactggtctttgctatcctgagtaaaacctgtttactctgtcgagcttgtcgctgatacaccgatcctagctgttttgagtaaaacctgtttactctgttgagcttgtcacctggtgatgcaaggtgcttattgactggtaatgtattttgaagtcgttatactatctgaaaccccttcctgagcatttgag

SEQ ID NO: 14148 - DNA, 444 bp, Zea Mays
gattacacaagatcctgttagcatatcagagcttcacaatgttgttgatgcaatatcgaaagttctagctgcccaggtaaacaaagaggaaagcattgctaatgaaactacactaattgatccaaatcaggtggcagtcctgttttctgagtggtgtcagatatgtagtcatgtaaatgctagtgatgcaatatacagtcgttttgtcacacagttggagcaggatagtctgttgaatggagatgatatctctgaacgcttcttccatattctcacggaacttgctgttacacactctctagtctccgagcaaattgttgctcctggtggatcatctcagcaatcaccacagcaaccccatatttcatatttttccattgattcatatgcaaagctcgtggttatggttctcaagagtgaagtttgaaataagggatgagttag

SEQ ID NO: 14149 - DNA, 1661 bp, Zea Mays
gttgttcaaaaaagtgtttatgaacatctacatgttatacacgagggacatctgagaatcattttcacaccagaactgaagataatatcgtgggaattttgttcaagacgtcatgaggaatacaccactcgtaagactatagcaccacaggttaataatcttctgcaagttgtccagaaataccaagctgttgtcactgaaagtggatcagccgggatatcaaataatgatgcacaaaccatctgcaacatgtttgtcactgcatcacaacaactggcaaaaaatctagagcatcacaccttaaatgaacatgggctctctaaaagatatgtacgctccctgcagatatcggaggtggtgaatcacatgaaggacttgattgagttcagccacaagaacggccttggtcctaaagagagcctgaacagctattctaaaaccatggcgaagtttcagaatatgcatgattcaagacagctcatggctgctgctaaccttgccaataaccagagcaacaccaaactaatggggaccaaagaagaagcaagtgcttctgcgaccaaccagactcctggtgtcggagccatcggcaataatgctcttcagcatgccacacctctaaacagctaccagaatatgctcagaagctccagtgcaaatccagtcttgctgcagcaggaggcatcgagtgtcttcaaaggtcctacagcaatgcacagtggcatacagctggaagcagccagatccttccgtggacctaaccaagtgcagttccaacaccctgcggcgattcagcagcagcagcctatgccgcagcagagcaatttccagggctttggtggtgttaacccacagtaccagcaccatgtgcttaatcagcttctgcaggaagttaagaacaataaccacgtgaaagcacagcaactgcctccagatgcacctaaagcgagcggcggtcttgcaccaggagttgctattcccaacgttgctgctgctggggagcagggacagcatatcaacagtaatacccgtgaccataacggcgcggtgaagggtgctgctccagctggtactggcccaagcaatgtgatcaacaacacagccagcatgccccccggcagaaacaacagcttcaagtcggtgagcagcagtccagctgctgctaccggtggcattgcggtgaactcgaaggtcgacgactccttccatcaactggaggacctcgacctcgacggcttgatcacaaacgaactgatggagagcgggttgttcggcgccggacaagggtggtgagcatgtcccaccacgcctcacactactatcgagttccttcaccgaaagcgccaagcaacaatataagctttgccacccttctctttctggagtttttgtgttgacagtttcagatgatcgtgccatatacaattatgtaaggtagcgagttggatttggcttgggagtcgggaacggcgcaatctatagagctgttagcgtgtgcgtatgacatgttgctgtggttatcattttcatgctatggaggagtgtcgattatagtctcctgttgtctggcacggcgtgagtgtgtgtttcccatggttctatgaaatcaaattatagaagaaacaagatctaatgtttaggaatcgattctctatggttca

SEQ ID NO: 14150 - DNA, 1852 bp, Zea Mays
actcatgtgggagcctctgattcgtgggagcaaactgcagaatcgaatcagtgcttctccaccacctcttgaagctgcatctctaccacgtgggatggttactatgcgctgtgatatcactacttgcagctcttcccatgtgtcactcctcgtttctggtagcgcacagacttgtttcgatgaccagcttctagagagccacataaaaaatgaaattattgagaaaagccagttagtccgggctctctcaaatagtgaggacaagttaccatcaagtgagcctttaacttccatgtctacggcttgtggggcttctacctttgaagtttggatgtcccttcctaagtgggcagcacaggttctgaagcatctagcgccagatatatcatacaggagtttggttgcacttggtattggttgtataaatggtactcctgttgcttcatttgagaggcgagatgcagaccgtcttcttttcttttgcacaagccagtgcaaagatttggctaatgaaaacggtccatattttcatctgccaagatggtcagcctcccttaccaaggacagaacaaagttgggttcagaatcaaaacaaaatctgttgggtgcaaatggagttttggaagacaagaagcatatgatggaagggccttcctcattttcagccgtcaaggctaaattaaagcctgcaactatgaggccaattcctcactctcaaaagcaacaaatgcatccttttatgtgtttacctgaaacttcctttcatgaaactagtattgtgaagccaagcttgacagttgcgccaactgtgaagcacaattcagtttcttatgccccaaccacgcacagaaaatcaacatcagggccatctcatactccttcagtcattcagttgaatcctctgcctatgaagaaacatggatgtgataggttgtctatacaagtatgctctgaggaggacttcttgaaggatgtcatgcagtttttaatccagaggggccacaatcgacttgtacctcacggaggactagctgaatttcctgatgcagtccttaacgccaagcgccttgacctttataacctgtacaaagaggtggtgtctagaggtggattttatgtgggtaacggcataaactggaagggtcaagtcttctcaaagatgcgtaaccatactgcaacaaacagaatgactggtgtaggtaacacattaaaaaggcattacgagacatacttgttggaatatgagttagcacatgatgatgtggatggcgaatgctgcttgctttgtcacagtagcgcacctggagattgggtgaactgcggtttatgtggcgaatgggctcactttggttgcgacagacgacaagggctaggcactttcaaggattacgctaagacagacggtttggaatacatctgcccccactgtagcttagcaaactacaagaagccaccactaccaccaaaagtagctaatggtttctcaaatacagcatatgtaccacgaagtgtttaatttcttgtttttttcttttcctttggtcccgtgtttgtgggaagaagtcattagagtagggaatagcctgatggaaagatgggcaaggccttcagggtaggtatcgaaggtatcatctcgctaatttagtggctatgagttttttatagatgtacaattgataacacattcaagttcctaagtagttttttagtggttatgaggtttatatagcatgcatttgaatgcgggtgttacttgtttatattaatctccactgtgtttttaatttcgctgtctggttccccgaaacacttgatggaacaacatgaagaagccctgaagctgctggtgcaa

SEQ ID NO: 14151 - DNA, 105 bp, Zea Mays
ttttaacaatacatcctccacgcaaactagcattttctaaactactcgtcacatcaataaatatatcccctatataatcacgaatcccatcacattgcataaaac

SEQ ID NO: 14152 - DNA, 2338 bp, Zea Mays
cttgaccggaccctgcggcccagcttttttcttcactctctgcaacccattccccccctgcattctctctctgttctcttgtgcgtgcctgcgctctgtagtgacgacgactgggcggcggccgctgccgccgacctacgtgcgcaggtctccatcttccggaccttcgctggagacgagcacccaccaccagaaattttctatacatttaagatgtacagggcctcaaatttcatacctgatcctaatcaggtgcttctagatgccaatccattaaggtctttagctccaatgttccctgcccccatgggagtcaatgttaatcagtcaagtacaccaccattggtttgtgtcactccggttggtcaatttccaattgggtttggtgcagggaaccttcctgcctttggatcgttcactactttcagcgccactacaaacggtgtttcttatacgggcaccagtggtaatggtgccattgatgccactcctatctctgcatacaagacaagatcaagcatatcacttgatgatgatgatgatgagccttactcgggcaaccaaggtttggcatctgaacggaaggctaggagaggccgtcctcctggttctggtcgtgatggatcaaatggtaagttaaagcgccctaagcctacatacaagaattttgttgctggcaaagagcttgtctttctgtcttctacatccgatcccagggagtttgtggaatcagttcacatgacttttgaggccctcaggcgaagacatctgcagatggatgaaacacaggatgctagcagacgtgcagacctgaaggctggtgccatcatgatggccagtaacatcagggcgaattcaggcaagagggtaggaactgtacctggagttgaaataggagatattttctattttaggatggagctgtgtgtcattgggttgcatgcacctagtatgggaggcattgattacatgactactaaatttggaaaagatgaggattctgtagccatatgtattgtctctgcaggaggttatgagaatgaggatgatgacacagatgtgctcgtgtacagtggtcaaggtggaaataataggaatactgaggagaggcatgatcagaagcttgagaggggtaacctagctcttgagaggagtttgcataggaagaatgagataagggttgtacgcggcttcaaggatccattttgcctaactgggaaaatttacatatatgatggtctctacaagattcacgagtcctggaaggagagaacaaagtacggtgtcaattgcttcaagtacaagctgctgcgggaacctggacagcgtgatggagctgcattatggaagatgactcagagatggatagataatcctgctaccagaggcagggtcctactagctgatctgtcatctaaggctgaaattttgcctgtttgtctcgtcaatgaggtagaccatgagaaaggacctgtacatttcacttatactaatcaggtcaaatacttgaggcctctcagttctatgaaaaagttgcagggctgtggatgccagagcgtttgcttgcctggcgacgccagttgtgcttgtggacaacataatggaggcgatttacccttcagttcatcaggattgttgtcatgccgcaaaccaatagtctacgaatgtggtgaatcttgcaactgttctacaaattgcaggaacagagtgacccaaaaagggtccaggctacatttcgaggtcttcaggaccacaaatcgaggctggggtcttcgctgctgggaacctattcgtgctggttcatttatatgtgagtatgccggtgaggttattgatgagctcaaatttaatttgaatgatagtgaagatgattacatttttcaaactgtatgccctggcgagaagacattaaaatggaattatggacctgaactgataggtgaagtaagcacatatgtatcgcctgatgaatttgaaccactgcctgtcaagataagtgcaaaaaacatgggaaatgtctcccgtttcatgaaccacagttgctcacccaatgtcttttggcaaccagttcaatatgatcacggagatgatggacacccgcatataatgttctttgcactgaagcatattccacccatgacagaactgacttatgactatggtgttgctggagctgaatctagtggttcaggttctcgtagaacgaagaactgcgtgtgtggatcacaaaactgcaggggattattttgatgggttgagagacgtgctcttggtggttaatcatgcaaaccactttctgctaggtctgatgttgagtaagctgagaagaacaagtttc

SEQ ID NO: 14153 - DNA, 1770 bp, Zea Mays
caaggggttagctgcgacaagtacagccgggtggatcttggatgggtttgacaaggttacttttagacgaccagaagatactaacgattctgtgaaggagactagttcagctaaggttcacatacttgtttttgaggtagaagaccgtgaaatgattggtggatctgcctatggaggtcagaaggctatttgttgtagttcagatcttgcaaaattaggagcttgcaaagaaggttctgtcatctatcgcccatcccaggtaaatcctggttggccaaagttgtttgttgcatcttttgagggaagtgatctgatcgcaacgctgccgtcaaggaccattcaaattaccaaaactgggatgtacaatatgtactttatacattgtgatccttcacttgctagtttggaaatcgaggggaaaaccatatggaaaaatcctactgggtatcttccaggtcggatggcgcctcttaagaacttttttggactgatgtcttttgcatttgttgtgcttgggatctactggttttatcagtacatgaaatcttggaaagaggttcttccacttcagaactgtattactcttgtgattacactaggcatgcttgagatggcattgtggtattttgagtatgctgagttcaatgagactggagttcggccaaaaggtatcacattttgggctgtcacgtttggaactgtgaagaggacggctgctgaagttattgtcctcattgtctcaatgggatatggtgttgtcgcacctaccttgggtggcttgacatcgaaagtggtcatgcttggaggaacgttctttctagcaacagaaattcttgagttggtagaaaatcttggtgctgttaatgatctatctggaaaagctcgtctgttcttggtctatccagtggccattttagatgccgcatttgttgtttggatatttatttctttagctaagaccatcggtaaacttcaggcaagaaggttgatggccaaacttgacatttataggaaatttgcaactgcattgattgtatctgttctggtgtccgttgggtggattggctatgagatttactccaaatcaacagatgtatttaacgaacgatggcagcatgcctggatcattcctgccttctggcatgtcttgtctttcttacttctttgtgtcatttgctacctgtgggcaccttcacagaactcaatgagattttcctacgacgcaagcgaattctttgatcgaaaggacaatctgtcattaattaggccagcaacgagtgcttccaagaacggctggagtttatcttctgcgccagaggccaaagcaacaaaggacgtgaatacagttgcagattttgaaggcgatgatgaggaaaacaaaagggagtagaatgtactgtcgatttggttaggggagggtatattctgagatcatttgaagtgggtgctagagcagttttggtacttaggagaggactggccatgctaattactaccagtggagcacgccacttgtggctgtttctttctttggttcattaccaccacagttcttcgcatgggtggctagttatgtacttatgttgtcatcgtcatagtctgaatgatggttatgataggggggaaaatagtctggtgtataatatttatattattggcaccatattgcttctggatcgtgggaactctacatatgctgcgaatgttagagaataaattgttttgctggacctttgctagaattccacttgattgtctaatgtttcgata

SEQ ID NO: 14154 - DNA, 957 bp, Zea Mays
gcatgccttcggtatttcttgcttacctcatgaagcggatttgtggtgtgaatgccaaaaagaagcatctgtcctggggtaatgatggcaagaaaaggggtggtggctttacaaaactatgcagtctttccccggcacttcaagagtttgtcggcgcctctgagttagccaggacagaggttgtcaagaagctttgggcatatattcgagaaaataatctgcaagaccaaaacaataggaggaagattttgcctgatgagagattgaagaagatcttcaatgtcaattccattgatatgttccaaatgaataaagctttgaccaagcatatctggccattgaattctgagggtcctgtctctcctgacagatcaacacccaaagagaagccacaaaagaaagacaggaatgaaggaaagaagcaaaagggtggctcttcaggagctggatctggtcttcttgtgccccttcaactttcggatgatttaatgaaatttatcggcactggtgagagcatgttatcacgatcggatgttgtgaagagaatgtgggactacataaaagagaacaacctgcaggatccttctgaccggaggaaaataatctgcgatgagaaactgaaggacctattaggagttgaaacgttcaccggctttactgtttcaaagctgcttgccccccattttaccaagacgaagtagcaacccgccatccagatcttctaaacccccaaaaggctgggtgatcatgttttgcagaatgtgtaatcatggaacagttaggagctatgtgagtggtgtgaaatttttttacatgtgggagtcggtggcactttccgaatgttaccagtaaagtaggttcctcgatgtctaatgaatctatcaactgtttactaaccgtcacgccctccgaaaactgtttatctgtgtggcttgtagtgcgttctttctgagttta

SEQ ID NO: 14155 - DNA, 1330 bp, Zea Mays
ccggggccgcggccgcgggaggcccgtccggcggggaggagctcgacctcttcatgacgcactatgtattgctcctttgctcattcaaggaacagctgcagcagcatgtacgtgttcatgcaatggaagcagtgatgggttgctgggagcttgaacaatccttacaaagcctaacaggggcatctccgggtgaaggcactggaggaaccatgtctgacgatgaagataaccaggtggatagtgaagccaacatgttcgatggaaatgatggatcagacggtatgggctttggccccctgatactaacagagggtgaacggtccttagttgagcgtgtacggaaggagctgaagaacgagcttaagcagggttacaaggaaaagcttgtcgatatcagggaagagatcatgcgcaaacgcagggctgggaagcttcctggagataccgcatctgtactgaaagcttggtggcaagctcattccaagtggccgtacccaactgaagacgacaaggccagactggtgcaggaaacggggttgcagctaaagcaaatcaacaactggttcattaaccaacgcaagcggaactggcacagcaacccaacatcctcggctgaaaagaccaagaagaaaaggtgatgatggcccagagcaatcttggcaaaaagctagagatgtccactatactttattatggcgaagtacattctccctcacttcgtaggcaagagggaaaggtatcttgggtgacttgagtggccacctaatgcgcaagtttgacgacgtggtggggctggagttggtagtgacctcagcagtatagcattcgctaacgtgatgtgggtgaatcacgtgttgcagtagaaccggcgagcgggaggggggtaatttatgttgtattgtaattgtgttttttattaccttgtaatgatattttagggagaatcccaagattcatattcgcatgttttgtcgtccagatgtgggagcagagcttgccgcatgttttgtcgcccacatatgcgctgagctcccccctccttcgcattggcgcgcagaagattgagcatagagacgcatgttttgtgttgtggtaggacttgctcgctggccacaggttgaggttgtccttaggccctgttgggttgttgtttgggattagagccctggattaatttctagctggattatttctctaatttatatagattttagtgagctggaatgaattctggcttattccggtgcaaccgaacggggccttaaggattgctttctttgaagtcgaaatggcagtgagtgaagctcgttagcgcaaagaaaacaaccga

SEQ ID NO: 14156 - DNA, 703 bp, Zea Mays
gctacgacaagctttttttgggacagaggttactgaagagtgcttgctcaggggcatatcaacatgcaaacatggtaccagctttaagaagattggcagaagaataagtgagcatgctgagaggaacggttttggtgttgtggagtgttttgttgggcatggagtcggcagggtatttcactcagaaccaattatctatcaccagaggaacaacagaccgggccagatgattgaagggcagactttcacaatagagccgatcatatcgatggggagcatcgagtgcgacatgtgggacgacggctggactgccgtgacgacggacggcagcttggcggcgcagttcgagcacaccatactgatcaccaggaccggagccgagatcctcaccaagtgctaggaggaaaggaaatcgcatgtgcccgatagccgacggtaggtaatctgtattcgtgaggtggtgaggatgcttgaggtgacctattttgtctcgcaaaatgggcgtgctacagaatagtgaagaaaagggttgagagattgcaaatggcaggtttgggcaaagaggaccaagttctaggcgtccgggacacgactctgtgtctggcgttcccttctgttgtcgacatcccgtggttcagttgaggccatgtctcgtgacgttctcctcccgccagttggcccaccgcttgccgttggcgcgttg

SEQ ID NO: 14157 - DNA, 386 bp, Zea Mays
acaaccagtcgcctacccactgcctcgcatcggcatcggcgtgccggtgctgccaagctaaaattccccaactcgcgtcgcgtcgtcagtgtgcgtgccagtcctccggcccaaaccccccgcacccaacccccagccccggcaaccgatggcggggtccgcggccgacgcggagcaggagcaaaagcgggcagcggcggcggcgtacgactacgagggcgacgcgcgctgggccgagtactggtccaacgtactcgtcccgccgaacctcgcctcccgccccgacgtcgtcgaccacttgaagcgcaagttctaccagcgctacatcattgcaggaacgtgccttgtagcgtcgggttgtagttgcagcgagtggctgagcgtag

SEQ ID NO: 14158 - DNA, 1170 bp, Zea Mays
ccggccccgctcgccacagctggagcacaccgtcaccggccccggctccggaatcagatgctccgaccggaccgactacgagcaacagcaaaaagaagaaaaaaaagaaaaacgggatcgccctaaccgtctctgcgtggtgggcccaaccttagcctctccactgtccactccaagcaaggaaggaacgtgatacccgcgccccaccccgcagtgtgatagcacgatagggacactcacgcctcgcctgcccccgtcgcgagctccacccgcttcgcttccctgacacgcaggcctcgcaagcgaccgccctactggagcccactcgccagggaaggccgctgaaaatacgggggaagaaacacgaaaaaggcaaggaattagaacgggcgaagcggcacacaattcgcgcagcagcgtagaaactagaaagaccagtccccaaactccccagcgggggcgagtagaggaggaagagtcgccgccgccgccgccgccgccgccgccgccgccatgtctgggggaatcgcccgcggccgcctcgccgaggagcgcaaggcctggcgcaagaaccacccgcacggtttcgtcgcgaagccggagtcgctgcccgacgggacggtgaacctgatgatctggcagtgcaccatccccggcaagcaagggactgactgggaaggtggatatttccctctcacccttcattttagtgaggattaccctagcaagcctcccaagtgcaagttccctcagggtttcttccacccaaatgtgtatccttctggaacagtctgcctttcgattcttaatgaggacagtggttggagaccagctattactgttaagcagattctcgtcgggatccaggacttgctagatcagccaaatcctgctgaccctgctcaaacagacggatatcacctttttatccagaatacaagaggcgcgttagactgcaggcgaagcagtatcctgcattggtctgagagcttcgccctactagggggatccatgctgcacatccgcatagttgttgctagtgtcttgaatgaaagaccaaatgtaacatggtgcttggagaagtaactatcgccattgtggactgtgtgtcttttaacagccttattaactgtttggagtgtgtgttttgcgggatgatggcaaaaaaaa

SEQ ID NO: 14159 - DNA, 1028 bp, Zea Mays
tgcttgaggtggtggtgtgtgtctgatggctccctccagaattcatgtaacatgtgcattagtttatgggccttcaccaacaggaaggatccaccaaggagtttgttcaacatggatgaagaatacaattcctctggaatatagcgaagaatgcagctgggctcccatatttgtgaggcagtcaaatttcaagttacctgctgacccatccactccgattatcatgattggtcctgggacagggctggctccttttagaggtttcttgcaggaaaggttagcactgaaacaatctggagcagaactgggcacttcaatccttttctttggatgcaggaaccgtaatatggactacatatatgaagatgagctgcaaactttccttgaggagggggcgctttctgagctaattgttgcattctctcgggaagggccaactaaagaatatgtgcagcataagatggtggagaaggccacagaaatttggaacatcatctcacatggtggttacttatatgtatgcggtgatgccaagggaatggctagagacgtacacaggatgcttcatacagtagtccaagagcagggatctttggatagctccaaaaccgagagctacgtaaagagcctgcagatggaaggcaggtacctccgtgatgtatggtgacacatcacccccattcagccatagctctagcgtgtggaagtaaagctggctttgcgtgtacgacatgcctaatgccaaatgaagcgtgccattgattagaaactgaaatgttcagtcgatcagtgtaattctttgacatctaactatttatcattatatggaatgggaggaactgttgtagatttgtagaactacaaaaaaattgtgtatccctaacaagtttgtagcaaagggggtacattattacagtttgagatgaggacatcatgtatactgtttgagacgaggacattatgtatatacttggtacataattacagtttgagatgaggacatcatttatactgtttgagacgaggac

SEQ ID NO: 14160 - DNA, 941 bp, Zea Mays
aggcaacaaggttgttgccacatgtggaggtgaaagtaaagctgaacttctggcttccttaggagttgatcgtgttatcaattacagaaatgaacgagtcaaagatgttctgaagaaagagtttccaagaggtgtagatatcatatatgaatctgtaggtggggaaatgtttgacttgtgcttgaatgcacttgcagtccatgggcatctcattgtaattggtatgatctcccagtatcaaggagaggatggctggaagccaaagaactacactggactatgtgagaagattctagctaaaagtcaaactgtggctggatttttccttgttcagtatgctcacttgtggcaagatcatcttaacaaactttttgacctgtatgcctctggaaagctaaaggtttccctagaccccaagcaattcttgggtgttgcttcagtcgtagatgcggtcgaatatcttcattctggcaagagtgttggcaaggtcgttgtgtgtattgatccatcatacggtcagatcgttgcaaaattataatccatggacatgatgcgcattgtcttccatggtcacgtaggttattgtcttatagttacacatatacatcaagaccgtattttcccagcgggtgacaaatgaataagggaacatgttggtgtatagtttagtttcatttttccaaagtgtaagatgcacaactatactgaaggacaagcatgggcatggaaatcgattaagtttctaatcccgtgcagtaggatatgcattcgtgtggcctcgttccacgttgtatgtatacagtatatattatataacttgtctcagtgccacatgcttcaattcgaaccggtaacaataattcaaacagctcatgcagatgcattctcaaatacacagcttggaacatcgatattttcttttgaagaaaatttgtttgtgc

SEQ ID NO: 14161 - DNA, 390 bp, Zea Mays
ctgagatcccaaatttaatttgttctaagatgtagaacaaaattgcgagaatcgtaatgattacatagggacaaaagtagttaaggaaaatagcaaaaagatagtggtctaccatagagggcacatgttccctaattggcctagagcatagcggctcattatccttctaccgctgggggcgggcggtactcgctgctctgtgaagccagcctcacgcaatgtccgccactttaggtgttaggatgcaaaggtgttcgccaaggcacccgaaacccactacacaacttggaatgggtggtccacagtttgtagcactagacccaagcacatgcaccacgattgacatccacacttccttattgcccccgctcaggttacaagcaatcgcta

SEQ ID NO: 14162 - DNA, 1522 bp, Zea Mays
ggccttgctgctgcctgctggtaccgtaccgactccgcgtcaaggaacatgctgctttcgggccccatgttcaaattgctaacctagggtttgggtggaacaccaagggtctagacagacatctagaagagtttgtgtatgcttattttgatggattggtccagaatcttatagagcgctgccttcagatgtacatgaacaagaaagaagtggttgatgccctctcccaccactccaggatagagccttgtatcactgaacttgtttggcaacaacttgagcaacagaatcctctgtttttcaaagcatacgatatgaggctaatgcttaagaatcaaataatggtcttcaacaggcttctccaggatcagttcgagattatgaataaagagttttcttcagggatcccttctatgtctcttcctaatgactctaattccaacctattgaagcaagattcatgctttttgccagagactgctcctggaaatgcaatgccagatggtataatgcacaatggaagttcaagtggtataataaatgacacaccatctggcgatcagttacttaatgctagtaaagacttgcatggccttcatagtcaaatagatgcttcaactagtctacagtcagaccagaatgcaactgctgtgctgtatggtgtagacaacgagacaagcgcaacaataaagaccgagtcttgctactcgagtaatgctgattttgccttctgtgggaacactttcctggaatcatgccagtcgataggtgatgcatctggtggtggatccttcagcagctcagagttgaatgggcaaccactaaacgattcaattttggatatggagtcatcatcatttagcttcttgaaccaaatgccccaaagcttcatgttttcagacctggcagatgatttcaaccaaaatgcagaaataacaccatttctcactcctgagacaaatttctccgattcaacagggggagaccatacaggttgagcgggtcatgcacagcgtaccaaccatttgtacataggcacatgggcagtcgaatctgcattggtgaagaacttgaggaccttttgatctagcttgtttatttctctagtttttgcgtcttgatattgtggtagtttggggcttcgggtctggtgggttgtctagcccatcagaacgcgtaatgggtacggagtattggtcttccagtatgttttcagcgttaatttggctaatttcccccgcttggcttgtacaacaaattttatcagtactgagtaccatgagttgtactgctgtatatgctgcttcccactctctgaattggcagaatgattgatgagaagacactgcttggaggagttgcctcagtttcacactgcatgtatgcagcaagttttggacaagaactcatcagctgcttggaatttcaatagtaaacacctggacacaaaatacaacacaactacatttcctatttactgtgataacagtctaaaaaaatcatccagtttctttgacgagaa

SEQ ID NO: 14163 - DNA, 1314 bp, Zea Mays
cttgtctatccatgttgtcacataaataacttattgtcttcaataccagctgatattggcacgttatcaaagttaggcatacttgatctccattctaatcagctaaaggagtatccagttggagcctgcaacctcaaattatctttccttgatctatcaaataactcattatctggtctaccagctgaactaggtaaaatgactaccctaagaaagcttctgcttactggaaatcctatgaggacacttaggagttcattggtttctggaccaacaacaacattgctgaagtatctgcgcagccggctttcatccgatgaggaagcatcaggatccagaagcaccccaactaaagatgaccaaattgctgcagcaaggcgcttgtccttatcttcaaaggaactggacttgagtggccttggagtgaccagtgtaccagctgccgcgtgggagacaagtgatgtggtgaaactggatctttctaaaaattcaatagaagatctaccaaatgagttgtcattatgctcatcacttcaatccttagttttgtctaataacaagataaaaaggtggcctcacacagtggtttcctcccttccctgtctgtcttccttaaagctggacaataaccccttggtagagatatcatccactgatcttgtgcctctgtccaaacttgaagtacttgatctaagtggcaatgcttcagcacttcctgaaccttctgcagtttctgcattaccacagctgcaagagctttacctaagacgaatgaaactccatgaatttcctaatggtttgctgggcctaaaactgcttaggattcttgacctgagtcagaatcaccttacaactgtgccggagggcatcaagaatttcactgcactcattgagcttgatctgtctgacaacaatataacagcactcccagcggagctgggattgcttgaagctaacctgcaagtgctgaaactggatggaaatccgctaagaagcataagacgaactctgttggagcgaggaacgaaagcagttctcaagtacctcaaagaaaaattgccgtctgaataatatttatagaacaaactattgttggagtaatggaataaaatgtttttttgccactgtatctcagttttctggactgaattttgtgcaaaagtatctggaccttgtgtgagaagagagctttgtgagtgtgttgttggatatactggttatagtccacatgttttattggaacaaaaatattttctctgttcaatctttacatggacacaacctggaaagatgttatccaccgttgtatcgttc

SEQ ID NO: 14164 - DNA, 1576 bp, Zea Mays
ccaccatgactttttccattattgggacagggtggatggataccctgtgtatagcatggcaacacccactattgatggagcgagtgatgttttgtcgtatctgggctctaaagacacaaccggaagaaacattgcacagaaggtggtcgtcacagatcttagagaggaagtggttgtttacatcaagggatcgccatttgttttgagagaactagatcaacctgttgatactttgaagcatgttggcattagtggtccaatggtagagaacatagagacaaggctaaaggaggatatactctctgaagttaaacagctaggtggtcggttactgcttcatcaagaagaatttaatgcagccacaaatcaatgtagtgtggtaggttactgggaacacatagatctggaggacgtgatgacaccagctgaagtgtacagcacattgagagacaagggctattgtatcgagtacaaaagaatacctctaaccagggaaagagaagcattagctgccgatgtagatgctatacaatcatcaattgatgaatctgctaggtactatctctttatttcacacactggatatggaggtgttgcttatgcgatggccattacctgcctgggactgagtgcagatgcaaagtttgtaatggaagaaacagcagaaacacactttgtatcaacatctcttgcgaaaaatgtgtccatcaaaactaaaactgacatagcacttaagcagggtgactaccgtgacatattaaaccttactagagtgttggtacatgggcccaagagcaaagaagaggttgacacagttattgacaggtgttctggtgctggtcatctgcgcgaagatattatgcattacaggaaagcactgcaagattgttcacatgacgacgacgacgactgtgatgaggaacactcttatctcactgatatgggcacaaaagctttgaggcgttacttttttctgatcaccttcagatcctacctatacagcacgacatcatgcaaaacaacatttacatcatggatgaaggcaaggcctgaacttggccacctttgcgacaatctaaagctggacaaataggccatcttcatgtgacgtgattatgtagttgtgtcacttccttggacacattcacccagagtttcaaaaaggaaggagactaaaagaacgggtagagaggaagcagtggttatgggagttgtggacaatgaaagagcagcttaggctgtccgaaagtagggcattgtactatacttgtcggtgttaattgacaccagcaagcatgtatatattgtcaggcgtattatagatgaacatattagatatttctattgtagtattttctcaaattttaaaagaatcatttcatgcagttcattctcatgtatgtatctgatatgcttgctttttcagcagcgtttttttagacaaagctcttcggcagctttgatttttgacttctctgccttctgggcgtcaatatggccgcagccttttctaggagttgtattgagctaggatgaagcttgaaagaaatacgatgtcttgtttctaaagccccct

SEQ ID NO: 14165 - DNA, 1107 bp, Zea Mays
ggcccacctcacttcgctggtacatgcccggcatcagagttactgacatatggaccacacctgtcagaaaagatagccggaagccggaaaaaccctcgtctcccgtctcggagcggcggagtacgcacctatcagtcccaagttcccgccacacacctctccattcccctcccgaagtcccgatcctgtcctcaaatcccattgctctatcttctctagcggcgagtcgaggcggggaagacgagctagcggcgaggatgttgtgggtagataagtaccggccgaaaaccctagacaaggtcaccgtgcacgaccaggttgctcagaacctcaggaagtttgtgtcggagcaggattgcccgcacctgttgttctatgggccgtcggggtccgggaagaaaaccctaatcctcgcgctcatcaagcagatgttcggcgctggcgcggagaaggttaagctggagaacaagacatggaaaatcgatactggaacaaggacatttgagatagaattggcgatgttgtcaagtgctcaccatgtggagatgacccccagtgatgctggctttcaggacaggtatgttgttcaggaggtcatcaaagagatggcgaagaacaggccaattgatgccaaaggcaagagagcatttaaagtccttgtgttaaatgaggtcgacaagctctcacgagaagcccagcattccctccgcaggactatggaaaagtatagctcatcatgtagactgatcctatgctgtaacagctcctcaaaagtgacagaagctgtaagatcccgttgcttaaatgtgcgagtaaatgcacccagcgaagatcagattgtccaagttctagagttcattgggaagaaagaaaatctgcatcttccagctggatttgctgctcgtatcgccgcacaatcaaaccgtaatcttaggcgggcaattctgttttttgagacttgcaaagtgcaacaatatccatttacatcaaatcaagtggcgcctcctcttgactgggagcaatatgtgtctgaaatagcaactgatatacttacagaacaaagccctaaaaggttttcacatgcctatgtttgctgaaaatacaaga

SEQ ID NO: 14166 - DNA, 463 bp, Zea Mays
gccgtggcctcgcccacaaactaatcctacggcccacggaaccagtcagtcctctctccttccggcttccgctgctcttctttctttcctggcatcttggagacggcggcgagacgaggagaggactggaactggaccatggctgcctcttcggctctcaggctaatcctgggctcctcgtcggcgtcgcgtcgccagattctgtccgagatgggatacaagttcacgcttattagtgcggatatcgatgagaaagcgatcagaaaggagaacccagaggaactggtggtcgccttggctcatgcgaaagcagacgctattctggagaagatgcagaacaatgggatgatgaaagagattcttgattctcaagatactactctgatgataactgctgatcaggtttattttgcctcacctattcttcttaatataatgatacacagctctcctgcgttttcgg

SEQ ID NO: 14167 - DNA, 1683 bp, Zea Mays
cgcgctgggctggaccaatgaagcagcgccccacgcgtgaccgaccaggaacggctgccccgccgagtcaaaaggccgccgagctaggtgagcgagttccgggacgggcggacggacggtggcccacccaccaacctctgaccccgacccggcgcgtctcgccctgaagcttaaatactagtcttggctagctactatattatactagccgtctagccctcgagccgtccagggcgcggcgacgacacccacaggccacagccacaggccacacgacaccaccgctcggtctcggcggccgcgccagccacgccgccgagggtgcggctcagggacggccgccacctggcgtacgccgagtccggggccagcaaggaggacgcgaggttcaaggtcgtcttctcccacggcttcaccggctcccgcctcgacaccgtccgcccggcgccggaagttgcggaggagctgggcgtgtacatggtgggtttcgaccgcgccgggtacgggcagagcgaccccaaccccaaccggtccgtcaagagcgcggcgctggacgtggaggagctcgcggacgcgctggggctcggccccaagttctacgtcatcggcatctccctcggctgccatgccgtctggggcgccctcaaatacatccccgacaggatcgccggcgcggcgatgatggcgccggtggtgaactactggtggccagggttctcgccggagctggcggcggaggtgtacgcgaagcaggaggtgggcgaccagtgggcgctgcgcgtgtcgcaccacgcgccgggcatcctccactggtggatggagcagagctggctgcccacctccacggtggtggccggcaccacgccgctgcccaacgagcgcgacgccgagatccggagcaagatgaaggcggacggcacgttccagcagaagcgggagcaggcgacgcagcaggggatccacgagtcctactaccgcgacatgaccgtcatgttcggcaagtgggagttcgaccccatggcgctgccggagccgccgtgccccgtgcacctctggcagggcgacgaggacggcctcgtccctgtcgtgctgcagaggtacctcgccggcaagatcggatggatcaactaccatgaactccctggcaccggccacttcctgtcgtcggtgcctgggctcggagacaacgtccttaggacccttttcagtgacaagcagtaaacaaacaatcctccctcacgacgtatcgaagctttcgagcatggtggtggtggtggcgcattagttcattttattattgtaaaggcccgtggttgtcgctgattagagatgataaaataatggtgatgtagatgcaagaccttaaagtgaaatactatatcagagatgtaatatacatacatagtgatgacctttctgttttcattataaaacaaattgtctagtcaagtgtgtgtgtgtgtgttttgccacgataacaaaggtgtcgctaaaaagataaacccagttaatcgcatgacagatcaaaattcgctttgtggcgaatatccatatacagactctctacatgctcgtgcaaatggatatccaggagcaggttaggctttagcttctccagatgacccaagcaagatccatagcgactgaaacatagcaatttcaattgttaaaaaaaaaaagaaa

SEQ ID NO: 14168 - DNA, 1060 bp, Zea Mays
gattacctcctaccgtccgacccggctccctcggtccctccctcggtccctcccggtctcgcagttcctccccgtcgtcttccaccgcaaatcgccgaagcaagcaggcgagctcgggaccagatccactgcgggcagctggagcggaagggccatggggacgccgccgcctttccaggagtccggccactgcgacgtctgccgctgcaccttcaacaccttccgccgccgtcatcactgccgcagctgcggacggacgctctgtcacgagcattcttcgtactacatggctctcccgcagtatgggatatatacagacgtcagagtctgctacggttgcttcaacaaatcctccagccaaggacacgctgataatccggtgtcagctggtagcatttctggagcagctgactctttttcagggctgagtttgggtaaggaggatgattcgtcgcctatgaagaattcaacggttcagagcacggcagcccttattgagtgcaaatgtgggatgcctttgtgtatatgtgaagcaccaaaaccagaaccttctcctacacctgtaaagaatatcaacaccgttcccccaaccacacagtcaaatccaaggccaaagaagcctgctaacactcaacagaaggcttcagctacttccagtagcaactcaagcccattcttaaatattggattaatgaacaacgatagcaatgataagggcattgttgactatgaagttagtggggagggactgagagaagcaattaaaggcggggatgttaagggtgtaaagaaacttcttacacagggagtggattctaactactgcgacaaacaaggatttactttgctgcatttggctgctttgtttaaccaaactgaaattgctcttattctcatggaccatggggcaaatgttgaaagcaaaaatgggcaaggggaaactcctttggactgtgctccggcaatgctgcaatacaaaatgcgccaacgggtggaagaactcgcggcttcggcttcgaagggaccactaggtcgtggactagcggacgaatgaaacgcg

SEQ ID NO: 14169 - DNA, 4285 bp, Zea Mays
ccgctgccgaccgaaacggcctctttccccttccgcctcctctccctctccctctccctctcccctcttctgctgcttgttcttgtcaatagcgctcccaatcctgtcaccatcatcactagtccctcccgccccagctcctctgcctgtaaagatttcgttcgttcctctttcgaatctctgatcccgttctcggtcctcgattccgcctgcgaaagaaactcgtctttgctgcaatctatagaagtagcagggaggactttgtgcagagtttattttccttttcttcttcttcttttggtccggaggaacctagttcgccagtggttgcttgccactgacgaatcacgttcgggttgcgttctccgatccgtcccagcctaattctgggggcgcaggggaaggattcgggacggaaggaactagtttctgtgcttccttggattccacggcaaagcccggctgcgacgtcggcgtcgtctccaccgcattccggctacggttcccaagcaaccttgctgtggtggggatggtgtcgcaggctcccgtggcgggcgccagcctcgccgcgtcgctgtgcaagaagagcaaccgcgtcgcgcgggtgctcgcgtacgcgctgctcgagtggatcctcatcgcgctgttgtcgtggatgggccggagcgagctgggtgagcgggacctcgcctgtgcctgctgcggtgtcgcgctcgagagcggcttctactcgccgcccttcttgctcaccacgtcggcgccgcgtggttcagattgtggcctcaagcaagaggaagaggcagcgatgccaaatggagacgtggtcgttgtctccaaggaaggtcctgtgatcgagctcttcgacgataagccgtttgtggaggatgactcaatcggcgtcttggctgccgaggttgttgccaatgttgagcggccggttgctcttgaatcaattgactcgttggtggtcaccatgggcaccgtgtcatctcaatccggtggcgaaggaaaggaagcagttgaccatggtgttgtaaggcagaacaacgtggacatggagaacacagttagtagcaatgaggagaaaattatgccatctgatgataaggtggatgtggttgatcggctgattgatgaacagattgttgccgtagtccttgtgccagcttgtatagaagctacacttgatggtggcataaatgcagacaaaaccgtggatgcctttgctgatcatcagtctcttgaggatgacagtggattggaagttaaggaccagaaaatatcatttgaagatgaggtatttgaaggtgagcaagctgaacaggttactcaacaacaggaactgtgtgctatgccaacagatcctagtgaccatgaatttgttgagaggttagatagaagtactgagttggagcattttccactggctgagtcaaagcataaaatgaactctatgccagtggaagcttctaagcacgttgctgtaactcagattgaggggaagcaggttcaacaagctgaggtaaatcaggagttggattcaataccaaaatgttccagggagcatgctgatgaagaacttcaaggagagagaactgcacaggctgggttggaacaagagtgtgactctgtgccaattgattatggggaacacggttcccttacttcatatgctcatactgatgatgagcaagatgaggcgatgcagaaagtcacttctgtaactcggattgaagagaagcaggttcaacaagctgaggtaaatcaggagttggattcaataccaaaatgttccagggagcatgctgatgaagaacttcaaggagagagaactgcgcaggctgggttggaacaagagtgtgactctgtgccaattgattctggggaacacggttgccttacttcatatgctcatactgatgatgagcaagatgaggcgaagcagaaagtcacttctgtaactcggattgaagagatgcaggttcaacaagctgaggtaaatcaggagttggattcaataccaaaacgttccagggagcatgctgatcaagaacttgaagtagagagaactgcacaggctgggttggaacaagagtgtgactctgtgccaattgattctgaggaacacggttgcctgttttcatatgctcatactgatgatgagcaagatgaggtgaagcagaaagtcacttctgaaacagcagatgttctacattatgcagcagacacttttaatgttaacacaaactcatggaaagaagatattgaagaggattcaactgaagctgctctaacagccatacatcaaatttgttacgaacctttgacgagcatagtcaagttctctctagatcatagtgtctccgaagaagacagagagcctgatacgccgactcatattgaaggtatatgtgattcacaggaactgctggattctaaagcagttgtttctgatgctaaatctgtagattcaagtgttgctactttgtctactgatctggaaagcactgaattggtgagtgtggatcaactaaaatctgctttggcttccacacgcaaatcattgaacaccctatattctgaacttgaaaatgagaggaacgctgctgctatagctgccgatgaaaccatggcaatgataaaccgcttgcaagaacagaaagctgcaatgcagatggaggcgattcaataccagcggcttatggaggaacagtcagagtatgaccaagaagcactgcagaggttgaatgaactagttgttaagagagagaaggagaagcaagatctggagagagagctcgagctgtatcgccacaaggttcatctctatgaggtaaaggtgaggaaattgtccaggcacaaggctgatgaccagaatggatcatcgtcaacttcatcgagtgctgaggatagtgatgacctttcacaaagtttctatgaaggtgatgaatcttcccatggtattaatggaagcaatgggagtattcctacagatgttgtgctacaagaaactgccaggcatcttgttacccttgatggctcactagctgattttgaggaagagagactatccatactggaacagcttaaagtgctagaagataaactttttgatcttgatgatgaagagtccgataacatgaagcatttctcagaagaaaaccatttaagtggtgcctcaaatggtttctctgatgatgatagctgctttaagctccatgacaagagaaagaatgtaacctacagaggaaagaaactccttccattgttcgacgatgctaccgtggaagctggaaacgtcccccaaggtaatgatgcacagcattcaacagaggtcacactggaccttgctagagagcaacataagcttgcaattgccaatgaaatcgatcaggtacacgagaggctgcatgctcttgaggcagatagggaatacataaaacagtgcgttaggactttgaagaagggagggaaagggtttgatcttcttcaggagatattacagcatcttcgggacctaagaaggattgagcaacgtgcaagtgcaaggaactctggggagctttcgcctcattacctacatcatcacacggattgaagatccctgcctatgtccagcgaatattgcttgaagatggaaatcatacaacaatgataaggggaaaaaaagattgccgactaagtagtattgtcattggagaagttttgttggttcctggagtggaaggagctcctcctggaacacccgtcacagtcggttcgaagataccattgggaaggcagatcacggagcaattctgccttccaaggtccaggattttttttgtggaccacttcccacgttctctttttgtgttggtttagttttcccggtgggttccaaacttttgcccaagggcaagagggtggttggtgagccgcccgggcccctgtggggctgtgtgtttgtggggggtgtggcggcaatcatggccttgtgcagaagctttagaattcattaacctgaagacatgccgatgccagctttgctgccagatatgttgggcttcactagtttttgttttcttctttttttctaaatcctttccctgtaaatcttctagctgtatgtaatgtgctttcggcctttggaatgatgaggtgttgggtgtgtgcatagcatgactgttgttttatgggtctttttttttctttcccttttgttctttttcgctgttattgttctggacattgcaatattttgatgcaagtgctgcttattagttattgaactctgaaagcaacc

SEQ ID NO: 14170 - DNA, 358 bp, Zea Mays
ctgctacaggaaattcattggaatggccaatctgtgtcacttatggtgcagttgctgggtatttgttcggaatggcagtgtcattggtcctaacagcactttacaaaagaagggttcgtgcaaaagctgactagccgttcttcccacaaagcaatgtatttgctgataacatttcttgttcctgcgagtactcatcactttcagtagccttttcacccaggttcacattgttgtattcttttgaagcccccctcattttttttgcagttgtacattgttttcttgaatgtaatgtgaaggactcagtttattactgtaaaacacacgtttgttgagagagtgcgtgttacacaaagtt

SEQ ID NO: 14171 - DNA, 2639 bp, Zea Mays
tcgtttgggccaggagccccgcacgagcacccagccccagccccagccccgttctcggcttctcgcgtcttcttccccctttccgttccaattccaactgcaactggccgcgcccgccgccgccgcggttcccgtagctggggttcagacgctccgtcctactcccgcgccacgtctcctctgggccacttaacaatctcggtaacgcacgacttccccgccagtttcagtcccgcccccgacatcttccaccaccgggtccggggggccatctgccgtgcttgccaccccgcggtcgcgatcgatgattcctcgagagcagccgccaggtatgttccggccgccgaatgcctttggggcgccgcccccctttcttcctcagcctccaccgttgcagtggcagtggcagcaaccgcccccgcccccgccctcgccctcgccctcgcctgcggttaccttctggcagcgagacaatgtgcgggatcatgtgaggaagctgcaacagaccatcgagttatcaactgcgctaataaaagagctcgaggaaattgcggcggccggaaatcctggtgatggtgccacagaaacacgaaaatctgcttcgtcctcggcggaattgccgtgggggtccggcgattcttcagaggacaagcgcctcggtttcgttgagctggctaggtccatggggattagtcaggacactcatgagtcgatggcaacagatgcagccaattacctttgccaccagcttcagcatcttcttgggcctatctcttctgcgacgagccaaagtggcccctgggaggagaggtcggcgatggttaggttgactcagaagctgcagaaatctaagagaaataagcggtggcggcagaggagaaggaagcatgttgcggagctttttcagaaggagcgtgcggattatgatagagttgaccgggaagctgatgaatggagggctaagcaaatagccaaggacattgcaaagcggagggtggaaagcatgcagcagattgctagaaagaaaacaaatgaggaaagaaagcgcctagaatctgagctggagcttgccctaatggtcgagaaacttcaggagcttcggtctataagagttcaaaaaatgaagaaacaaggccattttcttcctgaagaggatgataaatacctcgagcgtgttaaggctgcagttgaggaagaggagcgccaagctgcatctgctgctcggactgatgctgttaaggatgctattctgactgctgaggagtcaaggaagcctctacagtatacaaattctcaggaaggtggttctgaacagcctaaaagtggaccatctgaagacgaggaccagggagatggtgggatgagtgagagaaatgaccaggcaagccaaaaaacagaacatgaagatgaaggtcatagatttgaggggaaagggcatggacatcatgaccctgtcagcaatctgccttttgagttctaccattattatcatggaagtgactatgacatggggacactcattgaggtccgcagaatgtgggattctttcatcagacctggaggaagccgtatacctgggcactgggttccaccaccccctccagctgatgaggtttgggcatcttatttggtgcagcacaagtaaatcaccatgggtatgagaaatggtcttttctgcttcaaaaccaccggaatctttaatggttcctgcaagggtcggcaagacctcgctgatgaaccagtacgtcaacaacaggttcagcaaccagtacaaggccaccatcggcgcggatttcctcaccaaggaggtccagatcgacgaccgcctcttcacactgcagatatgggatacggcaggacaggagcggtttcaaagtcttggtgtggcattttataggggagctgactgctgtgttcttgtatatgatgtcaacgtatccaagtcatttgaaaagctcaacaactggcgtgaggaattcctaattcaagccagcccatcagacccagagaatttcccatttgttgtgcttggtaacaagatcgatgttgatggtggtaacagccggactgtttctgagaagaaggctaaagcatggtgtgcttcaaagggaaacatcccctactttgagacgtcggctaaagagggcttcaatgtagaggctgcatttgagtgtatagcgaggaatgctgtaaaaaatgagccagaagaagatatgtatcttcctgatacgattgatgttgggggcgctggaaggcaacagcgttcgtcaggttgtgaatgctagaagatatggagcactgcgaattgctcggttggttggtctgattctctagggcttgttgtttgggtggcctgtgtcatcatttcatatatgtatttagtttgcaaaactgctatttgtggacactggatagtttggaagtctgcatgcgggtgcttattgtcgactcccgtgtagatgcagagaactcatttgtaactgccgtttcggtgttgtatcgtatctgcgctagatgctagtgttgtaacgcttttgattgttgatggattgcatatatgtactgtatttgtacatgaacagaacgtagtgcccattttcatagtgttcaattgttggttggtttggtattgttctttt

SEQ ID NO: 14172 - DNA, 1542 bp, Zea Mays
ctttgtttccttcctccttttgctggagccactgactttgatgtctcaccaccatttcttcattgcattcccttttctctcaacttgaggcatccttgtgtacacaagatctgcctacgtgtttcagctgatctaagccaggcgcaactgtgaaacaatggcgacatccaagaaggatccccccaatcctagcagaggcaggacgtcacccaacctcatgtcgtccagcagtgagtcctctgggcacggatatggtgctaggcgggctcggtctgtaccgagttccgcgcaccgcaaatttggctcatcgtcgccgtctgtgtctgcctctggctccacagacgtgcatcattcatcattgttcaacgctggtaggtccatctcatcacggaccatgggctcttccatccagggcaccaaggcccagccattcccatctgcagcctcaaaacctacactggcaaaggagaaatccgacaaggtcagcaccaccttgcagcggcctccagtgcttgctgtgccggcagctaaggcatcgccatccaccttgccgaggagtaagccatctccaaggcctagttctgacagttgcaaagcggcagcatcactgaaacctagcagtcagagggtcatgttgccaggtgctgctcaaggagacaaagttcagccactgtctaccgcacagtcacctggtgcagctgcaaggaagagattggatactgttaatggtgctactaccaactcaaaggctaaaagtgtttctcagaaggcaatgggggcatcttcagccaggaaggagaaacataaggacccatcaatgcagattaagggaactgagtgcataaacaccaccacgtctatagaagagcacttgcacaaggagctccccgacccagttgatctgaaatccatggagatgactgtacctgatcagcatgagccatctttcaatgaaccagaacatgtactcaaagacgatgagaaatccgagggtcatttctctgaagagaaagtagatgcaggagctaatgagattcataatggagggcaagatgacaatggtggtgtcaagactatatatgaatgtgggattgttgagaagaaggctgaccggagtgtggataagacagtgccgaagactgaagtggctcaggtatggaggaaggatgatccaaagggcaatgacgtgattgaggaaaccaaaagcaagctcctgctggagaggaagagccgggtgaaggccttggtgggggcctttgaaactgtattgtcgttcaaggagtagtcctcaatcttgtcttctggtctcttgtgcccatctcaatattgagtaatatatatgatgacttccttggctcgttgtactctatatcgtatttcctttttctgaatcatcgttgcattcgatgtggatttgtctatttgttgctctttattgatgtagaattaaattaaattccggtgcttatggcgagaacatttggattctgtgaggaatattcttacttgcaatttttaatatctttcaaatttgtgcgctat

SEQ ID NO: 14173 - DNA, 1741 bp, Zea Mays
ggtaggtcacatgcggtcggatggtgagagcctgagagggggtggcagcaccatggcgcgcgcttcaccgtccgtcccgacgcgtcggtcgagtactcgagtcgtcagcggtcgctgggtggcgcgagcgtcaggcgatggcggaggcggaggagaaggcgagggtcgtggtggttggcggcggcgtcgccggctccctcctcgccaagactatgcagggccacgccgacgtcgtcctcctcgacccgaaagactacctggagatcccctgggctgagctgcgctccatggtcgaaccgtcctttgctgagagatcgttgatctaccacaaagattacctcagcgatgcgaccatcgtgacatcttctgcggtcaatatcactgaacacgcggtccttactgctgacggccactctcttccatatgattatctcatcatagcgactggccatgctttggcttctcctgccagcagagctgagaggataaaagaattccagagagataatgggaagatagagtcgtcagaatctgtgctgataattgggggtggtccaactggtgttgaactggctggagagattgtggtagactacccggggaagagggtgacccttatccatagaggaccgcgtttactcgaattcattggagataaggcttcaaagaagtgccttgattggctgacttcaaagaaagtagacgtgctccttcagcaatcagttgagttgggctcattatcagacacagagaaggtgtacaagacatcaggcggagaaacagtaacagctgattgccactttgtatgcattggaaagccactgagttcgtcgtggctacatgataccatcctaaaggaatccttggatagcaaggggagagtaatggtggaaaaggatttaagagtgaaaggttttaataacatttttgcgattggtgacatcacagatattcctgaaatcaaacaagggtacctcgcccagaagcacgcgctgctagtggcgaagaacctgaagctactgaccaagggtctccctaacagcaaactggcgacttacagcaccggctatccgctggcgctcgtctctcttggaaggaaggaagggctggctcagtttccattgctgacgctcagcgggtgcttgccaggcatgatcaaatccggggatctattcgtcagcaagacgaggaagcagatgggcctgaatggttgactccagtccgaggaagcttgaaaaaatagctcgggtcctgggttatatacagacgatggattcctttacacacagcttgtgttttgctcgtatggccatatgtgttcgttctgtatctgtacgtgtgatggtgtcgtcgtgtggatgcttggaatggtgactagcagagtgtatgctacgtacatgtatacatggacctttttggtccaacaaaatgttgcttctgtagtatgtatgggcgcattttgtttgctggcaagtaaacaatgaaatcatctttgcttgctggcaacacgatgtcagcagtggcaatttgatgcctatgggccggcctatggatggagaagatatatgtgcatctggacatctggtcctatggggctatgggcgcctggagcagccgtgcaagtctgggactgcacgagtgtccagtgcccatccattgcaatctgttcccgtgcttgggcttgcactgttctccctgtacggagtagtattcacggttaatgtctgcaaaaaaaaaaaaa

SEQ ID NO: 14174 - DNA, 2088 bp, Zea Mays
gtaattccgtggccttgtgagcgggcgttggcgtgttgccccgtgtgggcgctctctctcgtagccctgatcgcggtgttgctttcggctcggatctatgtgatgtcccgcgtgcgtttctgtggtgaacgctgtggataagtcgggcttttgtcggcatttggcagtggctggctggtatgaaactgggcctgctgttgtggattgcaggggccagggggaggaggagggaaggggagtacggacacgatggaagccgactctgggaagctcttcgtcggcggcatctcgtgggagacggacgaggatcgcctccgcgagtacttcggtcgcttcggcgacgtcaccgaggccgttatcatgcgggaccgcaacaccggccgcgcccgtgggttcgggttcgtcgtcttcgccgactctgggatcgccgagcgcgtcaccatggagaagcatatgatcgacggccgcatggtggaagcaaagaaggccgttcccagggacgaccaaagtattgcgagcaagaacaatagcagcatagggtcacctggaccaggacgtactagaaagatctttgttgggggtctggcttcaaatgttaccgaggtcgaattcagaaggtactttgagcaattcggtgtgataaccgatgtggtggtgatgtatgaccacaatacgcagaggcccaggggctttggtttcatcacatatgactcagaagacgcagtggataaggcactgcacaagaacttccatgagctcaatggtaaaatggttgaggtcaagagggctgtaccaaaggagcagtctcctggacctattgcacgtgcacggaatgggttctcttcgtttggtccaggttatggaatgggcatgagcgttgaaggtggaatgcgtggatattttggtgcaagttctggtttcgtcaatagctccaatgggcggcaaataggttcttactttaatggtagttcaaaccgattaggtagtccaattgggtatgttggccttaacgatgattcaggatcaatactgagttcaatgtctagaaatgtctggggtaatggaaatctgaactacataggcaaccatacaaacatgaattcttttcctcaacctggaagtggtgggggtatttctggtgatgaaattagttggggaagccttacttctgctcatgggatgagcaacatttcaagccttggatcgggaaaccttggccgtggaaccggagataacaactttggcttgccttctggaaactatgttaggagcaactcaactggtacaattggtgagccattttctgcatcagccaatgcatatgaatcgaacaatccaggtgcatatggcagcagctctatttatggtgactcaacctggaggttcaactcatctgaggttgatatgcctccttttggtcatgatcttggaaatgatgatccagatatcaaatcagaaatatcagcaagctatatgggcaactatactgttaataacaatcagacaagcagaggtatcacttcctagggagagtactattatattcatatatgacttgggataggtgaaacacccactactatatcaggctttcaggtgcatgactgtgaattggtgatgtcagattaatatacaggttagttgcttgtttctaggtaaccagaggtgtggtttacaacaccaaaatgctagaggagccgatacaaacattttagtttaatttctacatctattaggccttttgttttttgaatgagatgtgcagtgttgattgcggcacatacttagaagtgttccaacataagctggaattctgtcatacggaaggataaacttgtataccaagggaatgctgtattattatctttgcccatttatggctacattagcttgcttgtttctattctctttaaccatttcatctgtatactagacagttgcttgacttactattcaaactatattcaaactattgggggtacagagccatattgagacctagtaataaagccaccgaaagtatatacatgtactatctgtcccttttgtgccatgcgaatgcttttgcggaattctgttataaacctt

SEQ ID NO: 14175 - DNA, 1450 bp, Zea Mays
ttattaaacaaaagcagttgtctcgataccaaaaccgcgtatctcaccccgcctccttttcttcgcgtcccccgcctcgatccgatcggggacgggtcgaggggcaggggaatgtcgtcgtcgtctgcgtcatcttcggcggcggcgcaccaccagcagcattaccggcggcagacaggagggagcggtctcgtgccgctcgccgcgctcatcaaggaggaggcccgcacggagcgccaatccatagccggcggcgaaagcaggatctccgcgcgcgacgatgacgcggcaggagtaggaagctccggcgtaggaggggaggcggcggaggcggcggtggagtcgcggctggagcgcccgctgctgcgctatgggtgcgccgctcagtgcaaaaagggcgaggacttctttttgctcagaacggactgtcttcgtcccgccatctccgtctcctcctcggcctccccgcaccccatcttcgccgtattcgctatacttgatggccataatggtaacgcagccgcaatatacacaagggacaatttgctcaaccatgtccttagtgctatgccacgggggctgtccagggaggagtggttgcacatgttgccccgagcactggttgcagggtttgttaagacggacaaggagttccagagcaaagggcaaacttctggcaccaccgctacatttgtgataattgatgggtggactatcactgttgcctctgttggtgattctcgctgtattttagatgctcagggtggggctgtttctttgcttactgtggatcacagactagaagaaaatgttgaggagagggagcgcgttacagcaagtggaggtgaagttggaagactcagtgttgttggtggagcagagattggtccgctacgatgctggcctggaggtctatgcttatcaagatccattggagatatcgatgttggcgaatttattgtccctgttccatatgtgaagcaagtgaagttgtcaaatgctggaggaagacttattattgcttcagatggcatttgggatgcattatcctcagaagccgctgctaagtcttgcagaggtttgcctgctgagcttgccgcaaagcaagttgttaaggaggcactcaggacaagagggctaaaggatgatacaacttgcattgttgttgacataatcccacctggtcaaacaatacggcctctgtctcctcctaaaaagacgagcaagctgaagtcttttatttttagaaagaaagcgaaggacccttctcagaagttgactaaacagcattcagctgttggtatcgttgaagagatatttgaagaaggttcagcgatgctatcagaaagttaatgtacaaaagggtgaatcctacagtacaaacagtataaattatgtgaagatttaccggctcctaaagcttggtatgggtgtgtttttcagtttgttt

SEQ ID NO: 14176 - DNA, 4854 bp, Zea Mays
atggagatgatcggttctggctccaggagttgtctgtgtcactcttctttcctgcctggtttctttactggtggggaacatgcagaaaaactgagtcacaaaagaactgaaaggtcacaccctcttccatttcttgtaaaggaagaggagcttagtggcgatgagcttgaggaatttatcaagaatcgatacagtaatcgtgtgaaatatgctgctgatcggagctattctagagaagacgatgacattttccccatggattgtgcactcaaggagcctactatttggagagttaaatgcatggttgggcgtgagcgccaaatggccttctgcttcatgcaaaaatttgttgacctgcgaaaaattggtaccaaagtgccaattatcacagcatttgcacttgatcacataagagggtttgtttttgttgaagcggagaaggccggttatgttacagaggcatgcaaagggttttgtagtgtgtacacaagcagaattacttctgttcctgcaactgaagttcctagcttgttatccagccgtacgaaaccatttgaaatctctcgtggtacatggatacgcatgaagaatggtaactataaaggtgatctggcacaggtcgttaacatggattctggacggaaaaaagtgatgataaaaattatacccagagttgacctccatgctatttcgaaaaaatttggtggtgcagtttcactaaaagaagctgcagttcctgccccacggttgatcagctcccaagaacttgagttcttcaggcctcacattgaaataaagcgcgatcgtcagactggcgaagtttttgaagtacttgatggtttgatgttcaaggatggatttctgtataaaaaggttgcacttagttctttgatttattgggggatacaaccgacagaaacagagcttttgaaattctcttctagtccaagcaatagagcttctgctgatgacctggattggctctccggcatgtatggttctaagaaaaggaaccttccagcagaacgagatatgaagtcatcatcttctaaaataaaatcctccaaagcaccagaccttaaagggtcaacttctactgaaaattatgacgacaatgatgaattcaaccttcatgatcttgtactctatgggcgaaaagattttggtgtgatcattgctgttgagaaagatggttttaggatactaaagggtggtcccgaaggatctgcggtgacagtgaggaagcaggatattaagaaaggctgtgtagacaaaatgtttacagctgttgatcatcataaaaagacgatatccattaatgacactgttaatgttgtggaagggccatttcagggtaagcaagggctcgttaaacacttgtacttgggaatactgtttatttttaatgaaagtgaaagtgagaactgtgggtttttctgtgctcaaagtgggtcatgcgaaaagatacggaagggtctgggaagctctactactgaaaattcggactttccaactcccatgttttctgaacctgcttatgagcaaaatgagcataggaacactgaagggccttacaggagcaccagagaacaacttttctctattgggcagatgctgcgcattagaaagggtcctttgaagggctacctctgtcgagtagttaggatatttcggaatgatgtgactgttaagctagactctctactgaaaattgttacagtacaagctgatcttctttcagtcccagctaataggggggataacttgtctggtgctccagctagtaaatttggaagtcaagatacacccttcttcgggtcagaagcaggcaaaacttcatgggacagggggttgccatcatttggcagtgactcatggcaacccttttcaagttccacgctaccagtccagaatgcaggtgcagaatcagaagctgatccatggtgtaagaaaacttctgctgaagatgattctgatccatggggtaagaaaacagacggtgattctgatccgtggggtaaggaagcggtatctgctgctgacggtgattgcaatccatggggtaaggaaacagtaccttctgctgctggtgattctgatccatggggtaagaaagtgttttctgctgatggtgattctgatccatggggtaagaaagcaatatcatcagctgttgaagtttggaacactagtgccacacaaaaggaaggttctagtggcaatgcatgggacaaacaagctggagttggtggatctgatgctgctggcagctcctgggacagagcggttgtcaataaggagagtgaaaagagtgacaactggggagaggcttgcagggttatggacatgggaactggagctgacacagacccttggggaagcaaggtcaaagcagtagatatggaaggaccaaatagctgggaaaaggctacaatgcctccagacaataagctggaggatgtcagccaaggatggaaccaacataagggcaactcaactgaagaccaagcaaaagacaatgtttctaaagatgaggacaacaatagggcttggagcagttctttgcctgtcactgaagatggtacctggggcaaatcaaaagacgacaactgtgatggagcaggtggtgcaggaggttgggatgcttctgttgccaactggaacaaatcatccgttctggctgatgcacaggatgagggttggggaaaaggaaattggtcatctgctaagtctgaagaaacaaacaatgaaattggaaattggaacaaagctggagcttcggaccaagctggaccgaaatcttttggtggtgatggttggaacaagggtggtgatcagaatagcagttggaacagtcctggaaattttggaggtgggcgtggctttgggcgaggacgagggagagttaggggtcgggaatctggagatttcaatggcagaaatgatcaaggaaattggaagaattcatggggtggtgacaatgctgaaaaatcttcttggaggtctgataatcaggtagacaatgaagctggagattctggtggatataggggacggggaagaggaggaagggggcaatatggaggacgaggaagagggagagacaatggttggagaaatggtgatggaccaaaatggggtggtggagataattggaacgctacaaatccaccaagtaatcagccttggagtagcagtggaggcaccaagtcatatggtcaaaatcagccttccacttggaataatccagaggataacaaaccatctgtaggtgaacaaggtgatccttgggcaagcaaggtgtcttctactgaaggtaaaggacaacagaatgattcttggtcaagtaagatgacttctcgtggtgctgaggataccagcggtggctgggacagcaaggagaagggctcttcctgcaatggtgggggtgaaggactacaaaatgatccatgggcaaacaagattggttctaacgaaggtaaagaacaagaagctgatccttgggccagcaagatgtcttctgctgtgggtgctgatgacaagaatggtacctgggacacgacaacaaagggcactctatctaacgaaaaggctgacgacccttggaatagtaagcggggtaatgatgatgacagcaagaaaactgacgcctggggtgctggctcgtcaggtgggaatcaggaatcttcttggagtaaacctattttctctctgggggatcaggaacctacttggaacaacccaaggtttggtgacgatgacaatgtaaataatagaggtgggtttggacgcggaaatcaaggcagagggagaggaaggagttttggtggtggtggtggtggatcatcatggaatgaaagcaacaaaaacggtgaatcaggtgggggaaggtctggagaaccatggaacagaaggggttttgatggcggcagaggaagaggccgctttgggcgaggtgaccgcaatcaaggcaacaacttggggtcaggagatggtggcagctggggctctggcaggggaaatggtggtggccgtggtggttacaggaactggaacgataacaacgaaagaaggcccttcggtcaaggtggtggctggtctcagtcttccgactggaatgccaacaaaggaagtggcgaaggaaatcaagctttctcgaagagcaagcccagctgggacgcgcagaacgcctctggtggagatgaccaggcaggaaagaagagtgacacagacaactcctggagccagaaccgatcatctccatctatcctgggtcagccaagcggtgatgctaataacaagtctagcgcttgggacggcgctcccaacggaggagctggcaggggaggttcaggttcttggggaaagagcgacgaggatggctggaactcgtcgtcgggaggatcagccagagagaagccttcgtggggtggtggggcagaagctcctcccaggaaggaggacgacggcgcatggggcaaaggcggcgaggggagccggagcctaggaggaggaggagagggtggtagcagcagttcctgggataaaccggcagatggtgcatggagcggcaacaacaagggtggcagtggcagtggtgggtggtaactggtaagcttgcgacttattggcgctgactgcatgtaaatattgtgcccgcgctgtgtgaactgttctggtgcgtgtctagttcgtatcagttacttggccatgcgtactctaaactaaaataaaacatggcttgtgactgtgactagttaaatgtagcctgttgctgacagtaattaggtgccttaactttcagaaactcatttgttagcatcctcgattcctagacctacgaattaaaaaaaa

SEQ ID NO: 14177 - DNA, 70 bp, Zea Mays
tgaaaagccaaattagacctcgaagaattactatagagttattaataaaagtaaagggcattaatgtaat

SEQ ID NO: 14178 - DNA, 1098 bp, Zea Mays
gcaaaaacaaacttttgaaataggcaacccctgaaacagagtatggtaggatgaacataggaagcaggccatccaagagaaagccgagcggaggtatcgactcactccgagcaatcccatggatctttgcttggacacaaacgcggttccacctcccggtctggctaggatttggagccgcattcaagaatgtcctccagaaggacatcaggaacctccacatgctccaggaaatgtacaatgagtggccatttttcagggtgactattgatctggtggagatggtgttcgccaagggtaatcctggcattgccgcactgtatgacaaactcctcgtttcagaggaactgcatccattgggtgagaagctgagggccaactatgaggaaacccagaagcttctacttcaggttgctgggcacagggatcttctggaaggtgacctctacctgaagcagcggctccgcctgcgtgatgcgtacatcaccaccctgaacgtctgccaggcctacaccctgaagcggatccgtgacccggactaccatgtcgcgctgcgcccccacctctccaaggagatcatggactcgaccaaggctgcggcggagctggtgaagctgaaccctggcagcgaatacgcaccggggctggaggacaccctcatcctgaccatgaagggcatagcagccggcctccagaacaccggttaaaccacgaagaggggatcttttttctcctcctgatcattggctctaggtccttcgtattttcgcggattgtaacttcggccacctctctacaccgtgaggaaataatggtggtttctgcaaaagtggtggtaaataaaagggcgacaactatcttgtttttcatagtaacttataactttacgatgcgataatggaacatggcttgcgttatctgtttctcgtgaagcatttttgcaggcaggctctgaattggagaaaattgcatttttaacactgccagtgtgcagtcaatattacacagttcagttagaaccttatatattggacggcacatttcagaatcaaagtatcttttgtgtttcgtgataatattaaaggctgtagatataca

SEQ ID NO: 14179 - DNA, 1395 bp, Zea Mays
atgtgtttcaacctgtatgtagggcctgacgcacatggagaatctatggacactggagatgacgatgttgccatacagatactgtactgcgggatatgccactctgacctgcacaccatcaagaacgagtggaagaacgccaactaccctgttgtccctgggcacgagatcgccgggctgatcaccgaggttggcaagaacgtgaagaggttcaacgtcggagacaaggttggcgtcgggtgcatggtcaacacatgccagtcctgcgagagctgcgagggagggcacgagaactactgctccaagatcatcttcacctacaactcccacgacagggacggcaccgtcacctacggtggctactctgacatggttgtcgtcaacgagcgcttcgtcatccggttccctgatggcatgcccctcgacagaggcgcgccgctgctctgtgcagggataaccgtgtacaaccccatgaagcaccacgggctaaacgaggcaggcaagcacatcggcgtggttggactcggggggcttgggcacgtcgccgtgaagttcgcgaaggcgttcgggatgagggtgaccgtgatcagcacgtccccggggaagagggaggaagctatggagacgcttggtgcagacgcctttgttgtcagcggtgatgctaaccagatgaaggctgcgaagggcacaatggatggcattatgaacacggcctctgcaagcatgtccatgtacgcttaccttgctctcctcaagccccagggcaagatgatcctgcttggcctgcctgagaagcctctgcagatctctgccttctctttggttactgggggcaagactctggccgggagctgcatggggagcatcagggacacgcaggagatgatggacttcgcagccaagcacgggttggcagcggacatcgaactgatcggcaccgaagaagttaatgaggccatggaacgcctcgccaagggcgaggtcaggtaccgcttcgtcatcgacatcggcaacaccctcaacgcggcatcactagggagctcgccggtcccagctctgtagctgcggcacttgttgatcaacaaatgctcacataaacatattgttgtttgtcgatatatcgtgcgataagcaagtatatttggaataaaaaggaactcaatttaaacgcaagtaatactgtttgtcttaggtcctatttgggctttggtttattgggtactgcatagttttgccttcgtctagtagtctagtactagtagtaacagatgaaacgatgtactgagagacaaaaccgggggcgtcagtaacgggagccgactcagaggatctcgtcgcgacaaaaccagtctgtgatgctgaattaaggacacaaatttaaaaatccctaaacaa

SEQ ID NO: 14180 - DNA, 884 bp, Zea Mays
tcatcaccgctgcggccgtgcgtggaggcgtgaggccgatcaaatcggcggcgaatccccaaccctagcagcagtgggcggccggaccgggacgggcggtagacggctccagcacgcaacgctgacaggtttggccgtgcgaggcgcgagggctagacaggtgtcgcggcgccaggcatccagttccagggctgcgtgggctcgaccagagcgagtctgcaatccgcccgtccttgtccccgtcggcggccgttcaccagtgtcaggtgcggaggtgacaacatttctgaaagaagtaagcaagcactagttatatggtgagtcatgtcaaaggcacgtaatgctgtagttgccactggattgctgctcttcgctggtgctggcttatcatttccgttccttttcgtgaaatcaaagaacaagcctattattgattcgacaaaacctctgccaccacaggctacttttcgaggaccatacgtgaatacgggttcacgtgatatcggacctgatcctaccaactatcccaagaagtgatttgaatcttccatgacatttcggagtcccatttcactcgactccactgctgtgaaattgttcgttttggggccatcttactgtgcacgtgccttgatattgcaaaaaaataaaataaataacaatacctaaataaagggtggttattgaagctcctccattctccttgctcccaaacaaattccccttgcttccaaataaatcctagtgtaaagtttcccaatattgtatgggaatatctattttttacagatccatatatgattagttgaatttcatataggcgtattttgttttgtagataagactttattacaaaaaaagagttttaggcttgcgaaatttgg

SEQ ID NO: 14181 - DNA, 1205 bp, Zea Mays
ccgccactacttctccatagctaaggccagggattcttactacagtggtcagccattgatcatcgatgacatgttcgacaaagtcgagcttaagctccggctttatggctccaaatccgtcgtcaaatacccccgttgtagcctcataaggcattcaacctacgccgacgccgaggaggaccaatcgatgttcatggcgttatcaagcatctggatgctgctcctcctgtttggtacctctgcagttcttgttcctactctgtacactctgagcatcgcgttcggggatgtgtttggggcaaggcaccttctgtacggtgaaaagtccctcgatgcggtaacaagagttaacgacttggctttggttggattggggtatctggttggttatcccatcgcatctgcgtccgttggcgcgctgcaaggcttattgtcaaacaatttggttgccctaaaagggtcctgcccaaattgtggcgagcaggtatttgcatttgtcaagattgaaaaaaccgtgagagcacctcatcgagcagaatgccatgtctgtcagtgccctttggagtaccgcacgaaaattgagaaatcttcgtcagggcctagaagaagttgggtctacggccgggtttatctagtgaagcaagggcatcctgaaacggaaatggataaatgaaaaattctaattgattgagactgctgagggaagtttagataatcccatgagatggcactcttctggtcgactgaaacatttttcagatgccacttattttgatcagaagggcttactgtgtacgaatcatttgaaagatttgatccagccaagtgctttgtaatacagatacatttctgagatgtccagacgctgcagatgaaccccatgctgcattgtattcttttctgttttctctttagatgaatccatgatacagtttggatgaagaactactgaagaggctacgaaggtgccattgctatcaggagggagggtcactgaaaggctcacaggagggagggtcactgaaaggctcacactctgcaccaaacatgtttaatcatttgatcaaagatgcccacactcagcatgtatacagacttgctcaaatgtgatgtgttatacaagtgtgtgtgtgtgtatatatgaagttttcagctttattgtatgtatgttttcagattaatttgcctgaatctggaacccgtct

SEQ ID NO: 14182 - DNA, 740 bp, Zea Mays
aactgccttcagctgctcattatgtggtattaccaaaggctcacgaaggatgaggctactaggaaaatttgttgagaatgaatgtgaaaagatagaccgccttatggagttatacacaaggtattcagacagagtgaaagaagagactgaaagacttgatagtcttgatttggaagatttagagatggacgatgatgagcggtataaccgaaaactcgaagctgggctttacacactgcaggaattcccagatgagagcaagagtagaattacttcttaagcagaacaaacttacaaagcaagatgtgaagagcatacttgaggagtaccatgacaacattggagatttggatggacctgaagagaaggaaagagcacaagtgcggaccaaggaaattattgacgcgttgtgatgtgcatgggcctagggtagttggttgtggagcaagacagaggctggtagatattttgagtatgttgagtgaatttatatccgcagtcagcaaagctgtgtaacttactaggttgtagatgatggatgtcagaaacaagggtgcattaattagttctgttgtattctatttttgtgtaaacttgctagttactatttgtcgttatatgctttgggaaggaatttgtaacacctcaaaaacttaacttgggaatttagtaaaattctccaaagaaaataagagaatgaaatatgaaaatagaaaataaaatagaaaaggaagtaagaa

SEQ ID NO: 14183 - DNA, 2890 bp, Zea Mays
ggccgccattcgtgtggcccaacgccgtttcgcgtgcctctcaggcagcatgccaagggtaggcgaagggcacggccatggatacattcaagtctcctctttcagcgccaagccgccaaggtttgcctcaggtgagctttgacaaaaagaagaccatggagagaattggggtagacggggactttattgtcgccggcaattggaagctacatggagcactatgcaatgaactttacacagtaatccgtgaagttttggataccattcctccctttgagactacaagctcaggatgcagtcctgggctcctggcattgagttccttgaggatagctgttgagaaatccaagaatttactccagtattgctcagagactagcaagttttacttgaacacgttctaacaaaatttgagaattcaagacaaggacttctggaaagccttcatcaagtggaagaaacaattccggaagcagtcggttctcagatcacattgattgcacaagaactggaaaaggctgctttcgttttggatcagtctgaaaaggaagttggtgatgaggtgaatcaactaattcagaacgagtcaaaatccaatgggtttcttgatgagaatgagcttgaattgctccaccaaattgctgtccgggttggtattacatcatccgtggcagctctcaccgaaagaagagcacttaggaggcttcttgagagagcccatgcagaggaggacttgaaaaaggaatcgattgcagcctgcctactccaacttattaggaaatactccaacatatttaagagtgaaacaaccgatagcaccaactctttgtgctcaagcactccttgctcctccagatcgaattctggcttgattggtatgcatcgttcactttccagctcaactgatctctacggaaactgtcagagtctcgagaagcaactcccaaaggttggctccttcagttcgaagcagatgaaagggttatcaaggagcatgcccttgccacctgaggagctgaggtgcccaatctccctgcagctcatctatgaccctgttgttattacatccggccagacatatgaacgagcttgcatcgagaagtggttcgacagtggcaacacaacctgcccgaaaactcgcaagcagttgtcccagctcttgaggacgcctaattactgcattaagggtctgatagcatcttggtgtgaacagaacggggttcctgctccatctggaccgccagaatctcccgagctagaccacatgagaatttcatgcctggaaagcagcacatgtgtggggactgatggcgctaacactgttttgttcgaagagacagctgccaaggatgatgccaagtcggacatggagatattctctcgtcagaactccggagaggccacatccaaactacgtgtagatgaggtctcaccggagaactgctttactcttcagagctccaaggaggctgcacctgagacatgtggggttgtagactctctagacaagggcaagggctctcaccaagactccaaagatgatgtgcctgttagtgaaagatgtgaacagtggctccatgtgctgaacaagaacgatgctgagagcatgagtgagagacttaagttggtcgagcagatcaggatcctgttgaagaacgacgacgaacttcgcgactacgcaggtgctaatggtattactgagccactaatccattttctgaagatggctatctacagaggagatgtgcgatctcaggaggttgctacaatggctctgttcaattttgctgtcaacaatgaccggaacaagaggctgctgctgtcagctggagtcatccccttgatcgagcagatgatacaggaacgggaaacctgcgaggctgccatcgcaatgtacctgaacctctcctgcatccccgaggcgcaggcgatcatcggttcgagcgtcgctattcctttcctcgtcaatggcctgggggaaggtggctcccggagcgacacgtgccgcctggacgcgctgctcaccctgtacaatctctccctgcacgcgcccaacatcccgtccctcatggcgtccggcatcatcgagggcctccggggagtgctgacgccgtcgtccccgtggacggacaaggccctcgcggtgctgctgaacctggcgatgacccggaggggcaaggaagagatcgcggccagcgcggccatggtgggcgccatcgtgctcatcctggacaacggtgagccgggggagaaggagaaggccgtgtcgtgtctgtacgtgatctgcagcggcgacgatggcagcagccagacggtgctccaggagggcgtgatcccggcgctggtgtccgtgacggccaacggcacggccagggcccgggacaaggcgcagcggctgctgaggctgttccgggaacagcggcagcgggagttggagctggaggagatgcagccgcgggtggagctgcacgaggtggcgagccaggcggccgcgcggcaggaggaggaggaagaagaagaggaagagatggcgctggccgttacgccggccgccgcggccagtaagccgagaggcggcggcaagaagccgcggttgcgcaggtcaggctccaggaggttcaccaaggccttcacgtgcctgctcaagaagtggagcctgcgctgagcactgagctgagaaggatcggccagtccgccggtgtaagtgtaactgacctgtcttcaaactgtagcgacgtcattgtccgtctttgtccctttgacaagcgtgttgcgttctactactcattagtggtttcttgaaatgagcatgagcaaacgaaagcataccgatcaattccgttcaaattaggcatgagtagaacgaataaatgacgaaacgctctctatg

SEQ ID NO: 14184 - DNA, 1871 bp, Zea Mays
aaacagccgcaagagggcctgcatcacctactgcatcagctacatcctcagctgcatcaccaagcactcccccgagtacagggtcctcatgatcggccgcatcctcggaggcatcgccacctcgctgctcttctccgccttcgagtcctggctcgtcgcagagcacaacaagagaggctttgacccgcagtggctgtccataacattctccaaagccatcttccttgggaatggcttaattgccattgtgtctgggctattcgcgaaccttcttgctgagaacttgggttttggtcccgtggctccatttgatgccgctgcatgctttctggcgattggcatggctgtcataatgtcctcatggagtgagaactatggagacccatctgatagtaaggacctgatggcccagttcaaggttgcagctaaggcaattgcttcagatgaaaagattgcattactgggagccatacagtcattgtttgagggctcgatgtacacatttgtcttcctatggactccagcgttgagcccaaatgaagaagacattcctcatggttttatttttgctacattcatgctgtcatccatgttgggtagctccgttgcgtcacgtctattagcccgaaagctcaaggttgaaggttacatgcagattgtgttctcgatatcggctgtcacccttgtcctccctgttgtcaccaacatcctagtgcccacatcttctgtgaaaggaggcagcatatcgattggaggttcccttcagcttcttggtttctgcaccttcgaggcctgtgttggcatattctggccatcaatcatgaagatgaggtctcagtacattcctgaggaagcaagaagcacaatcatgaatttcttccgcatcccgctcaacttatttgtttgtgtggtgctttacaatgtaaggagtcattccctcgtccaatggcaagaatatacagaaatatcagcacacgagtaacactttgcctgtggacgttgtcttttgcaggtgaacgcattccctatcactgtcatgttcgggatgtgttctatcttcctcttcatggcagcaatcttgcagagacggctgatggttgtctcggatctacacaagtcatcaactaaagcacaagaaatgatcggggaagatgagccactaaatccttagacgtcgacagaaccatacgtgcaaatcagatacgaaggcggcatacacagagcaattcatttccacccgtgcaataagatggaagtcagaaccatgtagttgttttcgtttgtaattttctttctatagtgtaagatttgacaaggctgttagtttgcacctcggatctgcttatatccacagggcaatcgatagttcagcaagtattgagctatacctatgtcccgagaagattagatgagttggcgtcttggcgatcgatgtgggcttttcccgttgttgttccttgcaatttattttcgaaaaaaaaagaaacatgttcgctttaagctttacgatacggtatatattattcttggaagtgttatctactgcatgacaattctggctgatgtgcatatagcatgtgaaaagagtattgtgaaccagcgtagatatcttttttatggccgctgctctgatggctggtgacaaatctggtgctgctactgttactgttgtgggctctctctatctggccgccgctgctccgatggtcgcgcttctagctgttgttgtttgagcgccaggttgcaggattctatatcgtagcctcagttggcttctctggtctgtctcacacctagtagtgtcatgtttttgttttctgtagattttctttggtcgttgtaagaactattgcttcctaatgaagaaaaaa

SEQ ID NO: 14185 - DNA, 2557 bp, Zea Mays
aaactgccttttcttccggcttccaacttccaagtggcgactgctgccgactgccgggtgcgagaagagggagagatcagagtatcagacaagctgttgtccgaatccactccggcgaggacgagtgctgaggtcgaaatggggagaggagcggatgaggtggtgaaggtcgtggattcggaggacggcgagggggaggaggaagaggcagaggccgcggcggcggaggggtcgagcaaggagacgccgatgctgccaaggatgccggtgcgcgtgctactcgccgagggcgacgactccacgcgccacgtcatctccgcgctgctacgcaagtgcggctaccgagcctctgatggtgtgaaggcgtgggacatattaaaggaaaaatctttcaacatagaccttgttttaactgaagttgaactgcctttgatgtctgggttcctcttgttatccacgatcatggagcatgatgcatccaagaacatccctgttataatgatgtcttcacacgactctgtaagcatggttttcaaatgcatgctaaagggtgcatcagatttccttgttaagccgctaagaaagaacgaattaaggaacttgtggcagcacgtttggagaaaacaactggcaaacggtgggcccgatgtgcagcacatacaagaagagaatcttgcagaaagaatggaacagaagactggcgtgacaaaagatgataatttgaacagcgatggtccctgtaaaaatagagaatgcagtgaacaagaaagtgatgctcaaagttcttgcacaaggtcagagttggaggctgaaagtaagcaaactaacaacattttggagtatatgcaatcaactgaaaggcatttgtctattcgtagccacaaggatttagagctaaatggagagaccaaaacacgaactaagggtaataacttgattccaacaagagaagacgatttattgccaaagaaaagaacatgtttgaatgacaataattctgagagaacttccagagatatggagctagtccacattatggacaatcagcagaagcatgacacacagagggatgtggatactatgagaacaacatccaggagaaatgatgagaagaactccatcccagcacaccagttggaactttctcttagaagaactgactatggaaaattagagaaccacgagaaaaatgatagaagaacactgaaccattcaacttcatctgcattttacttgtataattgcaggacagcgtccagcttaggaaatgctggtgatggtcaattatgcagcacctcagaaacactagtggatgttgaaaatagaaatggagatttggcagctctgtctgaagacacgactgaaacaaatcgtcctcctatcagagttgtaccatttcctgtccctgttcaatgcttcacatttgatgggcagccgttctggaatggtacaccggtggcatctccattctacccacagtcagctccccccatttggaatagcaaaacaccaacgtggcaagaatcaactccacaagcaacttcactgccacaaaaatcgcaacagaaagaaccagttgaaatggatgctaaaccagttgaaaatgcagaggaacaatttgtcgtaggtcctcccagtgccagtgggaagcagctgcatgttgaaattcctaaagatgatctacggcatatttctcctgtgaccggtgaaagtggaatcagtacggtgctagacagcaccagaaatactctgagcagcagtggctgtgatagcacttccaaccagatcaccgcccctactgaaccatcatccaatgtatacaggggcgttcctgaaaccgcaagagccgaaggtttacgacacctgagccagcgtgaggctgcactgaacaagttccggctaaagaggaaggacagatgctttgagaagaaggttcggtaccagagccggaaattactcgcagagcagcgtccacgggtcaagggccagtttgtccgtcaagatcatagcatccaaggaagctagggtccagttactgagctggaactctttcccattatctacaaaaaaaagtcactgtaagtgactccactgcggggtaccctgatgtcaggttttttcgaagagttggaagcaaccacactgagttacggtttgctgtgtatgtttgctaaagcttgtaatatatgtatgtataggctgactcttttctttccttaggttaggcacaggacctggcacgttctagacggtttgtcggtagacgttaaaaaatacaggcatacttgtgtcctccagtagcacgtgtgctttaagccttgtattatgtaactagccaagttgtttttgatgtttcggattagatgtacactgtggatgtatggcgtgaaggatgtccaccaaagtatgctcgtttctgtgtagcttgttgcaatgaacattgttggcctggttttagtaatgctctcttgccttgagtattagtactgtgaaattttctacagacggtatgaagtgctaaatttgggtgacggtttttataagaagatcatgtctc

SEQ ID NO: 14186 - DNA, 681 bp, Zea Mays
ttacacacttgcacctaaggctatctccagcaggtatttgtatatccgatggggggtagagctgtcaaacatcaccgtgattgtcggtgagtgtggtgacacagattatgaaggactacttggaggcgtgcacaaaactatcatactcaaaggctcgttcaatactgctccaaaccaagttcatgctaacagaagctattcatcccaagatgttgtatcctttgacaaacaaggaattgcttcaattgagggatatggtccagacaatctaaagtcagctctacggcaatttggtatattgaaagactaaatctttgatctttgctggtcagcagaggaatcaaagcaggtatcgatcgaggagagtgacaggacttcccctctgtgcacttcgccgaaaagtaataatgggattgctatgcatggcccttgttgtacactagaaaattgggcacgcaaacttgtgtcagtttttccgctgttgcgaaattcagtgatggtgtttttgtaactataccaacctgtgtcagttttgccgttgttgcaaaactcagtgatggtgttttttgtaattattatacatccgaataataagactggtgtttccagacagactatgcaagctaaggggaaatcacgattttcctagatcaaatatgtaatatgttcttttccgatgca

SEQ ID NO: 14187 - DNA, 844 bp, Zea Mays
gctcccgtggattcactcaaatttccataccaaaccagcccgtaggctctagggcgcagtcaggtggagggatttttccccttttgcggcttcctgaactccatcttgccactgccacgagcccacgacgcccgcagccgcagcgaaccagagaggagagcgggagatgaagggcgtcgggggcggcgcggcctccccgggggactatgtctacttcaaatctgtcgtcccgctccacaagatctccattgggtcaaaactgtggaggtactatgactttggacccaaggttgtgccacctcttgtttgtatcccaggaattgcaggaacggctgatgtatactataaacagattatgtccctttgtatgaagggttatcgagtaatatctattgacgttcctcaagtttggaatcaccatgaatggattcattcatttgaaaaatttttggactccatgaatatccatcatgttcacatttatggtacatctcttggtggattcctggcacaaatatttgctgaacaccgtccaaggagagtaaagtcattggtcctatcaaatacttttcttgagacgcacaagtttgctgctgccatgccttggtctccagttgttaattggaccccttcttttttgctgaagcggtacctcttgacaggaatccgagatggtccccatgaaccattcatcgcagactcagtagattttgttgtgggtcaggtggagacattgtcaagagatgatctttcatcaaggttgatgttaaatgttaatgttgcatccgttgggtcgttaatgttgcctgattcactcatcactataatggatacaaatgactga

SEQ ID NO: 14188 - DNA, 660 bp, Zea Mays
tcaaatttctaacaagcactcgctcttgcagttgtgaggcttatgggtcgtgctgcttctcacattacattggaatgcgctttgcaaacacaccccaatgctgcactcattggggaagaggttgctgcgaagaaagaaacccttaagaatgtcacaaactacattactgatatcatctgcaagcgtgcagatcttggttacaactatggtgttatccttataccagaaggcctgattgatttcatcccagaggttcaaaaactcatcgcggaattgaatgaaattttagcacatgatgttgttgatgaggcaggggcctggaaaagcaagcttcaggctgaatcaagggagctgtttgagtttttgcccaaaactattcaggagcaacttatgcttgaaagagatccccatggcaatgttcaggttgcaaaaattgaaactgagaaaatgcttattagcatggtggaaactgaactggagaagagaaaagctgaggggagatactctgcacatttcagaggacaagctcatttctttgggtacgaaggaagatgcggccttcctactaattttgattctaactattgctatgcattaggctatggtgctggtgcccttctccaaagtgggaagacaggacttatttcgtcgctatgtcct

SEQ ID NO: 14189 - DNA, 980 bp, Zea Mays
gaatctccagcaacaccaaaggcagacgctttttttgtccctagagagaacccaaggaatctggtaattcgtccaattgagcagtggccttcgcggagagaaactgaccgacaattgactgtgaagaatgctactgatttgaacaaatatgaagatgcttccattgaaagtgagcgtggtaagtctgcctctgccatgtcaccaagcagcaggcctcctgcagtggaaaatgacaatcagcatgaggctagggccatggctcaacatgggaatgggaatgctacttcagtcgagaggttattgcctaagcttccacgtgcagattacttcacagagcctagtatagaggagcttgcggccaaagaacgtgcggaggcaggctactgcggtcgagtgagggactttgttgtggggcgacatggctacggcagcatcatttttcttggggagacggacgtgaggtgcctggatctggagtcaatagtggagtttaacaaccgggaggtggttgtttacaaggacgacagcaagaagccccctgtgggtgaggggctgaacaaggctgcggaggtgactctactgaacatcaagtgcgtaaataagaagactggggaggagtactgtgaggggacaagggtggagaggtacagggagatgctgatgaagaaggcggaggagcagggcgcggagtttgtgtcctttgatgctgccaagggagagtggaagttcagggtgaagcatttcagcgcctatgggctcccttgttgttaagtattctgtttgttttgatggagcagtgataactaagttgcacgctttacgctcttgtcaaatagtatcatgcttgattctgttgtgctgctttgtacaatgttgctgctgttaaaatgcttgcaaattgcactgctctgctgctgagaacgtattctaattataagacgttttagtttttctaaacacatgattttttccctaaacac

SEQ ID NO: 14190 - DNA, 2629 bp, Zea Mays
caaaactctacatgccctaatcgaaccatccttgtgcttcggcattatccccagctttttctccaagcgtccgttcaggaagctgtccggcaacgagccgctcggcactgggcggtggccgtgcaagagcgatcgggaccgcatcgctcgtctgctcctccaggcctccgcctccctcatcatcactgcagcggcgagaagaacaagggacggtccggcggtggtctccactgacatcgcctaccatggctaccatgctgcgccggtgcatgcgggatctgcgcccgctgcggtctctcgcgagggtccccagaccgatcttcggcgagagtccaacatttcttaaatgtagaagcaactcaacaaaggcatctccaaagagttctacacagaatgctgccccaggtcctcaaggacaaccttctcagtcgggaagtaatgtttcaaagcttgctcttggaactcttgtggtcggtgcagcagctataggtgcacatcaacttggttatatagatcttcaatttaaggacaagacattgccttttagcttaaagaaggaagatgtcggaaaggtggtatatgaagatctgaagattccttctgaacagaaggttgaccagacacaaaacatgtcaggaccaaacactgagattgttcaagagaacaataatgagactcatacttcaaaggactttcgaaatggtggggtgggggcaccagagcttccaatcaatggggatcagcttgttcctgcagaagaaaagaaatcagaaaccctagcccatgagacaaatccagttccagatgaacctggatctgatactgaaatgccatctgaagattctccagctgttgatataaggacagttgccatcgatgctactgaatctagtgaagttcctcatgaacagcaaactgataagatagacggcacagttactcctgtacagtcaaccccaacaacagttagtacttacgatcaccccacagatccagactcaccaaaggatctcacaatagctggtgctgttgagcagaaatctcttgctgagacttatttactgcaagatgaacctggtctttcgaaagacgcaaccattaaagagaaaagaagcgatgaagttgttcgagaaaaaaattctgaagatggtaagattgtacttgatatcattgaggctattcatgctgccgaaaagaagcaggcagatgtagatgcatacatgtattcagaagagagaagaaagttgaaggagaagtatgaaaaggagctgaaagacaccagggccagggaactgatgtatgcagaggaggcagcaattctagataaggagctaaagaaagaaaaactgaagaatgctgctgccataaaggaactgcaagagaaggctgaacaaacgttgcaggatgagctgcagaggaagggtgaagaaacaatccaacagattgagaaggctcaagagatagcaaaagctgaactggctgcagctgttgcaaaagagaaagcatcccagattgaacagattgctgaagcaaatctcaatattgatgctctgtgtatggcattctatgcgcgatctgaagaagctaggcagagccattcagttcataaacttgctctgggcactcttgctttagaacacgctttatccagtggatcaccaatccgatcagaagtggggctattgcgaaaatctgttgaaggcattgacaaagattcactgttagaattggctttttcatcactcccagaagatgttttagattatggatcagataccaggatggggttgaagcaacagtttaactccttgaaggaaactatcagacatctcagccttctaccagcaggtggtggtggaatcctggcacacgctgttgcacgtgttgcttcttcaatcaagattaaaggcgataactctggagatggcattgagtcccttataaacaaagtagaaagcatgattgtcaatggagacttgagtacagcggccgatgccttggagcaagggctacatggaactgaagcagaggagatagctaccgagtgggtgaagcaagccaggaaacgcgctcttgcagagcagacacttgctctccttcgcgcttgtgcttcttcgaccacgttctcgtgattttgacaaccatttccccttccttttcttcgaccgcatttgccggtactccttgcaaccgcatattttttccccagaccatgctgcaaatgtgtggacggtgagcgagaagactagatacaatactgtatgagccactcggtctcaaagtgggcccctgcctagctttcctcctgtaaacagagctaataagttctggcgttctgccctgtatctacttgctgttcttaacattttagtggccagttaaagcaatgtttttggatccaattgctgaaggattctttgtatctgtagtatctgtagtcatgtacagttcaacaaggggtcagtggacactggacatagtgggcgaaaagaaccttatgctccgtttggatgtcgatattgaattgaaatgagatgtaattctaattctattatttggatgtcactgaattggagtttagaattgtgtggtccaatttcacttaatacaaaggagtattgggagaaag

SEQ ID NO: 14191 - DNA, 869 bp, Zea Mays
ctacctgaatgagatcactcatttgaagatagcctctatccaaagcaccagggatctccacagaagcaaggggaacctcagggtcagcagcagcaacaccctccactggaagcaaaccatcatctgtgtcatcctcctcccattcctcctcaacgaaaggcgctccatactgtgcgccattctgaggacctggtccagctttctggaagatccggcacaccacaaatgaatatacctgcggtatccctgcggcgtcatcgccctcgaggcggtattcgtgcatgacccagttggtgcgttcgcccttgggggcgcgtcccgcgtggaagacgagcgtcttcttcatcccgacaagtctgggcccatggcgcacctccctgtccttcccggtggtcttccagtaccctcccgacgtggcgcggttggtgcgggcgcggttggcgtgcttgcggtcgaggcggctgaagaaataccactgggagtcgcgggagcggaggcgggagcgggcgggcaggtcccagggctcgagcttgtaaaggtccacatcggcgatggcatcaaccttgagcgggcggccgaggaccttgcgcttgaggtagtaggagacgagctcctcatcggtggggtggaagcggaagcccggcgcgagggaggtggcctcggccgccaccgccggggctggcggcggctgggcggaggacgacgacgaggacggatggttcatgtatgcgcaccacccgagcagggctggcggcggcgtggatagggttgggagagggggggcaggagatgggattggggaaagtttcgagagaggtgagaggaggaagaaggaagtggcttgggctataagaaaggccaggggcctt

SEQ ID NO: 14192 - DNA, 2639 bp, Zea Mays
aaggaactgatggaagagagaggggagaggtggtgtcatgacattggcagagaacaggctgcaaacaagcctcttttgaagactgttttccaggtcatgatgaggttgttcagtcctcgcaaaacaacattgttgtttgttatacgtgacaaatcaaggacacccctagaaaatcttgagccaattctaagggaagacattcagaagatatgggatgctgttccgaaaccccatgcccataaagaaactccaattagtgaatttttcgatgttcaagttgtcgcactgtcgagttatgaagaaaaagaagagttattcaaacagcaggtttctgatttaagagataggtttcagcattcaattgcccctggtggacttgctggggatcgtcgtggtgttgtcccagcttcaggtttctcatttagttcccagcaattttggaaagtcatcaaggagaacaaagatcttgatttgcctgctcataaagttatggtggctactgtacgttgtgaggaaattggtaatgagaaagttaccagctttatagctgatgaggaatggcaacaatttgaggaggctgtccaacatgactttgttactgggtttgggaagaagctcagcagccttctggatagatgtttatcagagtatgacatggaggctatttattttgatgaaggtgtcagaagctcgaaaagacaacaacttgagtctaaactgttacagcttgtcaatcctgcctatcaatctcttctaggtcacttacacactagaactttagaagcatttaaggagtactttggcaaggccctagaaaaggagggatttgctgttgcagcttgcaattgtactgaaactttcttggagaagtttgatagaggatctgaagatgctgctattcaacaagtgaattgggacacctcaaaagtgagggataagcttagacgtgacattgaggctcatgtagcttcagttcgggctgctaaattgtctgaactttgtgcgaaatatgaggcacaacttaccaaagctctggtggaaccagttgaatctcttctagattcagccagtgaagacacgtggccagctattagaaagcttcttcaacgcgagacaaaaactgctgttttaggtcttgaatctgctgtgtcagcttttgaactcgatgaagcaactgagaaagaactgcttgcgaagctggagaagcatggaaggagtgttgttgagtcaaaggcaaaagaagaagctggaagggttttgattcgcatgaaggacaggttctcaacattgttcagccgagatgctgactctatgcccagggtgtggacaggaaaggaggacataaaagctataactaaaaccgctcgctcagcttctgtgaagttgctttctacaatggctgcaattcggttggaggaggatggtgataacattgagaacactctttcccttgctcttgttgacacttcaagacatgggactacagataggagtatccaattgtccgatccactagcctccagctcatgggaaagggttgctgaggagaagactttaattacccctgtgcagtgcaaaaatttgtggaggcaattcaaagctgaaactgaatatacagtcactcaagccatagctgctcaggaagcaaataagaggaacaacaactggctcccacctccatgggcacttgctgcaatggctatccttggattcaacgagtttatgacattactgaggaatccgctttacctgtttgccatatttgtgatttatcttgttggaaaagccctttgggtgcaatcagaaattggcagggaattccaacatggatttcttcctgccatcctttcactgtcgacgaaatttgttcccactgtaatgaacatcctgaagagattagctgacgcgggtcaagaacctgcagcagcccccgagaggcaaagagagatggagctccaaccaaaatccaccaggaacggttccttatacagcaatgtgacatcggcagggtcatctagcgtaaccacttcggagattggacctgaatattcaagcccggttgtgcaatgattttgctgatctttagctttttggctggaaacatactctagcagttgagaaaaacagggtgcctcaagaacgtacgaagattttggtgccttgcagtttttgtaagcttgcccttcccagactgattcaaggtggcactgcccctcgttgttattcaaggaattttggggctggcggggttgtttgtaagagcattgtaaaataacttgtttcattttttggtttctgtaacatgaatacatgacatgtgatagttgtatataagatctgtggactgggggcgtatcagcgcattctacacagctaagggttgcatagttgcgagaactgaagcatgtaaatgtctttaaactgccatctgattgagatgcagtagtactgctgttctggaataagacatgtctgcttttggggaaaatgattcaaaaaatgtttcgtttgaactcagcgtctgctgaaaatgaatttggttcccgacccctgttctggttggccgaaattcacaagtttggtgttctttttgtgtactgtccgtacaataatacagtccaggcaaaggacaccagacg

SEQ ID NO: 14193 - DNA, 1238 bp, Zea Mays
attttttggtgccccgattttgtgttgaacaccctaaaaagtattggaattcaagagtgtgagataagctttcccagttacaagggaggaagccgagggtttgcttttcttaagttcacctcacattactatgctagagcagcacttcgtcgcttaatgaaatccgatgctatttttggtactgatagaagcgctaaagtatccttttatcgaacccccacaaaatcatccaagagacttatacaggcaaaaatagtatacctggaacatgtccctctttcttgggatgaaaataaagttaaggaatactgtgaagaatatggggagatcctgaaagctgatgttttccagatatcaaagaatatggaaaatgaaacaatttcttttgttgaattctcatccaggaagggtgcgttagcttgtgtgacaggaataaacaaagcaaatattgttgatggaagcttcaagttgtgtgcatatcttgcttggccaaaaagtgcttcaaaggtcaatagtgctgcaccttcaaatgctgccaccgcaaccgagaaggacaaaacccacacagagaagattcttgtagacatcgatttgcaacataaattccagaaaggcgacaagagcaaacttacatctcagacaaaggaggcaattatgaagaagaaaaaatcaagtaaattaccaaatgacaatgatacaaaactaacctcacaaggtgctgccgaagtaccacaaacctccaaatcttctgaaggcaagaggaaagttggaaaaaacaaacatgcctctgtataccaaaaaccattgaagaaagcaataaataatcgtaacgttgatgagagccagctaactcatcggagtgctgcagtactgcaaacgtctaacacttccaaagggaaaaggaaagccagtgagaacagaagtttatatttaaacgaaaaggctctcaagaaagcacgtggcaatagtaatttgggtggaagttcaagatctaaatcatatgcctctgatctggaacctcatgctggattcatttcgcctgcgattcgagataatggcagtgatgcatataatcgacagagaactgcacggtatgatatccatcctatagatgtccatccttatgctagagttgttttagaaattatgtcagggaaagtgggtaaccaaccagtcaactgtaggccataaaatcacaagaaaaggatgatgtaagcgactctgaattcaactactta

SEQ ID NO: 14194 - DNA, 900 bp, Zea Mays
tcggcctccgcccaaaaccccacgcgagctcccagtctcccactccatccatggcgatcgccaccactacctcttcctcctcgctgaccattcgtctcctccacccgaaccccaacactaaccccgctcccagatctctccagctcctcaggaggtgcgctcgtgccgccgtagccggaggcgcggtgccttacggggctgctccccggcgtgggatttggtcgatcagggatgacttggtggtgccgaggtctccctactttccagtggattccgcggcggggcaagagcgtgggccgtcgcccatggtgatggagcggttccagagcgtcgtcagtcagcttttccagcacaggattatccggtgcggtggtcctgttgaggatgatatggccaacatcattgtagcacagctgctctacctggacgctattgatcccactaagcccctggataagatcaatgtagatactgaccgcgactactttatgagcgcaaaagaagcaaaggagtatggccttattgatggagtaatcatgaatcccctcaaggcccttcaaccacttccagcttccagttagtcatgaagtgggctagaactgtcaaacatttttgtttgttgtatcaatgtgtctgttggagctgagtttgcgccgcggtgtttctagtagcctggccacataatattctacatccagaggcgtcaaagattgtaaaaaaacaagaactacggttaggatatatccttgttgatggacattcgaattgaattaacagtattaaagagcctggctacataacattctgcatccagaggcttcaaagattgtaaaaaaaaattaccgttgagtagatccaccgagattgtagagtttttgaactatttggcttgcatagtac

SEQ ID NO: 14195 - DNA, 939 bp, Zea Mays
ctcccctcgggcctcgccgcctcgccgcctcgcaccttttactgaaggtttgacctcacctgcccctcctctcctctctccgccccctgctcctccgagtgaccgtacgccgtagctcgacccggccgatccccgaaaccctagacgcgccgctggtcgccggaggccgggccatggacgtcggcgcggagctgcgcgaggcccaccgcctgacgggccacgccgaccgcgtgtgggcgctcgcttggaaccccgccccgggccccggctccagccccgttctcgcctcctgcagcggcgacaagaccgtccggatctggaagcgcgcccctgacggcgcctggcagtgctcggatgtgctggaagacacgcacaaccgcacggtgaggtcctgcgcctggtcccccaacgggaagctgctcgccaccgcgagcttcgacgccaccacggcagtgtgggagtacaacggcgccgactttgagtgcgtcgccacgctggaggggcacgacaacgaggtgaagagcgtgtcatggagcccgtctgggtcactgctcgccacatgcagccgggacaagatggtgtggatatgggaggtgctgccagggaacgagttcgagtgtgtctcggtgctgccgggccacacgcaggacgtcaagatggtgcagtggcacccaattcttgacattttggtctccgtcagctatgataattccatcagggtctgggctggtgatggagacgatgagtggcactgtgtgcagacactaactgaagccaataactgtggtcattcatcaacagtatgggcattatcctttaaccttaaaggtgacaggatggtcacatgcagtgatgaccaaacgttgaaaatatgggacacaagtgctgatttgtctcaaccaaaaactggcgaaggtcatgactcttggactgcgcagt

SEQ ID NO: 14196 - DNA, 2901 bp, Zea Mays
cacaagcccaacccttcctgacgctccacgcgctcgtctctctccttccttccatcctccctccctccttccctccctcgctcgcctctggaggaccctcgccatcctgcccaagcgcaccaccaaacccccagcagcggcgctagggttcgcgcctcggcgcgtcggcaccgtcacctgcggcgatggcggggcaggagcgtaggacaatcgatctggaggagggatgggcgttcatgcagaagggcatcaccaagctgaagaacatcctcgagggcaagcccgagccgcagttcagttccgaggactacatgatgctctacacgacgatatacaacatgtgcacgcagaagccgccgcaggactactcacagcagctctacgacaagtatcgggagtcgttcgaggagtacatcgcctccatggtactaccttcattaagggagaaacatgacgagtttatgctgagggagctagtgcaaaggtggtcaaaccataaagtcatggttcgctggctgtcacgcttcttttattaccttgaccgatacttcatatcaaggaggtcacttacaccacttaaagaagtgggccttacttgcttccgagagttgatctatcaagagattaaaggacaagttaaagatgcagtgatagctctgatagacaaagaacgtgagggtgaacagattgaccgggctctgttgaagaatgttttggatatttttgttgaaattgggttgggtcaaatggagtgttatgagaatgactttgaagatttcttgctcaaggatactacagagtactactctgtcaaagctcaaagctggattcttgaggactcatgcccagattacatgattaaggctgaggagtgtttaaagcgggagaaggagcgagttggtcactatttgcatattagcagcgaacagaagttattggagaaagtgcaaaatgaattgcttgctcagtatgcaaccccgctgttagagaaggagcattctggatgttctgctttgcttcgcgatgacaaggttgaggatctttctaggatgtacagactcttctccaaaatctcccgtggtctggagcctatttcaaacatgttcaaaacgcatgtcacaagtgagggtacagccttggtcaagcaagcagaagattctgctagtaataagaagccagagaagaaggatatggttggcatgcaggaacaggtctttgtgtggaaaatcatcgagctgcatgacaaatatgtagcttatgtgacagaatgtttccagggacatacactcttccataaggcacttaaagaagcctttgaggtcttctgtaacaaaggtgtctctggcagttcgaatgctgagttgttggctaccttctgcgacaatattctgaagaaaggctgcagtgaaaagctcagtgatgaagccattgaagatgcccttgagaaggttgtgagattgctggcatacatcagtgataaagacctgtttgccgagttctataggaagaaacttgccagaagattacttttcgacaaaagtgctaatgatgagcatgagagaagtattctgacaaagctcaagcaacagtgcggggggcagtttacttccaaaatggagggcatggttacggaccttactgtcgctagagatcaccaaactaagtttgaagagtttgtagctgggcatccagagttgaatcctggcatagatttggctgttactgttttgacaacgggattctggccaagctacaaaacttttgacataaaccttcctgcggagatggtgaaatgtgtagaggttttcaaggaattctatcaaacaagaacgaagcacaggaagctgacatggatttattccttgggaacctgcaacatcaatgctaagtttgatgctaaacctattgagctcattgttacgacatatcaggctgcattactactactgttcaatggatccgaaaggcttagttattctgaaattgcaacacaattaaacctgtcagatgatgatgtagtgcgtttgctccattcactttcttgtgcaaaatacaagatccttaacaaggaaccagcaaatagatccatctcgcccaatgatgtttttgagttcaattcaaaatttactgacagaatgagaagaattaagattccactgcctcccgttgatgagaagaaaaaggttgttgaagatgttgacaaagacaggaggtatgcaattgatgcatcaattgtgcgcattatgaagagccgcaaagttatgggtcatcaacagctggttgctgaatgtgttgagcagcttagccgcatgtttaagccggacttcaaagccataaagaagaggattgaggatctcatcacaagggactatttggagcgcgacaaggacaacgccaatacgtacaaataccttgcctgattggtggttagtgacaaagtccaaaacagctccgggactatgcgataccactgggatggcaatcttcctgcaatgtcgtggtagatgcgtattctggctccgttgtcacctgttggtttgtggaggcagagtggattggtcagctagctgacggaagtcactgactcactagaagctattaagtggttttgtacttactgagtcaaatatatgtcatacgttgaaaccatgtttcgtaattatgaatagtttctttaaaattaaattttgcgcaatcaaatgcctttctctgttgcctaaggacagtcacgctctgatatgcgatcatttcacatttaccgagtcaaatagacgtatgtatatagaaaccataccagtatacttaagttcattttagctcgttataaatgttctctctctcttaacgtccagccatcagtcgaaatattgattcttgtgtaaatgacatctattttttttt

SEQ ID NO: 14197 - DNA, 2004 bp, Zea Mays
cgcccagccgcccagggcctaggccaccgtcagcgccgcccgcctccatctccgccccgagcggctgcgccccgcccgccgcccgcccgcagtccaccaggcgtcgagccccgccccggctcgcgcgcgtcgagcctctgtccggccccggctgcaacccactcactcagccagacctggcttctctgcagactgcaggttctcagtttctcttataacagtaacaaaggatttggaacccagccctctgttctccaccaccgcttcgaagatgccgcaggtaatggtggtggcacggaacttcatggatatggtggctgctcttcctgcgggcaagcttgatatgctctatgactcagcctttatctgtgaggcagtactcaggtcacttcccccactggcaaagaagtatgcactgcagatgttgtatgtgctggcaccagtgaccgctgcagcaatggaagagtgggtgcttgatgaatatgctgccaagcataaggttgccattgataagcttctacagctcagggtctttgttgaagtgcgcgacagacgacgggacgtgagctacaagatgaatcagaagttccagggaaacatgcagaagtatttggttgatggtggaagtttaccaagggaacctttaccattaagtgtcactggtcgattgcccacaccagcagatctggaagcctatgctcttgatcaatgggagtgcttcttgttgcaattgatcaattcatctcaagtcgaaaaagggtcaagttttagctcctccatgatgaagacgtttcagcgtggtcttctgagttcaagggatggtgaagcttcaaagttgactgaaaatggcttccaatttcttctgatggaaacaaatgcacaactttggtacataatgagagaatacatttcatctgctgaggaacgtggagtggaccctacggagctgatatcatttctcttggaacttagctttcataaattgggagcggcttatagcttgaacactctgactgatgtccagaggattgccatcagggatcttgcagaattaggactagtcaaacagcagcagggtcgaaaggatagctggttcattcctacccaattggctactaatctttcagcaagcttgtcagattcgtcatctaacaaagagggatttgtggttgtggagacaaactttcgaatgtatgcatactctacttccaagttgcactgtgaaattctacgcctttttgcaagggtggagtatcaacttccaaacctcatcgtaggagctgttacaaaagaaagtatctatggtgcttttgaaaatgggataactgctgagcagataatttcatttcttaggcaaaatgctcaccctcgtgttgctgacaagatacccgctgtcccggagaatgtcacagatcagattaggttgtgggaaactgacctcaacagggttgagatgattccatcgcatttgtacgaagattttcctagcaaggaatggtttgaacaatgctgtgattatgcaagggataatgggtacttgctgtgggaggaccccaagagaatgagactaattgtacgaggggagttccaccccgaaatgagggagttccttcgcaggcaaagatgaggaacgaccttgtacttgacggaccatgctatgcttctttgtagtgcatagaaacactgtatcgggtaatagttctcctttaaatatcaggaaagggtctagaaaagggctcagtttttgaattattttggtgacctgtgagctgtggaagcatatgaataatgtggtgttcaatggagcaaggcccaacatccttgatctgcttctaaatgttactagtgactgtaccctatgctggtgtatggctggtggccaggtcctgttggaactcttaggtaggtagtatggtgggatggagttggtatgctcttaatttgttgttatttggattgattctatataggacggagtgattttaaaaatgaaaaaaactcaaa

SEQ ID NO: 14198 - DNA, 1229 bp, Zea Mays
ctcagatcgtgccgctaaaacatggtactaaaataggtgataaaaggcgctctttgctgtttttctaggctcgtgggaacttgatttcccagaggagcagatccaactatcagatgctttgactgaaatgagtcaaggtcagtgggagggctgcccaaaatccgaaatttataccccagaaatggtcaatctgatggaaagcacccaacctgatttctctgcaccatccggggagtcactcagacaggtacagtttcggatgatggaattcctcaaccggacagtcctaagactaccagaaaaggtggcaatgggggacacactgtcacaacaaaatgagttgaaggggttctctcggcagagctccagcaattctgtccaagatggccctccttgggattcgctttacaggctcaaccgacatagcctccaacgaaagaaatctgggaaaagccgactccagtttgtcacttcaggggacaatgaagctgaagatgatttctcccctaaagaagtaaatcagaggcatctccttcatgaaggaagtgttggcagctcagcagcgacctccattgctattttcagccacgtgacccccatccggtgcctcatcgcaggcctgctagactgcaaccctataatgtccaagagaatatgtatagacgattcctcggttacggttcttgagcattcgctgaagacaggatggcagataaaaaggctgaatgatactgcacatctcaggcttctctagctgatcagtgtgtcactgtaaagaaactatctgatagcattctgcaaatcagatgctgaaaccacttgctgcacgcatgtactatgcggccatcacaagtgtggtctcgtcactgtatttcaattgtacctatcgaatgtttctactcaatgtagaagggttggcctgtactggcgttgtgtagtatttgttgttatttttatcaagattatttctcaaattgtagttttccatcagtgtctagttactttttcttggtgggtagttagtggggacacatattagcgcaccattctttttggcagaatatttagcaagtttgtatacttcaggggtatgcagaatgaagtgctgttgcaaacttgctgtgtaactgccaatggcacaattgtttgtattttgcactataatgttgcacaaaatgtcggattgcaatcctctatccaaatgttttctacctctgtttggaacaatg

SEQ ID NO: 14199 - DNA, 1404 bp, Zea Mays
cttataatctggaccggagggagtaacacttatggcaccaaatagaatgtccccagtttctgaaaaattgaagttgctctctggttcatgttacttgcctcaccctgctaaggaggcaactggtggtgaggatgcacatttcattagcattgatgagcatgtgataggcgtagcagatggtgttggtggttgggcagatctcggtgtcgatgctggactatatgctaaggagctaatgagaaattcaatgagcgctatcaaagatgagccagaagggaccattgatccaaccagagttttggaaaaggcttatattagtacgaaagcaagggggtcatctaccgcgtgtatcatcactcttaaagatcagggtatccatgctgtaaatcttggggatagtggtttcgtagtagtccgagatggccgcactgttctcaggtcaccctcacagcagcatgatttcaattttacttatcagcttgagagtggaggtggcagtgatcttcctagttccgcacaagtatttcactttccggttgccccgggtgatgttatcgttgctggcacggatggactatttgacaatttatacaacaatgagataagtggtgttattgttgaagctctccgggttggacttgagcctcagattgcagcacaaaaaattgccgccctggctcgacaaagagctacggacaaaaataggcagtcaccttttgcatcagctgctcaagaagctgggtaccggtattatggtgggaagcttgatgacataacagtcgtggtctcatatgtgaaaagcgctggagccccatgatctgagcctttcttttattagatgtaatgtacataaatcattgtcccgaactggcggcgtatgtatgcaccagggcatagaagcttattctcaaggtgtggaatcccctgatcctagaagcacctgtgctgggttcagtatggttgcgctttagccctggaacatgttagcaaaccattgcaccattttacttgtttgccactgtgagaaatcgttttctctaattatctgaactcttgaagccagggtgggtttgtttccccccttggagttggaggataatgaccagctggaaccaaattttgttgtaaacagcgttgattgccgaatgatagttatagacatcttggactaaatggtgaaccagcgatgctgtttgaaatgcctttttggtctcggggtctttttgtttcactgctggcttaaaaattgttgagttgtgtgctgtaaaaaaatgttgtgagttttgtgatgtgaaaatatgtcatcctagagatttatatttgtatgtgtttttgtaaggatgcacgtgcccctcctgagctaccattatctaattatgattgtggtattcaatcgagacatct

SEQ ID NO: 14200 - DNA, 2510 bp, Zea Mays
atgcctgccgcagcttccagagggatcagcgtcgaggtgttgtccaccaccgggacttcacccgacgaagtagaaggagaaactctgatctttttctgtgtcaccggattccagacggacttcagcgcctccgtcatctccaccacctccgcttcgatcccccagcctccacttctgcgaatcgctttgatagggccccaaacttctgatcaggcttggccgagatccccgcccggcgtgatccgcgagatccccgcacggcgtgatccgcgagatccctgccctgcgagatccatgcctgcctgctgggtgtgggggcggagcacgggcgtgaggtgcagggcgccatcgccgggcgtggggagatactccagcggcgaggccttgggcccgccgcagagctcctgcgtccagcgcggagaggccgtcgcgaatgggacccaccgcttgccgtcccagaagacgacccggccgtcggcgacgccacgcgtccggcccggcgtcgggcccagcacccgcgcgcatgccagcacgaacggctccatgtgctccagcggagcagcgtccgccgacagatccatggactcgaggtcgttcagatccacggcggccgcgtccggcacgtcggatctgagcgtcgcccccgtcgttgcagcgaggcgctcgagctcgccggagatgtcggagttgaagccgcggaccgctttccaccaatctccaatcgcggcgtgtgtggcgggcgtgctgcagacgcgcgacgcgagatccaggggacagcgcggaggcggttggagaggctggggcgaggatccaggggacgacgcagtgagtgggagaggagggcgacgcagtgagggggagaggaggaggtggcggcgtagtgaggggagaggaggaggtgattgcgtaggggcgcggcgagatttccggacgcaggggcgcggcgagatttccggacgcaggggcgcggaacaaaggcagaaccgtgcaccacaccggcgtcgcagtcgttcatcggggtcaactacgggacgatcgcggacaacctgccgccgccggcgtcgacggccagcctcctcatgtcgacgtccatcgccaagctccgcctgtacgagccacagccggacctggtcgcggcgctcgcgggctccaacatctccatcctgctgggcatacccaacggcgccgtcccgaacctcgcgtcctccccggccgccgccgcgtcctgggccgccgccaacatccccaccacgcttcccgtctcctccatctccgtcggaaacgagctgctcaactccggcgaccccacgctcgcgccccagctcctccccgccatgcagaacctgctcgccgcgctcccggctggctcgaccaccaagatctccaccgtgcactccatggccgtgctgtcggcgtcggacccgccgtcctccggcgcgttccacccggacctcgccggcagcctggacccggtgctggacttcctgcaccagaacggcgcgccgttcatgatcaacccgtacccctacttcgcgtacgcctccgacacgcggccggagacgctggccttctgcctgttccagcccaacgcgggccgcgtcgacgccgtgtcagggctcacctacaccaacatgttcgacgcgcagctggacgctatccgcgcagcgctggacgccaaggggtacagcgacgtggagatcgtcatcgccgagaccgggtggccgtacaagggtgacgccgacgaggccggcgccacggtggacaacgccaaggcctacaacagcaacctcgtggcgcacctcaagtcccaggtcggcacgccgcggacgccaggcaagtcggtggacacgtacatcttcgcgctctacgacgaggacctcaaggggggcccggagtccgagcgctccttcgggctgtacaagactgacctgacggcgaactacgacgtcgggctcgcaaaagacaatggcacggcggccccgaccagcttgactccggttccggcacagggcacgccgcagccgagcaaagggacgatgccgacggggtactgcgagaccacgtccgccgtgcccggcaccacgcaaggccaacagttgccgcagagcagctcgtgctacattcccggcggagctgagtcgcggcacgccacatggcagcttgttttattgggtgttttgatgtgcttggtcaaggtagccggcatctagttacaacatctgtgtgcgacggaacgagtacagggttcgctctccacagttgtgcgtatggattcaccactgtaatagaattcacgaaagctgctaggcacgatcgaatgttgagccacacggttgcactgctttggcctccacagctccacttgcaactccttttatgaatgatagcacaaataaaatttccgaagccaaaagccgtcggacataatcactaagccattctatttcggccggtcgtaacgggacggaaataaggtatcgtaacgggtcaaaaataaggtcgggtcgaaa

SEQ ID NO: 14201 - DNA, 1454 bp, Zea Mays
tttggattcgccttttcgaacaagctgtggtactggacatgacagcacttatcagcccaaggtgaaaagttttcggaaattgtgggaagtccatactacatggctcctgaagtcttgaagaggaactatggacctgaaatagacatatggagcgctggtgttatcttgtatattttgttatgtggtgttcctccgttttgggctgagactgaacaaggagttgcacaagctattcttcggggaaatatagattttaagcgagaaccctggcccaatgtttctgacaatgctaaagatcttgttcggcagatgcttcaacctgatccaaaactcaggctaacagcaaagcaagttcttgagcatccctggcttcaaaatgctaagaaagctccaaatgttcctcttggagacattgtaaagtcaaggctgaaacagttttcaaggatgaacagattcaaaagaaaagctctaagggttattgctgatcacttgtcagctgaagaggttgaggacataaaggatatgttcaaggtgatggatactgataatgatggcatagtttcttatgaagagttaaagagtgggattgcaaaatttggttctcatcttgcagaatcagaagtgcaaatgcttattgaagctgtggatacaaatggtagaggagcactagattatggtgaatttttggccgtctcacttcatttacaaaggatggcaaacgatgagcaccttcggcgggccttcctatttttcgacaaggatggcaatggtttcattgagcctgaggagcttcaggaagccctgatggaggacgggggagctgataccatggacgtggtcaatgacatattgcaagaagttgacacagataaggatggtaaaattagctacgaagaatttgtagcgatgatgaagactggaacagattggaggaaggcgtcgcggcattattcaagagggcgcttcaatagccttagcataaagcttataaaagatgggtctgtaaaactgggtagcgagtgaggttgtagcttgctgccgatgctcttctccacgcattgtagtctgcctctcgggcccgctaagcagaaacccccttccgtttgctaatgattattttgtctgggatttaggtagttggagcctccctgattggtttactcgtgtaattagtagcccttttcagtatcgctgaggagcatctgctgtaggatgcacgcctgcctccgtctgtctgctcatctcctccggtgtacccgtcgctcaaatggaagtgttgtaaaatgttttggtgttgacctcaaatgcaatttgctggtttcgtgtactgacacccaagattcatttgcgcctataaggctaactgtgaaaatttacgtcatttgatgaggaaatgatgaagcgctagctgatttgtcttgtattctgtttatgcggtgtaaagctagtttgag

SEQ ID NO: 14202 - DNA, 1548 bp, Zea Mays
gctaccattggagagctgattcggctgtttccaaccacgagttaagagctgaatatgacaaagaatgcaaaatttgtgcacgtccttttactgtattccggtggcgtcctgggcgagatgcaaggtacaagaagactgagatctgccagacatgttgcaagctaaagaatgtctgccaggtctgcctgctggatcttgaatatggtctgcctgttcaggtccgagatacagcactctctatcaattccaatgatgcaattccaaggagtgatgtcaatcgcgaatattttgcagaagagcatgataggagggccagagctggcatagactatgattcatcctatgggaaggctcgcccaaatgataccattctgaagcttcaaaggacagcaccatattacaagaggaacagagctcatgtttgcagtttctttgtgcgaggtgaatgtacaagaggagctgagtgcccttatcgtcatgagatgcctgaaactggggagttatctcagcagaacattaaagatcgctactatggagttaatgatccagttgcactgaaacttttgagcaaggcaggtgagatgccatccctgacaccaccagatgatgagactataaggaccctctacattggcggactcgatagcagaataaccgagcaggatttgagggatcagttttatgcccatggtgagatcgagtccataaggatggtacttcaacgtgcaatcgcatttgtgacgtatactacaagagaaggcgcagagaaggctgcagaagagcttgctaataagctagtcatcaagggcgtgcgcctgaagctgatgtggggcaagcctcaggccccaaagcctgaggaggatgagtctgggaggctggggcaggtttcccacggagggctgctccctagggctgtcatatctcagcagcagagcggtgaccagcctcagccccccgggatggagggccaacagcaacaggctgcaccagcatcgtactacttcaacattccagcaccaccagcaacggagcggactgtgtatccatccatggatccacagaggatgggtgctatagtaaaaccacatgacagtgaaggcaaaccagggccgcagcaagccgggcaagctcaggcatcaagcaacccagcacaagggggcggctatcctgcaccaccgccatactaccatggtggagggcagcagcagccgcctgatggccctccagctcagcagcagccacagcagccaattcagaactgaagtcctgtcaagatgttgggtattggtactgctctaactgctcggcaggagaatgcaacccccgtgggtcaccagctttcgtaatttcttaatttgtggttaacagtaaaaactttgttgtattgcttatcaacgtttgaagaaaaaccgtgagatataccggatgtatccagcttctggattttgtggtacctgctgagtttcatcatctttttcaggtcgacctaacgactagtaaaaatactgacgcaagctcataattgacgcctgcaacggctaaatgtta

SEQ ID NO: 14203 - DNA, 182 bp, Zea Mays
gccccgcttccgacccacggaataagtaaaataacgttaaaagtagtggtatttcacttgcgcccggaggctcccacttatcctacacctctcaagtcatttcacaaagtcggactagagtcatgctcaacagggtcttctttccccgctgattccgccaagcccgttcccttggctgtggt

SEQ ID NO: 14204 - DNA, 1471 bp, Zea Mays
ttttcagagtggcggatgcataattctgttcatcattttgcatttcggactactaccaatttgatgatttgctgactgatgaagagaaggcactcaggaagaaggtccgaggtatcatggaaaaggaaatcgcgcccattatgactgagtactgggagaaggctgaattcccattccatgccattcccagccttgccagtcttggtttagctggtggtacaataaaggggtatgggtgccctggactctcgcttacagctagtgctatttcgatagcagaggttgcacgggtcgatgcgagctgctccacatttattctagtgcactcctcgttggctatgtccactattgccctttgtggatctgaggctcaaaagcagaaatacttaccatctcttacccagttcaaaactattggttgctgggcattgacagagccagattatggaagtgatgcaagctccctaaggactgcagcaaccaaggtacctggtggttggcatttagatggacaaaaacgctggataggtaacagcacttttgcagatgtcctcatcattttggctaggaatgcagatacaaaccaactaaatggatttattgtaaagaaaggagctcctggtctaaaagccacaaaaattgaaaataaaattggactcagaatggttcaaaatggagacataattctaaataaagtatttgtccctgaggaagacagattaacaggcatcaattcatttcaggatataaacaaggtcctcgctatgtctcgaattatggtggcatggcaaccaataggcatatcaatgggagtttatgacatctgccatcggtatttgaaagaaagaaagcaatttggagctccactggcagcttttcagctcaatcaagaaaagcttgtccgcatgcttggcaacattcaggctatgcttctcgttggatggcgactgtgcaagctgtatgagtcaggcaaaatgacaccaggccggtctagtttaggcaaggcatggacgtccaagaaggccagggaggtggtttctcttgggcgagagctactgggtggcaatggcattttggttgattttcttgtcgccaaggcattttgtgacgtggaacccattttctcgtacgagggcacctatgacattaatagcctggtggctggcagagagatcaccgggatcgcgagcttcaagcctgctgtgtcagcaaaatcacgcctgtgaaagttgtttttttctttgttcccgaagacagtagaaatcaaccttgtacattcagatgattgggaataagaacggtaggaaagctgtaaaactcgacgtgcttcctcgtatgtactgttctgtttcaaattattcgacgttttgtcggaacggaacggaggacctgtatggctgtatatgatactcatcctatatatcacgcagcttttgaagattttgtaaaaaaacaaccataataaaaacaa

SEQ ID NO: 14205 - DNA, 985 bp, Zea Mays
cacggttgggggcttgactcacatttgacatccttgataaacctgatggctatcgcggagagctgtgttgatgcggtggtcatggagatggtggctgtctactgcggtggcctctatgccgccaagccagagcttgctgcccgccgcattgaggccatcggctttcaggttgggcaccagctctctgagagatataccatggagcgtccacgatttagtgatcatcttgaagcaatcaaatttatctgcaaagacttctggtcagagctgttcaagaaacagattgacaatctgaaaacaaatcatagggtgatgcagaaatacttcctgtctgtttttccttctcgttaaccactgacatctcttgactacctatacatgcagggtacctttgtccttcaagataaccgttttcggtggcttactcgtgtttctctagatccatatacagagaacagagattcaactgaaaatgattctgcagcattgggtgatacagcagcccaaacaactaccatgcttctgtatttcccatgtggattgataagaggtgccttgactaacttaggaattccgtgttctgtctctgctgacatgtcaaaccttccagcatgttcgtttgtggtgcgcataaagacatgaactgtgagaaacgatacaagtacagcatgaagatctgacagtacctgcttctggttcaagcgggttgaacattgaagacagcagtatttgggcatgcattagatgtatcgtggtactgcatttagccccgtttgttttttgttttcttttcctccaggaattacttgttttcactatctcaaaatgactttcccgcaacctcctcatgagagcatgtacaaccccatttaagggctaagtgaaaaaatacaaaatacgggctcttcgcgaagaatccgtcttatcatgactttctatacacgtcttttagctgtatttatgatctacggtctcaaggttatac

SEQ ID NO: 14206 - DNA, 209 bp, Zea Mays
ggcaacgggcggcggtgccgagatctctctcggctagcctgaggtggaagggggagggaggcagtcgggatccggggagagaaggagagatctgatctaagcaagcgacgcgacggaaccaaccagcacaacacagcggtgcgggccgcggggagccggggaaggggaaaggagagagagaagacagcacgagatgccggggaattttt

SEQ ID NO: 14207 - DNA, 105 bp, Zea Mays
gtcgcagtctaaatttgttacaaagaaacaaattaatactgcgaggggctactattgggggccttcctcctccgaaggtcctcaaaaacgtaactaaccatatgt

SEQ ID NO: 14208 - DNA, 229 bp, Zea Mays
acgacgatcggagcaacaaatttggccttccacgcttccccggcagcgcggtccgatctcccatggctcccacaagctctctcacgatgggaggacgaatccatagttgtctaggcattgaaatagggtcgcgggcgtgcagcgcgaccaacctttatacgcacgatgaggctaccggatcggagcagtcatggtcgaggattccgcactgtgcgccggtcgtgccagg

SEQ ID NO: 14209 - DNA, 387 bp, Zea Mays
agagaaaaaaaaggtctaaagtacatgtccggattctttgcattgtcttttgaatgattatccatgaggatccacgatttcaacctgacctctccagttcatattcaccagtaaaatgcaacgttgattgtacttgtgacagtgacaaaaaacagtgcacttatgaaaggcagtatgctgaaatgagctccagcagtggggtgcttggtgaggacatagtgtcttttggcagagagagtgaacttaagccacagcatgctatttttggctgtgaaaattctgaaactggagatttgttcagtcagcatgctgatggtataatggggctgggtcgtggtcaacttagcataatggatcagcttgttgaaaagggtgtcataagtgatt

SEQ ID NO: 14210 - DNA, 89 bp, Zea Mays
ggacggtggtgtatctgtgctctcggttggcgtgaacccattctggtcttgagaaaccaggtggcgagttgacatatgcaagggttaag

SEQ ID NO: 14211 - DNA, 1741 bp, Zea Mays
attaacatcacacagcaaacttgaaatgcagacattcagaaccactcatcagagtcttttagaacaccaaacggacaggtagcagtagcagcagcagcagcaacgaagatgtcattcagacatggtcgctagccgtacatgcatgctatatattattcgtccattcaggaaccgaggacgcgaagacacagacagataacagctagagcggaggaggacgaattaggcggcggcggcagcagctaggtaaggttccttggattcatctagctcgtctctctgcgtatataagacaacaaggtgaactaatagtcaattaatatacagatagatgtatatacggcaaaagacaagcaacgtacgttcacgttcaccagggcaggatcttccagcgctggttgtcgcccttggcccactcccagaggacgacggtggtgccgtcgtggacgccgccgtggtccttgtcgccgtggaaggcgtccatgttgaggtagatgttgttcaccatgcgcacgcagcggaagccgtgcccgacgtcgcggctctccgtccacagcaccgactcgtcaacgtactcggggttgtagggcacaaggcgtaccgggtggctctgtcccagcgagtgcttgatggcttcgccggtgaccttgttcaccagcgcgaacgctgggtacccttcctcgtccttgatgctagtgctgtgcctcatgtccttcacccatacctggaactcgtccctggggttggttggcgccaggcacacggtgccgttcctgacggtgaggctgtacccttcgccggccttgcagtagacgcggacggtctgttcagacgccagagcgcgaggcaggttgctgtacccgtaccccgccgggtagcccccagcagatggaggacggtacccgccgtagccaggctcctgcacaggcggaggaggagcgtacgggcgcggcgcgtaggcctcgtccccccagggcagcaccttccagctctggttggggcccttgcaccactcccagagcaccacggtggtgccgtcgtgcacgccgccgtggtccttgtcgccgtggaaggcgtcgaagttgaggtggatgttgttgaccatgcggatgcagcggaagcccttgcccacgtcgtggctctccgtccacagcaccgactcgtccaggtactccgcgttgtagggcaccagcttcacctgcatacatatgcgtgtgtgtgtgtgtatttgtgggcgtgtaatgcaacacgtacgtacggtgagaaatcgagagagcagatagagacggccgcgccggcggcggacttacgggatgggactggccgagcgagtgcttgatggcgaggccggtggccctgttgatgagcgcgaacgccggctggccctccgcgtccttcaccttcgtgctgtgcctcatgtccttgtaccagtgctgcacatgcatgcgcaggcacaagtatacagatccatgaccaaccactatcgtcaatggcagaaagagagagagagagagagagagagagagaggcatgcctggtactcgtcgcgggggttggtgggcgcgaggacgacggcgtcgtggcgcacggtgaggcagtacgcctcgtcggcgcggcagaagatcctgaacagcgtctgctcgtgcggcggcggggcctggtggtgcccgccgtggccgtggtggtggtggtgcccgaacatgcttccttccctttcctgaagctgagacctcgatgtgaa

SEQ ID NO: 14212 - DNA, 2428 bp, Zea Mays
acgagactctgctccatataaaatggagccaaataaaaatcgacgacgacatctatttaaggctgaatctacctcgcctgcgtggccctcccctcctccccatcgcgtcctctccgctacacctcgccgatcggatcgcgacgagacgccgcgcgatccgacctaggctgacgccaacgaccactctcgccgccggcggtcatggcgtacggcgaccgcgttaccaccttcgaggactcagagaaggagagcgagtacggctatgtccgcaaggtctctggacctgtggttgttgctgatggaatgggtggtgctgccatgtatgaacttgtccgcgtcgggcatgataacctcatcggggaaattatccgtcttgagggcgattcagctacaatccaagtttatgaggaaacagctggactgatggttaatgaccctgttttgagaacgagaaagcctctatcagttgaattgggacctggaattcttggaaatatttttgatggtatccagcgccctctaaaaaccattgccattaagtcaggagatgtgtatattcctcgtggtgtttcagttcctgcccttgacaaagatgcattatgggaatttcagccaaagaaactaggtgttggagatgtcatcacaggtggagatctatacgctactgtctttgagaacacattgatgcagcaccatgttgctcttccaccgggttctatggggaaaataagttacattgcaccagctggtcagtacaaccttcaggacacagtgctagaattggaatttcagggcataaaaaagaattttaccatgcttcagacatggcctgtgcgttcaccaaggcctgttgcgtcgaagcttgctgcggatacacctcttctgacagggcagcgtgtactggatgcactattcccctcagttctgggaggcacttgtgctattccaggggcatttggttgtggtaaaactgtcattagtcaggcactttccaagtactccaattctgaagctgtggtttatgtgggctgtggtgaacgaggaaatgagatggctgaggttctcatggacttcccccagttgacgatgacattgcctgatggccgtgaggagtcagtcatgaagagaacaaccttggtggctaacacatcaaatatgcctgttgctgctcgtgaagcctccatttatacaggaattacaattgccgagtattttcgtgatatgggctacaacgttagtatgatggctgactccacctcacgatgggctgaggctttgcgtgagatctcagggcgtttggctgaaatgcctgctgatagtggttacccagcttacttggctgcgcgtttggcatccttttatgaacgtgctggtaaggtgaaatgcctgggaagtccagacaggactggcagtgtcacaattgttggagccgtctctcctccaggtggtgatttttcagaccctgttacctctgcaaccctcagtattgttcaggtcttctggggtttagataaaaagctcgctcaaaggaagcatttcccatctgtgaattggctcatttcctattcgaaatactccaaggcccttgagtccttttatgagaagtttgatccagatttcattgatattaggacaaaagcacgtgaggtgttgcagagggaggacgatctaaatgaaattgtgcagcttgttggtaaagatgcgctggcagaatctgacaagattacactggagacagcaaagctactgagagaagattatttggcacaaaatgcatttaccccatatgataagttctgcccattctacaaatccgtttggatgatgcgcaatattattcacttcaacacattggcaaatcaggctgtggagcgggcagctggtactgatggccaaaagataacatacggtgtcataaaacaccgtttgggcgatctattttatcgcctagtatctcaaaagttcgaggatcctgccgaaggtgaagaagctttggtcggcaaatttaagaaactgtatgatgacctcaccactggtttccgcaatctcgaagacgaggcacggtgaactagtgtagattctgtgtaaacaaggactgccaaatgttttataagatacataaattgtagattgagatcatctgtaagaattattcccaccgttgcaccatctcttcgccaccactgttttagtcatcggtgcctgatgggcaccctgtttatttcatgtatcatttattgctgtcattgtaataagcgatgggcatgattgtagttgaataagtacaatgtccatgtattcagacaccagtatcgtgcttatttgtttgttaaaaaaactatgttgcctttttgggatttgttcgtgcttattgcatatgatggtttaaaaaagactaacgtatgagtaaataaacttattatgagtg

SEQ ID NO: 14213 - DNA, 1473 bp, Zea Mays
attccagaacacagcctcagcaccttccttcttctccgtctcgtcgtccctttccatttcctctcccatttatgtccccgcttcaggtctgccaaataaacccccgaaaagcaggagagcgagacccggaagtggaagactagggttagggtcccagctccgccgttgtctgggcgagtcgagacatggccggccctgcccccgccgttgcagccagtgccgccgcctcacagtcgccgccgatgcagctgccgtcgccgttcgcggagctagtcaagggttcctccggcctcgagaagatcgtgcttcgcggcgctcgcaactgctgtgccgagatctatctttatggaggtcaagtaacatcatggaagaatgacaatggggaagagttgctttttctcagcagcaaggctattttcaaacctccaaaagctattcgtggtggtataccaatttgctttccccaatttggaacacatggaaatcttgagcaacatggatttgctaggaaccggttttggactatcgacaacaacccaccccctttaccagtaaaccctgctattaaggcttatgttgatctgattttgaagccttctgaagaggatttaaagatctggccccacagttttgaatttcgcttgagagtttctcttggaccttctggagatctgagtctcacatcccgaatcaggaataccaacacagatggaagacctttctcttatacatttgcatatcacacatacttctctgtctctgacataagcgaggtgcgtgtcgaagggctggaaacaatggactaccttgacaacttgaaggcaaaggagcgtttcacggagcaaggcgatgctattgtttttgaatcagaagttgataaagtttatcttgccgcaccctctaaaattgccatcattgatcatgagaagaaaagaacatttgtcgtgacaaaagaagggcttcctgatgctgttgtttggaacccttgggacaagaaggcaaaagcaatgcaagattttggggatgcagaatacaagagcatgctgtgtgtggagcctgcagctgttgagaggcctattactctgaaacctggggaagagtggaaaggaaggcttgtgctttcagctgttccttcgagttactgtagcggacagttagatccatcgaaggtccttcagggttgaaaatcctcactttctgcatcttgtacagaagttcattgcccttaatatttgatgctgggctggcgtcaacgccgcatgttccttttgccatttccaccccctatatttctggtcccttttgtatctagaatttgagtgataggttgattccgaataacagtctgtgatttgagcttaggattgggtcatctcatcgatgaatgataccgctggacaaaatgctggcgatggcaaatgcttgaaacttttcgctattggagcctccccgtcagcactcggctcggagcct

SEQ ID NO: 14214 - DNA, 2122 bp, Zea Mays
cgcaccttcatcagtttgccgagttgctgcgtcctgtgttaagggtggagcttggaatttggatcgtgaaaagcatatcccaaggcatctacaagtccagcttctgaagcagaacacttcaggtcatcaccagagttcgaagaatgaggtttcaagccccatatctgttttggagcggaagagtggagagctccacaagggacaacttcatgctacttctgctatgctgcctgtcgctaccatggagaaggcaacgaaatgggagcctggggacataaagggaatggaatcgcatgatgcgtatctgatagccagccagctgaatcttcttgatgaacacagagacaccgcgtatgttgctgacctccagatggagcttcagcaagcacgtgataggataagtgcgatggaaactgagcgacggtcagctaagaagaggcttgaccacttgttcaagaaacttgcggaggagaaagcggcttggaggaacagagagcatgaaaaggtgcgtgctatcctcgaagatatgaaggcagaccttgaccacgagaagaaaaaccggaggcggctggagatgattaacatgaaactcgtcaacgagctgaaggaggccaagatgtcagcaaaacagctgttacaagagtatgagacagagaggaaagcacgtgagctcactgaggaggtgtgcaacgagctagcaagagaggtggatgaagacaaagctgagatcgaggccctgaaacgggactcccagaggttgcgagaggaggtagacgaggagcggaagatgctgcagatggcggaggtgtggcgtgaagaacgggtgcagatgaagcttgttgatgcaaaacttactctcgacgcaaaatacacacagctgagcaaactgcaacaggatgttgaggcgtttattgctgcatgcagtactgctaatggagacgtcacggtagtagagcaagcagagagcataatacaggcaatcaagtcagtcagagcccaagatgctgagttcaggtacgagccaccggccgcatcagaagacatattttccatttttgaagagctgcgtccaagtgaggagcctgtcatcaaggagatcgagccatgttacaagaatagctctgccaaatgtgaaccagaaattcaagaggttagcccaatgaccgatatattcctcgaaaagaaagccaaggcaaactcgaacaaaagccctaaagatgaaagcgacactgaagatggcagcagctgggagacaataagccacgaagatgtccagggttcaagcggttcacctgatggaagcgagccttcggtcagcaacaaggtctgcgacggaagcattccttggaagagcagaaatggattcgagcgtatggagagtgagaagctgaaggatgagtcagctgatgcctgcctgacaaacatgaaccagcccaagaagaaagaatcggccatttcaaagctctggaagtcgtcccgcccaaagaacagcgagatatgcaagaaagacgcagttgaaacggtaaatgcaagatcgtcaaacgtgcggctctcagtcgggacctattccactgttgaaagtggcatccaagaaatagggctcagtccaccgtgtgttgagcagtggagctcaccagactcgatgaacgtccaattcaaccggggattcaagggctgtatagagtacccgcggatgtcccagaagcacagcttgaaggcgaagctcatggaggcacggttggagagccataaggtccagctccgccaggtgctcaagcagaagatctagtgcaggccagaaccagaaggcgaaacattgtaaacctagcattcaatccaaggaataatgtaaaggagtacctagatgcttcgtttttcatgttttagagtaacctgtattgcatgtacaacaaggactagaaaaaaaaaggacagggctggtctttgaggtctatctggagcctttttctgcttctgtatctcactttagctttggtgttattgtttgatctgataggctatggtgagatccatcatgatgtataatacagacataaacaagtagcaacgttgagacaaattgcatacctttgtatgcagtttccctatgtttttctgtatc

SEQ ID NO: 14215 - DNA, 1147 bp, Zea Mays
cttccatgtttctagcaggctcttctgttgaatacaaaatgtctatctcagatgttgtggtggcacctccatttatctatattgatcaggttaagaattcactaactggtcgcattgaggtttctgctcagaatgtgtggattggaaaaggaggagcctacaccggagagatcagtgccgaacaactggtggacatcggctgtcaatgggttattcttggacactctgagcgtagacatattattggtgaaaatgatgagtttattggaaagaaggctgcatatgcattgagccaaaatgttaaggttattgcctgcataggagagctgctggaagagagggaagcaggcaaaacttttgatgtatgttttaggcagatgaaggcttttgcagatagtatttcaaactgggcagatgttgtaattgcatacgagcctgtttgggctattggaaccggaaaagttgctactcctgaacaagcccaggaagttcatgctgctgtacgcaattggctgaagaccaacatatcacccgatgttgcctctagcactcgaataatctatggaggttctgtgaatgcagccaactgtgcggagctagcaaagaaagaagatattgatggttttcttgttggtggtgcctctttgaagggccctgatttcgccaccattatcaactcggtgaccgctaagaaagttgcagcctgatgagccctgtctgttagaaataagtggtcatctgtgtttcaacctcacctgccacgccgtaaagcctgtaggaggtgatccgtgtgatggtgtgccgtcaccttcctgcctttgctgatttgcagcaccacggaaacagaaaataacgcaagatgtcacaattttttttttgttctcgtagtccgtagaccttgtgtacgttacgggagttcagttgcacgttggcgatgtacgtttagaatattcttttgctctgtccttttgtaaggggaaaataatttgttgacagacgaggagaaatgataagtgctttttttatgcctcggtacttgaactacaagttgtagtagaaatggtaagtgccttttttaagcataataaatttattttgtaatgatatacatgtaagttctaaaattgtacatataatcttaaagatc

SEQ ID NO: 14216 - DNA, 927 bp, Zea Mays
cttaaaactgtggttctgtgttcttttatgctgagataaatttggaggtgctatggcaattgtaaagagtgatatcggcggcaatatcacaagactggaaaacaagtatacttcagaaccatcaaagtatgaacacttgtacagcatggttcaggaagaagttcaaaacaagaccgcaaaaggttcctcaagctgcacaaatgggcttctgtggctgacgagggccatggacttccttgttgagttgtttcgtaacctgcttgagcatccagactggaccatgggtcaatcttgcactgattcatacaccaagactttgaagaaatttcatggatggcttgccagttctagttttacggtggcaatgaagcttgctcctaatagagagaaatttatggaggtcattagtggaaccggtgacatcaatgcagatattgagaaattttgcacgaccttctctcctttcctcaaagaaaaccacaactttctggcgagcgtcggtcttgatgatctgaaggcttcatagatcaatctccatgctgattacaacaaaataagcatgtcttacgaaactcaaagtgttgccgagggtatacctgtttcccgtagccatctcccccttgaaaaactttaggagatggtaataatttgtcagcatgattgaccatggctacttacgcagagaattgacaccactcaacaaatttagttaccgaactctcgatcctgtgttacagcaaatcctatggttatgtggaactctggtgctgtaattctcttgtatgctacccagtatgccgcaggaaatcataattcggtgttccattgcagcaggaccatcgtgtcacttgtaggctacccatattgactttgtggctcagccagctgcccacttccaacacagttgagcgagaacatctagatgac

SEQ ID NO: 14217 - DNA, 1440 bp, Zea Mays
gtgctggactgcaagccattgatgagattgtcccgacattgctacgggctttggaagatgatgatacatctgcaacagcccttgatggtctaaagcagattttaagtgtccgaacagcagctgttttaccccatatattgcccaaattagtccagccccctctctcttcatttaatgcacatgcattaggtgctctagcagaggttgctgggccaggtttgaattcacatattagaactgttctcccagcattgattcttgctatggatgatgaagatgtggatgtaaaaaactcagccaggaaagctgctgaaactgttctgttggttattgatgaggaaggagttgaaactttgatacctgagcttctaagaggaatcactgacagtcaggcatcaatgaggcggggctcagcctacctaattggtttcctctttaaaaacactaaactatatttggctgatgaggcttctgatatgatgtcaaccctaataattttgttgagtgatacagacaaggctactgtatcagctgctttagaagcattttcaagagttgttgcatctgttccaaaggaacagctcccaacacacataaaactagtgcgcgatgctgtctctacagccagagataaagagcgtagaaggcgaaagggtgtgcctattcttctgcctggcttatgtctttctaaagcactgcaaccttttcttcctatatttcagcagggtttaattagtgggtcggccgaaacaaaggagcaggcggctgaaggtctaggagagttaattgatgtaacaagcgagaagactcttaaggaagttgtagtgccaattacaggacctcttatccgcatccttggtgatcggtttccatggcaagttaagtcagcaatcctatcaaccctgacaatcatcatcatgaaaggtctgtccggacgagggctgcagctgctctcggaaagcttagtgctcttagcacacgggtggatcctttagttagcgatcttctgtccatgttgcagtcaggagatgaatctgtaaaagaaagtgtgctttctgcactcaaaggtgttatcaaacatgctggcaaaagtgtcagtgctccaataaggtcacggggatgtgctcttcttgaagatctgctgcaggctgaagctgatgatatccgcagttgtgctgcaaaagtgattggcacattgtctcagtacatggatgacagagagattccagatttggtgcaaatccttttggaagtgggcacctcatcggactggtgtaccaggcatggtgctttgttagcattatcatccatatcaatgcattctccatcaaaattatgtgatttggcatcctttccatctctggttgatcttctgaaagattctcttaaagacgacaagttccctgttcgtgaagttgctacaagaactctggaaggaga

SEQ ID NO: 14218 - DNA, 220 bp, Zea Mays
ttactgtgacttccatgagtgatggtgacgatcctgagcggacttgcgcaaagcacttcccagaaacctgattcgtcggcacccgtgcaggtcgttaaaacgtcggtgttggttcggagacaccgctctcccttgatctgcggcacgacagacgaagggacgtcagggcagagaagcgacgacgtaaagagaggagaagaagaggacaagtcggttgcta

SEQ ID NO: 14219 - DNA, 1333 bp, Zea Mays
atcggccagcaactttaaactgggcatatttatcaatgtgtttgtaaagtatgggatgcacttactggtgatgaactacattcatttgaacataagcatatagttcgggcatgtgctttctctgaggacacccaccttttactcactggaggcatggaaaagactttgcgtgtgtatgatattaatcgtcctgatgcagctccaagagagcttgacaaatcacctggttctgtccgaactgctgcctggcttcatagtgaccaaactatattgagttcctgcactgacatgggtggagtaaggctatgggatgtgagaacaggtaaaattgtccaaactcttgaaaccaaggcttctattactagtgcagaagtaagccaggatggcaggttcatcactacagcagatggctcaagtgtaaaattttgggacgcgaatcacttcggccttgtgaaaagctatgatatgccgtgcaatgtggagtcagcttcacttgaacccaagtctgggagtaaatttgtagctggaggagaagatttgtgggttcatgtattcgatttcttcactggtgaagaaatagcttgtaacaaagggcatcatggaccggtccactgtgtccggtttgcacctggtggtgaatcatacgcatcgggttcagaagatggcaccattaggatctggcagcttagcccagttaatgctgatgacgacgaggcggccaatgcaaatggcaaggcaaatgctgcagtgaacgaggttacaaccaagctcgagggcggcttccacattcccaaggagggacaggctggggggtaggacctcatgtgctttgttgtggtgcttgtggttcttattgcgaggagattgcccatagggctgccacggtcattcagtttctccctgcagagccatcaacacctgtttgcgatccaagggtatcatggcttcaagagtcatcaccctggtaactggggaaaaaccatacccctcgtaagcatggtggtgggtttttggatggggccttcgctttgatagaacatagcaactgtagtgtcaaaaataaacaagagaatacaacttgggtaggtatcgtgtcttcggtcattaaagtgaagtattctgtatcgccgccagtaatttttgtggcttttgatgttggaacgccgattttcaaatcaaagctgacgaccacttcttgatcatgaggcaatatagatagcgtcatgcccatatcaaatgacagatttctctgctcactggacatgcttttttggtggcatccgcggacacgatacgtgaaatttagttttatgttattgtacacctacccgaa

SEQ ID NO: 14220 - DNA, 816 bp, Zea Mays
gtcagatttgagctggtttcatttgcccccctcctatttgttcatgggtggattctgctgtctccgagactcggaggctgtcgagacgctggcccccaacataagtacaggagaatctgacccagcggcagctgttcctgcggagagcccccatggcatcgaggttggtgttgagttcaagccagtggagcgccccgtggaacctatcaatcttgatgagccagtgaaatgcccgcttcctgagccgtctatactgcacgacgggaggatatggaaggagaaaatgtcttcagtcagcacgagggtgagaacagacttgccggtcgtgaaggaagggtcgcagctggagcctgacggtagcagcgctaggtcacgatctgcagttccaaggcgcgccatactgccctccgtaagcgcgcccgagcacaacatcctagcgctgcttgacgagtgcgacgtctccgggagccgtggctctgctgaatgagctcgagttgggcgtcgccagcacattgtaactaaactgcgtttgccacgagctgatctgagcacagcaaaccttacagtatgtctgaaaagaattggaactacgcaacagatcttttgtctggattgtatctataaatacgagtgaaagcgttttggggaaattgtctcgcacttgtcggaggcagttatggttactgaaactgaaacacttggttttgtgttgtaacttttgcactgttgagtgcgagcatgcagctctgaatgtgacgccaagttgtcaagtgcaaaatgaactggaaaatttgttacgggtaggcagtggttgct

SEQ ID NO: 14221 - DNA, 501 bp, Zea Mays
ctgggctctggcacacagctactccgcctcctcgcccttttctcctcatccctcgctttcgcttcgccgttccaacgcggagcccccacggaaaataaaggccaagaagtgatggtagtggagtaaaaccacgcgttggagggcagagggacaggttggtggaggacgcgcacccagcgtggagagcagcaggagctacgcgaattcgggccgcgagtgcgccggttcaggttgccgccgccggtggaattgtggcagacgaggtggcctgttggtagccgcgggagtttgcgagtaggtcggttccggttggtgtgcgagcgaaggtgctgttggaggcgtggatctggccggcggcgggcgatgggaaggagggactagggctcgattggagggaaaggcgcgatcttggaggttcccatgggcggatgcctctcgcaggaggagcaccggctccagagcaggccagagttgcattcaaggcatactttaggggaagaa

SEQ ID NO: 14222 - DNA, 2154 bp, Zea Mays
ggctcgccgtctcagttctcatgtccgggtgaagaaaagaaaaatcctcctgttcctgactatcgctacccctccacatccagtggccatggtgaagaagcccaacgacgttgccaaggccgcggcgacctccgccgacgcggcagccaggccatccaaggcgaatccgtccacccctcagtcggtcaagacctcgaagtttaagaagcggaaggtcaaggccaaccgccagaagccagcggtcgctgctgcagctgttgacgatgtcgccccggtaggcgcaggcactggggatggcgatgcatctgcatccgcggttttaccgcagccatccaatgttgctgaggcatcgcctgtggtgcaaacgccaaagtcgaccacttttgttgaggcgtcacctgtggtacagacgcagaagacagccactgatgctgaagtaccggtgcattcaccaatgccagccactgctgaagcatcagctttgtcgccaaagccaaagccaaaaccagctcatgctaatgctgatgctgcagctgcaatttctgtcagcaagggcaagggcgtgggtgctgataatagcgggggtgatggcagaatgaagagcagaaaagagagggctaggagtggcaagaaggaagaaaggggtgaccataaggttgcagggtttatatttatgtgcaatgcaaagactaagaaggagtgctaccagaatcgcttgtttgggatgcctggtgggaagattggaatggtcaagaagataaggccaggggtgaagctgttcctgtatgattttgacctcaagcttttgtatggtgtgtacaaggcagcatcacatggggggctaaaccttgtccaaggagcatttagtgggaagttccctgcacaggttaagtttaagattgataaagattgccgtcctctccctgagagtagtctcaagcaagccatcaaggaaaattacagtgcaaagagcaaatttgacccagaactcaccacaaaacaggtccaaaggttacttttgctgtttaagcctcttagtgcacctcaatctgttccaaataatcactttgaagaaaggcgtcactatgaagaacaaaggaagccgtattatcattttgaagaaaggcttcctctgttgcctattgaagaagtgcgtcagccacggtttgatgatgaaaggcgccctgcagttagacatgttcctcttgaggatccatatagggcacaagcaccacgctttgctccagttcctgttgagtctcagcttggccattcgttggctagtgctcagggtgatcatggcagatattatcaaccaccagcacttgcgcctgagcctcgacacattcctcttgttctagagcctcgctatgttccgccagcccatgtgcctactgtgccagagcttcaacatgtcccagctgcatattatcgcacttcggctccatctggtgattcatactatcggcctgttgataatctggtgcctgaggggtatgcagacagaattgtggcaaacataaccgctagagatccaatcattagtgatcacacagcactgccagtggaagcctctgctcgaccagaccgcttggatgatctctaccggattcgtggtgctcatgtggaggagctgtaccgtccacgggaaattgctgatcgtgcggggatcactgctagagcagatcgtgtggaggaactctaccgttatgatcgacttgctaaccgtgctgtggacccccctcattcagcctaccttacaactgcttacgagaataaccctgcttatgctgaaacaagcgttaggcctatctcagcaagggttggtggctccggtgcgccagtttcgtcactctattcgttttctggtggtccagtatatcggtgatgagtgatcatggctagctctgttgaaaagccttagccagactaagaagacatgatgttcgtctctataactgcaactgccgttttaccttggcttcgactctgtattttcttaaatatccttcactggatgaatggtactcttcgttatcaagaagacctgctggtctatgctgttgaattatgtatttatgctgctgcatctctcttgctatgcttgaagctcgtttcattttgtgaatggaggtttacatattgccatgcttc

SEQ ID NO: 14223 - DNA, 74 bp, Zea Mays
gtgagtgccgtcgggaagggaatcgcgggggcaatggagttgattgcgggggcggccgcggcgacgccatggat

SEQ ID NO: 14224 - DNA, 133 bp, Zea Mays
ttcgtctgagtcaattaaggaccgtgtcgatgtaggcttgctgattgagaaccctttaactggccacatgcctcgtcatgtgtaagctttgcctcggtcggaccaataccagaaaggccaacacgcaatggga

SEQ ID NO: 14225 - DNA, 1457 bp, Zea Mays
tgacaattaccaagaggtacaagtaaaccactttgaagattttttttcacctgagcttgacagacatggatatcaggcgctttacaagaaaaggacaacagaggtgtattctggaaatcctatggccatagatggctgtgctacttttttccgcagagacaagttttcgcatgttaaaaaatacgaggttgagttcaataaggctgcacagtccttaacagatgcgattattccttctgctcagaaaagactggctttaaatcgtttgattaaagacaacattgcactaattgcggttttagaagccaaatttgctaatcatggagctgaaaatcctggtaaaagacagctactttgtgtggcaaatacacatataaatgttcatcaagacctaaaagatgtgaagctatgggaggttcataccctcttaaaaggattggagaagatagctgtcagcgcagacattcctatgttggtctgtggagatttcaactcgccccctgggagttctccacatgcgcttcttgcaatgggcaaagttgatcagcatcatccagatctggcaatagacccccttggaattttacgccctccaagcaagttgaatcatcagcttcctctggtcagtgcatactctgcatttgcaagaatggtaggtgttggctatgatttggagcatcagcggagaaggacagaccctgcaacaaatgaaccactcttcacaaattgcacaagagattttactggaactgttgattacatattttacacagcggactccttgacagtggattcattattggaacttttggatgaggaaagtttaagaaaagacacagctcttccatctcctggatggtcatcagatcacatagcactgttagccgagttccggtgcaagcctagaatcagaagttgacacattaggtcttgtagaaaaaggttattgtcatcatccttggtggtggaacagcgttccatgtgggtatgacgggacgcgggctctcggggaagcaagcagcctaggtagcagcctcagcaaggggaaggggcatgtaacatttgattttacccttttacattttagctcatgatactcaagctgcccatgtgtaccattacttcctatagaagaaaatacttgagagaaattttgaaggctagtttggaaactctattttttccaaggtatttctatttttcaaggggaaatgaaatattttttcgtggaaaaatagaaatctctagaaaaaatgaggttcctaaactagcccttaaagggctataagccccttttttttctttcactctggtcgcgttggatttaacctctttgctgtatccatatgctcgctgcctacaagatgtaggagccttcagtttctctaccaatgtaattccagttccagtttttgttctccatgttgctggttgctctcattgccgttagatgtctg

SEQ ID NO: 14226 - DNA, 283 bp, Zea Mays
actagccagcacgtgtacataaacacaagcatgacattgcagtggagcttggcagcagggaaagactcatagcattctgtgaagtagtgcaacaaacttgtccagtaggatctttcatcaaaccaactgctggggaaacgcctggctatgcttcagaggtcattttcgccgacgggacattcatagatggaagcacaagcgaactgtcatgtgatgggcccttgagagatccatatgccgtcttttgccaggcgataatctgagtgtcgtactgcaaacgtga

SEQ ID NO: 14227 - DNA, 1529 bp, Zea Mays
cgaagctcgcggggggcgtacgcgcccagccaagctcagtgcatgcagtggcacgtatacgaggctgggataaatgccatcagagatggggccacaagatacacgcctaatgctggaactctggagctgaggaaggctatctgcaaaaagcttgaggaggagaatggtctatcatactccgccgatcaggtgctagtaagcaatggagccaagcagtgcattacacaagcagtactcgctgtctgctcacctggcgatgaagttttgatacctgcaccatattgggtcagctaccctgagatggctagactggctggtgcaacgccagttattctccctacaagcatatcagacaattacctgctaaggccagagtcacttgcctcagtgatcaatgaaaattcaaggatcttgattctctgctctccatctaatccaacagggtctgtgtatcctaaggagttgcttgaggagattgctgctatagtcagaaagcaccctagactcctagttttatccgatgagatctatgagcatattatctatcaacctgctaaacacacaagctttgcttcattgcctggaatgtgggaaagaacgttaactgtgaatggattttctaaggcttttgctatgactggttggagacttggatacttagctgcccctaaacattttgtcgcggcctgtggaaagatccaaagccagtatacctctggagccagtagtatatcacagaaggcagggcttgcagctttgaacctaggttatgctggtggtgaagcagtatcaaccatggtgaaagcattccaggagcgtcgtgattaccttgtaagaagctttagggagctgccaggtgtcaagatatcggaacctcagggagccttctatttattcatcgacttcagctcgtactatgggtctgaggtggaaggttttggtaccatcaaggactctgagtccctctgtctgttcctgttggagaaggcacaggttgcgcttgtccctggggatgcatttggcgatgacaagggtgttcgcatttcatatgctgcagctatgtcgacactgcaaactgcaatgggaaagataaaagaagcgatggctctgctcaggccccctgttgccgtttaacaaaaccaacgtatcgctaatcagttgtggaccaaaggcttctgcaatgcactatcatattaaatacattcagttgacatgatctatcttcttccctttatggaaaaaaatgttgctgctgtcatttggctttggtttgtatctgaagatttatatgtacttgctataatatagatgaactgtgcaacgctttttttacctgcaagaatagaaatggtaaacatgactttattttgacaatttgagtcgtgaatgtttcatattatttgtggagttttttacttgtttgaagcgataaggaatttctcatgtagaagtgcgtccatttatgtagttcatatatcttattatggagaatacaagaaagaaaccatgaacataatctatgaaataaa

SEQ ID NO: 14228 - DNA, 1558 bp, Zea Mays
atcacgaagaagaacacgagagcagaacctcgactttgggctgggcagacggcataccgcagagcgacgagaacctgggctccatctcgctgggcgtgctctacacgtccttcacggcgttctcggcggcgggctccgcggtggtgcggtggatgggatccaggcgcgcgctcgtggccggcacctccggctacctcctctttatcgcagcgaacctcctaccgtcctggtacacaatggtcccagcttcactctaccttggttttactgcatcgatcatttgggttgggcagggtacataccttacatcagctgccctcagtcacgcaagagaaaataatttgcccgagggtccaactttagggagcttcaatggggagttttggggaatgtttgctagcacacaggtgattggaaatttgatctcgcttgctctgctgagaaatggaaaggatggtggaagtatcacagggaaaaatcttctgtttgctgtgtttcttggttgtatgattgtgggcattgtattaatgtgtttactttcgaaaagagatgagaaaaaagataatactccaacgcattcctcatttggagctatgttgaagtacatcattgcgccacttaaggacaaaagaatgcttctcaccattcctcttatagcatattcaggtttacaacaggcatttgtatgggcggtattcacaaagagtattgtaacacccgttcttggcatcagcggcgttggtggagccatggcaatttatggtgcagcagatgtagtttgttctttggttgctggacgattgacctccggacttcgctcagcagcatttatagtgtcggttggagctattcttcaggccatagtcctgttctggctgcttcttttttacagtccaatggatggactgcttggcgcagcgataccattattcataggtgccttgtggggtgttggtgacggtgtcttgaatacacagttaagtgcattacttgggcttctgttcgaagatgtcaaggaggctgcctttgcacagctgaaggtgtggcagtcgggcgccatcgcagtcatcttcttcctgagcccaagcatcacgctgcaagccatgcttctcctgatggccgcggctctcgtcatctcctttggctcattcctgttccttacccttgttgttgagaagtcatcgcccgtcagagcctgaagtgcgaaaccatttcccgatgtccagaccggcgccagcgtgacttggtcagtgttaccagtggcctgggcagcgccatcgttgtatcccaatttcaccggaaacgcagcatccgtcgagtgcgatttgtggcacagtggtaccatttcaggcagccagtatctgaaccgaagctgtagcagctagcagttcgtgcaacggggaaaccgtcaatttgggcacgcttcttgctttgccagtagtggtcctttctccttttgcaatgtctgcactgcagcaatgttgttggaaaaaaaggatgttgtaagaaatgttgtttcatttgtaccacgtcctatcagagtggtcttttttttttt

SEQ ID NO: 14229 - DNA, 319 bp, Zea Mays
cagaagcgcggcgccggccggtgcgcgcggtgatcacggcggctagtcagctgcggtgcttcgacagatcggcggcaaagcgaccggagcggagcgggggagagagtggatgacagatagagcagtgagcacgcgtccgcgacggcaccatccgccggtgccgttccgcccggccgtgtgctcactctcttctgtcaccgcccgccgcggccggcgcatccgcgcgcccgacagccagcccgcgcgcgtacgtctgtggcctgcaccgccgccgcgatcaccgcatgcagctacaggcgatgtggatggcgagagctac

SEQ ID NO: 14230 - DNA, 116 bp, Zea Mays
tgatgaccgaggaccctttaaccggtcacatgcctcgtcatgggtgcttgcctcgggcagactaaggccagaataagataacacgtaatggacgtggagcggtggcgagagtagcg

SEQ ID NO: 14231 - DNA, 1429 bp, Zea Mays
gctaacgtggcagacctcaaagcatcactcacacaccatcgtcctctccttttgccagcaccgcgaacccgccaccagccttctcccacccacgaagtacggaaggctgccggaaggagctctcacctcacatccatctctgtcgcgcccgtcatcctcctcctcctcccctcctcaactgctatcggatttgcgctgcagtggagatcgacccgggctgggaatttctttcgttggtaaggaaccctaatttggtcggatgggattttcatcttcgacgaagcccgcgagattgatcgaccttagctgacgcgagggattggaaagcgaacgctcgggcgtagttaattttctaggaagattggggtttcagctcaaacccccatgctcgatgctgaggacgaccctggcgggagatgacgaggatcttcgtgcagcgcgggaccgccggctcctcgtccagctccggccgctcgggctcgcaatcagcgcagcagccggcagcagctgcccgggaggagttgccgttgcaacctcagccacagctaccagaactattggctatagatgatgtaactgagcatttaaatgagggcaacgagaacaacagtagcagaattaagtttttgaggacggatgacaccatttcagagagctcgagctacgcagaggagagggctgccagggagaagcctcctaaggatgactctaatgtaatcaaccccacttccttggtagaggaaccgatagtgctccatacccctgatcagattgaacatggaaattctgtgccgtcaggaactaattcatcacagatggtgggtgcagcatcgcacccgccgccaccgccagctccgcctccaaaatcattgttggggaatagtgggttgtggagaatgggacctggaagttccaacagtgtgcggattggatctccaagaagaccagtagcttggccaccagtggcagctcggacatctgcttcaggttctcgtccttcttcgcctaggtcactcgttgatggtgaaggttacaatagtgctgatgaacagggtccctgttacgcctcgagttatgatgattcggaaagagagcgtatgtttgagcatgacctaaggcgagtgaaagggttggaaatcagaaagacggccgaagatgggaactgtctattcagagctgttgctgatcaagtttatggagatgcagaagcttatgacatggctaggcagatgtgtgttgattatatggaaagggaacgggatcatttctctcagtttataactgaaagttttacattatactgcaagaggaaaaggagagacaaggtttatggcaacaatgttgagatccaagcatttgcagagatgtacaatcgtcccattcacatatattcctacagtacagctctttacatgtttgctgttatcac

SEQ ID NO: 14232 - DNA, 2799 bp, Zea Mays
aattgatccttttgaagattctgatcccagattaattcacgactagagttgtgaactctataggttttcttgtgtaaatttaacactaatttggctgctctttgggtctgggggcacaaatttgaaatattgggagtgctggtgtgatatagaggtctaggaggagatatgaggtactacttgcgtcaggtccagcgtttggttggagatatggaaggaggagctctcttgtttatagacgacctcaactccaagtgacaaagcgaacagctgttgaacgtttcccttctatttctgtttctttttgccggatttggagatggaggtgaattcctctggcgaggaaactgtggtaaaggtaagaaagccgtacacaataacgaagcagcgggagcggtggacagaggctgaacacaaacggttccttgaagccttgaaactttatggcagagcatggcagcgcatagaagagcatgttgggacaaagacagccgtgcagatcagaagtcacgctcaaaagttcttcactaagttggaaaaggaagctatgaacaatggtacttctccggggcaagcccatgacattgacatacctccaccacggcctaaaagaaagccaaacagtccatatcctcgaaaaagttgtctcagctccgagacacaaaccaaagaacttccaaatgacaagtcaacaaaaccaaatatgcccttgagcaatgggcatgtaaaaatgaattttcaaaggaaggagttgtctgaaaaaggaagtcgctcggaagttcttaatctcttccgtgatgccccatctgcatcattttcttcagttaacaaaagctcttcaaatcatggggcacccaggaggaccgaggcaagtaaaacagaaagccgagatatgtccatcatggaaaataattcttttaaccccaacacccaagaggatgtaaaggtgatcagtgatcaggaaatggaaaggcttaatggtatccagatcagatctaaatgtgaacattctcatgaggggtatttggacatctcaacgcaacaaatgaagctaatgccaaagtctgtggagacaacatatgtggatgaacaaactgcaagagcttcacacaccctagcagagagcgacgggacagctagcattccagtgactgtacctgaaggaactcatcctgatcaaacaagtgatcaagtgggaatcaatggaagcatgaacccatgcatccatccaatggtttctgctgacccaaaatttggtagtagtgccacaccacagactttccctcataattatgcggcctttgctccaatgatgcagtgcaactgtaaccaagatacgtacaggtcattcaccaacatgtcatccaccttctccagcatgcttgtttccacgttgttgtcaaaccctgccatccatgcagccgccaggctcgcagcatcatactggccagcagctgaaggtaacactcctattgatccgaatcaagaaaaccctgcagatggcgtccaaggaaggaacataggctctcctccaagcatggtttctattgtagcagctacagttgctgcagcatctgcatggtgggcaacacaaggtcttctccctttcttcgctccacccgtggcttttccatttgtaccagctcctagtgctgcctttcccacagttgatgttccacgaccttcagagaaagacagagattgcccagctgaaaatgcacagattgaatgccaagaagctcgaaaacaggtacagttcgaaggtttaagaattgctgcttcttcagagtctgatgggagtggaaaaggcgaggtgtctctccatacggagttaaagctatctcctgcccagaatgctgatgccacacctaccacaggagctggcacaaatgatgcattcaggaataagaaaaagcaggatcgctcttcatgcggttctaacacaccttcaagtagtgatgtagatgcgggcaatgttcctgaggaggacaatgctaatgagaaggcgaagcaagcctcctgcagcaactcttcagctggtgacactaaccaccgcagatttagaagcaatggaagcacaagtgattcatggaaggaagtttccgaagagggtcgtctggctttcgatgcgctgttcagtagggaaaagcttccgcaaagcttttctcccccacaagcagtagactcgaaggaggttgccaaggaggaggaagatgaagtgaccacagtggcagttgacctcaacaagaatgccacaagcattgatcatgatgacctcgacacaatggatgagcccagggcttcctttcccaatgaattgtcgcacctgaagctgaaatcgcgccgtacaggcttcaaaccatacaagagatgttctgtggaagcgaaggaaaaccgggtgccggctagcgacatggttggtaccaagaggattcgtcttgatagcgaagcatccacataattgatttcttcaaagttatatttacatctaagctactataggacttcagatcttgcaatgcagtgcttcattaaaactcaatctgttgtgtgctgtattttaatgcttgtcaagcagcccgctagactgctttaaaaccttatctcgtagagtctgatttaagcatcatgcaactatcaaacttttttttttggtcaaaatgtattttccttatgttttatatttttggaaaggaaaataattgaaatattatttattttgaaggctcatgcaaaggtttatttgatcaaggtgtaggataggctgagcgagagggtgaacattatgactaatatagg

SEQ ID NO: 14233 - DNA, 1723 bp, Zea Mays
gctcgcggagccggtagcaccccagacgcggccaaccgctagctaggccggtgccgccatggctgcgtcctcctgctgccaggcccgctggctgctccccctgctgctgcttgctgctgccgcgggtgctcttggtgcagagggcgcctcctccattgtgcagctggacgtggagtccctgctcccgtccgcagccgctccttgccccacccctcaagcagagcaaaaacaaggtgccgcgccgcccacaaggatgcccgtcgtgcaccagcacggcccgtgctcgccgctggccgacaacaggaacgggaaggcgccgtcccacgcggagatcctcgccgcggaccagcgccgcgccgagtacatccaccgccgcgtggccgagaccaccgggcgggcgagacgacggaagcagggcgcaccggtcgagctccggcccggcacgccgccgtcgtcgatcgtcgtcccctcgtcgtcctccgccacgtcgacgacggacctgccggcgtcgtacggggtcgcgctgggcacgggaaactacgtggtgcccgtccgcctcggcacgccggcggagcggttcacggtggtgttcgacaccggcagcgacacgacgtgggtgcagtgccagccgtgcgtggcctactgctaccggcagaaggagcctctcttcgaccccaccaagtccgccacctacgccaacatctcctgctcctcgtcctactgctccgacctctacgtcagcggctgctccggcggccactgcctgtacggcatccagtacggcgacggctcctacaccatcggcttctacgcccaagacaccctcaccctggcctacgacaccatcaagaatttccggttcgggtgcggcgagaagaaccgtgggctgttcgggagggcggcggggctgctgggcctcggccgcggcaagacgtcgctgccggtgcaggcgtacgacaagtacggcggcgtgttcgcgtactgcctcccggcgacgtcggccgggacggggttcctggacctggggccgggcgcgccggcggcgaacgcgcgcctgacgccgatgctggtggacaggggcccgacgttctactacgtggggatgacgggcatcaaggtgggcgggcacgtgctgcccatcccgggctccgtcttctccaccgccggcacgctggtggactccggcacggtgatcacgcggctcccgccgtcggcgtacgcgccgctgcggtcggcgttctccaaggcgatgcagggcctggggtacagcgcggccccggcgttctcgatcctcgacacctgctacgacctgacggggcacaagggggggagcatcgcgctgcccgcggtgtcgctggtgttccagggcggcgcgtgcctggacgtggacgcgtcggggatcctgtacgtggcggacgtgtcgcaggcgtgcctggcgttcgcgcccaacgctgacgacaccgacgtggccatcgtcgggaacacgcagcagaagacgcacggcgtactgtacgacattggcaagaagatcgtcgggttcgccccgggagcttgctgatccggccatggtttgtgaaaaactccagatcatctgcatccaccaaagtggtcagtgtttcacaaatgcagactgaagattcgtacttcgtgtctgtaagatggtacactttgtttgaaaaagaagaacgggataagtttaaaccacctcttcaataaaaaaata

SEQ ID NO: 14234 - DNA, 4678 bp, Zea Mays
cgccagcccgagccacgatatttgcgctgcgcctcgcctccgcgaagcaacgcggacgccgtgccttgcatttccctttcacaaaaccaaaatccaaaacaaagaggagagcgtcctcctatcctccccttcccctcccccgcggccatctcaccccgatggcctcggcccccttcccgccagtcgcggcgtcggcggcctccgcgccgccgcgcctggccccgcgccaccccttcgctgctgccgcagccgcgcgccgctcctcgctctcgttccgccccgccgcgcgccggcccgttctcccgctccgctcctccgcggtcgcggctaacaccctccgctgcacgcaccgccgcgccgtctcatccaggtcgaggagacgcgcgcaagaactcggcgcggcgcccgcgttggctgcgtcgacctggggcgtcggcgaggagaagggcggttgcctctcgtgcttccccaagagtaggcggggcaggtcggggctcgcgaggttcgcgccgtgcgcgctcccgcacgcgtcgggactatcgtttcgcagccggttgagcgggtccaaggtcaagcctagccatatattgcacgccgctggacctgatgaaccacatgttgcaagtccaacatggtctgatacttcccttgatacacgtgacatggatcatgctattagtaaggaggagcttgaagatgttctcaacactccgcttcctgagcatccgaagctaattcgtggtcaattgaagaatggacttcggtatcttatcttaccaaataaagttccagcaaacaggtttgaggctcacatggaagttcatgttggatcaattgatgaggaggaggatgagcaaggaattgcccatatgattgaacatgtcgcgtttcttggcagtaaaaaacgtgaaaaacttttggggacaggtgcgaggtctaatgcgtatacagacttccaccatacggtgttccatatccactctccaactaaaacaaaggaatatggtgaagacttactcccttctgtgctggatgcattgaatgagatagcttttcatccaaagttttcttcatctcgtgttgagaaggagagaagagcaattctttctgagctccagatgatgaacacgatagagtatcgtgttgattgccagttgttgcaacatctgcactcagaaaacaaactgagcaacagatttcctattggacttgaagagcaaatacagaaatgggatccggagaagatccgtagatttcacgaacgttggtactaccctgctaatgccactttatatctggtgggggaaattgatgatattcctagagctgtgcgggaaatagaggctgtatttgaacacactctttcagaaaatgaaggaaaccctgtaccgagcactagtccatttggtgctatggcaagcctttttgcaccaaaactcccaagtggctttactacaaacctaactggtgaaaaatcacctgccacagataaaataaagcctgtaaaaagggaaagacaagcagttagaccacctgtagagcataagtggtcccttcctgaagttgctcaggacgccaaacccccagcaatttttcagcatgagttgattcagagtttctctatcaacatgttctgtaagatacctgttagcaaagttcagacctacaaggacctgcgtagtgtactcatgaaaaggatatttttgtctgccctacattttcgaatcaatacaagatacaagagctcaaatcctccttttacttcagttgagctggaccacagtgactctggaagggaagggtgcactgtcactactcttactgtaacggctgaaccccaaaattggagaagtgccatcaaagttgctgttcatgaggtgcgaaggctgaaagaatttggtgttacaatgggagaaatgacccgttacatggatgcactgataaaagatagtgaacagcttgctatgatgattgacagtgttccctcagttgacaacttggacttcatcatggagagtgatgcacttggccacactgtcatggatcagttgcagggacatgaaagtttgcttgcagtagctgaaactgtcacccttgaagaggtcaatactgttggtgcggaagtattggaattcatttcagattttggaaaacccaatgctccccttcctgctgctattgtggcatgtgtacccaaaaaggtacatgttgatgacataggtgaaactgaatttgagatatatccagaagaaatcactgaggctatcaaggcaggtcttgaggaacctatttacccagagcctgagcttgaggtgccaaaggaattgatcactcaatcaaagctcgatgaactgaaattgcaacacaatccatcatttgttcctttaaccaaagaggagaatgcggtgaaagtgtttgacagtgaaactggtatatcacaacgccgtctttctaacggaatttccatcaactacaagattacacaaaatgaagctagggttggtgtcatgcggctcatagtagggggagggagagcgacagaagattctgaatcaaagggatctgtcattgttggtgttcgttccctgagtgaaggtggctgtgttggtaacttttctagggaacaggttgaacttttctgcgtcaataaccttatcaactgctcactggaatcaaatgaggaattcatatttatggaatttagatttgctttaagagacaatggcatgcgtgctgctttccaactccttcatatggtccttgagcataatgtatggctagaagatgcatttgatagagcaatccagttatatttgtcttactatcgctctatccccaaaagtttggaacgttctacagctcataagcttatgttagccatgctaaaccatgatgaaaggtttgtagagccatcgccacattcactgcagaagttgactcttcagtcagttaaagatgctgtcatgaaccagtttgtgggtagcaacatggaggtcagcattgttggtgatttcactgaagaagaagtagaatcttgtgttcttgattatcttgggactgtgagggcttcaagttctccaaccatagaggagcgtattgaaaagatttcctttcgaccatttccatcagatgttcatttccagcaagtatacataaaggacacagacgagagagcctgtgcatatattgcaggccctgctcctaaccgttgggggttcgctactgaaggaaatgacctatttaatgtcattcagagatctgacgctgatgcagaaatatctgaaccagtaagcttggatctaacagggaagagacacatcaatgttcgcagccaccctcttttctttggcatcactttgagtctgcttgctgaaattatcaattctaggctatttacaacagttcgagattccatgggattaacatatgatgtttcttttgaattgaacctttttgacaaattggatcttggttggtatgtgatcgcagtcacttcaactccaagcaaggtccataaagctgttgatgcctgcaaaggtgttctgagaggattgcatagtagccgaattgtggaaagggagctcgatcgggcaaagaggacactgttgatgaaacatgaagctgagacgaagacaaacgcctactggcttggtttgcttgcccatctacaatcttcatctgtaccaagaaaggatgtatcatgcatcaaggaattgacgacattatatgaaaatgcaacgattgaggatctgtatattgcatatgagcacctgaaagttgacgattcttctttgtttgcttgcattgggattgctggcgctgaatctggtgaagatacaaacgatgacgagcctgatgtggatcttcatggcatgggtcccatgggaggccggggtctttcaacaatgaccagaccaaccacatgatcaccattgggatggccaacccttccaagggattaaccttgctccccaagacagggagtcacatggccctaggagactgcatgttgactgtcgtttcccagcaaaactgtttaaagataattcaagcatttgatctggatctggaagactattatatcctgagccacaaccaaaagcttggtggctgcattttttccccgaggagcgttgagttaatgactcagcaaggtcgtgaaaaagaatttattgtttgaggtcatgtagcttcacatgtacagtaaaagcaggttggttcttgcatacagttgttgtaactagtgcgttcagggcattgaagataggatgacagtagatcacagacgttgctgggctgcgaatagcgtaaggcatctgctgtaactgtaacgaaataatgaagcgcagtgtcaggaccctggatagatggcaagtgggtggcatgtgtgcctataaaaagggagaacgtatagaccaagggatatgaaagaaccatttgaacaaactaaatcctctctacctttccattactgttatctcttcataatctctcctctcatgtatcctgtttctctaccttctagaacaatttggctatcagatatcaaattagatcgtcttcctcgctgctatctccttcttcaacccttcttctacctgaacatctctcttctctccgatattcccttctgtggcgctaacacgcaggcatgtaacatttttgtgttattcttttg

SEQ ID NO: 14235 - DNA, 1565 bp, Zea Mays
gaccttgcaaacttggtaaatgaagctgctttgttggctgggcgattaaataaagaaattgtggaaaagattgacttcatccatgcggttgagcgatctatagctgggatagagaaaaagcatgcaaaattgaagggtaatgaaaaggctgtcgttgcacggcatgaagtaggtcatgcactcgtgggaactgctgtagcgaaccttcttcctggacagccacgtgttgaggtttgaacttaagcaattactgatagaacaatctgagagaagatgtaatttgacttactttttcaatgctgaatttaacagaaattgagtatattgccaaggtcaggaggtgcattaggctttacatacacccctcccaccacagaggatagatatttactctttgttgatgaactacgtggccgtttagtaacacttctgggtgggagggcagcagaggaagttgttttagcaggacgggtttccactggtgcacttgatgacataagacgtgctactgacatggcctacaaagctgtagcagaatacggtcttaatcagcgcatcgggccaatatcacttgctacactgtcaaatggtgggttagatgactctggtggttctccatggggaagagatcagggccatctagttgatctcgttcagagggaagtaaaagcgcttttacagacggcactggaagtagctctttcagttattcgtgctaatcctgcagttttggaaggcctcggagcatatttagaagagaatgaaaaggttgaaggcgaggaacttgaagagtggctaaagtcagttgttgcatcaaaagagttgacctcttttatcagaggacagcaagagcaagttcttcagctggaagcaggctcctagcgtcaggactcttaaaattaattacttacagaagtcttccagcaattagaacatacaatgcgagttccaaggtatgcaatggaaaccttgatactggggacagatctgtggccatgtggtggattgtatgacctctcccacccactcatgctaagacaaacttgggttgggcgcccacccttcgttcgttgaatcatgagctcgagccttagaggagaattttcagaaaaggaaatctacatgcccgagtgaccatgtaaatatttaccattgcagttcgcggacccatgagtaccaaaaaaaagagatgattcatattgacctgtaacattgtaagatcaacctcaggaatatttgaagcggttagttttcacatgttcatagatcgggtcggtgttacacatgtaaaagattctttttttgccctaggttcttgtcctcaccctgttagaagttattttcctctttacaatatgatcctagagatgatcaataggataattaatgcttatacggactatggttcctgtattgatatactctttccaatatacttcgggcttcaaatccatcattagttgacattaccgttaagcgttatggaaggttttctgccacttgcgcatggaccatcgagaattgttcttcagaatggtgattgctttttcgaaagaatagaaatg

SEQ ID NO: 14236 - DNA, 76 bp, Zea Mays
taggacggcaagggatcctgcgctgttttcgctacgcgtacactgctttagagcaaatccaaaagatgctaaaacg

SEQ ID NO: 14237 - DNA, 1736 bp, Zea Mays
gttggtaccgagtatttcttggccacaaacagtacttcgtctcttcggatgtcggtgctggtaaaatgcaatggtacgcttttcacaatgaagaggctggtggcactgaccctgaaaatgaagcagttcttcgccgagatatatacgaccgcccacctactatgaattgggggaaaggtcgtgtcaccttgcttggtgattctgtccatgctatgcagccaaatctgggccaaggtggctgcatggctattgaggatggttaccagctggctgtagagctagagaatgcctggcaagagagtgtcaaaactgaaactcctatagacatagtttcctccttgaggcgctacgagaaagagagaaggctgcgtgttgctattatacatggactggcaagaatggcagcaatcatggctaccacctatagaccgtacttgggtgttggtctagggcctttatcgtttttgaccaagttgcggataccacaccctggaagagtcggtggcagattcttcatcaagtatggaatgcctacgatgttgagctgggtgcttggtggcaacagctcaaaactagaaggaagacttttaagctgccgactttctgacaaggcaaatgaccagctttatcaatggtttgaggatgatgacgcactggaagaagctatgggtggagaatggtacctcatcgcaacaagtgaaggaaactgcaatagcttgcagcccattcatttaattagggatgagcagaggtcactctttgttggaagccggtcagatcctaatgattcagcttcttccctatcattgtcctctccacagatatcagaaagacatgctactatcacatgcaagaataaagctttctatctgactgatctcggaagcgaacatggtacctggattaccgacaatgaaggtagacgttaccgcgtgccaccaaacttcccagttcgtttccatccctccgatgtcattgagtttggttccgataagaaggctatgttccgggtgaaggtgctgaacacgctcccgtatgaatctgcaagaagtgggaatcggcagcaacagcaagtccttcaggcagcatgaatggagacactggctaccaccactatcatcagccacactgtactgtacagcatccggtaaagacacaacactgcatcacggaaaggatacactcgttctcgaatatttgtcgtctgctagttcaattttaaactaaaacgtgacaaatgaaaaaacgaaggaagtagaagatatgtcaaaacacatgcaatttttgcatccatgaagatgccaaacaggatcttgaatactagcacctagcggattgaaataatgaagttgcagttctgcgtgaactggattgtacgatagggatagacaatttagctgttgtcggactgtgtacatcgttgtaccatcaccggaaatattgtacaccgagaagccatattgtaattacggcatgagaacagtaacactttgatcatgtaatacagtatatagttgtttagcaattagctgagtcagataagatatgatttgttcttccacaagtgccagctcctcgaactgttgaaatttccttaaaatttctgcaggaattgaaaaacttgttcctataaaattatttcatgatccaattaaaaattttactatattatgttggatttaattgggcctagcccattttgaattagtaattaaataaaaaaaataaaaccatag

SEQ ID NO: 14238 - DNA, 1309 bp, Zea Mays
taggcatatgcataggtggcaattaggcactaattgggaggctgaccgctgacgaccagcgcttagtcagtatatgggggagcttggattgaacttcgaagtataccgcaatgatgaactgaccatagaagatgtaaagaggaagaacccaagaggaatacttatttctccagggcctggtgaaccacaagattcagggatatcattgcagactgttcttgaattaggcccaaccatcccaattttcggagtttgcatgggcctgcagtgcattggggaggcatttggaggaaagattatccgtgctccttctggagtgatgcatgggaaaagctctccagtttattacgacgaggaattaggaaaggcattattcaatggcttgccaaacccttttacagcggcgaggtaccacagcttagtcattgagaaagaaaccttcccacatgatgctttggaggctaccgcatggactgaagatggactcatcatggctgctcgccacaagaagtacaaacacatccagggtgtccagttccatccggagagcatcatcacccctgaaggcaagaaaatcatcctcaactttgtcagattcattgaggagctggagaagcagcgttcctaatctaggggaggtatatgcgaatgcgacgggtggtttcatagatcaggcggaagcagagacataagccactgcgaagttccggcactggcagtggaagtttagctaggaatcaacgtttccctctcataattcgttgtgctcgtggtaacataatctgtgtggaccgaatgtcgaataaagtccaggcgtccagctgataaaataagcaccggtgttggttcctctaggtggatatatatatccggtaattttcggcaaggggaggcctcggcacatttttgtctgagttccggcggtagcaagaccggccgtaatagcgttagaccttgttcgacataagtttatgtcggattacactcggaattgttccagctaagggcccgttcggttgtaccggaatgagccaggattcattccagctcatcaaaatctatataaattagagaaataatccggctaggaattaatccggggctccaatccggaacaaccgaacagggcctaagagcatctccaggagactctttatttttggctctctatttgactctctatttatcttttcataaagattacattatatatgtagcatctcacttcaacagactatctatctattttgctagtcaggtggctaaccaaatttggctagtgagagagctgatttggagagtcagatag

SEQ ID NO: 14239 - DNA, 226 bp, Zea Mays
attgccaacgcaacagttccgatcctccacaccagcacccgccgccgccgcctcttcccttgcgcacctgctgctgtgcggatcggtgaggcggaggagtaggatggcgagcgcggccggaggcggagcggcgggggaaggggagtggcttaaggtatcccagctcaggcccatggtggaagcgcaggaccccaacgccaagtaatcgctgaaagacttcagaaac

SEQ ID NO: 14240 - DNA, 2468 bp, Zea Mays
ccaattcgcaacctcccgcctctttttctccccgccccgcgcggccgaacaaaaccctagtccccctccccactccctcagtccccattcccacaccgttggtggctcggaaccgccactgaccacttccctgaccccgcgctctctccctctcactacagtcggagggcggcggcggtggcgaaccgacggcgtatgtaagttggtggatagagaggtgttgcggaagccgggaaggtattgcgcaggaaaacgcagcctcccctattcgctggaatccaactgaacatttgacttgcttgttccgggagatctcttgcctaactgtgagcgagcgagttgtcacagaacagttggctgctcacaatggggacactttcaatgtccgacgccagccctatccctgccaagaactgggatgcttcccctgtcaagctcgaggctcaaggtggtgacgccatcctcggcatgaaggaggaagagcgactactggagctcgtgaaggatgagcaggctgatggaatcttggattcattaccaattgacctggaggccaagaatggcgatgcatcactcatcactgaagccatgaaaaaggaggaggagcagcttgaagacacccggatcaaggtgcaggaagaagaggaagccaggaagagggaagaggctgctagacttgcttttgatcctgagacacagtataacaagttagatgagctgctgacaaagacacaactcttttcggagtttctacttgagaacatggatcggattgccgatgaaagtgttgaaactcaagctgaacagccacaggtagaagagaagaagaaagggcgcggccggaagaggaaagcaaagccacagtacaatgataagaaggctaagacggcagtggctgccatgctcacaagatctcgcgaagaacgtcttgcggaagattctactctctcagaagaagaaaggtgggaaaaggagcaggctaatcttgtgccgttattgactggtggaaagttgaagtcatatcagataaagggtgtcaagtggcttatatcattgtggcagaatgggctgaatggaatactggctgatcaaatgggccttgggaaaaccatccagacaattggatttcttgctcatctgaaagggaaaggcatgcatggtccatacttaataatcgctcctctgtccactctctcaaactgggtgaatgaaatctcaaggtttactccatctctggttagtatcatataccatggaggtaaggctgcccgggcagagatccgaaggaaatttatgcccacaaatgttggccctgattttccgatagtagtgacttcatatgagatggccatgtttgatgctaaatttcttgctgcctataagtggaagtatgttgttgtggatgaggggcatcgtctgaaaaatgctaagtgtctattattgaagcagctgaagcgcataccaatggataataagctccttttgactggaacacccttgcagaataatcttgcagagctctggtcactattgaacttcattttgcctgatatattctcgtcacatcaagagtttgagtcatggtttgatttttctggtggaaatgaagaaactgatgagaagaaaaggctgcatgttgtttcaaagcttcacgctatcttgcgtccattccttctaaggcgtatgaaggaggatgtggaacagatgcttccacgaaagaaagagataatcatatatgccaacatgactgagcaacagaagcaaatccagcatcacttgatcgaaaaaacatttgacaactacttgcacgaggaatcagatattatattgaaaagacctggcattagggcaaggttgcataatctaatgattcagctgaggaagaattgcaaccatcctgatcttttggaatctccagttgattcaactggtttatatccacctgttgagaagcttctggaacagtgtggtaaattccaactttttgacaggttgctaaatttcctgatggcgcaaaagcacaaggttcttgtattctcgcagtggacaaaagtgctggacattattgaatactaccttgattcaaaaggccatgctgtttgccgaatcgatggtaatgtgaaactggaagaaaggaggaggcagatagcagaattcaatgacgtgaatagcagcatgcgtatcttcctcctgagcacaagggctggtgggcttggcatcaaccttactgccgctgacacctgtatcctctacgacagcgactgggccatggaccgatgccaccggatcggccaaacacgcccagtgcatgtgtataggctggctacgtcacactccgttgaggggcggatgatgaagagagcctttgggaagctgaagctggagcacgtggtgatcggcaagggacagttcgagcaagacagagctaagccgagcgccttagatattttctttttgtttgaacgtac

SEQ ID NO: 14241 - DNA, 1484 bp, Zea Mays
aaatgactttgtttccatcctcgatgtctatttcatgatcggtgttgaaaagatgcacaaggataccaagtatgtattgtttcttgatgatgatgtgaggctgcatcctgggactatcggagctctcacaaaagaaatggagaagaatcctgagatatttatacaaactggatatccccttgacttaccttctggcagtttgggcagctattgcatatatgaataccacatgccttgttcgatgggatttgcaactggtgggaagactttcttcttgtggggtggctgtatgatgatgcatgctgatgattttaggcaagaccggtacggcattgtcagtggattaagagatggcggttactcagatgatatgacactcgctgcaatagcaggacagcacaaaaggctcatattttcaccacctgttgctgtgtttccacacccccttgccagtgatcttagcttctccagatactggaattacctcaggaaacaaacttttgttctcgagtcatatgtatcgaatgtaaactggatgatgaaccgtgcattatttacaagccattgctatctgtcatgggggtttgtctggccatacattatggctttggtccatgttttagctgctcttcgggcaccgtacagcaaagttgtaaaggaagcatccgattcatcttggggtttgttcctggtgggcctcttgttcacatgcactctgatcgagctcgtttcaatgtggaatttgactaaggtggaaattcaactgtgcaatatgctgtctcctgaaggaccgaaagtatctcttgattcatacaactgggggctcgtgttcatcgctgtgttggtagacaacttcctctatccagtatccgcaatccggtcgcatttctcccaatcaatcaactggtctggcatccggtactacttgagggacgggaaaataagcaagatcgagagagagaacagttcgaagtacactgatcttggagggaagcatctatacggcaagaggacataccctcctaacaaatcgttgctcggttacctgtcaagaactctagtgcaatggcatcagccaaagaaatatgacgtataggaaggtcgaccgggggagattcagccctcgattgtgtggggggcttcttgttgtacacctcttttggtttcaactttctttcatgcctctctctctctctctctcctctctgattgtttagtggttattaggttcattcatattaaattttgtggtgttcaatcggcgccaccactttgaaagggttgcattgcacctcatagttctttgtaacactagagatatgtaacgatttggctgaagaagtgaaatgttccatgttggtgagacggtctctttggttcatttgctgattcatcgactctttaagagttgacatctactcactattgtatcataggatcacatgccttgatatagcaagattctgctctttcttttttttggg

SEQ ID NO: 14242 - DNA, 2446 bp, Zea Mays
tgcaactttacctgcttgttccgtgaaccggcatatgagtgaatacttggagaaaaaggtcccccacaccccccacgcaggtgaatactacaagtagcagtacaaggaagagagccaatctgcccgtgactgccagtgagttgctcgggtgtggtggttagttgaggtcacgatgatgggaggcgggctgatgatggatcagagcgtggtgttccctggcgtccacaacttcgtggatctcctgcagcagaacggcgacaagaacctgggcttcgcctcactcatgccgcagacgtcctccggcgaccagtgcgtgatgggggagggtgatctcgtggacccaccgccagacagcttcccggacgccgtggaggacgacagcgatgacgacgttgaggacatcgaggagctggagcgccgcatgtggcgcgaccgcatgaagctgaagcggctcagggagctgcagcagagccgcggcaaggatcccatggctagcggtgggggcctggccgacggctcatccaagccaaggcagtcgcaggagcaggcccggcgcaagaagatgtcgcgcgcgcaggacggcatcctcaagtacatgctcaagatgatggaggtgtgccgcgcgcaggggtttgtgtacgggatcattccggagaagggcaagccggtgagcggcgcctccgacaacctccgtgcctggtggaaggagaaggtccgcttcgaccgcaacggcccggccgccatcgccaagtatcaggccgacaacgccgtcccgggcgccgagaatgagctcgcctcgggcgctgccagccctcattccttgcaggagctgcaggacaccacactcggctcgctgctctcagcactcatgcagcactgcgaccccccacagcggcgctacccgctggagaagggcgttcctccaccgtggtggcctaccggcgacgaggagtggtggccggagcttggcattcccaaggaccagggcccacctccctacaagaagccccatgaccttaagaaggcctggaagtccaagtgcctccaggacaagatgactgccaaggagatctcgacctggctggcggtcgtcaagcaggaagaggagctgtacctgaagatgcaccctggcgcacgcccgccggcatccactggtggcatcgccagtgccatatctttcaacaccacctcaagcgagtacgacgtggacatcgttgatgagtgcaagggggatgaggctggcaaccagaagacagcagtcactgacccaacctccttcaaccttggtgcggctatcctaagtgacaagttcctcatgccgacgccgatgaaggaggagaccgctgacgtcgagttcatccagaagaggaacgcccccgctcctgctgagccagagctaatgctaaacaaccgggtgtacacctgcaacaacgtccagtgcccgcacagtgactacagctatggattccttgaccggaatgcccgcaacagccaccagtacacctgtaagtacaacgatccgatcactcagagcgccgagaacaagcctctgccagcaccgccgcaaccacaagccttccagccggccttcagccaagccaatcaggcagcgaacaatctggacttcagcctgcctatggacgggcagaggtccatcgccgagctgatgaacatgtacgacaccaacttcatgacgagcaagaccatgagcagtagtgacagcgtcaccatcatggagaggccgaacgcgatgccccagaggatccagatggacgagggcttcttcggacagggcaacggagtcttcgacgacgtcaatagcatgatgcagcaacaacagcagcaggcaccacccgtggtgcagcagcagcagcagcagcagttcttcatccgcgacgacacgccattcatgagccagatgggcgacatcaccagcacggcggagttcaggttcggctctggtttcaacatgtctagcaccgccgccgccgctgattacccaggcgcggcgcagaagaacgacgggaccaattggttctactgaagaataaaacttgtagggctcctcgttataagcttcggattcctccatggatctcccaagttgtcaagtcttataggtcttcgttatataggttttgcagtagctgcaagacggctggaacctggaactggtttatacttgtatgtccggccagccataaacctctcttatttgcaaacttaatgttattcctagctttaagttgttagtctcagtctgctgtccatgtatatggctgttaaaatgcttgtgcttgtttctgtactacctgctgtttggtgtctgaatgaagtgttttcttcagtggttctgctcgacgtgtctgctcactgttgatgaggcacatcatcgctgctgctcttcacacaaacaacatgactgacatattcaaatattttgagc

SEQ ID NO: 14243 - DNA, 149 bp, Zea Mays
cccctcctcctctccatggtgcagcctccccgcttggtaccccgtcgtgtgggtgcgagtcttccattggagtttggagggaggaagaaggaagaaaggaaggaggaaaggaggaacccaaggtggtggatttccggatcgtacttagt

SEQ ID NO: 14244 - DNA, 166 bp, Zea Mays
cacggctcgtgtctgtgagctagagctttttgagtacgtgcgcgcttggcgaggagtgagatacctagctgcgaggaagcgagcgctgttgcgttttgagtaggtgcgcgcttggtgggggtgcggtacggttggcggttgcttccgggcttccggtagggatcgg

SEQ ID NO: 14245 - DNA, 2196 bp, Zea Mays
gttccacacacttcccatccccggacgcccactccagtactccactacgcctctgatcccgtgccgagtgccgccatttcccgtgccccccaccgccgccccgccgccgacgcgatccccatcacgcgccgcccatggcgccccacctactcaccccaccagccctcaccgttacgggcgccgccgccccaggtcgcctcggcagcgccggatcggcggacccgcggacgcccaggccacgcgcgccgtggcccactttctgctcctcccccagcagagggcggcgggagctgaggaagaggaagggcttgagcgtcgcggcggcggcggaagtagcggagccgggtgggcccgctggggcgatgcggctcaacgagtacatggtcgctgtggaccggcccctcggcgtccgcttcgcgcttggtgtcgacggacgcgtcttcgtccattcccttagaaaagggggaaacgccgagaagtccaggatcatcatggtcggcgacacgcttaagaaggcaggcgccgacggcgaaggcctcgtcaccatcaaagacctaggtgacacggagactgcgctgagggacaagtcaggaccatgcagccttgtccttgagagaccatttgctccttttccaatccatcagttgcatcaaaatgaagattaccacattctatttaacagaggacgagctgctgtggcctcttggaacagtgctgtttggtctacaaagatgaacgaatcttctactggggatggaaaattaggttttgctgtattctccccaaggttgctaagttctcaaggatgggctcttctgtccaatgagaaaggtggactcaatcagagtagcactaaccttgccaatcgcgtaagtgagattgttggtttatattctgatgaagacgatgacaatgctgagtgggcacatggtagctttcctttggaagagtacattaaagcactagaccgtgctaaaggtgaactgtactataatcattcactgggtatgcagtacagcaagataacagaacaaatatttgttgggtcatgtatacaaacagagaaagatgtgaagatgttatcagaaactatgggtattactgctgttctgaatttccaaagtgaaagcgagcgcattaactggggaatcaattctgagataatcaacagttcctgtcgtgagaataacatcttgatggttaactatcctatacgagaggttgattcattggacctaagaaagaagcttcctttttgtgttggtcttctgttgcgtcttataaggaagaactaccgcatatatgtgacttgtaccactggatatgatagatcaccagcatgtgtgatatcatacttacactgggttcaagatacacctctccatattgctcacaagttcatcactggtttgcactcttgtagacctgacagagctgcaattgtttgggcaacttgggatcttattgctttagttgaaaatggaaggcatgatggtagtcccacacattcagtttgtttcatttggaacagtggtagggagggcgaggatgtagagttagttggagattttacaagtaactggaaagacaaaataaggtgcagccacaagggtggctcaagatatgaggctgaagttcgacttcgacatggaaagtactattacaaatttatagttgggggccaatggaggcattcgacttcgttgcctacagaaacagatgaacatgggaatgtcaacaatgtgatcagagttggcgacattgctcggattcgtcctgctccaagccagctacatataaaagacccatctgttgttaaggtcatagaaagggcgctaactgaggacgagcggtttttattggcgtttgcagcacgccgcatggcatttgcaatctgcccaatcagactgtccccaaagcagtagacgtgtcggtcgtccttctccgagcggaaccaggcgtcatcgaggatcagcgattttcgaagctacagaaaactcatgtatgtaacaacagaggggcttcttactgtatgtacccgttcacacaaaacctggaacgtggctaagtgtctcagcaatgggcacaatgtacacctctttgtaattccatggactgtatacctgaaatgaactccattttagactgacactcttgatataatcggaggccggctcgcaaatggccaaaaaaaaa

SEQ ID NO: 14246 - DNA, 934 bp, Zea Mays
  misc_feature (933)..(934): n is a, c, g, or t
tggcaaagccactatgctgagatcagaacaacaaaagaattgtccttgcattgcaaagtgggttgaagtcagagatactgtgggcactgaatgcccttacagtactctcatttaaggagaaggatgacctccgacgtgatgcaacacctcttgctaaagttcctgggctcctagatgctcttcttcaagttattgatgaatggagcgatatttcaatgcctaaggaccatacgaaaccacccagactaagaactttgggtgccaacacaacactctcgggctttggccaggagaatatggaaaaagtatactctgacactgccactacctctaatgaccaatccaaggcggaagattccagtgtcacaaagaagcgcgctgcaagcttttggtttgatgaggatgggttgtttaacaacgatgatgaagggagggcggaaaggcagcagtgtgctattgcagcctccaatataatccgcaatttctcttttatgccagaaaatgagattatcatggttcaacataggcattgcttggaaactatatttcattgcttagaaaaccagaatagagaagatgatgagctcataacaaacatgctggagacccttgtcaatttagcacctgtgctggacctgaggatcttcagctcatcgaagccttcgttcattaaaatgaccgagaaaggtgcaattcatgccataatgggtatgctttcttcttccgtaaagccatggcactgtgctgctgctgaattgattggccgtctgataataaatccagacaacgagccatttcttcttcctatcattccacaaatatacaaacgactcgttgacctattgagtgtaccagcatatgatgcacaggctgctgctgttagtgcactctacaatgtagccgaagtgaatatggattgcaggctcaagcttnn

SEQ ID NO: 14247 - DNA, 849 bp, Zea Mays
gaaagaaggccatgacacaggactagtggaactggctgcaagacctgcacgattctctatgttggtgatcacatatacggagatattctgcggagcaagaaagttctaggctggcggactatgctggtgattccagaactagaacaagagctgaagcttctctcagaatcaaagtctactcgaaaggagcttagacatcttagaatggagcgtgattcgattgaagacaaaatccatcatcttgaatggtctcttaagcttgatgatatctcagaaaaccagaaggagaaattgttctctgaacatgacaatctgctgaaacagagagggcatgttcgtggtcttcatcaagaagctcagaggcaacatcatcagaagtttcataaggtgtggggacagctcatgaagactgggtaccaaaattccagatttgctcatcaggttgagagatttgcttgcttgtacagcagccaggttacaaacttcggtttgtattctcctgacaaatactatcgtccgagcgaagattacatgccccacgagtttgatgtgcttgggctgtaggagcagcccctactgctggtcggagttcctcgttgtaattgatccatagcctaggaggggacatcgtagttgccgtattatataacaggaagcttcacccattgtgaaggagagaaggtttataactatagtagctacatttctacttatcagtaagtttacctgtatataaatatgtacataactgatatatgatgcgtgttatttgtgagcacgcgataagtagtactgactaagtcctgctggtgtagtcattggtttttttatgatggattagcatgtaat

SEQ ID NO: 14248 - DNA, 402 bp, Zea Mays
atcgctgctatcttcatccaggtcttgctcctcatggcatcgtcctattcgacaaggcctgcggagactcgtgcattcactttggcatcggcaccagcgggttctgcaaaggcagacgaccacccaccagagtctgcacgtgtaacttcgaatgtccagggcaagagcgaagcaacacgtttacatgatggggatgagccgctatatctagcttaattattagcatgcccaaactgaatatccaataatttgagtgtttctgtagttgattgttcgctgtttgtttcaaaacgggctagcagcaaggaccagagctgcatgtgtaacatttgttttcaaagttaatatatgtgtccaatcttgtctttggagatgcatatgcatttctacttccctggaaac

SEQ ID NO: 14249 - DNA, 351 bp, Zea Mays
gggcaaagactccctcttggcccattgacggcccaaagcccagtgaccagcgcgcgtccgtcggccgatataaagcgctagggttttacctatcgtttgccccacgccgtcactcctctcaacccgaccacgccgcgcctccgcttcgaaccctagccgagcggggtaaggagggaaatggggaagggtacgggcagcttcggcaagcgccggaacaaaacgcacacgctgtgcatccgctgcggccgccgcagcttccacctccagaagagtacctgctcctcctgcggctaccccgcggcccgcatccgcaagtacttcagagacgccttggcgttaatgagaagatgt

SEQ ID NO: 14250 - DNA, 1006 bp, Zea Mays
ataaaccagagcagcagagcgctctgtatcgttggttccgcctagggttttagcttctgccgccgtaacctcacctcccggcccttgtcgccgcaagtccgcaacctcaccatccttcgaatcccatacgaatccctagcccgcaacccgccgggcgacgagcggcggagcccgcagccaacatggaccggtaccatagggtggagcgggcgcggaaccagtcgaccatcgaagagaacgagatccgcatcaccgcgcagggcctcatccgcaactatgtctcatatgctaccttcctcctccaggaaaggagaattaaagagattgttttgaaggccatgggacaggcaatcagtaagtctgttgctgttgcagagattatcaagaaaagggcccctgagttacaccaggataccaacatcagctctgtcagcatcactgatgtctgggaacccatagaagaaggacttgtcccattggagatgactcggcatgtttctatgatatcaattactttgtcccccagagagctggacaagcacactcctgggtaccaagctccagcatatgttgaacatcccaggcaacagcaggtgccaccactgcagcgccaacctcgcagaccatcaggacaacaattccagcagctggagtatgaagattcctatgcacggggtcgaggaagagggaggggccgtgggcgtggaaggggttgggctagaggtggctatggtggatatggaaacaatcaaggtggctataaccaaggtggtgggtattacgacaatcaaggtggatatggtggctatgatgatcaaggtgggtatggtggtggatatggctacaaccaaggcagatatggaaactatcaagaaaatggtggatataaccgaggtagaggaggtggtatgcgaggaagaggcaattggggttaccgtggaggatgtggcttgccagtcgagccagcttcgttcttgagctcgtgcagtggccgtgtcgagctcgg

SEQ ID NO: 14251 - DNA, 710 bp, Zea Mays
cattgatatatttgttcttttaggtaaggagaggtgctgatagagcagaaatatatagcttggctttctcgaataatttgcagtatttggctgtgtccagtgataaaggaacaatacatgtcttcaatctaaagataaatgtgggatcgactgcaaatgataaacctatacctgctccagatcctgaagtttcgcatataagcccccctctttcgttcattaagggtgtgttgccgaaatatttccactctgagtggtcagtagctcagttcaggctccatgagggggagcagtacattgttgcatttggacatgagaagaataccgtgtcagttgttggtatggatggaagcttctacagatgtcaatttgacccagttaatggaggagaaatgctgcagctggagtgctacagttttctaaaaccgtcagatcaaccgtagcgacacacaattatcatctatcaattgatgccctcctccccgtaccaagaactgtacagtatctttgtgcgccctcgttggccggaggtctaagctaaatatgataatattttctttgtgtatatatatttcttgttggctctgggtgatgtatgttctgtctgtggaagggctaaaacacccatctgcagatggacgttatagaacgtgtcgttattatttatgaatggattgaataaaatagcctaacaatgtttctccaatgtt

SEQ ID NO: 14252 - DNA, 1751 bp, Zea Mays
ggattccaagtggagcgggacacaacgaagcggtgacgaagaacaagttaacccaacctggaagcgagtaagcgaccttcttgagcgtgaagccaaaggttggacctcaccgatccgccaccacgccacgaaatcatctcctactccagcagttccgctcctcgcgccgccaccgccaccgccacgatgccggaagacgtgcagatgaacgactcggagccccagtctgcggccccagctcccgccgccgccgcggcgccggcgctctccacactacaccatctgaaggagatcgcgtccgtgatcgaggctggttctctgtccaaggaggtccgccggatctcccgcgccttccgcctcaccgtcgcgctccgccgccgccttgccgcacgggacgtctccgccttcctcgccttcgcgctacccgcgtcctccgaagcctacgggcgcctcatcgccctggtgcccaaggaagatgatactgagatggacgttgatgctgtggctccagcaactcagatttcaatcaaacatggtctccctgagattgaaatatattgctacttgcttgcactgatttttcttattgatcagaagaaatacgatgaggctaaagtatgtgcaagtgtgagcattgctcgcctgaagaatctaaaccggagaactgttgatgtcttggcatctcgtctgtacttttattactcttatgtgtatgagcttaccaacagccttgctgaaatccgcgggaatctgcttgctctacacagaatggcaactttgcatcgtgacgagctcggccaggaaactctgctgaatcttctcctccgcaattacctccactacaacttgtatgatcaggcagaaaagcttagatcaaaggcacctcgttttgaagcacattccaaccaacaattctgccgatacttgttctacttgggcaaaattaggacaattcagttggagtacactgatgctaaagaaagcctcctgcaagctgctcgtaaggcaccaacaactgcccgtggttttcggatccagtgcaacaaatgggctatcatagtgaggctgctgcttggtgagattccagagaggactgttttcatgcagaaaggaatgaagaaagctctgacaccttattttgagctcacaaatgctgtcagggttggggaccttgaactgttcaggactgtcgctgacaaatttgcaagcacattcagcgcagacaggactcgcaacttgattgtgaggctgcgccacaatgtcattcgaactggactgcgcaacatcagcatttcttactcaaggatctcccttgctgacattgctaagaagctaagactagactctgagaaccctgttgctgatgcggagagcattgtagccaaggccataagagatggcgcaattgacgccaccatagatcatgcaaatggctggatggtatcgaaggaaaccggtgatgtctactctacaaatgagccacaaattgcattcaactccaggattgcgttctgcctcaacatgcacaatgaggcggtcaaggcgatgagattcccccctaattctcataaggaaaaggagagcgccgagaagcgccgagagaggcttcaacaggaggaagaactggctaagcacatggctgaggaggaggatgacgacttctaaattagctgccttttgagcaaccacttgcaattgtggacttgttggaacgcctggttcccgcacgcgccgcagttgcccttgtcgga

SEQ ID NO: 14253 - DNA, 1008 bp, Zea Mays
gctccagaagtggtgcccaaggtttgtttttgtactacaagggagcatttcattgactgtggggactggaactatccattctctgctggtggattcttatggatatcttcctgcaaacacaaagcattctatgatctcagatgaaccaaccactcttgtaatatttgagaggaggtacaatgccattgaggattcccatcctgatctaattgtgggttcaacagataagcaaccccttctcgaaaccccgggagaggtatttcaactaaggaagctgctaccgacttctctgtcctatgactttaatatccatataatggactttcaaccaggcgaatatctcaatgtaaaggaggttcattataatcaacatggacttcttcttttagaggggcaaggaatataccgactgggagagagttggtatcccgtgcaagctggggataccatttggatggcaccgtttgttcctcagtggtatgctgcccttggtaagaccaggacgagatacttgctgtacaaagatgtcaataggaatccattgatatgatcaagaaaccagaacaaggagggaataaatcaaatgtcgagctgtgccaggtataaagaatttcaatgggagatgatcacaggaatgagaaaaggagatcttattgtatgctgaaaaatcttgaaaccaaaaataacgtgggaagttgaatgtgtacttgtgatgtccataactgtcaatctttggtgactagtgcgactggaattgtgatgtaacgtattctggacagcagatgccaagttggatatgctgtgacatttgtgaatggctaatcccatgaatttaggtgatgtttggtttagaaatgataatgcatatgtaaacggtatgagatccaggggcaatgattacaggacaaacagttttccattttgttcggttccaccgtagatagtgttcaggtacgtgtaccgctcaccgttcgggcttgttcggttagagttagattgaaggaggtt

SEQ ID NO: 14254 - DNA, 3453 bp, Zea Mays
ctttgatctctcctaatgttgggatgcgtggataaactgatcggctcccatattctatcaggattcttctcgagtcggcgatcaggaactgcgatgatttccaggtcaccgggaaggatgttgagaagatcttggactgggagagaagtgcaccgaagcaagttgaaatcccgttcaagcccgcccgtgtcctcctccaggattttactggtgtcccggctgttgtcgaccttgcgtgcatgagggatgctatgagcaaactcggcagcgacccgaacaaaattaatcctctggtacctgtagaccttgttattgaccattcagtacaagtcgacgtggcaagatcagcaaatgctgctcaggcaaatatggagcttgagttctatcgtaacaaggaacggtttgggttcttgaaatgggggtcctctgcattccgcaacatgcttgttgttccacctggatctggcattgttcaccaggtattttgatgatatggttgttttttaaaataacttaatctagtcaaggttattttatctatcaaaaacttataatcctctatttcactttgttaggtgaatcttgaatatctggcaagggttgtgtttaataatggtgggatcctttaccctgacagcgtcgtaggcactgactcccacacaactatgatagatggtcttggagttgctgggtggggagttggtggtatagaggcggaagctgcaatgcttggccagccaatgagcatggtcttgccaggggttgttggcttcaagttatcaggcaagctgaggaatggagttacagccactgacttggttctaacagtaacccaaatgcttcggaaacatggtgttgtcgggaaatttgttgagttctatgggcaaggcatgagtgaattgtcacttgctgatcgggcgaccatcgcaaatatgtctcccgaatatggcgcaactatgggtttcttcccagttgatggaaagacgctggactatttgaagcttactggccgaagtgatgatacagtggccatggttgagtcctacctgcgtgcgaataagatgttcgttgatcacagccaggctgaagctgaaagagtatattcttcttatctagaactgaacctggaagaggtagaaccatgtctatcgggaccaaaacggcctcacgatcgagtgacattgaagaatatgaagtctgactggctttcttgcttggatagcgatgtaggattcaagggttttgctgtccccaaagagtcacaaggcaaagttgcagaatttttgttccacgggactcctgcaaagataaagcatggtgatgttgtaattgcagcaataaccagttgcacaaacacatcaaatcctaatgtaatgctgggagctgctttggttgccaagaaggcttgtgagttaggcctggaggtaaagccatggattaagacgagccttgcacctggttctggtgttgtgaagcagtacttggataagagcgggttgcagaaatatcttgaccagcttggcttcaatattgttggctatggttgcacaacctgcattggaaattccggggagcttgatgaatccgtatctgctgcaattactgagaatgatattgtttctgctgctgtattgtccggaaacaggaattttgaaggacgtgtgcatcccttaactagagcaaattaccttgcttcccctccattagttgttgcttatgccttggctggcacggttaatattgattttgagaaagaacctattggaatctcgaaagatgggaaagaggtttacttccgggatgtttggccatcaacagaagagatagccgaggttgtcaagtcaagtgtgcttcctgacatgttcaagagcacatatgagtccatcacccaaggaaatcctatgtggaatgagctgccagtctcaacaagcactctctatccctgggatccatcatctacatacatccatgagcctccttacttcaaggatatgacaatgactcctcctggcccgcgaccagtgaaggatgcatattgccttctgaactttggtgacagtatcacaactgaccacatctcgcctgccggaaacattcacccagacagcgcagctgcaacatatctgaaggagcgtggtgttgaaaggaaggacttcaactcatatggtagccgaagaggaaatgatgagatcatggctaggggaacctttgccaacattcgtctcgtgaataagttcttgaagggtgaggttggacccaagacaatccatgttccatctggggataagctttcagtttttgatgctgctatgaaatacaagaatgaagggcatgatactattatcctggctggtgccgagtacgggagtggtagctctcgggattgggctgcaaagggcccaatgcttcagggagtgaaggctgtgatagcaaagagctttgagaggattcaccgcagcaatcttgctggcatgggaatcatccctctatgcttcaaagcaggggaggatgcagacaccctgggcctaaccggccatgagcgctacacggtccaccttccaaccaatgtgagtgagataaagcctggccaagatgttaccgtgacaactgataatgggaagtcgttcacttgcacactcagattcgacactgaggtggagcttgcttactacgaccatggtggcattctaccatatgtcatcagaaagattgcggaacagtagattgagatgattgcgatgcggtgaatcgtaattggtgtaaacgacccatttttgagtacttataataacctctgagtttctcagagtgagctgtctgaacttttagtaaccttttgctttctttaagacactgttaataatatgttaactcctgcaatatctgaatatacatttggcagatgattccctatgttgtaaatgacactagttcataacactgacgcagttcaaagcggttcttgttatctggtggtactcaaattagtactgcaaacaatcgattagctgattttattttgagttttgtattacgaacctttttgactggtgaaacggttattccatttgcttcaagcgatttggaaatgattgttacagaaagctgtttgttacagtgagtgtattttgcctcttaccagctaacgtttcactttcacgagcgactggcaatgaccctgaagcaatgacaggatacataagcagcttcagcaggccaaggcaactgatgcgaggtcggtacgtgattttgggagtggctccatgatgggcaaaagcaaacgatgcgtagagaaccctttcagcggctgaaatatacttgatggactaaattacttggttcggcatttaacattgtaaaacttttcaaaatctagatataaatcttctatcttaaattcacacgttacgagagagaaaaaaagatttcatcggtgtccatggtctgtttcta

SEQ ID NO: 14255 - DNA, 136 bp, Zea Mays
ggaaagaagctcttcaattgcaggatacggagccgagtgcagcatatccatgggagtatcagtacaaagacgatatcaagtatgaagaggacttcttcgtgaattcacgcggaaacaagctcttcacttgcaggat

SEQ ID NO: 14256 - DNA, 93 bp, Zea Mays
ggctttcgcccccggcctcgtaacgtcgggtagggtttccccgactcgactgcgcttctcttcgtctccttcgcgaacccgccgtcgcccact

SEQ ID NO: 14257 - DNA, 802 bp, Zea Mays
tcttgatgtttctgcccctcgggcaaaataatgcttcttcctgaggatgatccaaatgccactcatatcatgattgccacggggaccggtgttgctccctaccgtggctacctacgtcgcatgttcatggaagatgtcccaactttcaaatttggtggtctggcttggctcttccttggtgttgcgaactctgacagccttctctatgacgaagagttcacaaactaccttcagcagtatccagacaatttcaggtacgacaaagcgctaagcagggagcagaagaacaagagcggcgggaagatgtacgtgcaggacaagatcgaggagtacagcgacgaaatcttcagactgctagatggcggtgcgcacatctacttctgtggtttgaaggggatgatgccggggatccaggacacgctcaagaaggtggctgagcaaagaggcgagagctgggaccagaagctgtcacagctgaaaaagaacaagcagtggcacgtcgaggtttactaggctataagatggcaaggattgtgattgtttagctactgagctgagaaactggacgtatgattgaacgactgtggctgctgcgatgtaatgtaacattgtagacttggattcataagcttctgctccaaatggtgaataaaatgaagcacgcggtttgtagctgctactaccagtatcaggacagtttctttttgctcgtttcgtataggttgattaagctatttttaagggtacatctccttgctttatgttattctgaattttcttatctgagatgcattattgaatt

SEQ ID NO: 14258 - DNA, 202 bp, Zea Mays
atacaaatttctataaaacagccaaacagcttaccccagctttagaaactctgagttctacatcgtggttgtacatttcgtagatgtactgtccgaacttaacaccatccttcccttcttccttcaagcggcgtagaacaagccacatatggagaacaagcaatgaaaatgttgtcttaaatgttttctccaactgaaaaac

SEQ ID NO: 14259 - DNA, 678 bp, Zea Mays
aacagctcccgcccttcttttcacacgaagagaagcaaatgaatgcttcatacatcatttctgtggctaggaagcttggttgctccatttttttgttaccagaagatatattggaggtgaaccagaagatgatgctaactctgacagcaagcattatgtactggtatttgaaaaggccaacatcacaatcattggactctgaaaacgggagttcatgtgaaacaacctccatcacaacttcagatgattctgcatctgaatcatcgattgatgacaatacaactagataaaagagcagggtcatgaaaataattgatatgacctgtcattttgaaaacttgggattgattgtttgctgtaattttaagggcaaatacattcaagaccgaggcaagggaaatggttaagggctttgggtgtttttttgaggtttaatagtgtgattgggtgaaagatgtttgacatcctgtaaatatatctataactagtgacaataggttgtccaaaatccactatttgagttagaacaatttgagttacaatgtacaataaattagtgtcctatccgttaaagcttttaggcgcatgttgtcatatgcttatggaataactacaacattttccttgaaatatgcttaaattaacacgagcttaaatcgcttgtgatttggcttgatg

SEQ ID NO: 14260 - DNA, 1245 bp, Zea Mays
ttttttcatataagcgaaatattgcagcaattgaagggagttggtttggatcttgggcaccagagaggatgttatgggatcacattatttataaaccaatacgggcaatgcttggaggacgtctaagatttgttctttgtggtggtgcacctctgtcaagtgacacacaaagatttatgaatatatgtctaggctttcactgaatgggatgatacaagtgtgggtcgtgttggtccaccacttccttgttgctatgtgaagcttgtctcatgggaagaaggtggttacaagatttctgattctccaatgccgagaggagaggtcgcggttggtggacacagtataacaaaaggttatttcaacaatgaagcaaagacgaacgaagtatacaaggttgatgagaggggcatacgctggttctacactggtgatattggtcagttccatcctgatgggtgccttgagattattgacaggaaaaaagatatagtaaagcttcagcatggagaatatgtgtctcttggcaaggttgaatcggctctagcaacaagcaactatgtggagaacatcatggtttatgccgatccatttcataactactgtgttgccctggttgttccagcgcaccaggccttggagaagtgggctcagaattccgggatgaactatgaaggctttggagagctttgccaaaacgaccgagcaattaaggaggttcagcaatcgctatcaaaggccgcaaaagcagcgaggctcgagaaattcgaggtgccagcgaagatcgtgctgttgcctgaaccgtggacgccggagtccgggctggtgaccgcagcgcttaaactgaagagggagcaaataaaggccaaattcaaaggcgatctggacaagctctaccactgaagaagcgacagaggacggtttaatttgcacctactgcttccagacgcttgcggtgccaaaagctgcctggatggaacttttactgacctgcacgagtggtgtgtgtgtgtgtatcccagctgctgatacacaggagcttcgttcttctgtgactgtgactgagggaaaataaacccagtgttggaatgatcttgatttgtaatagcttcacgtcatgggattttaattttgtcatagcacagaggatgctcaatttcacgtccgttacgggtcagttatgacactaagcatattgtaaatgatgtttttttatatagacacaataaataggccctgggcacatca

SEQ ID NO: 14261 - DNA, 898 bp, Zea Mays
ttcgaacctaacagtaaaaccttgtgatctccgcatccaggcacgtacaacgctgctgctgacaccgagctacctacctcccccgtgccaccacctctaaaatcccccagcggcccaaccgaacccgcctagggattcctaccgagggaggccgcacgcagccatggatttcctgcaggagcaaagcgtcgagaccacagtggccgtcgccgtcgctgtcgccgccgtcgccgcaggcggcgccttcctcctccttcgatccaggaagcccaagggctgcttggatcctgagaacttcaggaagttcaaacttgttgaaaagaagcaaataagtcataatgttgccaggttcaagttcgctcttccaactccaacttctgtattgggccttccaatcggtcaacatatcagctgcagaggacaagacgctacaggtgaagaagtaatcaagccttatacccctactacattggattctgatcttggatattttgagcttgtcataaagatgtatccccaagggagaatgtcccatcatttccgcgagatgaaagttggtgattatttgtctgtgaagggacctaagggccgattcaagtaccacgttggccaagtgagggcatttggaatgctggctggtggatcaggcattactccaatgtttcaagttgccagagcaattcttgagaaccctaatgacaacaccaaggttcacttaatttatgctaatgtcacatatgaagacattcttctgaaggatgagctggacgacatggccaaaacctatcctggccgctttaagatctactatgtgttgaatcagcctcctgagaactggaacggtggtgttgggtttgtgtctaaggaaatgatccaatctcattgtccagcgcctgct

SEQ ID NO: 14262 - DNA, 1606 bp, Zea Mays
ttgttgacagcagagtagcagaccaaagttaacaacataatctcacagttatacatagcaggaaaggaacaaaaaagtggcagtcatccaaactttcaggaatttaatatgtactacatagcaataaatataaaataatctcaaccattgaaacaataccaaaatttgagataaaccctctaatagcaaatatattggtaatatgtttggcagctcctataatgctaacctctttctttggtgctgaccaaaatgtatctcacagaaacgccaaagtctaaacctaaaacaagtgttatgaaatactccgtattattaacattaaacaactactgctagcactagcacaaaatgaactagtgcagcttgttgagatcaatttggtgaataacataaagaatccatcaaagttaaattttctagtatcgtcagttcatcacctcagcactagtatgaactgtaaggacactagagtttggaacaaaaccgacgaagtacctaggactaatggtgctgcaatcaaggcaccaaattagtgaagcacagtatggtatccactccatctactcgattagttctgcaaagcagcagggaccagaaatctgttgctaaatccacaagctgctaaagccttcgaccaagctttgaagagtagcaaagccgattcagtgaagcgagacgagaccttggaggagggcgcggcgcggcgcatccccgcggagcattccttttcctcctcccctttgcggcttctcgcagcgctgcgaatcccaatccgcaccgatccgacgcgaatcgatcgagaggcagggggcagcactaatcgaatcgagactagcgccatgaacccgagaggccatcgtagcaacagaacttctctcttcgatggcattgaggagggtggaatccgagcaacatcctattcttctcatgagatagatgagcaagaaaatgatggagctattgatggactgcaggatcgtgtcagcattctcaagcggttgtcaggcgatatccatgaagaggtggagactcataacagaatgctggaccgaatggggaacgatatggatacttcaaggggttttctgtctgggaccgtggacaaattcaagatggtatttgagaccaaatcaagccggaggatgggaaccctcgtcgcatcattcgtcgccctttttctgctggtttactacttgaccaggtagaagacatgacatgctggaaatggtcatctcatcatctgcgtgccgtgccgtatagatagataccttgaaaacccaccgtcctgagtgccaaagtatatgttgatgtgggtgtttcgtcaactctgcactgtacaacacgactacagcgtgcgtgctgggtcgatcctatgttctcttgttgcgggattcaagtttgttgtccgttccttccctttggcatgtcatgtgtatggtatttagtagcataacaacaacaaaaaaactgtataaagaagctttgattgagcactatgtgaggtcgacacgtgtcccgcagcatctggcaaaacgaatccagatgcaaggaatgataatgtgggtgcaccatgaacaagtggtatagttaaatactacgtacg

SEQ ID NO: 14263 - DNA, 1820 bp, Zea Mays
atataccgagtagaatagagaggggagagggctagggttcagagcacgacgagccataacttcaacaagcagcgggcgggtctcgggcggcgcgcgggcgcttggtggacgacgctcaagcggaggcgggcagcgcttgggagtcaggcgtgcgaccttgcggctgtgctcaggcggggcgttgcgtgaagcgctagggagtcgggtgtgcgacgggcggcgctcgttcctcaggcatgtgcggacgacgctcagacgcatggctgtgtcgaccacttgcagacgacgccgacacagatccaggtccaggtccaggttaagtattgttttttggtgtgtggacgtgattcttctagtgagatatgttctgaagcggcaaggtaaaccctcttagtctacttgtttaacttttaaaatatacccatcggtttgaatgatgcaaaactacaataatcttcatgtacttgattgactaatgagttggatatgattcgtattctatttcttaaaaaagtaaggcagaagatagctagattcatgatttggcaaatacaacctcaaattaacttgcctattcatcgattatgttcaggaaataatgtatcaattaattgaaggaagtaatagtagtggctcatctagaactcattcgattcctagttctaactatgaccactaacttttgccttgctagctggctatgtacaagcctgcaacacattcttatgataccatcatgtcattaaatgtcaagggctgagtatccccggacagcagggcctcgactacgcagttcgtagtcgtgacccatcttctccggcgagattttgcccctcagccacaggttttgttggtgagtggagaggagagattagagagaataaactttgcttaatccttccagccggctggttacacatatatatatggccgatcggccctaataaactagagataattactccttgatcctagggatagctatctaatcattcctaacaaccagcccctcccccctaaatcttctccttaattctaggaacttgaaacaaaaagtaaccatgttctatctgtaacaaaccagtgcgtgcgcgcctaaccgcccacgcgtatcgcacgctcttttgcccggcgcacgtcgttggcgcgcctgcgcctggtgtaggtacgtccgcacatgacatatactagagtctaaagtccattgaaattttaaattatatactttcatgtatggatggtgtttggagtgcaaacgtgcctttttatgttccacaaaatcattttactattgatccattccatcttttatactctttaatctattatggcattgatttccttcagttgcgtgtttccattttctgccactagttctatagaagttcactgatgtgtttaaagttataatggttacctagactaggctaagtagagtatacgtattgtagttctactgccttgaacaagaaaattcttgtctttgatgatgtagtttcttggttttttttcatctacaacaaatttatgatttattctcatttccttttgcaagttcatggagcatggttaccaccttggtttgcggcacaatatgctcattacgcggaggttgtcgcaggtcactagaataaacaagggaaacctgctgtgcagaatgttttgcataaggcataaaaaaattagcacaagcaaagaaatgggctaaagctcatattgagatactaagatgaaatgtattcctgttacagagaaaatggttgccctcaagaaaaatgtaggaccttatgtataaaagttggttgacattattacttcct

SEQ ID NO: 14264 - DNA, 226 bp, Zea Mays
gtatgttgttgcgctagaactcttcaatgcagtttccggaagaacatagcctcattttccaatagggcaatgattaatgagtatgacgaactaatggacacatgtcattggattatggcattgctggttgcataacaaacaatacgggtaattcatattgtgttcgtcttgtctgattgcagaaactagattttctgcatctatttggtatcccgggggcatcatt

SEQ ID NO: 14265 - DNA, 1991 bp, Zea Mays
ttcatagcatttccttctctcagtttctttttcttcatatcctattttgagcgagtactttgcagtgattgatcggttacaatctgcttagggatccccgttacaacaagggacttgcgttcacagagagggaacgtgagacgcactacctccgtggccttctgccaccagctattgtatcccaggagctccaggagagaaagatcatgaataatattcgacaataccagttgcctttgcagcgctacatggcactcatggatctccaggaagggaacgagaggcttttctacaagttgctcattgacaacgtcgaggagttacttccaatcgtgtacactccaaccgttggcgaggcctgccaaaaatatggatccatatttagtcgccctcagggtctttatatcagtttgaaggagaagggaaagatccttgaggtgttgaagaactggccagagaggagcattcaggttatagttgttactgatggtgaacgtattttggggcttggagatctcggatgccagtgcttgccgatcacattggatgttggtacaaataacgaggagctgcttaatgacgaattttacattggcttgagacaaagaagagccactggccaggagtacactgattttctgcaagaatttatgactgctgtgaaacaaaactatggggagaaagttcttattcagtttgaggattttgccaaccataatgcttttgatcttcttgcaagatatggcaccactcaccttgtattcaatgatgatattcagggaacagcttctgtggttcttgctgggcttattgcagcacaaacattacttggtggttcattggcagatcacacttaccttttccttggtgctggagaggctgggacaggtatagctgaacttatagctcttgagatctcacgtcagacgaaagctcctatagaggagtgccgcaagaaaatctggcttgttgattcaaagggcttgattgtcagtacacgaaaggagtcccttcaacacttcaagaaaccatgggctcatgagcataaaccactcagcaacctcttagatgctgttaatgctatcaaaccaacagtgttgattggcacatccgggaaggggcaaactttcacaaaagacgttgttgaagcaatctcctcatttaacgagagaccaatcattcttgccctatcgaacccaacatcacaatctgaatgcacagctgagcaagcttacacatggagcaagggacaagcagtgtttgcgactgggagtccatttgatcctgtggagtacaatggcaagatacatgttcccggacaggcaaacaatgcctatatcttcccagggtttggcctcggcgtggtgatgtctggagctatccgcgttcatgacgacatgcttctggcagcatcggaggctctggcccagcaggtcacagaagaaaattttgagaaggggctgatttatcctcccttctcaaacatcaggaagatctctgcccacattgcagccagcgttgcagcaaaggcatatgaacttggtttggcaagtaggcgccctcggccaaaggacctggtgaaatatgcagagagttgcatgtacagccccatctaccgcaactaccgttgaattcggatcaactccagttatgtgcaaatcagcagcagctattccgcagcgtttatctcttgcgatgtcatgtaaatcagctccggttagccttttggatgctagtcagtcatggtgctggtgccgtccttccggacaaggataaatttggaataaagtttgagtcgacgattcctccctcggtactgcgtgttcacctgaacgtttttttgcttcacgcagttgctgttgttttcaacaagtgcttggttgtatgcgtgaaggtaagtaggtaacaccaggaaaggttcttctttttttccctgatgaggacagattctcgtttgcttgaggctctgtttggttaggggtggattgagg

SEQ ID NO: 14266 - DNA, 1013 bp, Zea Mays
cagcaaaaacaaagcgaagggacacgaggaatcgaacccaggccaccagcaaatcgtgttgtggaggtcaatgaaatgtggcgtgccagggaaaaggaactggagttggagtcaaaaatgaaaggcagaagtagcagaagtaaagatcatggtgattttacaggtgagaagcgcaaaagtgaaagaaaccatagctccagctcaaggattgaacaagaagggaccacttatgatacttcgtactcagaccaggaggatggtctcagggatgatgaaattgaaagatttctttattcaagggcgaagcgaggacgtggggctgttggttccaggatggacgagcctggtccataccttgattctctgtcccatcatcaggacaatggacctagcccggacatacgtgtggaagaaaaatgggaacgcagagtacaaggcccagagaagcctccattttggggatgcaagtctctcgatggtcattggcgcttgggcacattggatggaaggccatcaagctctgaaccacagagcaaaaaagaaaagaaaagtaagctggataaaaaggataagatagagaaaaggaaggaaaagggcaagaagaaatccaaacatcgccaccaccgccatcgcagaagcagcaggagtgagtgagtgatgttgcctgttagcagaacagaaaaaaatggacacaacggttctgccatgaccatgagacaagctagctgactgttcctgtgtcttgaaacctgtattgtatggaaacgggatattgtgtaggcttatacaatacaatgttgcgatgtcacatcgtttgttgaagttttatcactttgattaacatctgcaacaggaggttttttcttctctttttcctatactatattgggcgtcgaatattggagtccgaggagcctgttcttcaagcagggcagcctgtcagttggggtttgtagctgaataaaactgtgtatggatgcgtaggccatcaatagctcttagtcatattagtg

SEQ ID NO: 14267 - DNA, 5240 bp, Zea Mays
gtgctcccgtgcgtaagtggctgtcttaagtactagcgtagccgaaagagacggtatgcattttgtaaggaaaacttagtatcctggaatagaactcctctggttctcctattcttctcctcctccttccaggttgctaacagagtggtatcaaagacacctttccttggccgtccgccatggcttctccacccatcgattcagccctcacgctcgccctcgaacaccaaacccgctccctgttgtccgagttggacaaacggttgtccgccatggatgtcaagtgggaatcccgtgtcggagagcttgaatctcaggtctctgcatccagccgccgcctggattccgtcaccaccgacctccgtgcggatgtggagatccagttctcctcagccgccgatcacctccaccagatcgaagctgacgtcaaaactcgcgtcgccgccctccaatcgactatgcacgtcttcgagctgtggcgccctcgcgtggaggcatcggtcgagtccctccactcctccgtcgattcgatccgcgccgaggtctccaagatggggatccgctggtccaccgacgcccgtgtggatggatctggacaacccggtctcctcggtgcgcacgggtctggatccggaagggtccctgctcctgaagaacctccagatcgcccacgttttgggtcctgcttcgagaattactaccgggatagtgggcacgtgcaccccggtgccgacgctcactacccggtcacgggtatgtggagctcccctcactcgccctcattttcattcaacgctcattgtggccatagtcagggtgattggggtcagcgtggcccacttagccgtcactgtggggggttacctaaattaaatttccctacgtttgatggtacctaccctaagctctggcaaaagcgttgcgaagattactttgagatgtatgctactgagacttttgtctgggttaaggtctccaccatgcactttgtgggtgctgcggctcgatggttacagtccattgaaccgcgtcttccgtccatgtcatggcgccaattttgtcaagctatccatgataggttcggcagggagcaacacgaacttgttattcgcaaactcttccacattaagcagacctccacagtccaagactatgttgatcgtttttcagagttagttgatttgttagtcacatatgaacacacaacagacccgttatactataccatgaaattcattgatgggttgagggatgacatcaaatctgtgattcttgtacaacgtcctggcgatctcgatactgcctgctccttggctctattgcaggaagctggggactcgtctcggcgtccggatcctgttcatggcgattcatcttatgctggccgttcgtcgtggaagtcggctgttccacagtctgctcgctgggatccatcgcgcggtttggctccagaatcctccaaaactccaactcagccagcgccaacaattgattccaaagtggcttctcttcgttcatatcggcgtgccagtggattatgccagtattgtgctgaaaagtggaacaagggccataaatgttctccaactgttcaactacatgcagtccaagagatgtgggaactctttgatcatgaccagtcagatactgatcctgatttccaagattcatcagaccagttcgcagtaatgttgtcccaggcagccatttcaaccccagccaaggcccaagcattcagacttcaaggctgtttgcaaggcgtggaattgttgatgcttcttgactctggcagttcacattgttttctgaacaccaacagcgttgcggcaatcactggccttactcttgtgtcgactccgctaatggtcaccgtagccaatggtgaggtccttacatgcacttcagagctggtggaagcagactggactttacagggtgtcccgtttcgcacaacattcaagttactgtccttacctcactatgacgcaatccttggtatggattggctacagcagttcagcccaatgttgatagattggaagaacaaatggctgtctataccatttcaagatcagcttattgtcctgcgtgattgtcagtcattggttcctgctggttcgttgttggaaatccgttccgtgtcctcgacatcgacaccacaacatttattttcagccacgacttctgctgttcctgagccggttcgttccttgctgcaacagtttgatgccttgtttcaacctcctacaacgttgccaccgagccgtgcatgtgatcactccattccattagtggatggtgctcgcccagttaatatacgaccttatcggttgtcccctgcactgaaggacgaagtggaatcccaagtggctgaaatgcttcaaaatggcataattcaaaacagttccagtgccttttcctcgcctgtcctcatggtcaagaaaaaggacaattcatggaggttctgtgtcgattataggcacttgaatgccctcacagttaaatctaagtacccagttcccatcatcgatgaattattggatgaactagctggcgcctgttggttctctatattggatttgcgagctggattccatcaaatattgctcaagcctggggaagagtacaaaacagcatttcaaacccacacaggacactatgaattccgggtcatggcattcggtctcactggggcgcctggcacatttcaaaaagccatgaatcatactttggctcctcttcttcgtaaatgcactattgtgttctttgatgatattttagtctacagccgctcccttcaagaccacttcactcacctacaacaagtattcgagctgctgtcgtctgatcactggaagattaaaatgtctaagtgcagtttcgctcagccccaagtaacttacttaggccacattatcagctcagccggtgtcgctaccgacccagcaaagatccaagctattgtggcatggcctgttcccaagtgtgtgaaggaattgcggagcttcctaggactctctggatattacagaaaattcatacggcattacggcgtgatctgccaacccctgacagcactgttaaaaaagggcgctctgtacgtttggacagctgatcatgatactgcattctgcactctcaaacaagcgatgtcatcggctccggtgttggctctaccagattttaatgtcatatttcagattgaaactgatgccagcgccaatggtgtaggggctgttctttcacagcaaggtcaccctctggcattcctgagtaaggcccttggagttaaatctcgtggtctctcgacttatgaaaaagagtatctagctgtccaacaatggcgtgcttaccttcaacaccagaaattcgtgattataactgaccacaaaagtctatcacaattaaatgagcaacgtctccatactccttggcagcacaaagtgttcaccaaattattgggccttcaatatagagtgcagtatcgtccagggacagaaaaccgggcagctgacgccctctcgcgctatggtcctgctgaaatcaatgcggtttctgttgttatccctcaatggctgactgatatccaacagacttacgattcggacagcaagactaaagagttagtggctaaactagctatcgatccagcagctgttgcccacttctcactgaaggatggtctgatccgttacaagaaccgtctttggataggcgaggatccccacctccaggctaagattgtttcagcactgcattcctctccgatcggtggtcactctggtgtgccggttacctacagccgtgtcaaaagcatatttgcgtggaagaatatgaagtcgttcgtccgttcatttgtgcagcaatgtcagatttgcctgcaagccaaacctgacagggcagcttatcctggtaagctccaaccattacctgttccaccctctgcctggcacaccatctccatggatttcgtggaagggttacctcgttctggctcgtgggactgcatccttgttgttgttgacaagttctccaaatttggccattttgttccattatctcatccatatacagcacactctgttgcgcagctgttcctatctcacatatacaggctccatggttttccagcggccattgtatctgacagagaccccatcttcaccagcgccttttggcgtcagctgttccaactggctggtacggaattacgcctcagttcctcctatcacccccagtcagatggtcagacagagcgtctgaaccaatgcttggaaacgttcctgcgatgctttgtcagcgcgtgtcctaaaaagtggtcctcttggctgccagcagctgaatattggtataacacaagtctgcattcagctttgggttgttctccgtttgaagtgctttatggccgcaagccacgttccttgggtctttcttttgatgctgctgccccagttgccctgtcagcctggttacaagaaagatctgtgatgcaaaatctcatccaccagcaccttattcgcgcccaaactcggatgaaaaaacaggcagataaacaccgctctgaacgctccttctcagttggcgattgggtttacatgaagctccaaccctacgtccagtcttcagtgcttccacgtgcccaccaaaaactcagttacaagttctttggcccttatcgagtggccaacagggtcggttcagtggcctaccgattggaactcccaaattccagcaggattcatcccgtcgttcatgtctcccaactgaagctggcaaaaggttctggtgcagtggtccaaccttcctactgagttagccacatgggaagaccaagacaacctgaggcaatgttatccttttgctcctgcttgggggcaagcaggattccaagggggggaaaatgtcaacaatgagagtatggattcccctacagtcagccgaggcgtaccaaacggcgaaccggaagcagctccagttgtccgcacacgccgtgtctgtcgcgccaacgtccgtcagcaaggaccagagtgggtgcagtgagtcggcatattggtgttgggtctgagcctgcgtgctcccgtgcgtaagtggctgtcttaagtactagcgtagccgaaagagacggtatgcattttgtaaggaaaacttagtatcctggaatagaactcctctggttctcctattcttctcctcctccttccaggttgctaacaaatagcgtgtggaccgcaacgtataac

SEQ ID NO: 14268 - DNA, 577 bp, Zea Mays
aaaagagtccatctcctccctccctggctcggctgtcggctcccttcgccaccgccttcacctccttccctcaccttccagagcccactgttccccggcggcggcagagatgaacgtgtggaactacgtcgtcacggcgcacaagcccacaagcgtcagccattcctgcgtcggcaactttaccagccccaaccagctcaacctcattatcgcgaaatgcacccggatcgagatccatttgcttacccctcagggccttcagccgatgcttgatgtgcctatatatgggagaattgcaacgattgagctcttccggcctcataatgagactcaggattttcttttcattgctacggagaggtacaaattctgtgttctgcaatgggacacagaaaaatcagagctaatcaccaggaaaacaaaactggtgttctctatttcgtatggaaaataatgatttatttgtaacatggatttgtacaggggcagacgcaaggggtgggcaaggtgggccatggccccaccttaattttataacttcttatacctaggtttaaatatacattaaaataaaaaa

SEQ ID NO: 14269 - DNA, 1596 bp, Zea Mays
aatttagaagccaacggctcacctctgctggctgctgctactgcacatggatatcatgtgtgagtttcgtgctggtaagatgtctcatgagggaacacgagtggttccagacacgcgcaagggtcttgtccgcgttggtaggggtgaagagggattagtccattttcagtggcttgaccgtggacagaacatagttgaagatgatcaaatcatctttcctgatgaggcggtctttgagaaggtgacagaatctcctggagggtttacatcttgaagtttaagcaagacagcagaaaattcttcttctggatgcaggaaccaaatgctgatggggactcccagacttgcatgcaagttaatgcctacataaatcgatcattagatgctgaggctgatcttcgagtacctattgaagcagaaatgtctgaagatacggctgatgatgatatctcttccagagctgggaatctagttgagagcatgaccgctgatttggctggtgaagtgacgtctgctgctggacctgtacgcttggaggatctgcagagaattctgagtgcaatacagtcatcaggtgctgcagctgaccctgatgctggagtaggactaggagacatcttgaagcctgatctggtcttgccattaattgaggacttgcccattgaacaattggcatcacatcttccggagggtggctcatggagtcctggtgatatcgttgagcttctccaaagtcctcctttgcgccaacaattagatgcattcacccacgttctgcggactgggcagatagatcttgctcaatttggagttgaccctgacaaatataagttcacggtggtgtcgttcctggaggcattggaagactcggttggaagaggtgcttctgaagctggagacaaggatgcagaggtcgagcgaggcagtggaaatgatgccatggacgagagttgatatccgtgtactaggtgtctgaattcatacgtgacaagtcttgtgttgttgttttgggtagaacgctagctcatagtattttgggcttctggcacacagaaagcaagtttctggacaagttttggacattattgctgctgtgagatgtagtgctaggcaacagatggtctggttggtggatcatggattccatggcattgagaagcttgcaaggctagattgattgtgttctgcgggggtaaatcttgcgtggcgttttgaacgtggattggtaaacagaatagcatcttttgaacgtcggttgttccatgtccacagctgatggtggtggcctcgaatgtcgtactgtacgtccatgtcgatgattccgtcgcaggagcctactactactatatccctgttctatgtaagatatgtgtactccagtacaaacagtatatggacagctcaggatttttttatattgttctacacatacatctttagatgatttttatggatatgatgagtcaaatcttgaggttagaacattatcgaattcataacttacctccaatgacgattgtatggcccctagaatccatttatctcattgagattattgaaatctttactgctttaaaacactagttttatgtgtca

SEQ ID NO: 14270 - DNA, 3559 bp, Zea Mays
tccgaggagaggacgcctgtgattgcactacacaacgtgcctctcgctcgctccccacgtcgctgtgagtgagatcgatcagacggaaccaccagggcaggagcaagctgctcatctccactccatccactgttttattggcgggcgcactgcttctgcgaccagagaacggcctcgctcgtcgtcgtgccactgtgccagtgaggaggttgatctcaggagctctgatgtttcgagtgattcccgtgcaaaggtgactgatacttcataccgagcaatcataccagagatcgttgacgttctcagaactgtttgtgagacgcacaaactgccactggcccagacgtggataccctgcatctgccaggcaaagaggggaagccgccacaccgatgaaaaactcaagtattgtgtgtctaccctggacgaagcgtgttacgtccgcgacctgaatgtaaatggctttcacgaagcttgctctgagcatcatttgttcagaggtgagggtgttgttggcagggcctttgcaacgaacgagccatgtttctctgaagacattaccgcctccagcaagatccaataccctctctctcatcatgccaaacttttcagcttaagggctgcagtggccatccggttacggagtatcagcactggaagccttgactatgtcttggaattcttcctgccagtggactgcatagagattgaagagcaacgagccatgctgaattctttgtccattacaatacagcaaacatgctacacacttcgagttgtcagcttgaaagagctggtggatgaaggatcaattgaaacaagtgctctaactccaccagaatatgacaaatctatgcatgaaaacatagatgaggtttgtagtggcattggtgttcctgcaaggacagcatcactggaaacttccgaggaggtgtcctcatggatagcaagccttgtgtgcgctcaaaataagggagtgaaagaaatggatggtgacctgccatttggattcagcaagcaagaggatgaagggtttagtgttacagctggctggcatacctctccagtaatagagcctgaaggtagcatcttttcaggcttcaagcagcatgaagaatacaaggtcaaggaggtaacttgtctcagagatccaagctcatccaacttggaaaaaactgtagaaaagagacggactaagatggagaaaactgttagcctggaagaacttcggaagcattttgctggcagcctgaaagaagctgcaaagaatttaggagtgtgccccactacactgaagagaatatgcaggcagcatggaattaatcgttggccatcacggaagattaagaaagttgggcactccctgaagaaattgcaaatggtgatcgattcagtacatggtagcgaaggaacggttcagctcagctcgctctatgaaaactttaccaagaccacatggtcagaaagagagttacaaggggatgccacttatccattgtcagaggaaaaaggtcccttggaaccttctgttcctgatcggtattgcgagggcagattcacctcgcatacttctggttctaattccctctcaccctcttgtagccaaagctcaaattccagccatggttgttccagtggttcgaaatcacaacaacatgtcagtgctcctcaacttgcagtaaagaaagaagttttcatggaggagaatcagagctccacactactcaaagctgcaagccatgctgaactgcagatgcttcctgaagaaagacttgtcaccctgcctaggtctcatagccaagtgcttttaagtgaacaaaagccagtggaaaatataacaggtatgcaaatgtctaagcctgattctctcaagataaaagccatgtacggcgaagaaagatgtatattccgactgcagcctagttggggatttgaaaagctaaaagaagaaattctaaagcggtttggcattgctcgggaggtgtatgtggacctcaagtatttggatgatgaatctgagtgggttcttctaacatgcaacgcagacctgcttgagtgtattgatgtgtacaagtcatcaagtactcaaacagtaaggatcttggtacattctagtgaccagtaagtgcctgttcctttggtcaaactggtttgtcctgacaatggcgcaaagctcatcaggatgctgaagaaagcatacaatctctctttgaagtaaagtgcttgttgacatcgcgctcagtttcaagtcataatcatatatgcaaaagcagcatctgtaaatacctacactcgtgttgtcatcccgtggtcaagtgcctagtaagttctgtatgttgctgtttggtggctgtgtggcagaattggagagaaagtgattgttggtgttccctgtcagctcttgggattggtttgtatgcagtaagctgcatacagtctttgatataacagaagatgggacttctgtacctctagttcagtttgttaacagtacaggtagttcgttgaatgtaacaaactagtgtacaatattgtaggccggagggtggaatcagtaggaatttgtcgatatgaagctttggattaggttaagtaatcacgaccaagttgcatcgcgcttgtaagttcttttggattaggttttgaaattcaaaaactcgccaaaaaaccacaagctgtggaaagtggaatcaacagaagcatgcccatgccgtcatgtgtcgttttagtgggcacaatgaaatgtcttctcaccagtggcaaaaggtgtcgagcagagagcaactggctggagcaacactacgagctcatcacctggtcaaaatgagatttggttggttcaaggtcaatgttactttttcatgttcttgcttcaaccatgcagaaggggtggtggttttaggtatcctgaataattccacagttagaaagcaggagatgtcttagtctcctagacgacaatgcagcatagatattttcttttgtttcgctcttattaatttttgtccagcagtgtatttctcttgtgttttttgaggtagccttgtgtgtaatctgtcctcggattcgcagcatgtgtgtctgtttcataactcatagtctgcatgtatgttgctacgactgtggccatcctgtccgattccaagaacattgctgaacctatatactgctgtaataatgagggatcaatcgagtaaaaatgtgtactctgtggcgattagttgaatgaagctgaagaatcaatgccagtactgttctgagtcagcagctatagccttgctcaagccaagcaacgaccatgccgcatcagcaaggcctggaaaaatcatggtgcggcgacgaccggcgcgccccgggccgcggcggcaggtcccgctgccccaccgcccccctgctgcagggcctcgatgtcctcgagcgcggcgacgacgtcgtccatggaagggcggctcttgcggtcgctgttgaggcacttgccggcgagcctggcgaccccgagagcgcggccttggtgtggtactggccgtccatccgctcgtccatgaggctcttgagcttg

SEQ ID NO: 14271 - DNA, 1984 bp, Zea Mays
cttgctgaaaatgaaaatcaggctaaactcctgaatgtgcgggatcaccttgatgcattgagttcacatacttctgcccatgtgtaccctgccagtggaccggctgtaccaagtaatcaaactaatgctgctacagaaccatccgaagatgtccagatgagggagaacataaccacgccaaatggcagtgctgtcactgtggatccaaatgcatcaacacatgccgataggctgacaaaaatcaagggtatactgtcaggagagacatctattcagttgacgctgcagttcctatacagccataataggtctgatcttcaaattttgaagactataaagcaagctgtggaaatgaggaacagtgtctgccacagtgcaacaatatgctccaatgcaatcatgcatgcagggacaacagttgataccttcctcagagaaaacttggaatggctaggtagggcaaccaactgggccaagttcagtgccactgctggactaggcgtcattcataggggccatcttcaacaaggccgcgcattgatggccccctacctaccacagaatggtgctggtggcagtggtagcccatactcggaaggaggtgccctctatgctcttggtttgattcatgccaaccatggtgaaggaatcaaagagtttcttcgtgagagtcttcgcaacaccacttctgaggtggtccagcatggtgcttgtctgggactcgggcttgcagcattaggtacatcagacgaggaaatatgcgaggacataaagaacattctttacacggatagtgctgtggctggtgaagcagctggtattggcttgggtttgctcatggttggcacggccagtgagaaggccacagagatgcttgcctatgctcatgatacacagcatgagaaaattatcaggggcttgtcacttggaattgcattgacggtgtatggcagggaagaagaagctgacaccttgatcgagcaaatgacgagagaccaagatcccatacttcgttacggcggtatgtatgcattggctctagcatacagagggactgcaaataacaaagccatccaccagcttctgcattttgctgtgtcggatgtgagcgatgatgtgcgaaggactgcagtgttggctcttggctttgtcctgtacaatgagcctgaacagacacccagaattgtgtccctactatcagaatcatacaatccacatgtccgttacggggcagccctggccgtcggaatctcctgtgccggatcaggattaagcgaagccatctccctactggagcctctgacatcagacgtcgtcgacttcgtgcgccagggtgctctcattgccatggcaatggtgatgatccagaccaatgaatcttacgatccacgcgtcggagcattcaggcgccagttggaaaagataatccttgacaagcacgaggacaccatgagcaaaatgggcgccatactggcttccggcattctcgacgccggcggcaggaacgtcggcatcaggctcaagtcgaggtcaaagcatgacaggctcactgccgttgtcggactagctgttttcacccagttctggtactggtacccgctgacctacttcataagcctcgccttctctccgacggccctcatcggcctcaactccgacctgaaagtgccgacgtttgagttcctgtcgaacgccaagccgtccctgttcgattaccccaagccagcgactcagcagactgcagccgcatctgtcaaggtgccggcggccatcttgtcgacatatgctaagtccaaggctagggcaaagaaggacgcagagagcaaggccaaggagaaagcagatgactcttccaatgcttctacttcgatgcaggtggacggcgccgctgcggagaagaaggctgccgaacccgagcctgcgttccaggttctgacgaacccggcccgggtcgttccagcccaggagaagttcataaagctct

SEQ ID NO: 14272 - DNA, 1676 bp, Zea Mays
ccaggatgttggcctttctccaagagcaactactcattctttggttagagttgcaaatgttgactggattaagataacagcagaagagcaaatcagtcttatggaaggaagcacaaaagatttccaaatattagctggcacccaagatggacaaatatttggtgattctcagttcaaatatatggacattgagttgcatcttgacgatgagattctggagcttattggtccaagcgaatcaatggatggacccgaattttcaattaaagctgcaaaaatcggcattacatctctatatgtcagtactaaacaaagctctggacacagagttttaagtcaggttgtcaaggtggaagtgtatggaccattgcaaatacatcctgagtatatttacctcactccaggcgcctcttttgtgctttctgttaaaggtggtccaaaaactggagtttccattgaatactcaagtctgaacatgggaattgtagaagttcaaaataccactgggaaactatctgcaaaatctgtggggaactctactgtacgtgctgctgttttagcaaatggaggtatcttagtctgtgaagcttttggaagagttgaagtggatatcccagtggctatgacattgaatactcaaagtgaacgtctttgtattggctgtagcatgccagtttatccatctctgcctaagggagatctattttccttctatgaaacttgccaaagttacagttggatgatagcagatgagaaggttgtgacattccaatcagctaaatcctggcgatacagacttgaccaaggactatattcagatggaaaaaagagtccatggttttccaatggcagcagcaaattttttatcagtcatatgcttggaaggtctgctggcaaaaccaaaatttccatttcagttgtttgtgatttcttgctacctggcacctctggatctgttgtatcatacaatgcctccaagatcattcttgtggttccagatcctccccttgcacttgcgctaccgatgacttggttattcccacccttctataccactatgagccttttgcctagatcagcaaattcccttggggaaccaaactcacttgacctggagagctccgttgggtattctctgctaaggggcaatggtaggataattgatggaagtaaaattcagactggagaaagcaatacagttgattgtattcaagcaaaagatcactcagctgggagaacggaaatagcagcatgtctacgagttgctcaggttgcacaagtgcgggtagctgctgcagaatcatcaatccagattgtctatctatctgtaaacgataaagttgaattggatataaaatatgctgatgaattaggttatattttcaacgaagctcatggagtagtccctgtaaagattgagacaaattatccagatgttgtttcggttctcatgccaagagattttaatggtacatatgacacacgtgaacgttttgttcttcaggcgagaagtcatggaacagctcttgtaaggctccacacaaacaatgtccctaacaaagtggatttcataatggtatccgtaggagcacaaatatatcctagggatgtgatccttcattctggccagcacctgaacttcactgttatcggagacagtcataaacatactgctg

SEQ ID NO: 14273 - DNA, 2084 bp, Zea Mays
atatgcctcaggccctcagcacaaggcccgtgttcgtgtccgcaccctcggccgaacagttccccgagtccccgactgctctctgtctctctattggcgacgactgggctaccgccgccacaggcgccctacgccaggtgtccaggtctcgggcccttctccggcaccgagcacccaccagcggaatataccatggaggtcaggcccatggtagctctgcgtgccgccctagttggtggggtagcggcatttgcgaagatcggtggggcgatgaaagccgcaggcggtgtcaagattggtgcagccgctgcagccgtcacggctgcaacatcagctgccatatcgggaaaagacgcaaaagaagacacttcaaagccggaaacgaaatgatatgacccatggattggtcgacaagtatgaaatcgcctctccagaggtttagaagagagagggtgccatagtcaataagttacaggagtaaattttgatgctccgtgtgttttttatctcgggaataagaatgacagtacagttttccccagaagtatgattttgtgttgtgcaacagtttcggctgttgaatgcttttagtcacactgtctgaatggcttgatttctgctgtgccacattctggggcgcgatgcatctgtgatctgttgccatattctgtttgcacagggagatcctgaaggccttgtgcagtctcatgcgtaaggcagtgcatctaagatctgcttgccaaattctgtttgcacaggaagatcctgaaggccttgtgctgtttcatgcgtaagatcctagtgatctacatcggcatctgtatatttgaagtatctcaaactgtagaacgctatggaagacattcttatgatatgttgtatgctgttgcgaaaaccatcgtgctatcccctaactaccagtgtcttttccttttaccatattataaggaagagggagaaatagtatctcgtatgggaaccattgctgcggagttaataaaccatccttcctatcatgtccttcctagtgacgattcaaacccaccaaggttgcttttatggcatcttgatccatcaattattaggcttgatctctcagtgatgctcaaggaggggtttgagttgtgtgctagaacttcacaatgcattggtatcatcggcactagacattcttctcaagcctatgccatgaggaatatccatagatttggggcagagatttcccttttcacatgcttacttcctaagccatcaaagaaacttgcttgcaatactaactggacccttatcttgtacatgattattagttttcctgtttggttcagttttgcaactgctttacttttctacagagaaggctcacacgattctttatcagaaacattatccaaagagccaactgctgaatcaataagtgacgtcagtcttgttcagagggcagccttttacctttcttgggtgctatgcccttctaatgatgatcaatgcgagatgctatcaaacaatatattggaaatatcacattcttgggctaggaacaacaaaaagtgcctgagctaccaaattactatgaaccataggaggaaactgcaaatacccacagctgcgaagtcagagaaatttcatgtgccaataaacactgcagctgcattgatagctgagagatgggctttgattggagcatatctcatctttatctggcttgacgtagttgaggatatgtcctcattgatatttggttgcgaagatagatgtcatcgttctgtcagccaactcagaaacaagactgccccataccctgctcaaggttctaggtttgcacggctggctcctaatccagacacccaagaccaccagctgcgcatatatcaagcgaatggactgccgtcttctctgaacacactgctagtgctagtgctagtttcttctcgatacatggttctgggaaatgaagaaagaatagtctactctgaacgctgcacgttcccactgctagtgctagttgagacgccggagcacaaatggactgccgtctgcaggaaactggtgagcggctacagatggaacaggaaactgctccacaa

SEQ ID NO: 14274 - DNA, 2579 bp, Zea Mays
agcacacggacagaggatagagaaaacagagtgcgacgccgacgaagagagagacagagagcaaaacccaaaccctaacaatcatttgcagcccccggcgtctcgagaacctccaaggaaccatccacaggagaaggcgcgagcgcgggtgtttggatcgggggaggcaacgctggcggctcgcggcggcagcaggtgatggcggatccgcctagcggtgggggatctagggcttgtgtctgcagggagagacaggtcgaggaggcagaggcgggtctggggctcgggagaagagaacaggggaggaaggagggaggatgctgagcgtggttcgggtacacctgccgtcggagatcccgatcgtgggctgcgagatcacgccgtacgtgctactgcggcggcccgacggtgcagtctccaccaacgatgtccccgaaaccgcgcccgctgatggccagttcatgcggtacagatggtatcgcatacagagcgaccggaaagtccctatctgcagtgtgcatccaatggaacaagcaactattcagtgcctcggttgtctcaagtcaaaaatacctgttgctaagagctaccactgttcagccaaatgcttctctgatgcatggcagcaccacaaagttttgcatgaacgagctagtagtgctctaaatgaaaatggggctgaagaagaggagttatttggcagatttggcagtggtggttctggggttctaagtactgctggatctggttctttgtcaaattttggacaaagccctggtgttaataatggacctgtgcctttctatccctcaggtaccgataaaaattctggagaaacttggtttgaagttggacgctcacgaacatatacaccaactgctgatgatattggacatgcactaaagtttgagtgcgtagctgtggattcagaaaaaaagtctccaattggaccctcaacctcaatcatgacatcacgtgtaattcccgcgccaactcctacccctcgccgccttatccaagtgaatggggatgttttaggtcacttggatttagacagccaaatttcgtccttagggacattcactgtgttatcctacaatattcttgctgatgcatatgctacaactgatgcatatagctactgcccaacatgggcacttacctggaattatagaagacaaaatttgctgcgtgaaattattggttatcatgctgatatcatctgtctacaggaggtacaagtaaaccatttcgaagattttttttcacctgagcttgacaaacatggatatcaggcgctttacaagaaaaggacaacagaggtgtattctggaaatcctatggccatagatggatgtgctactttttttcgtagagacaagttttcacatgttaaaaaatacgaggttgagttcaataaggctgcacagtctttaacagatgctattattcctgctgcccagaaaagagtggctttaagtcgattgattaaagacaacattgcactaattgcggttttagaagccaaatttggtaatcatggagctgaaaatcctggtaaaagacagctcctttgtgtggcaaatacacatataaatgtccatcaagacctaaaagatgtgaagctatgggaggttcataccctcctaaaaggattggagaagatagctgtcagtgcagacattcctatgttggtctgtggagatttcaactcaacccctgggagttctccacatgcgcttctggcaatgggcaaagttgatcagcatcatccagatctggcaatagacccccttggaattttacgccctccaagcaagttgaatcaccagcttcctttggtcagtgcatactctgcatttgcaagaatggtaggtgttggctatgatttggagcatcagcggaggacagaccctgcaacaaatgaaccactcttcacaaattgcacaagagattttactggaactattgattacatattttacacagcggactcattgacagtggattcattattggaacttttggatgaagaaagcttaagaaaagacacagctctcccatcccctgaatggtcatcagatcacatagcactcttagctgagttccggtgcaagccaagaatcagacgttgacacattagctctccaggtcttgtagaaaaggtcattgtcatcatccttggtggtggaacaccgttccatgtgggaacttgaggcagggcgggaacgcgggctctcggggaagcaaacaaccaagcagcctcaggaaggggaagaggcttgtaacatttgatttttaccctcctacatttgagctcatgatacttaagatgcccctgtgtaccattactttctatagaagaaaaatacttgagagaaatatttgaagggttataaggcccgtttttcttttttgttcactgcggtcgcgttcgattccttttggctgtgtccatgctcgctgcctacaatacgcagccacgcaggagtcctcgacttctgtaaattctgtaccaatgtaataccagttccagtttttgttttccacaatgttgctggcgctggctcaggcactca

SEQ ID NO: 14275 - DNA, 76 bp, Zea Mays
cggcaatgtactcggcttcgacggtagaaagagctactgaattttgtttcttcgaagcccaagacaccagggatct

SEQ ID NO: 14276 - DNA, 659 bp, Zea Mays
ccaaaatatctatcataagtacctgaaggctgacaaaattaaagagcaatccaattgcaaggtggcacatctgtcaaggtgcaatcaatgacatttccttttcaccggatggtgcttacttggcaactgttgggcgtgatggccatttaagagtatttgactttgctaaagaacaactaatatttggtgggaaaagttactacggtgcactgttgtgttgctcttggagtgcggatggcaaatatttgttatcaggtggtgaagatgatcttgtgcaagtatggagcatggatgatagaaagatagttgcatggggtgaagggcataattcatgggttagtgcagtttcttttgatccgtattggtccccaccaaattctgatgaaacggaagaaaatgtcatgtatcgctttgggtcaattggacaggatacccaactgcttctctgggatctggcattggaagagattgctgtccctctacgccatccgtctggtggctcaccgacattcagtagtggaagcccatctgcacagtgggataatgcgtgccctccagccggtgttctacagccttctccacggatgcgagatgtgccaaagctctcacctctcgttgcacaccgggtacatgtagatcccctatccggcctggaattc

SEQ ID NO: 14277 - DNA, 1609 bp, Zea Mays
aacgaaacgggaacgaatcgccgtgcctcccctatcgctggtatccgttgtccagcactccagcccccgtccgtttcccacgaattccgcgtcccacccggccacactttctctacgagcgccccccatctcacccacccaaaattaaaatcctcccggaaatcagagacgcgaatccctcgccccaggccccgaaacctccgagttctctcgccaattcgatccgcctcaccgccgccgcccgtccgccggtcggccttgactgctccgttgcacgtggcggttcgcagcgcggaatctaccttgtgttgagagatccggggaaacccttgttcccggtcgttccggctcgaatcttctgcggactggcaatgtaagcgttctccatcggagggcgacgatctacggggcggttgttggcggggtcgcgggaatggagcacgtgttcggagggaagtttaagcttgggaagaagatcgggagcggatctttcggcgagctctatctcggcgtcaacatacagagcggcgaggaggtggctatcaagttggaatctgtaaaatcaaggcatcctcagcttcattatgagtcgaaactatacatgcttctccaagggggaatttgtttgttttccaaacttcagctggaattcctcatttgaaatggtttggggtggatggggagtacaatgtcatggtcattgatcttcttggtccaagtctggaagacgtattcaaccagtgcaacagaaagttttcccttaaaacagtacttatgctagctgatcagatgataactagggtagagtacatgcacacgagggggttccttcatcgtgatatcaagccagacaatttccttgtgggcttaggtcgtaaagcaaatcaggtttatatcattgactatggccttgcgaagaagtatcgggacctccaaactcataaacacattccatacagggagaacaaaaacctcacaggaactgcacgatatgctagtgtaaacacccatcttggagtagaacaaagcagaagagatgacttagagtctcttggttatgtgctgatgtacttcttaagaggaagccttccttggcaaggcctgaaagctggaacaaaaaaacaaaagtatgacaaaattagtgagaagaaaatgctaacctcaattgaggccctttgtaaatcttatccatcagaattcattacgtacttccattattgtcgctctttgcgttttgaagataagccagactatagctatttgaagaaaaatttccgggatttattcatccgtgaaggttaccagcttgattatgtatttgattggactgtgtcaaggcaagctgtggacaataacagattgcgactgagcgggaagacaggtggcttggtgggaccatctgtggatagggctgaacgagctgcagcaagacaagatgttccagatagattcactggtcaagctggtgcttttgctagaagaaccggctctggttctggtcaatacggagaacacacaaagcacaggactctgttggattcacttatggcatccaagatgagtctggtggcttgtgctcatgaatgtgggcaggagaagggccaatgtg

SEQ ID NO: 14278 - DNA, 677 bp, Zea Mays
gatagagtaatcggacggctaggtagtaccacatgccttctcgtcacaaatcgactagggcgtctgagactctgagacacaggaacagaaccctctctgcgccgccgccgccgttgcagtcgcggccacatcgtcgcctatccatccccaccgctcccactgccacgattcacaagaggtgtcgagatgtctcagaacaacccctcccagctcctcccctcagagctgatcgatcggtgcatcgggtccaagatctgggtgatcatgaagggggacaaggagctcgttggcaccctctgcggctttgatgtctacgtcaatatggtgctggaggacgtcaccgagtatgaatacactgctgaagggcgccgcattacaaaacttgaccagatcctcctaaacggcaacaacatagccattttggttcctggtggttcaccacccgatgtgtaatgagcttttgctccccagagtaaccattcgaggcgaaggcatctccatggactttgcacgttattttggcatggaagctgccttctgtatcgaacttactgacctgaagtagtgtgcttgcatagctgtggttatatgattggctatgctaattctgtgtatgtctgctcgccatcattgtactgcaatgtgaattccaggtaatggattatgcagtaaaaaca

SEQ ID NO: 14279 - DNA, 156 bp, Zea Mays
  misc_feature (155)..(156): n is a, c, g, or t
gggctaagaattatgagctgcaggaaccagcgacctgccatttgctttccctaagtacactttcccctcggcgctcgcgctccaccgccggccatcctcagcggaacaggaaaaccgtgctgtttccccgcgctgcttccggtcgatggaattcnn

SEQ ID NO: 14280 - DNA, 2320 bp, Zea Mays
cccttctctccctttccccctgtgcgaaaaaccgagcgctccaagccctgattcggagatgaacgcgtccaggaaatccagccatctctccagcaaggacagtgcagagaccgcgagggatatcatcaccacgtccggccaaatccaacccctcaaaatcccggacgctgttgctgcgctcgcacaggctgctgcaaaggcaaatggtgagaccgagaaatatcttccagggtggccgttgttctcgcctcctaaggtgcagttggacaagtgtaccaagtgctccagagaattctgttctgcaatcaacttccggaggcacacacgtgttcatcgtagatccctcaagatagatagggattttccaaagaatagagaccttctcgctgcattctggaataaactcactgtggatgatgccagcaaaattttgtccttgacaggtgttgttattgagggtgtaactggttcatcaattttgacagcactgtcatcatggatgtgtaaaccagggtatgcttcgttgccagttgcatatgccagagctggcagtgagcttctggatctaattcaagcaaagccttcaatgcatctgcctgtttcatcggatgaactatttagtttgctcgatgaagcaagtgaaaaaacatttctttgcacaaatacagctgcttgtatacagaagtttttatttgatggagaggtagaaaaaattgcaactgagttgaaaaatgttgtttcgtgcgctagttacatgcttgaacaaaagctgcttgaagcatggtgtgctgataagactgctgaagcattaagatgccagaagttgctggaggatgaagaggaagctgctcagaaaaggcaagccgaactgatggaaaggaagcggatgaagaaacttaggcagaaagaacagaggttaaaaaacctcaaggatgaggatgcgacagttcagtcacctgaaatcatggatgatgcgacatgttctactgccattcaaagtgtgaattccatttatgatcctgactgttttgagcaagaagaatcgcagtatcttcaatttccagcactaattactttggaaactgacaatgattttaatgtggacctaccagtagaagatatcagttgtgatttggggcctgaaatggataaaggtgttgtattaaggcaacaagttgtttcaaggcatcatttaggcagaacggagaagcttgctgaaagtagcattttatctggttccgtagttacttcaaagcatgcagctttagcaaggccttcaaattacaaggatccaaatgtctgttctgcaccaagtagaaacaaaacttgtgaattgaaactacggtctgagattgaagaacagtgccaaaaacatgagttagatgtagatgaacgtggcattggtcctagcaaaaactctcgtgtgctaataggatctataattgtcgcaattaaagattgtagtgaacacttgctggacttaggttccaagaatgacccagtacctcccaatgtaaagacaaagaaacatgcatcagtcaaggtggtgcaacaagttacccatgagggaaacagaaatgaaggtgttcctgatagtgataaccgttctagcctcagtgttactacagatgaaatcagttattcaacctgctgcgatgcagatttggcagtggatgaacatttacaatgcaccacgttttccagtgaagaagcgacagcctttctttctcaaagatggaaagaagcaatagccgccgatcacgtgaaacttgttgtgtcctgaaaactaaaggaatggcagaataaagaaattctgttgagggcaacagcatggaagctccggccgacttgtcgccggatcccacagccctacaacataggtggttcttatctagcctgcagggtgctatgaaagtttggatgtcaagtttgtgttgcggcatgaatggttgtaaaatggcaggtgcattttgcagctgatttgagattgaagcagagggttctagttttacaaggggacagcttgtgtgatgggatctgtttttggtaaggaaaaaaaagagtgatttgaataatggtttggtcgcacaagttcctaatcttttgtactcgttagagtctgctaaacacgaaatgcatgtgtgttgaacatgttgtgcttgcgggttgcggctttcatattgtcccagttctttctgctgtcagttcacgtaactcgcgttcattttgtatcgcttcgtgctgtataacccgtactatttgcaatctattctggaagtctgcagaaactaagtaatttatagattgaactatttgatga

SEQ ID NO: 14281 - DNA, 1292 bp, Zea Mays
ctgaattaaagctctgtgtttgattggccaacttcatctttgaaaaattcaaggtggcacattactaggtcaaacacttcaggtcctttgactactcgttatgagtgccgcaaagtatttccttgttctgtaaggccatctgcatcttactctacacaagcttcagaccagaagggaaaacaggaagggaaagacttgtcaaatgtagaacacccctttgatgatattacctacaatatacctgagaagccagtgacatttactgaaggtgcttcttatagtcttgtaatactcgccgggctcggaattgcaggactggctggatatgctgtgttcaaagagcttatatttgagccaaaagagtacaagatatttgggaaagctctagcaagaattcagagtgatagtcaggtcacgtcaaggattggccaccctattactggatatggccaggaaactagaaaccgtgcagctcggcaaagaattccaaataagatttggacagatgaggatggtgttgaacatgtggaggtgaactttctcatccgtgggccacatggagctggaaaagtgtattcagagatgttcaaagacactgatcggacgtggaagttcacataccttgttgttgatatcgtgtcaccaccacatgcaaaaacacaactgatgttagaatcttacttaccagcataaggatgcaggaaacagaggcagttagcagtgccatgacatctccgagattttggcacaaatgggaagctctgatagaagtggctaaactggggatttgtgaacaagtctaggcaagttgggaatttaggaacaagattgtcataatgtactaccatcaaaccagttttgtggagtaataaacggttcttacattactagaagcatatctgaaaatgtttcgatgtttcttttagttacggggaaaacccctgcatgcctggatgagggtattttttgttagttctcatgagtaccttgtatcgtccaaatacgtgggctaatccagcaagtcatcttttgtaaaatcatagcaactcttattgtatctggatttggtttccaattaactcattttgaaatgctcgacttaagggctaaggcatgggtataatcttggctgttaggaacatctctctctctctctctctctctctctctctctctctcttaaattaaagccttaaaatgtatggtatgaaaatatattttacgttatgtctaactatactaattttatgtcacaaatatgagtctttctatagaatatgtgaaacttaaaa

SEQ ID NO: 14282 - DNA, 2568 bp, Zea Mays
agccttccgtggccgcggtgcagtgccgctcgatctcacacccgctcgacgtggtggcccgccgttcagtcaccattcgtccgctgcagccacgaccccataaaagcccaccaggccatcacaagtcagagccactttcgcaagcccccttccgaccttgcccctgcggtctcccgagtcccgaagcatccccttccaaaaccctcgccgcgccgcagccacccttgcttccgcacgctatcgcccgggaccagccatctatggcggcgtccctgctcctccgcgccgtgcgccgaagggagcttgcgtcccctctcggatccctgggtgccagcatacagtcaacatgtgttgccaacgtttgctcaaaatggggaagttttgcaagacctttcagtgcaaaagctgctggaaatgaggttattgggattgatttggggacaactaactcatgtgtttcggttatggagggaaagaacccaaaagttattgagaatgctgaaggtgcgagaacaacaccatctgttgtcgcatttactcagaagggtgaaagacttgttggaactccagccaagcgccaggcagtaaccaacccccagaatactttctttggaacaaagaggttaattgggcgacgcttcgatgatccacagacacagaaagagatgaagatggtgccatacacaatcgtgaaggctccaaatggtgatgcttgggttcaaacaacagatggcaagcagtactcaccaagtcaggtcggtgcatttgtgctgaccaagatgaaggagacagctgaatcttaccttggcaagtctatctcaaaggcagtgattactgttccagcttatttcaatgatgctcagcgtcaggccacaaaggatgcaggccgcattgctggccttgatgttgaaaggatcatcaatgaacctacagcagccgctctgtcttatggaatgaacaacaaggaaggcttgatagcggtatttgatcttggaggaggaacttttgatatctctattctggagatctcaaatggagtttttgaggtcaaagcaacaaatggtgatactttcttgggtggtgaagattttgataatacactattggagttcttggtgagtgatttcaagagaactgagggcatagatctgtcgaaagatagattggccctgcaaaggcttcgtgaagctgctgagaaggcaaaggttgaactttcgtcgacttctcagacagaaatcaatctgccattcataacagctgatgcttcaggggcaaaacatttgaacatcacactgacaaggtcaaaatttgaatctcttgtacacaatctgattgagagaactagagatccatgcaagaactgtttgaaggatgccggaatatctactaaagaggtggatgaagtacttcttgttggtggaatgactagggttccaaaggtgcaggaggtagtctctgaaatctttgggaagaacccaagcaaaggagtcaatccagatgaagctgtggccatgggtgctgcacttcagggtggcattctccgtggagatgttaaggagcttcttcttcttgatgttactcccctgtcactaggtattgagacgctcggtggtatcttcaccagattgatcaacagaaacactacaatccccacaaagaaaagtcaggtgttctcaactgctgctgacaaccagacccaggtaggtatccgggtgttgcaaggtgagcgtgaaatggctacagacaacaagctccttggtgaatttgacctcgtgggcattccacctgccccaagaggcttgcctcagattgaggttacattcgacatcgatgccaatggaatcgtgactgtctcagccaaagataaggctaccgggaaggagcagaacatcaccatacgatcctcgggtgggctgtcggaggctgacatccagaagatggtgcaagaagctgagctgcatgcccagaaggaccaggagcggaaagccctcattgacatcaggaacaatgccgacaccaccatctacagcatcgagaagagtcttggagagtacagggacaagatcccggcagaggttgcatctgagatcgaggctgccatcgctgacctccgccaggagatggcctcggatgacatcgagaagatcaaggccaagcttgaggctgccaacaaggctgtctcgaagattggacagcacatgtctggtggtggctctggcggctcgcagtcaggatctggacctcagggtggcggcgaccaggcgccggaggcagagtatgaggaggttaagaatgaaacaggtcacacgacattgtcatggcttttattgcatatgaagccttgttctgcccgatgtactcgcacagcgaaaaccatcggcgagttctgttaatgagttgaagtatatttgttcctgtgttttgactattggtgatattaagggtggcaacaactgtgactttggcaatgttctgagaacgctaggtcagatcaaagagattgtatggtacttttgtgaagagccgtctcttatattttttaagtatttttttagttagcttcacaga

SEQ ID NO: 14283 - DNA, 200 bp, Zea Mays
caggttataagtttgttctgttgtggatggtgctaagtgccggtgggctcggccttcttatataagatatccctaccacgactccaaggaagacgaggactacgcgcgtgacggagagcgaggacgactgcaaagcctctcaacgtgctgccaggtccagtggagttcagattcaaatatgaatcatatgctaaccctgt

SEQ ID NO: 14284 - DNA, 1052 bp, Zea Mays
ttatatataaatatgttatattgttatgagaaaagttttttgtaatccattggtgatcctgtctatacatataaattttgttatgagaaaagtataattgctatccttgacaaatatatgtattatgcagacatgcggagagatgttcaggagatcttcaaaatgactcctcatgataagcaagtcatgatgttttcagcaacgctcagcaaggagatccgtcctgtatgcaagaaatttatgcaagatgtaatgccctgcagccttctccagctctcctttccaaagtcgtcgtattttattcccattgctcctgtggtggtcctcctgtagctgttagtcatctaccagctttggagttgtagttgtgtcttctgctctttctaggtgggaggattctattcctcagtgtctccatttgtagtacataagtaagttctctttgcttttttcgttatcccacaccttctgtcctgaagatgcggtctccgagctcctggtcgacatctccagtttgctgcacactcaatgttcacttggtttcacttaattggacttcactggtgttggttctccaactatctcgtgcgggtggagaaagaattcttctgctggagttgtatttggaagcactgttgcaaaacttaagcatatttggagagaatctagtgttgaacagtgcataactgaacttctgtatggaggctgcatgtactgacagagggggtctattggtatatatactgcaagactgacgctggaatgctaatttgtttcatgtatcatttgttcccttacatccgatggaaatatatgttgatgatgaggcaaagttgaccctccatggtcttgtacagcactatataaaacttagcgaggtagagaagaactggaaactgaatgatctcttggacgctcttgatttcaaccaagttgtgatattcgtgaagagtgttagcagagctgccgaactgaataagttactttgtgaatgcaacttcccatcaatctgcattcattctggaatgacccaggaagaaaggctcctacag

SEQ ID NO: 14285 - DNA, 1030 bp, Zea Mays
tttggttcgatttcgctgggcttggtgggctgttaagccagcagcgtctggcgcagtgcagtgccagctcatggatatggttcaccctggagtggtgcccatgcataaggtcaatttcgatgcgaagacagaatatgacatgatccagaactacaaggttcttcaggacgtgttcaacaagctgcggataggcaagaatattgaggtcaacaagcttgttaaaggacggccattggacaacttggagttccttcagtggttgaaaagatattgtgattctgtgaatggtggaattatgaacgaaaactacaaccctgtagaaaggaggtcaaagggatgcaaagaacgtgtctcaaagggttccaataagccatctaaatcattgcaagccaataggctttctggtgctgatccaacagatggaggccatggagttgggaaagtatgtaacactttttctgaagagcattacatagaacagattcagaagttgtctgaaaagattgcagacctgaaagtttctgtcgatagtactgaaaaagaaagagacttctacttctcgaagttgcgtgatattgagatactgtgtcaacggcctgagttagagcatctaccgatgactaaggcggtccggaagatactttatgcagctgatgcaaaggattcaccgctacctgaggcgaatgatataatcacaaagtcaccaagcttgttctcaaatgaaaccgagtgagatgtgcggctacatgagctaattttggtgcttattttccatcattgatcgtcttagttttgagtctgtaaatgcgtaaaataacatttgacacaagtctttttgctgtcaaaaacagttttcctgtaagaacttgagtggggttaattagttattacgcattcatgcttgatgtgactgtccctgtatggttcctctggagaatatagggtctgttcacttgactaatctgtaccggcgtctactacttttacagtgtttttgtctcaatggattgcagttgcaacagtctaaata

SEQ ID NO: 14286 - DNA, 2571 bp, Zea Mays
tgttctgcataagcagaagggcttgcaacttaagaactagttcatggacctggagctgatattgataccctttgtgttggaccttcatatgtgaaccgagaggaggatttctttgtcacactgcatggcatattagctgagaaggaagaagttgctgagttgcaacctgtacctgatgctcatgtacctgtattgaaatttaagttccgtgggatatcaattgaccttctctatgctagcatctctctttcagtgataccagcggatttcgatatttctcaaggatctgtactttgtgatgttgacgaagcaactgtgcgaagtcttaatggttgcagagtggcggatcagattcttcggcttgttccaaatgttgagaatttccggacaacactcagatgcttgaagtactgggcaaagagaaggggtgtttattctaacattactggtttccttgggggtgtgaactgggctctgctggttgctcgtgtatgccaactctatcctaatgctgtgccaagtatgctggtttctaggttcttcagagtttttactcagtggcaatggccaaatccagtgatgctatgtgcgattgagaataatgatcttggtttttctatatgggatccacgcaaaaatccacgtgacagaaaccatctcatgcccatcatcactccagcctacccatgcatgaactctagttacaatgtttcaaccagcacactgagggttataatggagcaatttcaatttggcaacaaagtttgtcaggaaattgaacttaataaggccaattggaatgccttatttgagcctttccatttttttgaggcatacagaaagtttctagtggttgacatagttgcagaggatgacgatgatcttcgtctttggaagggatggatcgagtctcgtttgagacaacttactttaaagattgagcgggatactaaaggaattttgcagtgccatccgtacccatgcgagtattcagatcccacaatagagtgtgcacattgtgccttctacatgggcttatcaaggaaagaggggttgaaaaaacgtggtcaacagtttgatatccgtgggacagtagatgaatttatgcgtgaaattggcatgtattcattgtggaagcctgggatggatctggctgtcacccatgttcatagggagcaggtcccatcttatgtatttgagcaaggatacaagaaaccctgccctacaatgcatgcaaaccaacaagagcagtctgatggagatggaacatttagcccatatctggagagtcagcttaagagaaagtacatttccgatggagatggtcatgtggatctttgcaaatctgtaaaaagggcttcagtaagcccacctggtgtgggaaccccacctcatcttggaaatagtgtcagtaacgttgtttgtgacagtccagtcaaattcgtttcaagtgtcgtttgcagcggagcgcatgcttcctcatcacatgatgatataaatatagaacaagcacaattaactacttcaccatatggatctgaggatacctcagcatcaggtacaagctgtgcagcagtgggagcagttattttggctgatgaatccagcaagctcggtaacttgacatcagatcttgaagttgatacaattcagacaatgccactgcacacatctttagaatgcgtcgctcaaaagggtgaaacaaagcttgaggaaatcagaaggttggcgagcaacaattgtgctgagtttctagagagctaagttcttgctgacaaggtacacttagacttaggtgggcatgaagtgaattgaaacatcattccagacaaggtttttcttcctatacttcttgtcaaattaagattgtagtttgatatgatctgaactctatgcctgcctttctattcttttcattgattaactgtttggatccattaaaagtcaatgaaacatgtggttcgaagcggtttcgaaaggtgatgcaggggtgaagtttgcatagcatcgataggccggaaatcggatttgaggacccaatgatatgccgctgcatggaaagtttcatcatttcatgcctgtggtcggtttgctcgtgaagattgcttttgttcgctgtggaagcgggtgcaagtattacacagcagcaatatcgggactgttgtgaaggatgaagttgagagtcaacatctgagaaccatggagctcaccatacgccacaaaggaactaagctgctggtttaggcatggttaagagagtcagtgctggtcctttaggttaaataaaaactttgcggggctgcacggtgtgcagaaaaggttgagtctagggcactaggctgatggtctatgtatgtgatgtacgcagataggcagatacctatgcgttcaaagtagcgcatcaaattttggccccattattttcactgcagtatcatgatgtgatgttgatagtagagatagagcaagtatgatactccctccgtccaaaagtttgtcgttcttgctttttaaggagtcaaacatcttgaactttgaccatatttatataaaaatattattatttatagt

SEQ ID NO: 14287 - DNA, 1201 bp, Zea Mays
ctcatcacggcacttccactggagggccacacttctcttttgaggaccagtccaccgtccactcccagagtccaaaaccctacgatccgcgccaccatgccgcgcctcgccgccgccgccgccgtctcacgccgcgccggcgaggccctgcgccgcggcgcgtttgggggactgcggcctctctcctccctgcaaccgttaaacgccgcctccagcgacgaggtgctcgttgaaggaaagacaagtgcgcgcgctgccgtgctcaaccgccctggctacctcaacgccctcaccaccaccatgggagctaggctcaataaattttatcaatcatgggaggacaacccagacattggctttgtcatgatgaagcggccgagcattctgtgctggtggggatgttgttagattacatgaacttatcagtgaaggcaagctggaggaatgtaaggattttttcaagactttgtacatgttcatttattttctgggcacgtacttgaaaccacatgttgccattcttgatggcattactatgggtggtggtggaggtgtttccatccctggaacattccgtgttgcaactgataggacagtctttgcaactccagaagttcatattggattccatcctgatgctgcagcctccttttatttgtcgcatctaactggccatgttggggaatatgtggccttgaccggtgaaaagcttaatggaacagatatgattgctcttggccttgctacacactatttcatgagtggccatctggatctgatcgatgaacgacttgcaaagttagtaactgatgatccatcagttattgattcgtcccttgcacaatatggagacatggtttatccggacaaaaaaagcattgttcataggctggaggtgattgataaatgcttcagccatgacacagttgaagagattgttgatgccttggaaagtgaagcagccagctcaaatgaagaatggtgtatcttggcgctgaaacgattgaaagaggcctctccgttagctttgaaggtttcactgcgatcgatacgcgagggtagatatcagacacttgatgagtgccttgtccgtgagtaccgcatgtccatgaatggaatctcaaagcaattttctcatgaattctgcgagaaacttctaaaacttgaagaatgcatactatcaaacttgtgatctggaaac

SEQ ID NO: 14288 - DNA, 503 bp, Zea Mays
cctaaaacattttctttttgccctgcgtggcgttctccactctcctctccctctcccgagcacctctccttcctccactttctccccaactccggtgagcgagagtgtggtcacgacacaatcatggcgctgcccgtggggccaatcgtcggtgcgcgagctccccttcggggtgagcatgtcaccgtcgagcgacctcttggcggtgccctagtgtcctgtgcgtggcgttatgtaccggtggctgcgttgtttctacccagtcgtctgcaaacaagattagcaggaatggacgaaatggtttgagttggttctctgagcaggttgacaagtgaggacctctatgaagctgatgctaacatttacagagcaaaaggatctatattagagcagtatagaagggtggatgtgaggcttacattggttgtgagcttgaaagggaatttgttgtttggctggtcaaattgggctgttcaagttgccgagtacctgactacagctta

SEQ ID NO: 14289 - DNA, 1562 bp, Zea Mays
aggctaacctgattctgctccttaggccctagcaacaaatccgtatcccgagtccggcgacggcagtatccgagctcgcactcgcgcacccgtccatcgcatcgcatctgtcctcccatcccctcagcgccaccgcaccgcaatcacacgcgcgccacccgcgatgacgccggcggcggcgatctccggctccagcagccacgtcgtcgtctcctccgcccgcctcaggcagccgttcacgctccctccgcgcaccgcttgcccaatcgccgccgccgcctcgcccgtgacccgccgcggggtcgcggtcgccgccgtgtcgagccccgttgtgtccgccgccgcggggaaggatgccaaacaggctcctaaggatttccttcaaatcattgattttgacaaggatacaataatgaagattcttaatcgagccatcgaggttaaggcattgataaagtctggagacaagagcttccaaccgttcaaagggaaaacaatggccatgatttttgccaagccatcaatgaggacccgtgtttcatttgagacgggattctttttacttggtgggcatgctatttatttgggtccagatgatatccagatgggcaaacgtgaggagactcgtgatgttgctagagtactttctggctataatgacatcattatggctagggtctttgctcaccaagatattctggacttggcaaaatatgcatctgtacctgtcataaatggtctcactgactataaccatccatgccagataatggctgatgcacttactatgcttgagcagattggtcgtattgaaaacactaaggttgtctatgttggagatgggaacaacattgtgcactcatggctgctattggctgctgtgcttccttttcactttgtatgtgcttgtcccaagggatttgagcctgacgcaaacacagtggagatcgccaggagtgctggaatcagtaagattgaaataacaaacagtcccagggaagcagttaagggagcagacattgtgtacacagatgtttgggccagtatgggacaaaaggaagaagctgattatagaaaacagaagttccagggattcacggtggatgaggccctgatggagattgctggcccacaggcctaccttatgcactgtttgcctgcagagagaggagtggaggtgactgacggcgccattgaggctcccaactcaatcgtgttcccccaggctgagaacagaatgcacgctcagaacgccatcatgcttcacgtgctcggtgcttaactctcctattgcacaccagtgacacgctcctcttagattattgggcattgctgtcttgctgaagcattgaggctgttttggctttagggcatatatgagagcttagttcagacgaactgtttagtaaggtgataacggttcttcagggtgggaatttgttgtgctgtaaaggtttggtaacctgaataaaaaataaacttatgtgctagtttcattcgcgaatcatgacagctttaacattgaaagacacgtttggccgagaccctggatcaaaaaaata

SEQ ID NO: 14290 - DNA, 1204 bp, Zea Mays
attatccttaggtcgaccaaatccttagaatgctcctgttcttatccagttgaggtctagaagcttactcatcacgccggagcagcagtagcagtcgagctcggcatcagctcccttgctgctcactttgcagcacctcgccagctccctggtaacactctgcacctgccgtcgaactctctcagaatgagcagtttggtcgtccccatctcgccgtggttcgtcctcaccatgttttcagatgtgtttgggctgagatgccattcaaaatcgatgatctgttcgtcgccaccggccgcaagcaccagttttgttgaacatacgtgattgaagatcctttgtggtgatgaaggtgaaatcagcatagcactcgccaagcattctacagaagagctcccaaaataaagagtgaagatttaagatgaagtggttgttgaagaggagtttactccagtgcctgttcatcaagtggatggagccatctaactgatcatcgtgttagaagtatctagaacctcttctctgcaacaaaggcaagccccggtgcatttgccccttccttgtgttttaaatgctttatcaccttaaatgatgcattaggtgataggagttgtgtgatgaacaactgatgcattaccattccttggaatttaaatactataccttgatccctgatttataaaaagaactgataatgcttaaccctgcttagaaactgaaaaatcatttgttttcaaaaagaatgattgcggaacattagttatgggctttttgattcaaaaatcaaagcaaactaaggtgatgactccacttcggccggagtgggatcatcattggaaaagagtacccctgtcgggtgccaaaaatggggaaatggttaataaatctagaccagacgctgagcagacagagtcgcccgtctgtgtcgattaaggaccgtaccgttgactggcctgttgtggttgagactttgcaactagccacataccctggtatgggacagggtaagcttgaacccggctattccatacgtgaagagacaatcgcgcactgggagtggagagatggcgggagtagcatgtaccctcctggcatagtagcacgcctggtagggtaatgtgctctcgggtggcgcggacctgttcatgtagtggaggactccgtgggaacggttgacatatgcaagggttaagtgctacatatg

SEQ ID NO: 14291 - DNA, 921 bp, Zea Mays
gttctattgtatggtactccctccatttctcttcgtataaggctttgctccatttcatgtactgggatgagttgccggatcttgaagagcttactggtgtaaatacaacttgggtatccaccttgatggctcaacatttacttgctgctgcagaccgttatgcattggagagattaaagttgctctgtgaacttaagctgtgtgaagatgttgcaataaacacagtggcaaatactttggcactggctgaacagcaccactgctatcagctaaaaactgtttgcttaaaatttgtggctctgcctgagaatttgaaagctgtcatgcaaaccgatgggtttgattatttgcagcaaagctgtccatccctcctgaccgagcttcttgaatatgtggccaagataggagagcactccgtgagcccctgcctgtattcaactgaagtccttgatggtggagatgccaatggacgacgcgtgaaaccaaggatctaacggctgcccagatgagcctagaagagggagttccttgtcttttttttttgttgttgttgtaaagtgattccaatgacgggcgccttctgtggtgccataatcatgcatgttgtagcgttggtttgtgtgtgttgtgatttccccagccccattgctgctactgtagagggactgatatacatcctactgactagactgcgttgctgctgcaaagcagcttttcatcatatgccaaggatggtctggtgcaaaggtttgatcaatatgttctgcagaagttttacctttcgctaggccagatttgtcgattcatggtcatctgtattgactgtattcaattgaaatgaaatgtatccgttgaacattcactttcatactgatccgttcatctgtcctacccttaaatctcaaataccttttacctgtg

SEQ ID NO: 14292 - DNA, 71 bp, Zea Mays
gtgctaggcatgcactaaagaagttatccgtggctgcgaagtgatcgccggaccgccgcggctataaatag

SEQ ID NO: 14293 - DNA, 76 bp, Zea Mays
gagagacgggatgggggaccatggcgcggattttgaatcacgtcgagggggtagatggaacgtttcacaagggctc

SEQ ID NO: 14294 - DNA, 474 bp, Zea Mays
aaatgaagggatattatgatgcccaatatctagaaaggttgggttgggttcttctggattatctggttcaccgcaaggaagagcatggtcctgacgaagcactccttcggcatgacgagctcggcaatccaatcgtattccgcgtcccggcaagtgaagcagaagcctgtcgactgaggctagttggttgcgtcctgtatgaagcggatatatctatctatgtgaatcacggttttgctgtttgtttgtttgtaagagtgtagaagacagcttgcttgttgcggcagctctgtttctctcggtgactaggtgtataatgctagctctgaactttggcagcatgtacgttcggcatggcggtcaatgctgttatttaaaggatagtgagcagatgttaatgtttatagcaaataaaagcatgttaatgtttattaaatttatcttgaatgaacttattatttctttattatttag

SEQ ID NO: 14295 - DNA, 1759 bp, Zea Mays
gttcgtacctcaacttcgtgctgatatgtgacatggtgactatagcacgccatctaaatctaacgcttgtggtccctgaactggataaaaggtctttttgggctgacccaagtgattttggagatattttcgacgtggaccacttcattaattccttgagagatgagctgatgatagttaaagagcttcctttgaaactacagttaagaactaagaagagactgtactcgatgcctcctgtcagctggtcgaatgaaacatactacctaaagcggatattacctcttgcgaggaagcacaaggtaattcatttcgataaatcagacgcccgccttgcaaacaatggccttccgattcagctgcagatgctgcgttgccgagtgaactttgaggctctgagattcacaccacagatcgaggcccttggcagaaagctcatctccactctccagagacgaagtgggcagtttgttgtgcttcacttgcgctacgaaatggacatgctctccttttcaggctgcacacatggctgctctggtaaagaaactgaggagctcactaagatgagatatgcttatccatggtggaaagagaaagagatcgattcggaagtgaagaggctccaaggactctgtcccctcacaccagaggagatcactctagtgcttaaagctctagggttcacaaaggacactctgatatacattgcttccggtgaaatctatggcggtgaaaggcgcctggccgtgctcaaggctgcgtaccctaaactagtaaggaaggagaagattttatctcccgatgaactgcggccgttccagaaccattcgacccagatggcagcgctggattacatggtctctctagcaagcgacattttcattcccagctacgacggaaatatggcaagggttgtcgaaggccaccgcaggtatatggatttccgcaagaccatcgtcttggacagaaagaagctcgtcgagctgttggaccttttccaagggggcgctctatcctgggacgaattctcggacgcagtgaaggaggcacacaggagccgcacgggccagcctgcggaaagaaaggtcgtcccagggcagcccaaggaagaggactacttctacgctaatcctctagaatgcctcggctccaacgggggactacgggacgtctcctgacgacgctttcctggaaacacgccgccgatgaacgatgacaccacctcagccctacagcacaccgtgtgtgttcgtgttcatcctcaccagtcaccgccaccgccacctttgtacagctgaccaaaggccctgcccatctaccacaagtgcatgcaggttcaccagatcagaacgcctgcgaccacatttcctcctcacagaataaagcaggaaaagaagctgggaaccctacggggttcttcagaaagaagagatgccgctcgtgcatccagtctgctcctttcctaccatctgtcgtagttgttgttgtaacccttctgtcagttttttcattctattgttcggttgctccccttcaactgctccagttttcagttcttctagccggggcgggtagctcatgcaaaagtaggagtccagctttctggaagtttcttgtactaggtccgcgatgcataacagagatttctgaatcctgacagaaccttattactttcccttgagggatcaaatttcggcgacggaataattgtttggtttccagcatctcatctatggacggctgtggttgctgaacggag

SEQ ID NO: 14296 - DNA, 1023 bp, Zea Mays
aaaaggctgaagaactgaatgctgatatgttacctttactccttgagagcaacaaggagaagtggcaattactgcaaatttgagggattcaccatgcaagattgaactgtcatctctggttcctcctaatggaccgccaagagcaacttttttctttccaaatggtgaagtctcaattaaagagaagattttggatgagcgtgacagaattttgtcagtaaatggcctagtgaagtcacgtgttctgcatggagtttgcacagctgtgtacaatgataatgtaatgagcattaaataccgctacaaggatgatgaggtatcgtttatccccagcatctcattaccatccaattctctgtcatttgcattcaagcgccaattaacgcctttggacaagttgagctattggtacaattttgacacaaactactggggcgccatctacaaacacaaggctcacaagcatctcaagtggaaagctggctatgagtcagacaacaggcttggatgggcatcgctttgggttggagatgctggcggcagtacaaaggaggcgcctttgaaagccaaaattcacctcacgcttaaagtcccccaggacaatatacagaattcagttgtagtgttccatgttaagaaaagatgggatttttagtttctatttgtgagctcagatggtgttacgtcatgcgcacataagcaagcgtgtacagatggagagccaataagagatggatgcaaatttgtgatgtggtctgcaaaattgtttcatgcaaatgttagggagaaatcatgtaatgttagtcctcttttataggttccgtttggttcaaggtcttgttaagggaatgctaaagagctcaaccaaacaaaagtattggtaactactagaggtgtaatccgatcgaatacagacgaatatcactgaaattaaatttgttattcggatccagattcgaatacagctagctttgaatacgaatacaatatagatgttcttggatataaatacggatagcgtta

SEQ ID NO: 14297 - DNA, 1812 bp, Zea Mays
cttagagccattcatataaaacgataaggcacgccgagcattccgtgccctgaaagggatcataagactacaggcattgattcggggtcatcttgtaaggaggcaagctgtttcaactcttcgtgcaacatggttgattgtgaagtttcaagccctggtccgtgggaggaatcttagactttctgaagcttccattcaagcaaccatggaactttcccaacagaaccttgcgggtgctaaacctggttcctggaaggagaagttgtcgtcaaatgcatttgctcgcaagcttctatcttcatcaattgtggttgaggctcttcacttccagtatgatgagatggaccctaattcagccttcaattggttagagaggtggacgataagtcatgtctggaagcccgcttcccaaccaaggagagttagtgctgatgctaagccacatacaaggaaggccagctatgcaatggaaacagagtcagtgaaattaaagcgtaatgcacggaggagctctgcagggccatttgaaccttctcaaacaaacactgccattgaaattgagaagacaagacggaatccaaggaaattaagtagcactcctgctgagtcagttcctgatggccagttaacagaacttgagaaggttaaacgtagccttaggaaggttactaattccgtggctgaaacctcgaaggcatctagtccaaaaactgagattcctaaccatcaagaggtccaatgtgagagaccactaagaagagcaaaacaagttccaattcatcttgagaatcaagagcctgataatgttaatctgtcggacaatgcaaagatggatattctggtacctgatatccagcctgatgtggaagttgcttcagatccagtcaccatcactaatgaagaaaatgttgatgaaccaccatctgttgttgctccagtggccgaaattatgcctctgcaagacatcaacaacgatgaaaatgctttggtgaatgatgtggaagagagatccaaagaagaacatccttctactgagagcctgaaaggcagcaagaggaggtcttcattctcagctaagcctgaatatccagaaaatggctccaaaaattctccagctctgccaagctacatggctgctacacaatcagcaaaggcgaaactgcggggaaatagctcaccaaaacttagctctgattcagcagagaaaaacggcttcactcgtcgtcactcccttccatcctctaacaacggtaagatggtttcacattctccacgtacacaaaggccagctaatgctggtggcaaggatggagcgaaaggtgacaaggctatgctgtcatcaagagatgcaagcgagagaccactgaaagctgagtggagacgttgaggcggcgaatcaaatccaaatccttcatttgattagcgcgaccgtttgggtggatggatcgcccttgcagtttgctcggatttgttttgtttgtgatgtaaaaaaatgatgtccttatcgtcggcgagatgaatgaaccggctttgttgtgatgaatccgctgggagtcaacttatttattatagggttttccgtcatgccttttgtgatgtatagctgaagtattttcccggtttgttttggtttccagaccccccagacttcctcccttctccttgttgagagctgctgatgttagagagaatgagaacatgcatggattgaattgaacaatcttacccatttggtgaaatgtgggctgcgttttgactgatggttgtttgccattcatggttattgtccttgaagccgcagtatacttgtcc

SEQ ID NO: 14298 - DNA, 1122 bp, Zea Mays
atgaagggccaaaatttatttgagatattaccaactatgagctgccagagcctttcggattcattttcacatggtttgctgctttgcccctaatattgttcttagcgcagtcattgactaaggctatagtccaggattttttaatccttaaggggccatgtcctaattgtggtactgaaaacctttccttctttgggactatactgtcagtctccagtggcggtacaacaaacaaagtgaaatgtgcaaattgcagtaccgagctggaatatgactcaaaatctcgggtgatcacacttccagaagcatcaaatgcataaacataggaacagggagctccagagcttgtgaattctatagaataaaggtggttgtccgcacagtatagcaaactgcgaagcctgcaactactagagtttggtctgtagcaggctcagttgggaatgtgtagcagagcatgatccatggtgtggatgaattgcagagtactgtgctgtgtgtgtaggaaggaaaagctgccgcctgccgattgtgcagtcagtctagtacgttgttatgtttgcaaggcccaagtctactgaacggccacggccaggctgactgatgacctgaagcccggcccacggcccacggcccacagcccaactggttgcacatactgcgagagaatttctctcaaccaagcgtctgcatcttccttctctagcttgtgtcatggagtatatgcatatgcatccctgacctctttcatgcatgcatgtttaaatgactttgttcctcaagcaacctgcaagcagaattaataccattccaaatcgatcgatgagcagaatcagaattagcgagcattttgcattgctccaccaaacaaaaaaattcggccacctcaatgcactagtaggaaacggagttagtcctgattgagaacccgaactacggattcaggactaaagagcactttagaggctttttttattttttgcacaagtttctctccacccttgtgattcctgggactcaaactcatgagcattgtcttgtatatgggattagatgatgctctggaccgatctattagatctactggactttcaatttattttggtctaaagttaagtaata

SEQ ID NO: 14299 - DNA, 439 bp, Zea Mays
gttgaattcttcaccgccctatgtggtgtttctgctgaagaactaaaacaaacacctgctcgtgtctttagcttgcagaagcttgtagagataagctattataacatggctcgcattcggctggtgtgggctagaatatggtctgtgttggcccagcactttattgctgctggaagccacaatgaggagaaagttgcaatgtatgccattgattcactaagacagcttggtatgaagtacttggagcgtgctgaattaaacaatttcacatttcagagtgacatactgaaaccttttgtcattttaatgaggaatacccacaactcaaaaatccgaggtttaattgttgattgcattgttcagtcaaaagttggtagcataaagtcagggtggcgttgcgtattcatgatatttactgcagcagctgatgatgaggatg

SEQ ID NO: 14300 - DNA, 874 bp, Zea Mays
ctttagtctgtgcgcacataggtggagtttttaagcttgaactctttttacctgaggaatatcccatggctgccccaaaggttaggtttctgaccaagatttatcatcccaacattgacaagcttggtaggatatgcctcgacattctcaaggacaaatggagcccagcacttcagattcgaacagttcttttgagtatacaggctctactgagtgcaccaaatccagatgaccctctctccgataacattgcaaagcactggaaatccaatgaggtagaagctgttgaaacagccaaggagtggactcgcctgtatgcgagcggtgcatgagagcgcagtgctgttcttggtgtaataaccccatcatacttcagtcctaatccgttgccatttgcttgataaaaatagactggagatatttgccatggaatgaagtctctaaatgactaccactctgaattgtttggttgtacacctgtggtcggttccctttacctttgggcacctttgactaatcagtatatgtggtagaacttgcagttactctaatatatttgtcacttcatgtagaagagcttctcaactgttcataatgttggaactgaggctggttagcttggttgcattttcgctgtaccttcctctgttcgcctgtcgactgtcgcctgagaacgaattttgccgaaactcgagttgcacctggtcatgttttctacgatgtgctttcttattaggtgatcacaggttggttttatcacaacacttcggctgttttgcggggatttgttttatcgcaatacattttggcagtcataatctcgaggaatatgaaaatccataaatattatcctctggttataggctggataata

SEQ ID NO: 14301 - DNA, 1299 bp, Zea Mays
gctgggagaaaacacagggactggagatgagctcctcatctgaagattttcatatcctgctttgtaaagacatcacattttgaggagtatctcaatgtccaggaagctgttatgttggaccttcttagaatagttgggcatcacaaagcaaggcttgctacccaaattcgaacagttcagaaatcatatggcaatgcagacttcgataacattccttttggagaggacatgtatagtcgagtccgtggccggccacttctgattgatacatctgcaaggatcagtgatgacaaacccaggcctcgacctgtatcatcacgtgaggagcagaaagtcaagacaaatggctcggtagatattaagtccagttcccctgaaaatgctagttcaagcaactctgaaaagcaggaaccgaaaaaaatggtgcctgaagatactcgggtgaagaacattaagggtgataatgtgatgccagtaacaccatctttagatcctgctacgtcaacttccaaggctggtaaagggaagacacgggaaccagagcccactgagcggcaaggagatgggtcagtctcggtggctaatccaaagaaagaatctagaccagtttttgaagataacattgttctgggcgtagcccttgagggttccaggaggacactgcctattgaagaaggaaatcctcatctatcactatctgagactgaggtggacaccgaagaggcggcttcatcaccgaaggataagataggccaaagcccaaaactttgaggtccagaaaaaaagccgttcagaggaatctcgataggtcatccgagttcaaactgtatccttgtgaagatttgtcaccaagcctaccttttttgtgcgcttgtgcaaatacaatgccaccacacatcagtgttgtatgcttaaggggtaaattcacactgacgattattcagggaacattacctgtcagtcgtattgctacaggcttgtaaagaagcaagtgcttcaataggcattttgtaaagattatattattgctcatttaagtggcttcttgcatatgcatcggcaattcagcatgcgccgttgcaactgtcatctcggtttccaggtttggcttacgttagttttgtttccaatgccatctgctgcgagctgaaatatcatcgtctcttttcctttttttttttttacaaaagacacgctaagtcgtggagacggtgaattcttccggatggcgtctcatcttgcagacgactaaaacggaataccgcgattatcgaaaaggaaacggaataccgcgcggcg

SEQ ID NO: 14302 - DNA, 97 bp, Zea Mays
cctcggtaaaacaaatcaccgtgtcatccgctattattcgcttgtgatttgttttcgccctctctttcggactcatttatatttctaacgctaaccc

SEQ ID NO: 14303 - DNA, 1461 bp, Zea Mays
agaaaacaaaaataaaagtgaagaaaaggataggcttttgttcagtttattacaatgcagttccaaatgtgctctgtattttttactttctcacttggaacaagaacccactactttggccgtgcaatattacatggaggtgcaaagtatagagcaaccggtagaggttttgtggtacgacatatcaagtttgctgagaactaccgtatttattctcgaagccattttgtgaaagggatggaggttgcacttttgttggtgatcttcctagcgtatgggtttaacaatggtggagcagttggctatattttactctctataagcagttggattatggcattgtcttggctttttgctccctatttatttaacccatctggatttgaatggcagaagattgttgaggatttcagagactggacaaattggctgttttatcgaggtggtattggtgttaaaggagaagaaagctgggaagcttggtgggaagaagaactgcaacatatttacagcattcgagggaggatactggaaaccatattaagcctgaggtttttcattttccaattcggagttgtttaccacatgaatgctagcggaggaagtacagctttattggtgtattggatttcttgggctgtgcttggtggccttttcatcctcctcttggtctttggtttaaaccccaaggccatggtacatttccaattgttcctgcgtttggtcaaaagtgtagcgttattgatggttttggctgctctggtccctggcaattttgtttacgaaactcagtgtgagagatgtttttgcttccattctagcatttgtgccaactgggtggggaatcatttcgattgccatggcatggaaacctgtcgtgaagaaattgggtttgtggaaaactgttcgtgccctagctcgcctctatgatgctggaatggggatggtcattttcatacccatagccatttgctcgtggtttccattcatatccactttccagacgcgacttctgttcaaccaggcgttcagcagaggtttggagatatctctgatccttgctggcaacaatccaaatgctgggatctgatggtggcagttccggccttgcttcattaatctgtggacctttcgtacttgaattaatcctcacttctcagttaacagtagcgatgtacatatctgatatctctatgttcaccggagttgtttgccgtgggtataaatatcaacggctatatttctagagttcaccggcttgtacctgtatttttgaacgggtgaactttgtatggcccttcttttgacattgacatgtgctgattacgtggaaaaattgcttttttaggtcgcttcgaacttcgtttttagcaggatacttcagtatccacatgtttttcccgaaatcccggatgggcttgagtaattatttttctagcaacttttctaaaaatataaaaa

SEQ ID NO: 14304 - DNA, 978 bp, Zea Mays
cctacaaggttgatgctgttgtgtacttggtggatgctgttgacaaggaacgttttgccgagtcgaagaaggagcttgatgcgcttcttgcagatgactcccttgcaaacgttcctttcctcatactgggcaacaagattgacatcccatacgcggcttcagaggaggagctgaggtactacctcggcctgagcaacttcacaaccgggaagggcaacgtgaacttggccgactccaatgtccggcccctggagatcttcatgtgcagtgtggtgcgcaagatgggctatggcgaaggcttcaaatggatgtctcagtacatcaagtgagtcgctgctgtcctcttttgtccatggcgctgctgctttcgcaggagggttgaaatcaagtctggtcgtgacatggcagctgcatggaaaggtttatggtagctagtgataggcaaagcttgtaagtcggtgttaatcctagatatgtgatgtggggtctactttctcttctgattgtttcttggggtggtctaaacggttaaaaaaaatgcgacttcttcgggtcagctagaagttatgtaatcacgttacatgaagcagcgcattgttcgccagctgctttggtgtggtggacttctgtcggtaatggtgagcttgcggtttctaaaagtatgcgtgtagagtaattgtgtatctacagattccaaaccttgcatttgctgttgactgaggtagcccggaaatgataaaacatcctggtgaaagttgcattgctttcatgttgcgttttcgttggaacgaagcagcacaccaacccgaacgctgctattcatttcaatttgaacatttaaaagcaccttgggcttcgtttggctaaccgtgtattgtacacgcattgttagagcatctgagtcctaaacggagttgtaggacatcaaaaacttgctttaatagggttctattttacaaaaaaaaaatatataggaaa

SEQ ID NO: 14305 - DNA, 969 bp, Zea Mays
cgccgaccagcttaagcaatcaccacttaacagtgttccttggactgaagaagaacaccggaggtttttgctgggattacaaaagcttgggaaaggtgattggcgagggatttctcgtaatttcgtggtctcaagaacacctactcaagtagcaagtcatgctcaaaaatattttatacgtcaatcaaatatgagcagaaggaagagaaggtctagcctttttgacatggtgcctgatgagtccatggaccttccaccccttcctggaagtcaagagccagagacctcagtgttaaatcaaccaccactgcctccccctgtggaggaggaggaggaggtggaatcgatggagtcagatacttctgctgttgcggagagttctgcagcttcagctcttatgcccgagagtttacagcctacctatccgatgattgttccagcttatttctcaccgttcttgcaattctcagttcctttctggccaaatcaggaagatggaggtgatctgcctcaagaaacgcacgagattgtcaagcctgttgcagttcattccaagaatccaattaatgttgatgaacttgtgagcatgtcaaagctaagcataggggagcctggtcaggaaacggtgtctacttctctgtcgttaaatctgctggtgggtcaaaataggcagtcggccttccatgcaaatcctcaaacgagggctcaagcttgatcccgcttccgcacagaaactgcattaagaaggattccctctcttttttttttctatatgtaagattgaccgtgctctgtagcttgtatcatgttgtaagttatgctatgtatgaatgtacctgttgtttgtctggcacgcatgacatgccactcatgataacaaactcataatgttagtgctgatctttatggttgtaatgttgtaaacttttctgagagaaaaaaacgtactagccagttgttttcacgtgc

SEQ ID NO: 14306 - DNA, 1921 bp, Zea Mays
cccaccccactctccttctcctattctatctatatatcacccgcctcttttttctccctcactccgccacaccttccctcttcttcctcagctccgtcgcccaccgccggagctccgaaaggccccgcgcccgccgcctttcctgtaaaaaacccaacctttagctagctaaccgctcctcttctccccctactccccttgcccaaatcagagaagatatttaacggaggaggggaaggagaggatatttagctgattgttgattggtggtccggggtacggtgttcttgagtcgtgaagcgaccgtacagtggctagggccgtctccgggttgcgtgcaggatggtcgtcagagatcgggagtgaggaggcagctcgtggtcgtggaggctaaatgtaccgcaagaacgactcggcactctcctgtttctacctcttcctcctctggttcttcttcttgaaatagaccagcgccagccaccaggtagctacctactagctagcagcccagttgcgactggggacgggctgctgcttgcaagttggaatcttggagcaggagcagaggagcgggagatggagctggatctgaacgtggccgaggtggcgccggagaagccatcggcggcgctggaggcgagcgactcggggtcctcgggctcgtcggtgctgaacgcggaggcggcatcggcgggcggcggggggcccgcgccgggggaggaggggtcaagctcgacgccggccgtgctcgagttcagcatcctcaggagcgacagcgacgcggccggcgcggacgccgacgacggcgacgccacgccgtcgccacctcgccaccaccagcagcagctcgtcacccgggagctcttcccggcgccgcagcattgggccgagctcggcttcttccgcgccggcccgcagcagcagccggacatcagggtcctgccgcacccgcacccgtacccgcccccgccgccgcccgcgcagccgcagcaggccaagaagagccgccgcggcccgcgctcccgcagctcgcagtaccgcggcgtcaccttctaccgccgcaccggccgctgggagtcccacatctgggattgcgggaagcaggtgtacttaggtggattcgacactgctcatgccgctgcaagggcgtacgaccgagcggcgatcaagttccgcggcgtcgacgccgacataaacttcaacctcagcgactacgacgacgatatgaagcagatgaagagcctgtccaaggaggagttcgttcacgccctgcggcggcagagcaccggcttctcccgcggcagctccaagtacaggggcgtcaccctgcacaagtgcggccgctgggaggcgcgcatggggcagttcctcggcaagaagtacatatatcttgggctattcgacagcgaagtagaggctgcaagggcgtacgacaaggccgcgatcaaatgcaacggtagagaggccgtgacgaacttcgagcccagcacgtacgacggggagctgctgctgactgctgaagctagcgcagaagttgctgacgacgttgatctgaacttgagcatctcgcaaccggcatcgtcccagagccccaaaagagacaagaactgccttggtccgcagctccaccaccaccatgggcggccgtttgacggctccgccgttctgaagaaaaccaagatcgatgctccgtctgagctgtcgtcggcgggccgccctcaccggtcgttcctccctcatctcgtggctgccgagcatctaccgcctcggtctcaccccttcttcatcacacaccatgagcttccttgaaaaggaaaggtcctagacctagctaccggccagcagcgacacttcaactctaagggcatgtacagtggagagacgccaaaacggttctccaagcataggagacaactaagag

SEQ ID NO: 14307 - DNA, 569 bp, Zea Mays
tactttctgttgggttctgcgaggcgtgaagagcttcgacaacgagatacacaactgaagcagacgattggagacctggagcttgagctggaggaaacaaaaaagaagtgcggtcagcttgctgctcagctcaaggcatggaagaaccagcagcatctaccctaaatgtgaagggcatcattaagaccgaggacacggaggtacacgacaacgaccaatactgacagaaaaccgaaggttacaaggaagcacggatgcatataatgtctgtctagtgggctggctaactcatggttgagttgttaaaaagaagtttagcatgtaaatcttaggcgtgtgtgctacttagctactagacagaatggttgtcatgtgcaagcaaggaagatgacttgggtgattcctgctgttaatttgctatgcaaaatgtcacgtaaggcccttatgatccagccttgagcatcaaataaaactgtagaactcgaaatgaattgctcatggtcccctgcatttctgattaatagggtaccaactgacgacgaacaatgcagggttcaggtgtatgaaag

SEQ ID NO: 14308 - DNA, 154 bp, Zea Mays
gtttggtcgaaggcgagcttgggaatggggagagcgcgagagagagagggagctcggagaggaggagagttctgctgtgggagggagaagagatctgtctccaatttatagagggagaggagagggagagtcagccggcgtcatcaaacaccat

SEQ ID NO: 14309 - DNA, 458 bp, Zea Mays
cagaggagcaatacaaatgttgccaccatgcaatcagagatgaactggaagatcttgtatcgagttcaaaaattgagccgctttcgaggaacgggtaacgctagcagtgatgttctactgacctatctgacagcgtgatacctctttacttgctccattcttcaagcttcggcgatagccgttatgaacatcatgacttctgaaatgttgcgttttatctggagttttaaagcctttacaacattcttcaaccttctatgatctaacattcattgtggtgtatgcatgaaattagaatttagattgatgatatattattgattgtgcccgcccccacacccccacagattgtatttttggttaatggtgtatgcatgaaatatgatgcacaggaaagatttgatattggtgtgttgttgttcgtgcacgtgcgcgcacacaatcgtttccaggaaaga

SEQ ID NO: 14310 - DNA, 1205 bp, Zea Mays
atttcatttcgttcggcgtccccacacggccacaccggaaaaaagaccccggcaagaacctcgctctccggcgtctccggccaatacccatggaggccaccgcagtgccgagggctctgttcctattcgggacatcgccggcgccgtatcgtatgcgtatgaactgcttgcgcgtagctattggaggagatgtgaggcggcagggggccgtggcagtgtgggcgaagaagaagagggggagggggcgggatagcgagacggaggaacgggtggacacgcacagcttcacccccaagccgggcgaggctgccgggctgttccccgaggccgtcctgcttagaaagaaaatggtgagagaggatggtcaagtgtcaccagaatttgctgatgcagacgaagaaaagctgtatgattttcttaatattgagctagaaagtgatttaaatctgaaaagaatgcggcactatgaagtagtttatctaattcatgaggaccgtgttgaagaagttgaaaatgttgtatcaaaagtacaagattttatcagggagaagaaaggaaggatatggaggcttaacaattgggggctgcgcaggcttgcttacaaaataaagaaagcaacacatgccaattacattttaatgaactttgagatagagtcaagatacatcaatgacttcaagaccctgctagacaaggatgagaggatcatcagacatctggttatgaaacgggatgaggcaattactgaagattgccctcccccaccagtatttcacactctgcgagctcaacaatattttgatgatgaatatgaagatgagggggaagaggaagaggatgaggatgctaggagtgagccaaagtctgccaattatgatgaggatgatgttgaagctgatgatgagcctgaaattatttatgtcgatgaagctgatgaggataattacgaagacactagaagaaggaacacaaagctaaaggtgaagaagtatacatcagagaaggtattgaggcagcattagtgtatggttttccacttagtttaagtctttttagctcttatagaaaggactatctgtgtctgtatgatgaggaagtttcacttaggtgtttttttctgatgccaaggaccactgcatgataatgagataggtatatgtgctatggttggtacagcccttgtaaatgctttctttaaaaaacaa

SEQ ID NO: 14311 - DNA, 1098 bp, Zea Mays
gtgctaatcaaagcgaggcacaggcaactaatcaattcagttcactagcagttagcacatcgaagactaacacgactgcccgcgtaatgaatagaaaaaagaaccaatttgactagaatcaatatgttctggcccatgtaattatatgggccagtcgccgtttggcccattagaagctataaaccctacctctggccacctcccccagtctctcgcccctctccctctctcccaccccgcagccgccgcgcaggtagccctagcacccgcgacgagcaggatctgcccagttgctcttgcggtagttcccccaactgtcaccatgcagaacgaggagggtaagactgtggacctctatgtccccaggaagtgctcggccacaaacaggatcatcactgccaaggaccatgcctctgtccagatcaacattggccacttggatgcgaatggcctgtatgatggtcacttcacaacgtttgctctctctgggtttgtccgtgctcagggcgacgcagacagctccttggacaggttgtggcagaagaagaaggttgatatcaagcagtagattttacatctagtttaccaagaattggacactgccttagctatgttttgaattcatgtcactatatgcaatgttgtgatttcagctggtaccttaaatctgaagatttagtatctttgttgggttccttctgagtttgatgtgtggtgttcaattcaaccgtccagtggcaccgaaatatgctgttggggtagtttcattcaaaaaacgtgccattcaattcaaccgtccagtgccattcaatgaattactatgttttgaattactatgctgcttataggacacacatagcacaagtaaaataaacaagtgggcgacaaataatttatgtcaatgatctgcatcttctcttcaaacaaaaagaaaaaactatatatgatttgaggtgatttaagtattgttattttcctttattttctttgcttagctacaactattgtactttttgaagaaaaaaaaatatggtacaacaaattgcatggttctgtttgtataaaaaataaaataaacatgtgtacctatgaagaaac

SEQ ID NO: 14312 - DNA, 1537 bp, Zea Mays
ctgatttgttgcaaccctcttgctcactgttaatcacatgtccactagaatgatctgacagtttaattcacagggtactgtaaatatgtcggcaacatacaattccaggagtcaagacatcgagagttctgttgttgcacatggagacctctggaggctagaggcatcgcgtggtggatcaacttctggaaatggcacttcgcctctgtaccttgttcagttggggcctctactttttgttcgagactctacacttctgttgcctgttcatctatcaaagcaacacctgctttggtacggttatgatcgcaagaatggtgtccattcactctgtccagctatatggtcaaaacataggagatggttgatgatgtcaatgatgtgtctcaatccaatagcttgttcgtttatggatttgcaattccctaatgggcaactaacatatgttgctggtgaggggatatcagccagtggttttcttccgttatttggtgggttgcttcaagctcaaggaaaatatcctggagaaacaagagtgagcttttcttgcaagaataagcgtggcacaaggtttactcctatgtttcaatggcctgacaagtctgtttcgttaggagttactcaagccttggcatggaaaagatctggtcttatggtgagacccagtatacaagtcagtgtgtgccctacgtttggaggaagtgatcctggggtacgggcagaagttgtccattcattgaaagaggaattgaatctgatgtgtggcctctcttgctcgcggcatccatcagcttatactgctctatctattggacgatcaaagtggaacggtcaagtgggcagttctggagtggtaatcaccttggaaacacctcttaataacattggaaggccgtcgttatctgttcaactgaatggtggttttgagttgtgattcttcagactccagcgctgaagctgtacataccagtgtgtatatattgccatcaccaatgttcgtgctccatagtttgtggaagtgggctgcagcctgccggcttgcaggtcgtttttgttactgtagtctataggtagtctcaactcagcaaatcagctgccatggtacccaacccatgcgggcacagaagtcaactactttgttgttcaatcattatgacaatccttaggtcttatttggatactctcgtattcacattaatctcacatttattgaagtgaaatttaaattaatttacactccaatcaacttcaatacatatggattgaagtcaatacgagagtatcgaaatacggccttaagggattgtgacgcttgcagcaggtgagctcatattagaagttcgtgaaagtggaggaccacgtaatcatgcaagttgttcatccagaatcacattcttttggtgcaggactggcaggttgggatgtaaacggacggatgatcttgttttaacattataactcggacacgcaaaatgataaaaacgaactaatatgaaaaaatacgtgggtaacggtaaaaaggataacaaagctacaa

SEQ ID NO: 14313 - DNA, 799 bp, Zea Mays
aagaagtcttggaatgaaaattggaaagttgtttggcaccgacagttgcagtcaataggaacctatccgaaaaggtgctgttagtcacactctgatggtggaggagcttggtcggcggagggtcaatcatggggatgtttatgttctgaggttgtacaatcggttgaatcaaacaaagaaaggagagatagcatgtgctactcctggtgaagcccggaaatggattgaagcatttgaacaagctaaacaacaggcagactatgatctgatgagaggggttaactggaacagattgcagaatgaaaatgagattaatcttgatggtcatcgtcctcgagttcggagatacgcacaaggcttggggaaatttgtaagaattggtaaagggccagaaatgctccttcgtcagtcttcagatcttcaaggccaagaaattgttaatacgaactttggaggtgatactggagacgcatttgaagcacatgaatggagatatgttcggacatttaacggtatcagaatttttgaagatattagtattacaaacccaaaggttggaaaggttatacttctgaaatctgttggggtggtcagtgcaaaccctgataccgtgtttgaagtggtcctcgatcttgataaacataagcgatatgagtgggatatgttgacagctgatttggagttggtggaaagaattgatggatactacgatgtggtttatggaacctatgaacccaaatatttaaattggtggaaatgccagaaggatttttgttttcttctcgacaatggtttcgtg

SEQ ID NO: 14314 - DNA, 104 bp, Zea Mays
taattccatactcagggttttattccctgttgtttttcaggatataactttgtgctgctgtgatggtgttaagtgccggtgggctcgaccttcttatataagta

SEQ ID NO: 14315 - DNA, 2125 bp, Zea Mays
cgtaatttcctcctccttttcccagttcccaccttgcttcctctcctcgctttgcttcctctctggctctctctcacatgcctgcctactactccctcaagcaagcaagcaagcaagctgcaagaggtcaggaggagccgtgactgtgagtgagcggcgtctggtgtgaactgtgaagtgaggacttgttggaggaggacggagcgcggagggtcatggcatggtgatggacctgctgctccccctcactttgcccctaggcagccttagctagcctcgcagtcctgggaggaggagaaggacaaggtctctgatcagctccagcttgtctggtcaaagctgaggagcctgcttgggctgcctgtgagtccaagctcgacaggaccactgccactgtgaagcacagcggcagcggcgacgagacgaggacgcggaagctgccaagcggatagatctacgcaaaatggagaccaaggacgtgtcgccgcttgccgccgccgccgcggcgcccgtgcttgcaccggcctctcagcagcagcagcagcagccgccccagccgcagcagcaccaccaccagccaccgcagccgcagcatcagcaccagcaccagccgccgccgccgccgttcccgcagcaggcggccccggcggcggcctcgtcgcccgccgcgtccatgcccggcggcatgcgcctctcgttcgaccatatgcccgggaaggcgcccggggagcagcaccaccaccaccaccacgcggcgccgcccatgctgtacgcggcgccaccgcagggcgcgggtgcgccggggggcagtgtgctcggcatgggcgaactgatgcgcaagaagcgcgggcggccgcgcaagtacgcgcccgacgggagcatggctctggcgctggcccccatctcttccgcctcggccggcggcggcggcggcgccgcagcccccgggcagcagcagcagcacggcgggttctccatcggtagccccccgtccgaccccagcgccaagcgccgcggccggccccccggctccggcaagaagaagcagttcgaggccctgggttcttggggcatcgctttcacccctcacatcctcgccgtcaaggcaggcgaggatgttgcttcaaaaataatgacattctcacagcaaggccctcgcacagtctgcatcctctcggcgaatggcgcgattagcaacgttacgcttcggcagccagccacatctggtggactagttacttatgaggggcgtttcgagataatctcgctgtccggttctttcctgctcgcggaggatggtgacactcgcagcaggactggtggcttgagcgtcgcgctcgcgggatctgacggccgagttcttggagggtgtgtcgctggaatgcttatggctgcaactcctgtccaggtcgtggtggctagttttatcgcagaggggaagaaatctaagccagccgaagcgcggaaggtcgaaccgatggctgctcccccgccgccgccgccacagatggctgccttcgtgccggctccggtggccaccagccctccgtcggaggggacgtccagcgcgtcgtctgatgactccggcagcccgatcaaccacggtgcgatgccgttcagccactccagtcagcaccagcaccctcaccagcaccagcagcacatgccgcctgcctacgcgtccgggggctggtccctctcggtgcaccagcagaacaggcatgattctgacatgaagatgatgtcgaactaacaggcgccccattcgttggtgtttgggctggagaggaaggaaaggaacctgctgatggttaggttggtactgctgctatgaaacggtcctcttgcgcgtcgtctgtgctctggtcagtgacgacgtgtcgatctgctacttaagctaagctagctaggagagttagggttcatggtctcaccccccgctgttgtgcccctgagtaagattaatttaatttgaattagtcgctctcataatgctgcgagttgtgatggtttcctgatcagatcttcaccttctaggctagttaaaatatcatttctctagtactatggatcatggatttacttggatacttgggtttaattcaggaatttgatcgtattctgt

SEQ ID NO: 14316 - DNA, 1419 bp, Zea Mays
ctcttccgacgcgacggcagatttgggaggtgtcgcggccagagagtgcacaggcacaactgacggtgctcgctcctctgctctgtgactcatcgctcgacgacgaaaacactcgttggatgttgcgctgtgttccaatccaatccgctccgctccgctccgctccgcaacccaattcccatctccgccggtgagggattcgccacaccacacgccaggccgcccctcggtcgcggaacccacttcctgctggcgcgcgccgtcttccgttggtccggacatgtgtctttgacagatcgttacaggaggaaagaggtgcccctgtttgtccacaatggctttagctcatgccagcgccatgtttcctccctcgagcccctcacataaaacttgggaggacccgtcattcttcaagtggagaaagcgtgaggcgcatgtaccactgcgctcacaggacacgctggaagcggctctgaagtattggcatgaacggaggaatgtgaactatcacaatgctgacactgctgtctggaacgatgacgctgttcgcggtgctctggaaagtgctgccttttggtccaagggcttaccgtacgccaaatctctaagcggatactggaaattccttctgtcgccttcagcggaaagtattccggagagattctattatgctcattttgatgattcaaactggtcgggtttgccagttccctcaaattggcaaatgcatgggtttgaccgtccaatctacacaaatgtcacatatcctttcccattgaacccaccatttgtgccggctgataatcccacaggttgttacaggacagtctttcacatcccaaaagagtggaaaggtcggaggatcttgctgcactttgaagctgttgattctgcattctttgcttgggtaaatggagtactagttgggtatagccaggatagcagacttcctgctgagtttgaaattactgattgctgccatccttgtgattcggacaaggaaaatgttcttgctgttcaagttatgaggtggagtgatggctcttatcttgaagatcaggatcactggaggttgtctggtattcacagggatgtgctcctactatcaaagccacagatttttatcacagattacttcttcaaagcaaccttggatgaaaatttcagtttagccgatattgaggttgaggtggagattgactcacacaagcaagaccaggagcacgtcccaactttgtctattgaagcaacactcattgataactctggactatctaacagtatagatgctgatctttcatccgctaatgcagtcaatttgaaaccgaagccaaaacgaactcgaagcccttgtcttggttttcatggttatgtacttggtggaaaaatagaaaatccaaaactttggtctagtgagca

SEQ ID NO: 14317 - DNA, 723 bp, Zea Mays
cgtggtgctatcaaatcggacatgcagcttcaggcacctcgcccgccccgaaagctcagcggttttactacattatcaagaagttggcagcagcagcggcagtagccatgggcatcctggaccacctgtcgcatctgtgcagcatcacggagacgaaggaggcgctcaagctcaggaagaagcggccgctgcagactgtgaacatcaaggtgaagatggactgcgaagggtgcgagcgccgcgtgaagagcgcggtgaagtcgatgcgcggcgtgacgagcgtggcggtgaacgccaagcagagcaagtgcacggtgaccggcaacgtggagcccgccaaggtgctggagcgcgtcaaggccaccggcaagaacgccgagatgtggccctacgtgccctacgcgctcaccacctacccctacgtcggcggcgcctacgacaagaaggcgcccgcgggattcgtccgcagcgcgccgcaggccatggcggaccccggcgcgccggagctcaagtacatgaacatgttcaacgacgacaacgtagacgcgtgcacagtcatgtagtttcttctcttcttctctttccgtggatcgatcggatatccctgtcactgtcatcaccggccggccggccggccttattattattcctactgaaaccaacgtcaattatatccgttcatgcatcttctcctccaaaaatcatttgaaaaaactcaaaaaa

SEQ ID NO: 14318 - DNA, 1677 bp, Zea Mays
atgatgaaatttaagaagggaggatgttgtggcaaggcgtccaaagatgaaaatacaagaaaagataacatgatactattaggtaagagagaagcaaagcaagcaacaccggctgccgacgcgcaggtcagtacaatgagaggatcgatgttctgcggcggagatctccggtggtggatgttggccatcttcttcctctgcacactaattgctgccgcggaggagcgcgtcgtcacccatctccccggcttccagggaccactccccttccagctccgaactgggtacgtggaggtggacgaggacaatggcgtccgcctcttctactacttcaccctctccgagggctcctcagccgacgacccggtcatgctctggctcagcggcggccccggatgcacttccttcaccggcctcgtctatcagattggccctctcagtttcgaccttgacagctacatgggtggcctgcctaagctggtgtacagacctgagtcctggaccaaggtgagcaatatcatttttcttgattccccggttggagctggattttcatactctgtcaaagagcaaggatacaattcaagtgacacaaaagctgtcagccatattctggtctttctcaagaagtggtttgacgagcacccagagttcttgtcaaatccactttacattggcggtgattcatacgctggtatgattgtgcctaccgtcacttctgaaattgctaagggtttgaaaattgttggtagtaaacctacaatgaatctaaagggctgccttgttggaaatccattcacagatcaatcaaactttgatgggccatcgaaaattccatttgctcataggatggctctcatatctgaccaaatgtacaagtcatacaagaagagttgccgtggaggagacaacaggcaccaaagcatccagtgcagaaatagtcttgatgccatagatgagtgtgtcaaggatatatctgagtttcacgttctggagccccgctgtgcttatgcaagccctcaccaatacaatgttctcaagctgaagacgagtttaggtgttcagaagatgcagcagctaccagacttcactgcagaagggcttcacttgtctgagatttctacagagtgcagaacaatgctatatacactgtctagaatatgggcaaacaatgccacagtgagggaggctcttgggattcacaagggaacagttcccctatggttaagatgcaacacggacataccgtatttgaaagatattaagagttcagtgaagtaccatttggatgtgaccaccaaaggatacaaaagtctagtttacagtggtgatcatgacatgggtgtaccttatattggcacacaatcctggattaggtcacttaatttctctattgtggatgactggagaccatggtatgttgatgggcaagttgcaggatatacagtgttgtactcaaataacctcacatttgcaacggtgaagggtgctgggcatactgctccagaatacatgccaaggcaatgccttgctatgctttcaaggtggcttgctggtgataccctttgattggcgcatagagatgcactgctacatagttgtatagactttatgtgtataacctccccgaaaaggattgcaagcataatattcgatcgaaggaaaaaaatcaaataa

SEQ ID NO: 14319 - DNA, 1977 bp, Zea Mays
ggactctcaaagaagacctcgcatgtacgagatttttgccattataaaatacggatgccgcctcgtttcgttatttcgccgcctcgtttcgttatttgtttcgttatttcgccgcctcgttttgttatttcgccgccgttcgccgtcgtacagccgagccgccgccgagtcgagccggcaaagcgaagggaaggagagcggggtgaagaggagaggactccatggcgacagcctcagtgactttcaagtcacgggaggatcaccggaagcagctcgagctcgaggaggcgcgcaaggccgggctcgcgcctgcggaggttgacgaggatggaaacgagatcaatccccatattccccagtacatgtcctcggccccatggtatcttaatgctgagaagccgagtttgaagcatcaacggaagtggaagtcggatccgaactacaccaagtcgtggtatgatagaggcgcaaagcttttccaggccaacaagtacaggaaaggtgcttgcgaaaactgtggagccatgacacatgacaagaagtcttgcatggagcggcctcgaaatgtgggggctaaatggacaaatgtcaacatagctcctgatgagaaggatactgagaaggatgatgagaatgctggtagtgaagatgatgaagaagatggcctgaggatagatgaggccaaagttgatgagagtgcccagatggacttcgctaaggtagagaagcgtgtgcgcacaaccggtggtggaagcactggtactgttaggaacttgcgtatcagagaagacacggcaaaatatcttttgaatcttgatgttaactctgcatattatgatccaaaaactcgctccatgagggaagaccccttgccagatgcggatccaaatgataagttctatgtgggtgacaaccaaaatcgtcttagtggtcaagctctggagttcaagcaactcaacatccatgcatgggaagcttttgaaaaggggcaggatatccatatgcaagcagccccatctcaagcagaactgttgtataagagtttcaaggtcaagaaagaaatgttgaagtctgaacataaggataaaattatggagaagtatgggaatgctgcgtccgaagatgcaattcctcgggagctgctgcttgggcaaagtgagagagagattgagtatgaccgtactggtcgaataatcaaaggacaggatgtatctcttcccaagagcaaatatgaagaggatgtgttcattaataatcatacgagtgtgtggggttcatggtggaaagatcatcaatggggctacaagtgctgcaagcaaactatcaagaatagttactgtactggcttggctggaatagaagctgccgaggcatcagcagatctaatgaaggccaatatggctcgcaaggaggctgcagaagatgagcctgtacagcatgaagagaagcgattagccacttggggaaccgatgtgcctcaggatcttgttcttaacgagaagaagctccaggaatctctaaagaaggaaactgcgaggaggaaagaggagaaggatgaaaggaagaggaagtataacgtgaagtttaacgatgaggttactgcagaagacatggaggcctaccgtatgaagaggattcaccatgacgatcctatgaaagattttctcaactaaaagtgtggtaaatgtccgcactgccgtataacattggtggcaccctgccttgcagtgaagctgtgtaattgtaagatagactatgtacctgtccgaaccagggtggtgctgtaaactactctagtctagaatggctatgctttttacaagctgcgtgttgaaatgacatgatttctgatatcagaatccttgcttccatagttcccgtatccaagacacgggagccttcttcaggtgtatctaaccagaaacatgtggacatttttaccttaaatttgaccgacccgtcttattttaaaaaaat

SEQ ID NO: 14320 - DNA, 1886 bp, Zea Mays
ctctgctctgcaatctccctcccgtgagggaggtggtggggttcctgctttcctggaacaagcaaatccttgcttgccggagtaaggaagccgacaccacttggagttgctgccaactaccgggctcggctgtcaaattctctatctggcagccagcccgtgtccaattccaactccaccggtggtaaaccatcgacagcaggagcagggagggcaggctgcacaagaaaagagcatcattcctgctgatcggctcggctccactccaccccgaataaaatggcttccttctcgggacatctccaccgccccctgtccgccatggccgtggccgccttcgccgccgtctcctcccacgagcttcccgacaagctgtcccaccacaggcttcctgatgccagcacaggcacggacgcgctcgcctcgcttccattgaccaggtcagatgttcccgcagcgccttcggcatctgccctttctggcgcgcagctattgccacgggacctccacagcttgcgtctgctgaaggcgcccttcgcgtctgtgccggtcatgcagacggtgtaccagtacgccaactttgccaaaacctcgggacaggccgatgcgatgcctgcaattccttcctcgccgtccgatgtgctgtaccgctggcacctgccagaccccagggtctatgccgacttccctgacaagtctcagacggtcgtggtccttcttggttggttgggctcaaggcagaagcacctcaagagatatgccgattggtacacctccaggggcttccatgtcgtcactttcaccctcccgatgtctgacattctcagttataaccttggagggaaggctgagaagaacgttgagatgctatctgaacatattgctgactgggtcagggaggagagtgggaagaagattattttccacaccttcagtaatactggttggctttgttatggcgtaattctggagaacttgcaacagcatgatccttcagcagtggacaaaattaaagcttgtgtagtagactcagcacctgttgctgcacctgatcctcaggtttgggctttgggcttctcggctgccctcatgaaaaaacgcagtgtcaccacgaagggactaggttcagatgattcaaggtctgatgtcctagttgtggagtccaacaaggagctcaagctgggggcaacagaggcggttatactgtcagcgttagagagtttctttgacgttgttttgaactatccaaagatcaataggaggttgtgtgacgtgatggagctcttgtcctggaagcaacccaagtgcccccaattgtacatatacagctccgccgacagggtgatcccagcgaaatcagtggaggcattcatcgacggccagcggaaagccgggcatgaggtgagggcctgcgacttcgtgtcatcgccccatgtggaccattaccggagcaatcctgggctgtatagctctcagctggccaacttcttggaggattgtgtgcttgccaagcgctgtgagggtgcttgcacatcatgattgtctcttttatttgttcctggtcttgaattggaatgcaccagggacactgacatacgtgggttatacatgattttgttctctccttgttttaacggtctttgtgggtgacttttttttccccctcttgtaactcttgtctttgtggttggagtctgggcgcacaattgtaaaaacgtgtgaggagaaataaccaaatgaaaggagaggaaattcttttttttttatccactgagactgactgatagcctgaattacattttgattatgttactcgacctgtatggaatgatgtgcacagtgaatttggacctgtatggaatgattgaatgatgtgcacagtgaat

SEQ ID NO: 14321 - DNA, 1160 bp, Zea Mays
tgccaatcatcttttactgatttcaattggttacccggaaatcgaagataattgcaagccaaggcaccgtttcatgtcatcatatgaacagaaagtccaaagttgggataagggttatcagtacctactttttgctgcagagccctatgaaattattgcattcaagataccaagtacagagattgataaatcagcgaacaaattcttctcttactgggatcctgacaagaaggaatatctactgcaactgtacttcaagccaagaccgccagaagctaataaaccaccaccagctcctccggggactttgcctaatgggactggggttcctggtgctccaacaaggccaccggcgcaagcccctccacccctgccacaagttccaccgcccccgcctcatgcacctcctcctgcacccatgggaatgccccctaggattcctccaccccctatgggtggtgttcaacctccgccgcctcctccaccgccagttgcaaatggtccgcggccaatgattccaccgccacctaacttcactcctggagcacccccaccacgccctccaatgcatggttttcctgggcaacaacagcagtagttaagtgcttagcaatgttccagtaattgacagtcggcaaaagtttcacgcttgcttgtgttgccttatgttttccaactcaaaactttgaatgttatcataggcttacatggtctctagactatactcagatttggtcgaccgatttggtcaaattgcaagaaattgagttacatcaaaatccaaggtacaaaggaagacaacaattaaaaccatcaaaatggtgaaagtgcaatggagtcagtacttgtttgaagaagccacatggtaagtggaagtcacgataggaagcaatatccatatctcttcgactcaagataactagaagccattgttttgtagcaaagtttagtttgggttcaaagggatagctaggagggaacgaaaattgctaatttctctcgattttgattttcaatgcataacacctattttggttaatctcagggcacattttttccccaaaggggaggttggtcatgaccctatcatgatagtcatttccatactcatcatgagaattatatgcatttgaatctcaatttgtttaattatgtaatca

SEQ ID NO: 14322 - DNA, 1110 bp, Zea Mays
tgtcaaacctacaagtgctggcacaacagcacacatggttgtctcctcctttcaaagaaacggaatttgttttcctcatctaaagttactgcattgtattccatagaaatggctatggggttgattaatgctaatcctataatccatgagaaaaaagaaagacgcatccgacaggcaccagagaccacagatgaaaatgcggtagagtccatagaccagctggaaatatttgatcacattagagatataaaggatccagagcacccatactcactggaacagcttaatgtggtgactgaagactcaattgaactcaatgatgaaagcaatcatgtcagggttattttcaccccaacagtggagcactgcagtatggcaactattattggcctttgcatacgtgtgaaacttgtacggagtctccctccttattacaaggtggacataagggttgcccctggatcacacgcaactgaagctgctgtgaataagcaactgaatgacaaagaacgtgttgcggctgcattggaaaacccaaacctactggacatggttgaagagtgcttatcaccaacattcgattgaggtctcagttattgcacatctgggagccatggtgtttcatgttcagaagccacacaagcttattgccataggaattcactcctgaatattatatttgagggccatggtgtttcatgtgcatgattttttttgtcctccgtccctttgagttaatacaattgttatctttttggacatttgttggtgcttgtgacctccctgggcaaagggacatgtaatcagatcttgtgtagtagctttcagagcgtttccagtgccacgccattttgtggctgtgtacccccagtcaactgaacttggtaggtgaatcctagaatcctcaagcacgagttgtttatgtctctatacgcaggaaatgttttatcttctcagctcaactgatcatgctaattatttggcttgattgcctcctgtttttcccactggcagaccgtttcgcatgaagacgatacacttgcagcagcagcgcccaccaatgaacgcaatatactttcggtttcagtagcatgcaagcggaaagacgca

SEQ ID NO: 14323 - DNA, 2437 bp, Zea Mays
cgtggtgcaattgggcttctcggataattgttcgcttaaccatacgagcaagagcaacagagcaaagcaagcgaaaggcggccacaggcgcagcgtagttgtccctgtccgtcgcttgcgccaacctgctgcccaccgttaatcagttttctttaaccccagctgctgcccgtttactaatcaaatcatcgtccccctccggcccctcctttcccttccgcgcctccctcgtcttcttctcgtctccactccccctctcccaagtcccacccgccgctcccgcccccgtgcgctcgccgacacggtcagtagttccactcggagaaaggaacgcttccccctgcctgtctcgccggatccgttgccccgctgcagtttcgcccgccgctttcactttcgctttcactcgatttagattccatttccgttcgttcgttcctgtttcccttgctcgttcgttcgattggagctagccgccgcctggatctggcctagccgagccccggctgctctgaatcccgattcggttcggctcccttgctctgcggtcgcttccgaggcgtgctcggatctcgtcggagtagagggcctcgcggctcgcttcgggggcgagatggatcatgtggtcgggggcaagttcaagctcggcaagaagatcgggagtggatcgttcggggagctcttcctcgccgtgaatgtgcagaccggggaggaggtcgccgtcaagctggaaaatgtcaagacaaagcacccgcagcttcattacgagtccaagctatacatgcttctccaaggaggaactggcattccgcacctcaagtggttcggcgtcgagggggactacaatgtgatggtgatcgaccttctcggccctagccttgaggacttgttcaactactgcagcagaaagttctctctgaagactgtgctcatgctcgctgaccaaatgattaaccgggttgagtacatgcatcaaaaggggtttcttcaccgtgatataaagcctgataatttcctcatggggcttggtaggaaagccaatcaggtatatataatagactatggactagcgaaaaaatatagggaccttcaaactcataagcacatcccgtacagagagaacaagaacctcactggaactgcacgatatgcaagtgtcaacacccaccttggtgttgagcaaagcaggcgagatgatttagaatccctcggttatgttcttatgtacttccttaggggcagcctaccatggcaggggctgaaggcaggaaccaagaagcagaaatatgacaagatcagcgagaaaaagatgctcactcctgtggaggtactctgcaaatcgtacccatcagagttcatctcctacttccactactgccgttcgttgcggtttgaagacaagcctgactattcttacctgaagagactattccgcgatctctttatccgggaaggataccagttcgactacgtgtttgactggaccattctaaagtatcctcaaataggctccaacccacggaccagggccggtgaaagaactagtggcgctgctggaccctcaatggataggattgagaagaccccaggagaagcgtccggtagaaggaaccctagtggtcctgtgaatcagagcgacagttacgcgcaacggccacgcgagaccgtatccatgtcgctaaaggagattatgcatagcactgaccggtctggggaaaggactgtggagagaccacgcacgtcctcacgcacaggcagcgcatcccgcagagccgttgcgtcaagcagcaggccagcaacctcgtccatggaaccaagcgagcagcagtatagccgggcgagcagactgttctctagcaacagtggcagccggccatccagcgcccagagagtcaaccctgcgccgggcgagtctagggccacctccctttcgcgggcagcggtcgcgagaggctcccgcgacgagccactccaccgcagcctggagctcctttcccttggcagcggcaagaggaaatagcgggaaggaagccgatctgatagcggaagggaaaagaatgcctgttggcgactctgtaaatgacggggcatgtcacctgttcttcgccagcagttcttcccctggggcatcccgtaatttcatggtgcccgccccggccttttaccatggctccgtagatagcaataattcgttgttgaatgtgcgtgctgtgttgcagtcgcgttagggccaagtcctagcctttgtggtgattagatttagggggtggtcaagattcacatatttatgtttcttaaccctctcctggacttggcgactcttttttttaccccctcccgagacaagtgcccgtgcgtttcttgttgaactctgaatttgcttattcaacagaagttgataatgataataaaagaagaggcatcctgtgtaaaagaa

SEQ ID NO: 14324 - DNA, 3609 bp, Zea Mays
ttcagttataatatcctttgccacaggaattttgctcacatggttgggtatattgtgacatcttgcttactgaatgagaataatgatttcttaagaatggtaataaatacagtaaggaatgacataatcggacgaaatgagaccttccagtgcttagcattgacaatggtaggtaacattggtggtaaagaattttctgagtcactagccccagatgtccagaaacttcttatttcaagcagttgccgtcctgttgtcagaaagaaggctgctctatgccttctgcggctttataggaagaatcctgatgttgtgaatattgatggctgggctgaccgaatggcacaacttctagatgagcgtgatttaggtgtgctgacatctgtcacgagtctttttgtttcactagtatccaacaatgttgaagcatattggaattgtcttcctaaatgtgtgagaatattggagaggttagcaagaaatcaagatattccacaagagtacacttactatggaattccatctccttggcttcaggttaagacaatgagagctcttcagtacttccctaccattgaagatcccaacgcaagacgagctttgtttgaggttttacagcgcattttgatgggtactgatgttgttaaaaacgttaacaagaacaatgcctcacatgctgttctctttgaagctcttgctctggtcatgcatctggatgctgaaaaggagatgatgtcacagtgtgtggctcttcttgggaagtttattgcagtccgggagccaaacattcggtaccttggtctggaaaacatgactaggatgctgttagtaacagatgtgcaggatatcattaaaaggcaccaggctcagatcatcacatctttgaaggatccagatatcagcattaggagaagggctcttgatttattatatggcatgtgtgatgttacaaacgcgaaggaaattgtggaggagttgttgcagtaccttgatacagcagaatttgcaatgcgtgaagagttgtctctgaaggcagctattcttgcagaaaaatttgctccgcaactattgtggtatgttgatgttattcttcaacttatagacaaagctggagattttgtaagtgatgatatatggtatcgagtggtacaatttgttacgaacaacgaagacctacagtcatacgctgcaactaaagcgagagaatatcttgacaagcctgctttacatgagacgatggtcaaggtgagtgcctaccttcttggggagtatggacatcttttggcccggagacctggctgtagccctaaggaattgtttgctattataaatgataaacttcctacagtatcggcaagtactgtagctattcttctctcaacctatgccaagatattgatgcacactcaacctcctgatgttggactgcaacaacaaatcctcacaatatttaaaaagtacgagagctatattgatgttgaaatacaacagagagcagttgaatattttgaactaagcaggaaaggtcctgctttggcagatgtgttggctgaaatgccaaaattccctgaacgtgagtctgcactgttgaagaaggctgaagacgctgaaattgacacagcagagcaaagtgccataaagctacgcagtcagcaacaaacatctagtgctcttgttgtagctgatcacccccctgcaaatggatttgcaccaccagttaataatctcactcttgtgaagatgccaagtcaaactgtttctgacactcaggagagtggagtaagttatgaagaagctcctaagcctcctgttgaagctcccaaagaaaatgggactcctgtcgaagtgcagaacagggacacaaacattactgaaatcaacaatgagattaaagctgaacctccctctacatcccattctacctctcccggagacctcctcctggcagatcttttgggtcctcttgcgatagaaggccctcctgctgtagagcaaaatcctgcccaaggattgaatgctaatcaaagtccagctggtgacttggcacttgctacccttgatgatcagtccaactcagttcagccaattgtcaacgtcgaggagaagtttcatattttgtgcacaaaagatagtggggtgctgtacgaggatccttacatccagattggcttgaaagcggagtggcgtgcccatcatggccgtcttgttcttttcctgggtaacaaaaatacttcagcccttacgtcagtgcgggcgctgattttgcctcctagtcatttgaaaatggaactttcgtcagttcctgatactattcctccaagagcgcaggtgcaagttccccttgaggttgcgaatctccttgcaagtagagatgttgcggttctagatttctcgtatgcttttgggacttcactggtggatgccaaacttcgactccctgttgtattgaataaatttttgcagactataactcttacccctgaagaatttttctcccagtggaaagcgcttactgttcattcgctgaaggttcaagaagtggttaaaggtgtgaaacccatgcctctttctgagatggctaatcttttcatgagccttcacttggcggtcgctcctggacttgataacaacccgaacaatctggttgcatgcacgacattcttttctgaagcaacacgtgccatgctttgtctgatacgagttgaaacagatccacaagacaggacccaactgcggctaacagttgcctcgggcgaccaatatttgacattcgagttgaaagagttcatcaaagaacatctggttgatatcccaaggactcaggtcgccccacctcgcgcagcagtccagccacagttgcctactacagcacctgccacatacaatgaccctggtaccatgcttgctggattgctatgagaagtaacccgaaggaatagtgttttgatgtacatgacagttatttaatacgaggatctaacatctccacaagcatcttgctgccaagacgtacacgtggagcaaccaagaaagagctggcggagtgtagtctccatgaggattctaaaccgagaaagagcttagattctttttgtgcggtttgaaggccccctccctctccatgtagcagttgccgtattgtgtaagcgtaacttgttgtttctcattattatcatccccttttggtccatttgtataacctgtatcgcccatgtctggtggtggacaatcggtagtttttgtgtgttaatataaggtgctaggttttcccaccatgccgattgtaaagttgccctggtgcgcattgcactgcgatttgtacggaatagggaaggaaaaatttataggttttgctttgtgcatgttctatggtttgcatagctcccatctcttgatttcctttttcttctgctgctatgtggtggtgtgtgatggttcacgaggctcgattgtataatgtaacctggttggaaccggtgctccttttcttttggagttcccaattcatggatgtacacctgtgtctctctctctcacgcacgactcaatgatggtgcgtgcttggtacgataacaacagctgctagagtagacaggtgatggtgtggac

SEQ ID NO: 14325 - DNA, 756 bp, Zea Mays
catatcaggcaggcaatgaactagccattgtgccagttcaggtcctcgtagagttaatggcgatggagaggggatttggctcttgttgggcccatggtctctggtctcgtagcttttgaatagtatatgcagatgcaaatgcaatagctgtttttgctaactaattgtgcaatggttgaattgtttagatcatacatgttcttatgctctgctcaaaaagagaagatagtttcattgttacaatgttcatggacaagtcgtgcagtgttatggactcatctatggctaacaagtaggcacatggcacatcagttccgaccaatacggctattgttgtatccatctgcttgctgaagttacaagacccgaaaaataggaaattggaagaagggccatggagggaagccgcagtgttttgcatatattgcccaccttcacctgagagaagatatcgggcgcgcaataatgattagtgagcagtcctgtatggagcctgggtgcagcctctgccagtattaagtgatctacgtgttatacattttttatgttcatgaaacattgatccattgataaaatatatcgtcaggtggcaaggggtcgatttgggggaaaatatcttacgcaatttatttatttgttctgttgctaggtcaatttatttatttgttctcgggcgcaggccaccacaacatgtggtgacgaagtctgaattccttcgagttagcatttgtgaagcgtgtttggttctgcgggaaa

SEQ ID NO: 14326 - DNA, 114 bp, Zea Mays
ggggcgagcgactgggaagggactcgacgtagtggagcttgcaggcgagcatggtggagctcggctgggaacaagcaggaacagggtagctgcctgcgttggggaatagaaagg

SEQ ID NO: 14327 - DNA, 1117 bp, Zea Mays
tagtttggatttgaatctcttatagtgcaacggttcggtgacaaaaaaagcctattaagatgtgccttggggggcatttttcaaaagcaaggcggtctgggcaatgatatatgcacacttttgtggaagttgggggcattatacttgtttgtcttggctaccaacattctttagcgaggagctgaacctgaacttgacagaagcagcatgggtgtcagtccttcctcctttgggttcaatgatcattacatctattgcagcaccttttgcagacaacttgatatcaaatggagttgacaccacgaaggtgcgaaaaatttgccaaacaattgcctttgtgtcacctgcgactttcatgatgctttcctctgtggatcttggactgcctccctgggaaattgttgcttttcttacaagtggtgtagcactctccagcttcgcattgtcagggctttattgcacacatcaagacatctctagtgaatatgcaagcattctcctgggaatcacaaacactgtaggcgcggtgccaggaattgtaggcgttgcactcacaggctttcttcttgattcaactcattcttggagtatatcactctttgcgccttctatcttcttttacttaactggtactgttgtatggttggcatttgcaagcagtaagccccaggatttttccaagtcaggacctgagtctgagccgtgaatcgtgatgtatggtactcctctgcacataaggatcgtttcacaaggaaaattcgttttgagtttagacaaaagaatggagttctagggcagagaatagatgttatgttcctcttcagtcagtagcagacaagaggaagccactgataaggggacaatgcttgcgtgtatatagtataatgatgataggctttttttctggttagttttcacattttgatatggttttgatttttgaatgtgtgcagtcaggtccgcggtccgccagtttgtagtatcctgttggtttcgggtgtcttggttgttgagtgagatttagaatgtgctgatacttcgtttcagtgcttgtactttagattcgacctgttacgaaaaaaatgaagagtacccactgaattttaaattacaagtc

SEQ ID NO: 14328 - DNA, 4505 bp, Zea Mays
cagactactagcagtgaccatattttgatggtaaccgacagcgtgcctgaaagtttaaaatgtgcacttgaagaccaggcagctgttctctactcaaggaagagatggcccatgtttcgttcaaaagcaaagatgtggacagcggcatgtcccggtggtctgaatacctaagtgttgaagagccaattccttccgcaatggcaacctggaggaacatgagcgctgatgcgccgcaaggctcttctgctggtagccacaaacatcttcagatggagccggtggttcagctgtccaaggttgcggaaggcttgctggccaaaatgtaccggctgaacagcatcctggactatccagatccaaacacgcacacattctcggatgcattttggaaagctggtgtctttccaaatttccccaaaatttgcatcacgatgtcaaaaaaatttccggaacatcctaacaagctgcagctagaaagggtagataagtttggtcttgatgctttaaacgagaatgctgaaggttacatgcacaatcttgagcagtggatcctgttgcttcttgatttgctggcatttcgtgaacaagctttgcgacttattttggatttgagcagcacggtcataacattgctgccacaccaaaactctttaattcttcatgcttttatggatctgttttgttcatttgtccgagtgaatcttttctctgacaagatgccaagaaagatgatcctccaggtttataacatcttgcacataatgctaaagggtggtcgtgattgtgagttttatcaccgactggttcagtttgtggactcttatgatccacctatcaaggggttgcatgaagatcttaattttgtgagcccaagaattggagaggtcctggaagctgttggcccaattatatttctttcaactgatacaaaaaagttaaggaacgaaggtttcctcagtccatttcatccacgttatccagacatcctaacaaattctgcccatccaatgagggcccaagacttggctaatgtcacatcataccgtgagtgggttcttctaggatatcttgtttgtcctgatgaactacttagggtgaccagtatagatgttgccatggttgttctgaaagagaacttaatacttcctctgttcagagatgagtacatcttacttcatgaaaattatcaactttatgttcttccaaaagttctagaatcgaagagaatggctaaatctggccgaactaagcaaaaggaagctgatctggagtacaatgttgcaaagcaggttgagagaatgttaacggaagtgcatgagcaagcactggtgtcatgtgatgctatgcatcgtgagaggagaattcttcttaagcaggaaattggaaggatggttttatttttcactgatcaacctagcctcctagcacctaatattcagatggttttttctgctcttgctttgtctcaatgcgaggtgatttggtacttccaacatgtggggattgcatcatcaaaatctactcggttgaaaactgttgacattgatgcgacagacccaactattggtttcttactagatggaataggcaaactttgttgcctggttcgtaaatacatagcagcaataaaaggttatgccttatcatatttgttatccagtgctggaagaatacggttcttacttggtactccaggaatggttgctcttgacctagatgcgacactgaaaggcctttttcagcaagtcctccattgtctggagaacattccaaaacctcagggggaaagtgttcctgacattaccgctgacttggctgatttgcgtaagcactggctgtcaatcttgatgatagtcacatcttcacgatcctcgataaacattaagcacttggagaaggctactgtgtctactgggaaggagggtttggtgtcagaaggcaatgctgcatataattggtcaagatgtgttgatgaacttgagagccaactctccaaacatggaagccttaaaaaactctacttttatcatcagcatcttaccacggtcttcagaaatacaatgtttggcccagaaggtcgtccacagcattgttgtgcttggcttggagccgcttgcagttttccagaatgtgcttctgcaattattcctgaagaggttaacaaaattggcagagattctatctcttatgtggagtcccttatcgagtctatcatgggtgggttggaaggtttgataaatattctagattcagaaggtggatttggctcattagagatgcagctttccccagagcaagcagctcttcgcttaaataacacaagagcaaagggtgtttcaagcttgttaactccaggatatgagagctatcctgataacagttcatcaattaagatgctggaagctgctatgcaaaggctgacaagtttgtgttctgttctaaatgacatggagcctattggtgttctcaaccatgtttttgttctacgcgagtacatgagagactgcatcataggaaatttcaggagaagatttcatagtatgattagaactgagaactgcattcagcgaccatcaatcatagaatctcttctaagaagacatctgggcatcatccatctagcagagcagcatattagtatggaccttactgaaggcatacgtgaagtgctgctagctgagagttatactggtccatttcccaatcttcaaatgtttgagactccagtggggacacaaggaggggggtctgccgttgagatgatatgcaactggtatattgagaatgtagtaaaggacgcttctcgcattggagttgcttttgatgcaatccaaaattgcttcaggagctcacagcctattggtggtggatgtttggctgaatcatttacagataaaagagaaatgaaatcacttgttcgtctttttggtggctatggaatagataaaatggataagatgctaagggagcatacgtctgcgcttttaaactgtatcgattcagcattgaggtcaaatcgtgatgccttagagggcctagctggaactgtaaattccggcgataggattgaaagggatgtgaacctgaaacaaattattgacctcgaaacactggctgacctctgtattcaagcagggcaggcaataactttccgtcggctgttggttgaggccgtcggagcagtccttgaagagaaagtgcctctgatatattctctgctcaaaggattagccttgcagttgccagacgaggtacctgataaaaatgagataattagattgagaaaggttgcgagcagtgttggtgttggcgacaaacatgatgctgagtgggtacactctattctggcagacgctggtgcagctaatgataattcttggatcctacttccatacctttgtgctgcattcatggtgtccaacatttggaacggtgctgtttatgatgtcaatataggtggactcagtaacaatttgcactgcctagcaaggtgtgtaagtgctgtgattgggggaagcgaatacactcgggtcgaaagggagcagcgaataaattctctttcaaatgtgcatacagatgagctgcaagaggccgagttaccgagccgtgtctcagcagaagcaaatatcaaatcttgtatgcagatctacgtcaaactgtctgcagggatcgtcctggattcatggaacgacacaagcaggcagcacatcgtcccgaagctgacattcctggaccagctctgcgagctgtccccgtacgtgccaaggagcaccttagaagctcacatcccatacaccatcctgcgctcgatataccaccagctgtacggaggctctctgctggcctcggaaccggcggagcagtccccaaggcagtcgcctctcatctctctggcacacgcgtccccgtccgcaaggcagatgcagaaccgaccagagacaacacccaggtcccacaccttcgacccaggctactacagctcgtcggggtcccagcacgacgatggctacgacgcggataggaggaccggacggctgctgcggagcttgaggcgctctggaccgctcgacttcggtgcgagcagaaaggcgaagaagttcgtcgagggctccagctccgggagcagccatggagctggctcgctgcagaggttcgcagtgtccagatctggccctctatcgtacagatagggccgcatgtaatgtaaactctagagagcagtagatcttcctatgcgtgctggtttacgtagctagcagtagcaacagcagcagctagttgtgctgtaagtaaaacccattaattgcttaatttgtgttgactgtcgttaggcaagtgatttgaattagctgttgctcgtttggtttgtgtatcaacaatacaattgttcgttgatttttcttgatagcaaagtaaagtaaaccaaccttctcttgaaagaaagaaatagagagaaagattagacggaggccgattaagcagagatgaattggttctgagtgtag

SEQ ID NO: 14329 - DNA, 3090 bp, Zea Mays
gagggaattctcacactacaggcaagagagttgatcaaatcaatcacaagtggcagtttcatctatctctggacgaagatggcacagataactctagcttcttcaaggagaagcttacacaagcccttcggtacttcaaggagtccacagatcaacatctgttggtccaagtctgggcaccagtcaagaacggagaccgctatgtgcttactacttcaggacagccttttgtgcttgaccaccagagcattggcctacttcagtacagggctgtatccatgatgtacatgttttcagttgatggggaaaatgctggagacctgggcctacctgggcgtgtctacaagcaaaaggtgcctgagtggacaccaaatgtgcagtactatagcagtggtgagtatcaacgacttaaccatgcgatcagttacaatgtccatggtacggttgccctgcctgtttttgatccttctgctcagtcgtgtattgctgtcgtcgaacttataatgacatcaaagaagataaactatgcctgtgaggtcgataaagtctgcaaagcacttgaggcggtaaatcttaaaagcactgaaatactggaccatccaaatgtccagatatgtaatgaaggccgtcaagcggctctggtcgaaatactagagatcttgactgtagtatgtgaagagcacaagcttcctttggcacaaacctgggttccttgcaagtatagaagtgtattggcacatggtggtggtttaaagaagagttgcttaagtttcgatggaagttgcatgggggaagtctgcatgtcaactagtgatgtggcgtttcatgtgattgatgctcatatgtggggatttagagatgcatgcgtggagcatcacctacagaggggacaaggagtttctggaaaggcatttatctcacacaaaccttgcttttcaaaagatatccgcaagttctgtaagttggcatatcctcttgtacactatgctcgcatgtttgggttgtctggctgctttgcaatatgcttgcaaagttcttataccgggaatgacgactacatattagagttctttttgccactcgattgtattgacgaagatgaccaaaatgccttactggagtctatattaactctgatgaagcggtgtcttcgtagcctaaagctagttgatgacaatgatttgagtggggtttctcttcaccttagtaatgtgctaaaacttgagaatgaagaatccaaaacagatgcacagtttgatggttcccttcgcgaatcacctgaggatgatagacatggaggatcccacaagtttgataatgagaaccagaaagttttggatatcacagagggacaattgttgactgatgactactctcaagacaatggtacttctgttggcagaccaaatggtagtggtgcttctgattcttcattgcttcacaaaaccaacaaaccccctgaaagaagacgtgggaaagctgaaaagactatcagtttagaggttcttcagcaatatttttctggaagcttgaaaaacgcagctaaaagccttggcgtttgtcctacaaccatgaaacgcatctgccggcagcatggaatttctcgttggccatctcggaaaattaataaggtcctcttcctatacctgttggcccttcaccagagtctctcaatgtagagaaattaactcaaagtaaagtggcagaactttcgaatcttgctgttggtgttgacagagattctttgcagaagtcgcttgaaaatgatgaccattttgatatagtcatggcccagcaaggatttatagacaataacaatgacgtgcagcttgaagctgacaaagcttctcactcgagaagttcatctggagagggcagcataaattcacgcacttcagaaggctcatgccagggaagtccagcaaaccaaacatttgtttgtaagccaatcgcttcaatgttcgcagaacctcaacttaatcaagaggagttcaacaaagaaccttttcaagaaccacaactaccactttcaaggatgctgattgaagattctggtagctccaaagatttgaagaatctcttcacttcaacatcggaccaaccatttttggcccctcccaacaacttggtgtcaatgaagcattcagggactgtaacgataaaggcgagttttaaggaagatattgtgaggttccgtttcccatgctcaggtggtgttattgtattgaaagaggaggtagcgaagaggctaaggatggatgttggcacgttcgatatcaagtatctcgatgatgaccatgagtgggtaaagttggcgtgcaatgcagacttggaagaatgcatggagatctcgcggctttctggcagccatgtcattaggctactggttagcgatattgcagcacactttggcagttcttgtggaagctctggttgatatgcgtgtcagccttttgctttgatcaatgtagactcgaaagttcagttccacttggtagttttgttgctagttagctttagctgtttcattgtgtttgataaatgtatcattgtattttacccccaaaaaaatacatgtaattgtgcagaacgcacttgtagtcaactttgtatatatcatgtgctggaaattctatttcaagttataaaaactgaatttgttattgtctagaatttgcacagaacagtgttgggttaaaatgattacattgtattggaattgcagcagattttcgtaggtcataattccatgctgtaaacacgtttatacattttatttatatctttgtgatccatgaagttgagacgcatgctggttttaacttattgcggtgatagaattggcaacttcataaagtagtatcacttgcactttactccctccatttctttctattggatgtaatatattaaaaaaaattgaacttcaaagttttgacaaaatggttaaatgtgttaaattagcttcatgcttagtgtctaaaaatcatatcaataaaattcacatatctcacgtcttttaccatggcgttgattttatagaaactgtatatatatatatatattaatgtgttttataaaaaaaagaaa

SEQ ID NO: 14330 - DNA, 436 bp, Zea Mays
agaagctgaaggatgccattgcaatgcacaacactgctcgttgcagcattggtccacctgttggagttggcgatgttgacttgctggataacgcgagccctcaagagaaacctgcagaagctagcccacggtagattcatgagaatgagctccacctcatccacttctacgtcctgctcattgttttcttcactatagatctcaatgtaatcagttgtggagaacataagtagcctcggttcatgaatcagatgtatggattattgtaacgcattcttgaaagggaaaaacatgtattatagcgtgataactgtaccttttgtgtttgttgtacagaaccatagaattgtacttcattttaggtgaagacgcctttgaacatttaagctcccttgtgggccgttttatagagtcagtcagtccagtatttttgcgc

SEQ ID NO: 14331 - DNA, 1128 bp, Zea Mays
cagcccgcagccgcaggtgcaggtgccgatcagatagcgtggcgccaaaccactgccgtccaactgaaccagtggacaggagccacccctgcacggctgcactagactacacgagggacccccgtccggtctggccgtctccgccctccgccgatcgtgaaacacaaccgtcggtggtttgcttgcttgatcgctgatcctcgcggacgctcacggtcatggcgcctcagcctttgcgcgctccgaggctgagcgcccccgctggccacgcggcgtgcaggtgctcggccgcgccgctattcgggaagcgggcgccccccgtcgtcgcgttcccccgcgcccgtagcggcggcgccgtcgcctcgtgctcggccgtgcaggagtcgtccacctccaccactggtacgggtcttgctaccctaattgcggggtgggtgggatctcttctgaataagttctctcgagacgtagatcggcatgttagcaagaagaaggatgccgcggacggggccaaggaggccacagcggaggcggcgaagccggccgcggccgccaagccaaagaaggccgcggcgctgccgctgccggagatgatgcagcaggagatcatcccaccgctgaaggatgccttggaggcggaggacgacgtgtcccaggtgcagctcgccttccaaaacaacacgctggagggatccttcataaagaacgacgtcccttattatttttgggccttctttccaaaaggagacctcacaggaccgaagggctttgcgctatcgtcctacagcaacgaagtgagcaccatcgagccgttcctgatcgatgagaagaggataacggccaagtacgtggtgttctgggtctacaagaggctggctgggcaaggcatccttccggtctggaaggaagaggagggggaggaggaggccgcgaagtagtaggttgcgcaggcgcatacgcatacacatacacacacacagggtgctgccgtgaacatacacatgtaacgctgtaaagttcatctgctagtaaaagttcatctgctgtgaacatacacatgtaacacagatacttcagtttcagcagttaaaaacctaccgtcgttattcttctggtgtgagataagaa

SEQ ID NO: 14332 - DNA, 3034 bp, Zea Mays
ccggtggggagagccggaaccggaagtctgcgtggttcactggttctttaggttgactatcaagagaaacaatatgctcaaggtgttatccccacaacatatatgcgcagggaaggtgctcctaaggaaagagaacttctatgtgggcgtataattgatcgaccaataagaccattgtttcctcctggcttttaccatgaagttcagatcatggtaaatgttctttcatcagatggaaagcaagatccagatgtaatggctgcaaatgcctcttcagctgcactaatgctatctgatataccttggaacgggccgattggagtaatacgtgtagggaggattgatggggcttttatattaaaccctacagtggatgagctaggtttgagtgacctcaatcttgtttatgcatgttctcgggataaaactttaatgattgatgtacaagctcgtgaaataagcgagagggatcttcaggcaggaatgaaacttgcacactctgaggcaattaaatgtatcgaccctcaaataagtttggctaagcgagctggcaaaaagaagaaagaatacaagatatcactgatttcagatacatcctatgagaaaattagaacattctcagaagcacccattgaggaagtcttcactgattcatcatatggcaagtttgaacgggggggagctttagaaaaaatcacacaatctgtgaaggcaaagcttgaagaagaaaatgatgaggacagcttgaagtttcttcacaaggcagttgacacagtgagaaaacaggttatacgtaaaagaataattgaagagggacttagagtagatggtagacaacttgatgaagtgagaccattgtattgtgaatccaacacatatccattattacatggttctgccctgttttcacgtggagacacacaggttctatgtacagttacccttggtgctcctggcgatgctcagcgactggattccattgttggtcctccaacaaagcgtttcatgcttcactatagctttccaccattttcaatagatgaagttgccaaacgtggaggccttaatcgacgagaagttggacatggcactcttgcggagaaagcattgcttgctgtgcttcctccagaaagtgattttccatacaccgttcgggtaaatgcagaagtcatggcatctgatggttcaacatcaatggcatcagtatgtggaggaagtatggctttaatggatgctgggatacctgtaagagaacatgttgccggtgtttcagtgggtcttgtaagtcaggtggatccagctactggagatatttctaattatcgcatattaacagatattctgggccttgaggatcacttgggtgacatggacttcaaaattgcagggacaaggaaaggtattactgctattcagctggatataaaacctgctggaataccattggacataatatgtgaaagtttagagcctgcacgtaaggctcgaaatcaaatccttgaccgcatggaccaggaaataagtaccgcacgtggtattaacgatggaagttcccctcgattagctacactgagcttcagcaacgagtctcttaggaaactgcttttccacaggaaaaaaatcgagcaagaaacaggtgcacgggtatcaatcagtgatggtacagtcactattgttgctaaaactcaagaaattatggataaagctattgagaaggttgagttcctcgtgggacgtgaaattgaagttggtcgtacatacaaaggaattgtttcttcgattaaggagtatggcgcttttgtggagttcaatggtggacaacaaggcttacttcatatttcggagttgtcacatcaaccggttacgaaagtctcggatgttgtaactcttgggcaatctctctctctgagatgcattggacaggacatgcggggtaacattaaactttcacttaaagcaaccttaccccaaccacgtatcaagaaggatttgaaaaataaggatcctttgccaagtgaagttactggttgggctgctgtggagaacatgagtagtgtggatgttgatgctcagctatcaagtaccgaacatgaaaatggcacaactgaggaggcagctgcattttcgactccttcagttataattcgaagtgctgctgactgtgatgctcaagatgatgcaaatggttctaagaagcgggcgaaggttgcaaagtcatctcctagaccaaataaaccagccagcgaatgccatgatgttaggaaagctaccgctaagaaagctacaggtgccactaccaagaaaactaagaaagtaaagattgaggaatctgtgagtaatggactagaaaccagtggttctgatgttccagaacagagtgctgacaacacttctgaccagaatcagagtcccacgaaattccaatctggggcaatgaagttgggtgatgtagttacagcaaaggtctaccagattcgagcctatggactagtacttgagttgagtgatggtgtgcgtggaatgcataaatttgaggcaaatggcctaaaggaatttgaagttggacaggaactagtagtgaaatgttctagtttcaatgcgaaggggattccgttattctcattgctggactagcaatgccaccatttgggaaccggatacaaatgacaccttagcagctaaccaatcaacttgtggaacacatggctagcgaagttttgttctttcgctgttgttgaagcgttggtcaagttctttattcgtacaaccatgaatagaatggaggtcaatcacatgaagtgtagagcgtacggactgagtacgaaccatcggaacctgctgtagccattatatataactaggattacgttacttatctatctattggttaaaataatagggacgatgaattctttgtaagacgtactgaagcagagtgtcccacttacaggaatccagttccagtttgtagtttctttacctaagattgttcagctgtacctttattttatttttagcagggctgtttacaaaa

SEQ ID NO: 14333 - DNA, 931 bp, Zea Mays
ggttttctaatgaaaccgaacacatctcggttttaaacaaaactatgattttactacggtaaggcactataatatttgtgtcatgcataattataaattttgacattttaaaattatagtattttaaaactgcattattaaacaggccctaatccctggcagccagcgtttcaggttttcaggacaccagcttcctagtttctattggctacggcatcttgaatcactgtccagtcgtgtcgatgacccctccgctgcgccaaccaacccaccctggtccacgggcgtcacggcactgctacagtgctacaaaccaactacctaccaccactccggcagtccggctagctccataaaggcgcagccggccggctggccggtagcagtcagccagccagccagccatggagacggcctccttcctctcagtggcgctggccctggcggccctcgtccccgtctcgctgctccttgtgaaccggctcctctacggcaaactgcccccggggccgcggcggcgtcccgtggtgggtaacctgttcgacgtgcagcccgtgcggtgccggtgctaccaggagtgggcgcgccggtacgggcccatcatgacggtgtggctgggcacgtcgcccacggtggtggtgtccacgtcggagctggccaaggaggtgctcaagacccacgaccagcagctcgccgaccgctgccgggaccgctccaccgagagcttcagccgaggcggccaggacctcatctgggccgactacggcccccactacatcaaggtgcgcaagctctgcaacctcgagctcttcacgcagcgccgcctcgaggcgctcaggcccatccgcgaggacgaggtcaccgccatggtcgagtccgtctacaaagccgtcaccgcgcctggcagtgcagggaagccgttggtggtcat

SEQ ID NO: 14334 - DNA, 254 bp, Zea Mays
ggttgatcctgccagtagtcatatgcttgtctcaaagattaagccatgcatgtgcaagtatgaactaattcgaactgtgaaactgtgaatggctcattaaatcagttatagtttgtttgatggtacgtgctactcggataaccatagtagttctagagctaatacgtgcaacaaaccccgacttccgggaggggcgcatttattagataaaaggctgatgcgggctctgcccgccgatccgatgattcatgata

SEQ ID NO: 14335 - DNA, 1695 bp, Zea Mays
ctaccggacagtgaggcgccgcttgccctccacatacggccgcggcgaggaacccaaaaggccaaaaccctcccaaaagctactacacagtacacacacggaacggaatccgggcatccgggaaagcagccctaatctcaaggccgcggctgcgagcgctgcttcccacctcccaactccagaagtcctccctagacgccgccagccgcgcgcacacccaccgagagctcctcgggctttctttctccgttcctccctcgcgcgctcagggtttcacgatggaggccgaggcggtggtcgccggtgctggcgagcaggcgggaatctccgccgtcatcccaggatggttctccgagatcagccccatgtggcccggtgaggcgcactccttgaaggtggagaaggttctgttccagggcaagtcagactaccaaaatgtgatggtttttcagtcctccacgtacgggaaggtgcttgtcctcgacggagttattcaggtgacagagagggatgagtgcgcgtaccaagagatgattactcacctgcccctttgctccatcaaagaccccaagaaggtgttggttattggagggggggatggtggtgttttgcgtgaggtttcacggcatatctctgtggagcagattgacatctgtgaaattgataagatggtggtagatgtctccaagcaatttttccctcatctagctgttggatttgaagaccctcgtgtgtcattacacattggagatggggttgccttcttgaaaaatgctccagagggtacatatgatgcagtaattgtggattcttctgatccgataggtcctgctcaggagctttttgagaagcctttcttccagtcggtggccagagctttgcgtccaggtggagttgtatgcacccaggcagagagcatatggctacatatgcacatcattgaagatattttcgtcaattgccgccaagttttcaaaggctcagttaactatgcttggacaacagtacctacataccctagcggagttattgggttcatgctttgctccaccgaagggcctgctgttgatttccagcaccctgttttcaacatcgaggaggatgaacattctacgaaatcaaaaggaccccttaagttctacaactcggagatccacacggcatcattctgtttgccctcttttgcaaagagggtaattgagtcaaaggcaagctagacgtgaggatacttcaccaagtccagtcgattgggttaagtaccttaggcgcaacacaaaatttgttgtcgtgtgaaaatgggatgcctccctcccccaccccccacttgatgaataagcacatgagatgagatgcaacggttatcggagttgtcagtctatacgattctgtctgttgtatgtgccggctgccaggtgcagctatgaaaacgttttgcaatagctgttttcggcagtgctctgatcaggttgagttttggacatcatttattatgttcctgcatccatacctgatactccctccgttcttttttatttggcgcggtttagttcaaaaatgaactagtggtgataaatattcgagagaacggaggtagtaccacagatggaatatataagaaataaaactgtgtaatggttgttgccatcctatctttttgaaactggttcagctccaaaaaacataaatagataaaac

SEQ ID NO: 14336 - DNA, 270 bp, Zea Mays
cttcttccgtcgctctcgctctcggtctcggactacggttgagcgaagtcgtcactgtaatctactgatctgcaaatggcggaggcggaggcgacggtggggcgactgatgctgtactcgtactggcgcagctcgtgctcccaccgtgcccgcatcgctctcaatctcaaaggtgtggattacgagtacaaggcggtgaaccttctcaagggcgagcagtctgatccagaataaagccggttgcaattagattattcaaggagtcttgtt

SEQ ID NO: 14337 - DNA, 76 bp, Zea Mays
caactctccaaccactatcattttcactattattttgaattaaatcaaatttacatgttttgtgaatgatgagatt

SEQ ID NO: 14338 - DNA, 2682 bp, Zea Mays
ccaaacccccaacctattcgagcgacgaaactggaaaaaagcacgcgacgacgcgacggtgaaggggaagtgtgaagggaagcagaagcgagacaaatccccacccggctccaaaccctagccacctcccccgtcccccccttttcgtcccccagatctcgctggcgtctgctccgcctcgcttcgatgtgaccccaccctagggtttgagacggtgttgcggtgtgtgcgtgtgtcgcggcgattcgcgacgcgagtaggattcgaggtgtcggcggcggtgcgagcgcaaatgaaggacccggcgcaccgcacgaaggtggtgctccggcggctgccgccggcgatcgcgcagcaggccgtcgtggaccaggtcgatgcgcgcttcgctgggcggtacgactgggcctgcttccgtcccggcaatgccagccaaaagaatcataggtattctcgactttacctaaatttcaagcacccagaggatgttgttgagtttgctgaggtcttcaatggacacatatttgtgaatgaaaagggtgctcaatttaaagctttcgtggaatatgcaccatcacaacaggttcccaagtcaaatgtcaagaaggatggccgtgaagggactgttacgaaagatcctgagtacttggagtttcttgagtttatttcaaagcctactgagcatctacctagtgctgaaattcagcttgaaaggaaagaagccgaaagggcagctgctggaaaggaggcacctgttgtgacacctcttatgatgtatgtccgccagcaaagggcagctaagagtatggctcagagacctggaagtaggcttagcagaaaagttgcaggtgttgtaactagcagttccagtcctaaaaggtcttttgagaagcgcagatcctccacgtatgttgtacgagacagtattaaggagaaaccgacctatatcatggtgccaaagagagaggagcatacacaaagggaaaaaattgtttctggaaattcagatgccacaagtgggggggcatctggatctggtcagtcttctgacaaaattgtcattttgaaaggaagaggaagggttgattcgaacacacctgatggagcagctcaacagtcatcaacccctgtgaagaatataccaccatcgagttctagactagacaagcgatctgaagctaatggaagaattattaaaactgttctttcaaacaaggaagttcgcagttcaaatccatctcaacatgagcaggaaggtcaaatgtttaatactgagaaggataagcgtccaccacgggctctcaaccctcggactattgtgaaagatcaggtagttgaaaatgctgagagaagccattttgatgagaagaataattatctccacagctctgctccaattggtgagaaggttgaaaggcatgccagaaacagagatagacctgatcgcagtgtatgggcacctcgccgctatgacaaatctccgcctgggggtgtttcacatgccttgtcgtcagatttttctcaaatgcagtcacattctggagataatgtctcacaactaacagatggtcatggagacagaaagacagacacaaggggtcatggaggtagccgtggtgttcctgttgaaaatggacataggcatgccaaccgtcgtggtaccccatgtgatccaaaggaaaccaaaatatctgctagcgtgcctgatggaaagaattcaaagaggggctctgctagctatggtgctcatgagagacaagtatgggttcagaagtcaagttcaggctcgtgagtttgtccattgatgatactcccataaaaaacaggtattgaagtcgtggagaagtcttggattctgcagcgcattcttctttgttagctgttgatcctgtgaagtatggtaacgaaatgtccaatggtcaaatgctaccatgaagtgcaatctcagatctgtcagtcgaagtctcagctgaaaagagggctcggctgatttgattcacagaaatagtgaagtaacataacccggcatgtaggtagctctccgacaactttgggcaagatttgatttatgcccaatgttgatctttctggagcattggatggagattaggttggcatcactacctcattacctcgtgatagtggtcacatatttccaagacccctggaggttacacgcaccctcggcaattcgtcagagatggatgtaaatatctctagagaaagaagaggtctggttccgattgctgtttacaggttagaggtgcaacgtatttacaaagagagataagagttatcacttatcagattacctggtttgttaaataaaggtgaatttagctactagattatgagaccccgtgttttgacttctgcaatcgtggttcacgacagcagaaaggttacctaggagtgtaaaagtgacatctcattttgatgctatggttctgactcaatgggatgtgactttgtgatgtggttttgtcgcctggtgtgtgttttgctgccatgttcctccaaatgacccgggtgttctgtcgtgttagggatgatatgcttggtgtacagcatcaaaggtgcttaatgttttaaatcttaaaagtgatgttgcctggctttaatggttgatgatgtccgttctcctgtgcatttcgtcatgaaggttaaaaatatagatttgcc

SEQ ID NO: 14339 - DNA, 1610 bp, Zea Mays
actacctcgttctgctccgtcgctatattcctcgccggagtgtagcggggcgaagccatccgaactccgaaaagccccccagcggcctcccctccgccccgcagccatggccgccaccggcgtggtcgccgagccgaagaccaagtacgatcgccagctcaggatatggggtgatcaaggccaggctgcactggagaaggctagcatatgcttgcttaactgtggtcctaccggaaccgaagcattgaagaatctcgtgcttggaggcataggaagtgtgactgttgttgatggctccaaagttgaatcatctgacctggggaacaattttctgttggatgaaggatgtttggggcaaccaagagctaaatctatatgttctttcctacaagagcttaatgacgctgttaaggccaagtttgttgaggagtctccagcgcatttgatagatactaatccttcattcttttcccagtttactgttgttattgctacccagcttccagagagttttttactgaagctagattatatctgcaggaaagcagatatcgttttggttgctgcacgttcatatggtctaaccggtttggtcagggttagcgtaaaggagcattgtgttatagaatcaaaaccagaccacttcttggatgatttgcgacttcacaacccatggactgaactaaagcagtttgcaaaatcaattgacataaacgataaagatcctgttgtccacaaaaatactccatacattgttatccttgtgaggcttgcagaaaaatgggcagatgcacatgatggtaacttgccttcaactaggcaagaaaaaaaggaatttaaggatctaattcgagcccatatgcttaatgtagatgaagaaaattacaaagaagctgtggactcttcatataaagtatcagtcactccaggaatcaataatgagattcgtcagataattgatgatgactctgcggaagtcaattcctcatcgtcagatttttggattttagtggctgctttaaaggagtttattgcaaaggagggcaacggtgagctacctctggagggaacaatacctgatatgacttcccttactgagtattatgtaagcctacaaaagatttaccaagctaaggcagaatttgactgtcttgccctggagcatcatgtaaaggaaatcttaaagaggattggtagagatccggattcaatttcaagagcatatatcaaaacattttgtaaaaattctagaaaactaagggtttctaggtatcgtagttttgaggaggaatttagctctccgtttgtccctgagattcagaggtatttcaccgatgaagactacagttacgcaacgaacttctatattctactacgtgctgttgatcgattggctgccaattatagcagattgcctggaatcttcgacaggctgaagactgttgcggcttcagtggcaagtgagatgggtttgaatggagcatccttatccgaagacctgataaccgagatgtgccggttcgggggtgcggagattcatccagtggctgcttttgtcggtggagttgcttcccaagaagtgattaagtttgacttaggataaacacaaa

SEQ ID NO: 14340 - DNA, 1461 bp, Zea Mays
ccttgtgctattgcacaaagtgtttgcatgtattggaatttagatgctccagagccagaccaacctaactttttttattgcagatcatttaacataaatggctgacgcagaggacattcagcccctagtctgtgacaatggaactggaatggtcaaggctggctttgctggagatgacgctccacgtgctgttttcccaagtatagttggtcgtccacgtcacactggtgtcatggttgggatgggacagaaggatgcttatgttggtgatgaagcccaatccaagaggggtattctgactttgaagtaccccatcgaacatggaattgtaagcaactgggatgacatggaaaagatctggcatcacaccttctacaatgagcttcgtgtcgcaccagaagagcacccagttcttcttacagaggcccctcttaacccgaaggctaacagggaaaagatgacacaaatcatgtttgaaaccttcagtgttcctgctatgtatgttgctattcaagctgtgctttccctatatgctagtggccgtaccactggtatcgtcctggattctggagatggtgtcagtcacactgtcccaatctatgaaggctacgccctcccacatgccattcttcgtctcgatcttgctggcagggacctcactgattccctcatgaagatcctcaccgagaggggctactctttcacaaccactgccgagcgggaaattgtacgtgacatcaaggaaaagcttgcatatgtcgcgctagactatgaacaagaacttgagaccgccaagagcagctcatcagttgagaagagctacgagctgcctgatgggcaagtgatcaccataggcgcagagcgcttcagatgcccggaggtgctcttccagccatccatgatcggtatggaagctccaggaatccacgagacgacctacaactccatcatgaagtgcgacgtggacatcagaaaggacctgtacggcaacattgtcctcagcggtggatccaccatgttccctggcatcgctgaccgcatgagcaaggagatcaccgcgctcgcgccaagcagcatgaagatcaaggtcgtcgctccgccggagaggaagtacagtgtctggattggaggatcaatcctcgcatccctgagcacattccagcagatgtggatctcaagggctgagtatgaggagtctggtccagctattgtccacaggaagtgcttctagacgtcactcctcgtggaaatgcctttgtttcatgacatatctatgggtggtcgctctgctacagctcgcagttttttgtgtatgccacaagccgcatatatatatatccattctggtaacgttgtggagtcagccgagcactgtatgaagtatgtagtttggtttgatatatattgattggattattacttgattctatggggtcttggatgccagctggaatgtgcaaa

SEQ ID NO: 14341 - DNA, 998 bp, Zea Mays
aaagaaaaagagaaagacacaaacaatgaacaagtctcatggtcatgggccagcaaaccagcgtcgtgatgcgcgtgcagctgcaggaaaaataaaaataaaaagacaaaatcagtcggcccaatagccatggaagaattgctctcctgaggtgtgctctgctgcttggtgtttttcctcctcccgttcacctcgccgtcgacggggccaggcggccgaacacatccttgacgaccgccgtcgccctactcgcagcttcctgggtttcatcggatcctctgctagcgacgagcaccccctacaccaggccgttacttgggcgccggtgccatgcccggcgggtcttcgggtccagatggtgaagtggatgcaggatttgcgaagctccagggagaggatttcgagtattacatgcaaacgtactccatcatgctgggacgcaacagcaagaaatcaacagtggatgtggatctctcgagcctcggtggggattggggacaagaagttctacttcctactgccaacacggtccatcttcgcttcggctgctgctgctcggcatgctcctattattccacagcagcttcctcctccaccgtatgcacatgcacgggcaggccgccctcgtttgtccgagtttcatgaccgctccttcgaaggtgattatgggcgggaggttgatgagattgggaatggtatcagtgaaactgcgatgaggggaaagctggtaaagaggaacaagaagtcttctggcgacttggatatctatggtgggcatagaatcaatgtggaagcaatagggacgctaggtgaagacagtagatcagaaataagatcaaggggtgacagggatattgacaaccaacaagcccttcaagcagaagagaaggatgttgtatcatctgtggccacagtgttatctgatctctgtggccctggggaatggatgcccatggcaaaactccacaacgagtgttatcacatgtttataaactgac

SEQ ID NO: 14342 - DNA, 6439 bp, Zea Mays
aaaacctttccgtccgttactgctatagcgttcatcatcccattccttccccaccaccacctcctgcttctacactactggactgctgctgctgctctccccctcccctcccctcccctcccctcccggccgccgccgccgccgccgcgtgttctctctcatctagggtttcatctccatctagtcgagcattcccgtgctggggtggggagtgggagactcgactcgatttgattcgactccatttcgtgctagcgcctagcgctgcagagcgagtgaggtgacgggaatggcggctccggggcggaggacggcggacgtgtcctcgtcctcgccctctccgtcccctgccgccccctccaccggcaggcgcctcctgcgcacgcagaccgtcgccaacctcggcgagtccatcttcgacagcgaggtcgtgccgtcctcgctcgtcgagatcgcgcccatcctccgcgtcgccaacgaggtcgaggttgaaaacccgcgcgtcgcctacctctgtcgcttctacgctttcgagaaggctcaccgcctcgacccgacttccagtggccgtggtgttcgtcagtttaagaccgcacttctgcagaggcttgagagggaaaatgaccccacactgaagggaagggtccacaagagcgatgctagtgagatgcaacgcttctaccgcgaatactacaggaagtacatccaggcactgcaaactgtcgttaataaggatgaccgtgcgcgcctcactaaggcataccaaacggctgctatcttgtttgaggttttgagggctgttaatgattcccagtccgttgaagtcgatcaagcgattttggatacacacatcaaggtcgaagaaaagaaaaagctgtttctaccttataacattctcccgctcgatcctgaaagtactggcgaagccattatgcgatatccagagattcaagctgctgtttatgctcttcgcaatactagaggtctgccatggccaaaggaccaagacaagaagcctgaagagaagaatactggcaaagaccttcttgattggcttcaggctatgtttgggtttcagaaagacaatgtgtccaaccaaagggaacatttgatactgttgcttgcaaatgttcatataaggaaaatacccaaggctgaccaacaaccgaagttggatgacaaagctctggatgatgtaatgaagaagctatttaagaattataagaagtggtgcaagtacctcggccgcaaaagcagtttatggttgccaaccatccagcaggaagtgcagcagcgtaagcttctttatatgggtctctacctgctgatttggggtgaggcggccaacttgagattcatgccagagtgtatttgttacatctaccatcatatggcttttgaactctatggcatgctggctggaaatgtgagcccaatgactggtgaaaatgttagaccagcatatggtggtgacgaagaagcctttttgacgaaagtcgtgactccaatatacaaagttatagagaaggaagctgaaaggagcaagaccatgaaatcaaagcattcacattggagaaactatgatgatctgaatgagtacttttggtcagttgattgtttccggctaggatggcctatgagagccgacgctgactttttcaaaactccaaaagatccttatctgaatcatttgaatggagagaacagatctgcaggcaatgtccattggatgggaaaagttaattttgtggagatacgttcattttggcacatattccgtagttttgacagaatgtggatcttcttaatattgtccttacaggccatgataattattgcttggaatggtggaacaccaagtgatatctttgatgctggcgtatttaagaaggttttgagcatatttatttctgcagcaattttgaagttgggtcaagcaatcctagatctcgtatttggctggaaagcaaaaagaagcatgtcatttgcagtcaagctacgatatgtcttgaaattaatatctgctgctgcatgggttgtgattttaccagtgacttacgcgtacacttgggagaatcctactggtcttgcaagaacaataaaaagctggcttggggatggtcagaatcagccatctttgtatatactggcagtagtgatatatatggcaccaaacatacttgcttctatgctatttcttttcccatttatgagaagaatcctagagagttcaaatgttaaggtcataacgatcatgatgtggtggtctcagcctcggttatttgttggtagagggatgcacgaaggtgcattctccctcttcaagtataccatgttctggattattcttttagcaatgaagttgattgtaagcttctatattgagatcaaacctctggtacagccaaccaaagatataatgagagaacctatcaggacattccagtggcacgagtttttccctcatggaactaacaatattggtgttgttatatcactctgggctccaataatcctggtatatttcatggacacccaaatttggtatgcactgttctctactctgattggtggcatctacggggcttatcgtcgtcttggtgagatacgtacattaggaatgttgagatctcgctttgaatctttgcctgaggccttcaatgaacgcttgattccttctgatgcaaataagagtaaaggtcttcgtgctgctttttcgagtagacccaaggcttctggtgacgaaagtgagagagagaaaagagctgcaaggtttgctcaaatgtggaacgccattattacaagtttccgcgaagaggatctcatagacaatagggagaaggatctgctactggttccagactgtaaagaccgtgaacttgatatattccaatggccgcctttcctacttgctagcaagatcccaatagcactggatatggcagcagacagtggtggaaaagaccgtgatctgacgaagaggataaagtcagatccatacttttcctttgctatcagagaatgctatgcttcattcaagaacatcatcaataccttagtatttggtcagcgggagaaagatgtcctagtacagattttcacagttgttgataagcatatagaagaggaaactctgataacgggtctcaatatgaagaaccttcctgcactgagcaagaagtttgttgaattacttgagttactgcaaaaaaacaaggaggaagacttgggtcaggtagttattttgttccaagatatgctcgaggtggtcacgagggatataatggaggaacaggacctgctcgagacgttggattctttacatggtgccaatagtagaaaacatgaaggaattacaccgctagatcagcaagaccagttgtttgctaaagctattaagtttcctgtggtggaatcaaatgcatggactgaaaagataaagaggcttcatcttctgttaactgtgaaagagtctgctatggatgttcctattaatcttgatgctaggcggcggatatcgttcttcgcaaattctctatttatggatatgcccaatgctccaaaagttcggaacatgttgcccttctctatcttgactccttattacaaggaagatgttctgttttcattacaaaatctggaagagcgaaatgaggatggagtttccattcttttctacttgcaaaaaatttacccagatgaatggaaaaatttcctcgaaagggtgggctgcaagaatgaagaggtactccgtgaagatgaacagctggaagagaagctttgtctttgggtgtcatatagggggcagacattaacaagaactgtaagagggatgatgtactatcgaaaagctttggagcttcaggcttttcttgatatggccaacaatgatgatcttatgaaaggctacagagcaatggaagtaatgtctgaggactcaccattaaagactcaatgcaaggctatagccgacatgaagtttacatatgttgtctcatgccaactatatggaattcagaagcgttctaatgagccttgcgcacatgatattttgagactaatgacagagtatccatcacttagggtcgcctatattgatgaagttgaagcacccagcaaagatagaatcaagaagattgaaaaggtttactactcagtgttagtgaaggcttctgttacaaaacctaatgagcctggtcagagccttgatcaggtcatctacaagataaaactaccaggtaatgccattttaggtgaaggaaagccagaaaaccagaaccatgcaataatattcacccgaggcgaatgtctccaaactatagatatgaatcaggagcactatatggaggaggctttgaaaatgagaaatctgctgcaagagtttgagaagaaacatggagtgagacatccatcaatacttggagtcagagaacacatatttacgggcagtgtgtcatcccttgcttggttcatgtcaaatcaggaaactagttttgtgacaattggacaacgagtgcttgccaatccactgagggttcggtttcattatggccatcctgatgtcttcgatcgtcttttccacgttacgaggggcggtgtcagtaaagcatccaaaattatcaatcttagtgaggacatctttgcaggattcaattccacattgcgcgaaggcaatgttactcaccatgaatacatgcaagttggcaaaggaagggatgtaggtctcaatcaaatatctctgtttgaggcaaagatagcaaatggcaatggcgaacaaacgctgagccgtgacatctaccggctaggtcatcgctttgatttcttcaggatgctgtcttgttactacacaacaattggtttctacttcagtacaatgattacagtatggactgtatatgttttcctctacggccggctatatcttgtacttagtggactcgatgaagcactggctactggaaagagcttcagttggcctctgttttcttcacattctcgttgggaacaaaaactcactactacggaaggacgttactccatggaggagcggaatacagagccactggacgtgggtttgtggtgttccatgccaaatttgctgagaactatcgactttattcccgtagccattttgtcaagggccttgagctgatgattctactagttgtgtatgaaatatttggtcagtcatatagaggggctataacttacatcttcatcaccgtatccatgtggttcatggtgggcacttggctctttgcaccattcctgttcaatccttctggatttgagtggcagaagattgtggatgactggactgattggcacaagtggatcagcaatcgtggaggtattggtgtggcaccagagaaaagctgggagtcatggtgggaaaaagagcaggagccccttcgttactctgggaagcgtggtactattgttgaaatactgcttgcattgcgtttctttatctatcaatatggactcgtgtatcatctgaatataacgaagaagataaccaaggataaccagagtgtgctggtttattgcttctcatgggttgtaattttcgttgttttactcgttatgaagaccgtatcagtggggaggaggaggttcagtgcagagttccagctagtgttccggctgatcaagggtctcatatttataacttttacagccatcgtggtaatcctaatagcaatccctggcatgacggttctggacatctttgtttgcatccttgccttcatgcccactggatggggtttgctcctgattgcccaagctatcaggcctgtgattcaaaagatcgggctgtgggggtcgatcaaggctcttgcccggggctacgagatcctaatggggcttctcctgttcacgcccattgctttccttgcctggttcccgttcgtgtccgagttccagaccaggatgctgttcaaccaggccttcagcagaggtctgcagatctcccgtatcctgggaggacacaagaaagaccgagggacgcggagcaaggagtagtagggctgctgattgaaggtccgtctatcgggagttatgtcgtcctggagcggtctatcaggttcagagaatattagggtccgtatgtatgtatgtgtgtgtcgcacctagcaccagtagtatgtatgtatgtatgcgtatgtaggttcagagaatattagggtccctatgtatatgtatgtatcaggattgctatggtcttttggattggaagatctgagatttgctggtgcaatggccagtatctgacatccaaatgttgaaactataattaggctctgctaatagttagctaacttacagctaacaattagtttattagctggcttacgactaagtagtcagattaaagttgggatgtcggtcgccccctttaggtttagttaggctcgttccaatgggtggcgagagc

SEQ ID NO: 14343 - DNA, 1433 bp, Zea Mays
tgtgtttagctctaccgccgggaatgacagtcctcttgctcttgcacaagcccacgaaactcgagaaaaactgaaagccacacactctgagttagctgaggagagggccattgagatcgtcatcataaagaccacaggagacatgatcttggacaaaccccttgcagacattggaggcaagggtttattcaccaaggagatagatgatgcgctcttgcagggaaggattgatatcgctgttcactctatgaaagatgttccaacatatctacctgaaggcacaatattgccctgtaacctaccacgagaagatgtcagagacgcattcatatgtttgactgcaaattcgcttgcagagcttcctgctggcagtgttattggaagtgcttctctgcggagacaatctcagattctctacagatatccatcactgaaagtagttaacttcagaggaaacgttcagacacggttaaggaaactcaaggagggagatgtctctgctacattgttggcactggctggattaaggcggctaaatatggcagaaaatgcaactgctgtactatcagtggaagaaatgcttccagcagttgcccaaggtgctattggaatagcttgccgaagcaatgatgacaaaatgatggagtatctatcagcgttgaaccatgaagataccagattagctgttgcatgtgaaagagaatttttggcagttcttgatggtaactgccgaactccaattgcagcctatgcttaccgtgacaatgatgggaattgctcattccgcggtctattgtcttccccagatggatctaaagtatttgagacaacaagaagtggaccgtactcttttgacgacatggttgagatgggcaaagatgctggtcatgagctgaaggcaaaggctgggcctggcttctttgatagcttgcaatgaaaagaatgagcggccatgagcaatttcaattgtcactcttttgggtagaaacagagggcccaagtagagtgttgagaggtttgtttttgtttattctttctcctactagttctgctagagaagggtgtacctggtgtagtggtgagctgagtcatcaggtcgcgggttcgaagcatccagtctccgtatttgtgggagaaggtttgtctcggtttatctcttttccgctactcatatgggagaaatgtgggagcctcagtctgctcttttttttttccatactagttctgctagtgccttgtactatcactcgtattgagcagccccattcagctttataaaaatacagtaaaaacaaagaagctggtatggattaaagaacgaacaagttgattaatgtgatgtttactccggatctagatataaaaatgtgcatatgcatatttcccccacgttgttccaatataacattgtcatccatttttatgttttgtcg

SEQ ID NO: 14344 - DNA, 1456 bp, Zea Mays
ccctggagcgcgccacccgtcggctgcgcaggcatttgaggccaggattttttggtgctctcattgttagctgactggtgagggtctggatctagcaatggcggaaaacacccacggtagtggtcgccacgtgcttggggacttgacaaatgttatttgcaagcgagcagccacatcagatctggagaagagtacaggtgggataaagatcagacggattgaaaagactgggactaggaaagagtacgatgcaaatgcaaaagctagcagtattgggaaaggaattgtatttggccatttgtttgatgatgttgccagagagaaatttcaaagccattctatctttcagaatagtagggttcaacacatagctgccgaagcagctggactcttatccaaggaagccaatgactcgaagaaccactatgcatcaatcggtccattagatctcagtgataaggagcaggattcttcacttgaatctgaagacgactatgatgatgaagataatgatgagacgaatggtgaattgctgcaccattttttcagctcagagctagctaataaaatgtcaacaaatgatggtgagtgcttgactcaggaggagatagttgggtcatctggaaatcagaaacctctgtcttcattggatgctacgacaggtggtgacttgccaatttctagtgctcagcatgcttctgtgagaactggtggtttggaagaagctgttgccccaaaatcttgtgcttgttctttctgtctcaaggctgcttttatgtggatggatctccattatcaggatgcaagaagccggctttctgtattgaagaaaagcatcaagtttgccaggtcattggaggaaaaatgtagaggaaatgaatatgcggccaatgtagctggatatgaatcaaagcgagctgtgggagtggagtttgaactatctcaacaacagagatcactctttctttatacagaaaatgcccttgtccgtgagtcaacgcagcttcattctgcttttgtgaaactgaaagaattgagagagaactgcaagacagatcttgagacgctcagcaattcttcaatgagaaaatgagtgctgcatgttgcgttgctgaactgttagtttcctgagacttagtatgatcagctggcttgtcttgaagcaagatgtgctgagattgaaccacaacttaggaattatggtgcttaccatcaatttgggacttcaatttggctgtagtgattattcctatcataaagcgttggtctagtatgcttgtagctgatgtaaaaataaccatggtaaggtaggaactgtatgtttgtctcgttgaggcatcgtcatcttcacttgtaccttgcagtgagcttccttcatatgaacattctttccacgttctccaaacaaaagggaaaaccatatcgtttcgtgcttgttggcgaatttcatagtgcg

SEQ ID NO: 14345 - DNA, 1425 bp, Zea Mays
atccatcactatgacaaaaagatacacatcatcctctggtgaaaggcgtatcagggtccacacagcagctgcacctgtggtcacagatcttagtgaaatgtaccgtcaagcagatacgggtgccattgtgtcattgttgggtagaattgcggttgaaaattcactgtctgataagctggacagtgtccggcagcagttacagttaaagcttgtcagaagtttgaaggaataccgcaatttatatgttgtacaacaccggataggcgggagactgatttttcctgaatccctaaagtttttgccattatacatcctggctatctgcaaaactcttgctcttcgtggaggttatgccgatgtttctcttgatgaacgatgtgctgctggttttagcatgatgatattgcctgtaaaaaggctgctcaattttatctatccttctttgtacagagtcgatgaagtattaacaatggaaccaaataagattgatggttggttgaaacgcttgccattaacgtttcagtgtttagatacgggaggtttgtacctccttgatgatggcttcactttcttagtgtggttaggaaggatgctcccacctgaacttgtgaacaacattcttggagtgagcttggcaaacttccctgacctatctaagattctattgagagagtgtgacaatgagttatcaagaaatttcatgaaaatactaagatacctgcgggagaaggatccttcttatcaccagctatcccttgtggtgcgacagggtgaacagccaagagaaagctatctgcttctatctaaccttgttgaggaccagatggctggaacaagtagttacgttgattggatacagcaaattcaccgtcaaacacaaagctaatgacgaaataccaacaggaagctatgcctgaaatttttgcctactgtaagctgctgcagggcgtagattcagttgctgccagttccaagtcaatctcgcaaccccttggagatcttattcacaacccagctgtccagtatgccaccatgtaagcagtatttggctggcaaacaaagcttcttactgttaatatttgcccttgtgattattctatttttgcagagtgggaatacagctgttgtattggaataagtaggcagcaaatgcggtgggtatattatacaactggggtcgtgtagtgtggcctgtgcgttctttcctgatgaattctagtcgggttcagttacatggcatttgggttataaaaagttcatcgtgtaaactaatttttggctattttagtctgtttgtaatgggagatctcatttaatttaatgtcattccgttattaaagttacttccgtatactgaatttttagaccgcatgatccttcatttgtggtttatataaccagtaaaacttgtagttttggtgaata

SEQ ID NO: 14346 - DNA, 1522 bp, Zea Mays
cctctaggactaggaggcgaagcagtgtggtcagggcctcctggtccccctcggagtctctgccaccgtcctcgtcgatggcgccgctcaggatggaatcgcccgcggggcagctactctcccagattcttcacacgcacccgcacctgctgcctgccgccgccgagcagcagctcgagctgctccagaccgaccgcgaggcagagaagaataaggataaggagagcgatgctggcgacaagctggctccgacaggtgtcgacctcgtgctgtacaggcggattgctcaagtaaaggagaaggaacggaggaggactttggaggagatactctatgctctggttgttgagaagtttgttgaagccggcgtttccttggttccggcactctcacgctccatcgactcttctggaagagttgatcagtgggcagaaactgtggaaggaaggctccagcgtttgcactcgcctgaggcctatgaaatgatcgagaaccatctcgccctcattctggggcagcgtcagagtgatgccactattgcagccataagtaagctccgtgttggccaggtctatgccgcatctgtgatgtatggctatttcctgaagagagttgatcagaggtttcagctcgagaagacaatgaagagcctcccttggggatcagaagaggaagacggcgctttgtatcaagttatgacgaccgactcgatgccttcagctcagtcttctagctctcacccagagatgggctcctggaccgccgcgcctgacttcaacgcaggaggtcctagcgaatctatcaagccttgtcgccttaggtcgtatgtcatgtcattcgatccagatacgcttcagaggtatgcaacggtcaggtcaaaggaggcctttggtatcatcgagaaacacacagaagcgctatttgggaaagcagagattgtagtcacacctggaggcacggttggttcatccaaggatgagcacattaggataagctttgccgggctgagaaggctggtcctggaggctgttactttcggatcattcctctgggacgttgagagctttgtggattccagctaccattttgtgaccagctaagattgtcatcctaagtaaagaaaggttcgtggtttacgtctctggtctgaatgtctgtgggcttcggaaagacttgtacaatgatgctaggctgttaccacaccccttactgatgcgatggtatcaatgatttgcgcagttctatggcatcgcattatttgtaaagaccaactgccattatcctgatatttagccgttatgttctattaacatctgtgctgcccggggggcgtagcgatgtatttttttggctatcccctctgcaaattgtaagaggaattctaggctcatagccaattctttggcgaagctattattctcgttttacagattgccgttatgatgatttgagtctttctttttgagagcacagccatttcgtactacagaatacttgtgcgtatttgaatagggatgaagtt

SEQ ID NO: 14347 - DNA, 421 bp, Zea Mays
ctgggccggcgaagtctgagccacagtgtagaatggagatgttacatgccaaagatgcaaccatggagaagcatacttcaagcagatgcagattcgatcagctgatgaaccgatgacaacaatatacaggtgttgcaaagaagaatgccagcatgaatggagagaggactgaccatagcattcgcactttgcttacacttcgctccctgtgcttcttcagttttgagtgttgggatgtcctgttgcacatgtaatgcttctaatcagcgtatacttaagtacaaatttttggaaatgtatgttctatactatggcatcgctttttggctgcaaaagacattgcatgacacatcatctagagttatttgtgatgatgatctcaatcatcagtgagagctcacttaaaaaaattcattgagtt

SEQ ID NO: 14348 - DNA, 1424 bp, Zea Mays
gaaatgtgctgcttcaaaagattttgaggatccccaaattgaatgctacaatgatagtaacatgcaggacacaccatatactcacattcatgaggtagtattctccacaatcgacaagccaaagctccttagtcagctatctgcattgctatctgacattggattgaacatcagagaagcacatgttttctctactcatgatggctattctcttgatgttttcgttgttgatggctggcccattaaggatactgatggtttgcacaaagcactggaagcatccattttaagaaatgagggttcatggtctggttcatctcattcgtcagcagctgaaagaacactgcccttccaagttaaaggtggtgaatgggaaatcgataaacgacttctgaagatgggagggttgattgtttctggttcttgtggggacttgtatcacgggacttacctcggtgaggatgtagctgttaaagttctaagagctgagcatttgaataagaatgtttggaacgaatttactcaagaagtatatatactaagagaagttcaacatacaaatgttgtgcgattcattggtgcttgcacaaaaccaccacaattttgcataattacagaatacatgtctggaggaagcttatatgactttgtgcacaagcagcataacgttctaaacctcacgactctattgaagtttgcagttgatgtatgccgagggatgtgctacttgcatgaaaggggtatcatccatagagacttaaagactgccaaccttctaatggacaacgatcatgctgtgaaagtggctgattttggcgtagctcggttccaggatcaaggaggtatcatgacagctgaaactggaacatacagatggatggcgcctgaggttataaaccaccaaccctatgatagcaaagcagatgtgttcagctttgccattgttctctgggagctgataacgtccaagatcccatatgataccatgacccctctccaagcggctgtaggtgtgagacaggggttgcgcccaggacttccgaagaagacgcacccaaagctgttggacttgatgcagagatgttgggaagcagatccatccgaccggcctgctttctcggacattttagccgaactggaggatcttttggcacaagctcagggaacatcgggaaagacggtccaagatccatcaaactcgaacgcgaaagattaacccccatacctgacattttttctcaatccagtgatttgccacatctaggattcgagttgccaattatgaggaaatttgttttgcttgtgtacattcgaacaatcttcttggggccaattttttatgggcacctcattattcttatacaaaagaaattgggctcgacgcttgggataccacacagattcaggggaaaaaaacaaagacg

SEQ ID NO: 14349 - DNA, 1505 bp, Zea Mays
ttcattttctctctcttctatttctcttctccgtcactcgcatctcgcgggatcggacccccagcgccgccgaccgccgtcctcactccctgcccccccacgccgccacacgaaccacctcagctccctgcgccactaccctcggtctctcgctcgtggagtcgtagtacagcgcttcccgcacggcgatgtcggcgacgccgctgcccccgccgggccccgatggcgcggtggcgctcctgcctccgccgggtacggacatgactgggatctgcttccgcgaccagctgtggctcgacacttacccgctcgatcgcaacctcgtcttcgactacttcgcgctctcccccttctacgacatcacctgcaacaacgagtccctccgatcgcgccaaatccaccccctcgacatgtctcatctgacgaagatgaccgggatggagtaccttctgagcgaagtgatggagccgcacctatttgtgatccggaagcagaagcgggagagccccgagaaatctagccccatgctcgcctactacatccttgacggctccatctaccaggcgccacagctctgcaacgtcttcgcctcacgcataagcagggctatgcatcatatatcaaaagcctttaccatagcatgttcaaagttggagaagattggaaacgtggaaaccgagcccgatgcagtagcctctgaatcaaagacccaaaaggaagcaatcgacctgaaggaactcaaacgaattgatcatatcctgtcatccttgaaacggaagataggggctgctcctcccccacccccttaccccgagggctatgtcccaccatcagcagaacaagagaaagcgccggatgatgtggcagcatcagaggcaccgcctcaacttgaccctatcattgatcaaggtccttcgaaaagaccaagattccaatgaaagatttgtagcttaaacctgctgactcgacaacttcctgtatgctttaaagtcgccgacgtggactttataaatccattcttgctggttggttatttacaggccaaagacagaactaacctcgtggcatgatatctcgttctctgagttactagcttgaatcttgtagattggccagtgccatttgctccgggcttgtaatcttgtagataggccagtgtcatttgatctggtctatctacttagctatcataacttatgaggtggttatagttttgccttggtgcaaatctgcaagactggacatctcatacattatttactatgcatacttacgtggatttgtcaagtcatatgacctgatacagacggtgacggtcaccaattggaactgccattttctgttggtgtggatgaagtttgacactatgaaagtcccttggctgtgtaatactagcctgtatagaagtctaggcctaagagggctatgcatgtcttaatagtatgtactcaatgaacaagagaacaccattttattttatttattaattttctcgtgttgtttgg

SEQ ID NO: 14350 - DNA, 717 bp, Zea Mays
aggccttgggcacagttgttttagctttgttgcagcaagccagaaggctatcttgaaacgtaggtgggagaagaagatgaaagcggaggagagcggcaagaattgataccacgcggctcgtccagggtgcttctcttcctaaataaggtccaaactttatccaggaggtttgcaggacggctagattctgacgcgtcatttccttgtggattccttctctcctgtgatgcgactttggacgcactatcctgattgtgatgctttccaacacttgtgccactggatcgtgatttcagtgagccccaacttctgcagcactagtattttgttgagacaaatcagctataagcatgccatctgcccaataaacttgttcatcatgtaagatcaatgctgttagtttttgtccgagtttgtgcttgcgtttgattacacttacctgcagaagaatgattgtctgaaaagtttgtccttgtgtaataagtgttgaatgttggaaatcctaaccctctcaaggattgggagattaatatatagaattagttggatgggctaggcccattacaataggggcgagatagtaaatacacagtggaggactgtaaccctaactggtactctaacatctcccgcagaccgcagtcacaattctatcatgtacatgtgttgagactgaactgaaagtctaggaatacactggacgacagtcccttggtg

SEQ ID NO: 14351 - DNA, 1371 bp, Zea Mays
cagacagagagagtatgttggtatgtacaaacaaagcacatgtgcatgctggctggagaggtagatatgacggagatcagacaccaggcaagctgcaagcacgtacaagaggggtcaatcaatcaaaggagtggtaaatcaaaagtgcaagctagcccatcagagaattcaggaccaaaccaatgcagcagcaagggccagccaggccgcaggaatcatcagatcgagaggcactgccaacaccaccaccaccaccaccacaccatgctcaacatgatgactgatctgagctgcgggccgtcgtccaaggtcaaggagcaggtggcggcggcgccgacgggctccggcgacaggcaggggcaggggagaggcaagatcgagatcaagcgcatcgagaacacgacgaaccggcaggtgaccttctgcaagcgccgcaacggcctgctcaagaaggcgtacgagctctcggtgctctgcgacgccgaggtcgcgctcgtcgtcttctccagccgcggccgcctctacgagtacgccaacaacagtgtgaagtccaccattgagaggtacaagaaggccaacagtgactcctccaactctggcacagttgcagaagtcaatgcccagtactaccagcaggagtcctccaagctgcgacagatgatccacagcttgcaaaacgcaaacacgaacatagtgggagattccatccacaccatgggcctcagggatcttaaacaaatggagggcaagctggagaaagccataatcaagattagagctagaaagaatgagctgctatacgctgaagttgactatatgcaaaaaagggagatggatctgcagactgacaacatgtacctgaggagcaagatcgctgagagtaatgaaacggggcagccggcgatgcacatgacgatgggagcgccgccgacgagcgagtacgaccacatggcccctttcgactcgagaaactttctgcaagtgagcatgcctcagcactactcccatcagctgcaacctacaaccctccagctcggatgatgaaatcagcgctatacctggcggcgcccggcccccaatcgagatagatcacgcatgcagttatatcatgtgccaaatcgagatctcaagtaactctacgtacgtttgcttaattattaataattgtgattagtgcaactgttagggtatatatatttgtgagtgccaccactgtgtgcgtgcatttgtacgtgtgaatttagctgttgcatctactactattgtaccctccggccaggccatatcatcagaaacgcgggtttatttacgcatacttatatatatatgatttgtgtgctttatatagattgaaaagagtatgttggcctc

SEQ ID NO: 14352 - DNA, 1215 bp, Zea Mays
ggctgacccgaccccaaggccgaacgggggaagggcggcagccccagcctccgggtagcgcagcggggccaggagctcagctccccgcctcgtctgggtcggttcggccccgctccgacgcgtggtgggcgcgagcgcgaccagtctgcgacccccggcttcagtcagcgttagtgaggttgaggctctattcgagctgttcaagagcataagtggttcggtgattgatgatggcctgatcaacaaggaagaattccagctagcactatttaagaatcagaggaaagaaaatcttttcgccaatcggatatttgaccttttcgatgtcaagaaaaggggtgtcattgattttggtgactttgtccgagctctaaatgtgtttcatccaaatatcccaatggaagaaaaagtcgatttctcgttcaagctatacgatatggatggcacagggtttattgaacgaaaggaggttaagcagatgttaattgctctcctaggagaatcagaaatgaggctatctgatgagatcattgagacaatcctggataagacattttcagatgctgatgcaaatcaggatggaaaaatagatagaacagagtgggagaattttgtcacaagaaatccttccttgatgaagataatgactctgccatacctcaaggacataacaacaacattccctagctttgtgtttaactcggaagtcgacgatctcgtcacgtgaccaccactctctccgatgtatagttaataaggagttttttctcccctcaaccgcaaaaaggagaacctgtcgagggttacgagtggagatttccagctttctctggcaatgaatggagggtgcgtcaaattggctgccacaaatgtacgagacgacctgtagttttcactcagggcttgtttgggagcaagtggaatgaagggtattgataggactataatcccttgctatctaaaattgaatagtggaggattatatgccctccaattcactccattacctttactcccaaacaagccctcaatggtaatgatgatgcttttgtgttggtgatgattgagactgagttagtatgcagatgtgaacagtttccatttttaccagtgggaaggctgttttgtttgtgaaactgcgatgtgcttgtttgcacactgtactgatcaaacctgattcttgtcaaagtagtactgcattcttcttcaagtccc

SEQ ID NO: 14353 - DNA, 1201 bp, Zea Mays
gccggcaccctccggctccagggacgccggtcaggcccagcggaggagcaagccctcgaggaccggccgtgtgcgcgtgctcggcggcactggccgtgtcggaggatccacggccaccgcactctccaaactctgccccaagctcggcatcctcgtcggtggcaggaaccgggagaaaggcgagtccattgcagccaagcttgggggccagcctgagttcgtccaggtcgacacccgcaacgcaggcatgttggaggaagcgctgcagggtcagtatcatactagcagtcatgtggtagctgttcgcggagttgccaaaccggaggcagctgcgacgccggcgaggcgctcgcgccccatccctctggcttccgtggccgtgtggagtctggttgccactggcgccgcaaatgctgccgagctatgggaccccttggccctgcacggatcatcaggactcgtcttggctgaccttggtattggagattggtttgggggtttgctgttttcagctgggcagcaggctaatgaggctgtccaagatcagttgtctgctcttagtttctctagcctagcagttatttttggtgctggacttgtaactagtttatctccttgtacactaagtgttctaccactaactctaggatatataggtgcatttggctcagggaaaggccgatccgaggttgttgggaattcaattgcattttcactaggactagcaacaaccttagccattcttggtgttgctgcttcttttgctggaaaggcttatggtcaggtaggacaagggctcccagtggctgcttccggtttggccattatcatgggattgaaccttctggaggtacttgaattgcaacttccctcatttttcagcgattttgaccctcgagctgctgcagctaacctcccttcaggtgtacaagcataccttgctggtcttacatttgcattggcagcatcaccttgcagcacacctgttcttgctacccttctgggatatgtcgccacttcaagagacccaattattggaggaagtttattgttgacatacacaacgggctatgttgcgcctcttcttattgcagcttcatttgctggagcactgcagagtttgttgtcattcagaagatattcggcatggataaacccaatcagatcatccatgctcccaggataatgagagagtccaagc

SEQ ID NO: 14354 - DNA, 608 bp, Zea Mays
tccagcaacttatatgcttgtataaacacaatggaagtggaacccctccacacacagggagttcaagatcgcagtcctgcccattctgccgtgacaacctgaagaagacctgtcctggtgacctgtggatctatgttgaggaccaagatgtggttgacatggagacggtgtcgagcgagaacctcagacggctgttcatgtacataagcaagctgcctctgattgtcccagacgtcatcttcagtgtgtatgattcccacatcaaatgacttccgacgcgaccttcctgacgaccttcagccagtgcccagctccagttaatcttatgcccccatgtcctccattttcatgctttgctcaagcttttggaagtgcctgaactgatttggaaccgcaagccttccggtggtgctttagaaacttgtttagtgcctgcatgcatccttaatcatatgcagccactctgtacatatctgacttggctcagttaataggggactgtgcttgccccaaatggaggcagggccgtttgtgtctttctcatgtttccattagcgaagcaacgcaaagttctggggggcattggaaggtttctgctgcaatgttag

SEQ ID NO: 14355 - DNA, 876 bp, Zea Mays
agctgtgaatttgagcgacggataaaagttaggtccaaccatacacatcatagatgcagagttccggaacactgggctggagagatcagaggcactcaaaaaggatctggaatggttcaggcaacagggccacacaattccagaaccatcgccccctggcaccacatacgctactctactggaagaactgtctgagaaggacccccaggcatttatctgccatttctataacgtctactttgctcatactgctggaggccaaatgattggcaaaaaggtttctgagaagattctggacaagaaagagctggagttctacaagtgggagggcaatctctcccagctgctgcagaacgtccgcaacaagcttaaccaagtcgcttcaagctggtctcgggaggagaaggatcactgcctggaggagacggagaagtcgttcgcctactcaggaggcctcctccgccacatattcacctgacttaacactgttggctgatccagtttcaaatgctgtacatacataacctttgactgttaaaactttattactggtgagggggatctccctcccccagatacgttttacctgcaaccaagttgccaagtgttgaataaacctccctgcattgctggtgttgggtaaatgctgagcgatgccgctgactgtgaaggtatatgttttctgtaatggaatcggatggcacagcaccatgcccctagacctggacaccggtggatggcgctgccacaacacacggctgccgttgagatgcgatgcagtggatagccgtaggtcgtttcatgaccactagaatcggccgttccagtactgcactattgctaatggcaaagaggagcccttttattataaaattg

SEQ ID NO: 14356 - DNA, 71 bp, Zea Mays
gaaaccgacctaaaggggaaaagactacttagcccttgatagctcgccttatgattagcagtaaatgttag

SEQ ID NO: 14357 - DNA, 1263 bp, Zea Mays
gtggtcaatgattaattcgacataatttaagctcatgttaggcaagcctgagggtgattttaaggaatacgtacaacaagctggtgctcgctggggtacatctatcttgggctctttgacagcgaagttgaggcggcaagggcttatgacagggctgcccttcgcttcaatgggagggaagctgttactaactttgagcctagctcctacaatgcaggagataataacctgcgtgacaccgaaaccgaggcaattgatgatggtgatgccattgatttggatttgcggatttcacagcctaatgtgcaagaccccaaaagggacaataccttagctggcctccagccaacatgtgattcccctgaatcttcaaatacgatggcttctcagccaatgagctcatcatccccttggcccgggtatcaccaaaacccagcagtgtcatttcaccatcagcgcttgtactcgtcagcttgtcatggcttctttccgaaccaccaggtccaggaaaggccggtggagcgaaggcctgagctgggcgcccagccattcccctcatgggcatggcaagcgcagggctcccctcacgtgccgttgcaccactctgcagcatcatcaggattctctaccgccgccggggccaacggcggcatgcccctgccgtctcacccgccggcgcagttcccgactactacaaacccgttcttcttcccctagaccgcttttgacatgacagcttgctgttccggctcagctctcggcgtctgggatggcagctggtcttgcgtgtggcgtctagcagctctggtgatggaagaaagtgattgtgttttgtgtgtgtgtgtgtgagagagagagagagccataataagaagcgacatggctggtctccctctggtatgtgcctgttaggatatgggatatctccatgcatggattgtttccgagacagtagtagtattttgttgtagtcgaccatgcgtgtacatcagtataactggatctttgaagagctgagattttatgactcaacaagcattgacataatggcatgcactccaggaccactgaagcaaaaggccaatttgacatcattgctgcgtttcagatggtagcagtagaagcaacaaatatcggtttcagattgtacaggaaaactgtgcctcgtacgttcgtcgtctgccagcggttgtccgttgcgattgacacgcaacaccggtttgggggagcaacgcaggtggaagtggccccagacgcactttt

SEQ ID NO: 14358 - DNA, 1486 bp, Zea Mays
gtcgccgagccgtcctaactcagcgagagggtttcgaattggcgccaagccgccaaccattccccccaatcccgcctgccagccctagggttcctgctacgccatggcgggaaccgccgccgccgctctcatggacatcgacgcagccgcgccgcctcccccgccgcctggtgcggcggccaagggcaaggcgccgctctccgctggcggcagggcagcgccctgggtcgagaagtaccggccccagtccctcgctgacgtcgccgcccaccgcgatatcgtcgacacaattgacaggcttacaaacgagaatagacttccacacttgttgctatatgggccacctggcactgggaaaacatcgacgattctggctgttgcgaggaagctatatgggtctcagtatagcaacatgatcctggagctcaatgcgtcagatgaacgtggcattgatgttgtcaggcagcagatccaggattttgctggggcacgcagcctctcttttggagcaaggccttctgttaagctggttctcttggatgaagcagacgcaatgacaaaggatgcacaatttgcattgagaagagttatcgagaagtatacaaggagcacaaggtttgcactcatatgcaaccatgtcaacaaaatcatccctgcgctacaatcaaggtgcaccaggtttagatttgctccactagatggcagtcatgttagagagcgtcttcaacatataataaaatctgaggggctcagtgtagatgacggtggcttgacagccctagtgcggttaagcaatggtgatatgaggaaggctttgaatatattgcagtcaacgcacatggcatcccaacaaatcacagaagaagctgtctatctttgcacaggaaaccccatgccaaaagatatcgagcagatagctttttggctattaaatgaaccattttcaaccagcttcaaatatatatctgacatgaagatgagaaaagggctggccttggttgatatcatacgggaggttactatgtttgtgttcaaaatacaaatgccatctgatgttcgtgtaaagctaatcaatgacttggctgatattgagtacagactaagctttgcatgcaacgataaactgcagctgggcgcactgatctcaactttcacggacactcgcacggctatggttgctgctgccagctaattccagtaatgtgaaggatctttctgctgctccctctggaatctgaagatgaagcgcagctacattatggggtcaacgtcttgcctgtagttagcaagctgaaaggtttggtgagggttgtcttagatctgtatgtctgctggacgtgatgtggtaactgcctggaacttgggagtactcgtatgactgaacgctgccaggcgttctcatgttatgcgtgtgaagggaatcgttgctcgtaaccctcgaagaaaacgccgggctattagctactatctcttaacaatgtactac

SEQ ID NO: 14359 - DNA, 710 bp, Zea Mays
aaaaaaaaatctatggagctggcagaggccgccggggctcgccgccaagctcatcgactccagggcggcaaacggtactacggcctgtactacctggagtacacgctgcagaaccccggcgagcgacggcgccacatcgtctcggccatcgggatggccttcaacggctggtacaaccgcctctacactgtgacgggccagtacatcgacgacgatgactcggagaagtacaggcctcagatagagaaggctgttggatcgttcaggctgacatgaaagatgcgatgtcatccagcaccagcagcagcagccgcccacggtacataaaccctaaatatgtatgcggagaggtccagcaacatgttgtgcccgaaaattgacaccttgccatttcgatgagacaagacaaggcatgtgcctattgccctattccaattcttgagcactgtaacactgccaatatgcagagtatatgttttctgcctgttgaggtggatacaaatgcatgctttttttttattaataactcatgtgtaacaataataataaaaaagcaaaaactaaaatgaaataaaatgtagagactaaaaattagtccctagaaaccaaacaccctattagtactctctccgtagacagatataaagatacctgggtcaactgcaaagtcagattgttataagtttataattaaataaattaataaaaaa

SEQ ID NO: 14360 - DNA, 1590 bp, Zea Mays
aagctctacactgtctgttgcaatcaaaattaacactgatgataacattatttgccaccatacaaataatggagaatggcaaagcctatgctattgaaggagatgtttacttttcagttgaaagttttcctgaatatctcagtttatctggaagaaaatttgatcaaaatcaggcaggtgcacgggttgcttttgatacaagaaagcgtaatcctgcagacttcgcactctggaaagctgcaaaggagggtgaacctttttgggatagcccttggggccgtggaagaccaggttggcatattgaatgcagcgcaatgagtgctcactatttaggacatgtattcgatattcatggtggggggaaagatttgatttttcctcatcatgagaatgagcttgcacaaagccgcgcagcttatcctgatagcgaggtcaaatgctggatgcacaatggctttgttaacaaggatgataaaaaaatggcaaaatcagataataactttttcacgattagagatatcattgctctttaccatccaatggctttaagatttttcttgatgcgcacacattatagatcagatgttaaccattctgatcaagcgcttgagattgcatctgatcgtgtctactacatttatcagactctatatgactgtgaggaagtgttagctacatatcgtgaagagggtacctctctcccagtgccgtctgaggagcaaaatctgattggtaagcaccattcagaattcttgaaacatatgtcgaatgatcttaaaaccacagatgttctggaccgttgcttcatggagctgctgaaggccataaacagcagtctgaatgatttgaagaaactgcagcaaaaaatagaacagcaaaagaagaaacagcaacagcagaagaagcagcaacagcagaagcagcagcaacagaagcaacagcaattgcaaaaacagccagaagattatattcaagctctgattgcactggaaacagaacttaaaaacaaattgtctatacttggtctgatgccatcttcatctttggcagaggtactgaagcaattgaaggacaaatcattaaagcgagcagggctgactgaagaacaattgcaagagcagattgagcagagaaatgtcgcaaggaagaataagcagtttgagatatctgatggaatcaggaaaaaccttgctaccaaaggcatcgccctgatggacgaaccttctggtacagtatggagaccatgcgaaccagagcggtctgaagagtcatgattagctcactgactcaacaagtgatggcggtgtaaaatgagatttttgcctgagggcagttatcgcattttgaagactaacaaaaatcgccatctctggatgtggtattctacagggtaggggttccaggttgactcaccagttaaaacatgcatttctggttgtataacaagcaatgaaccccatatatatacttgacagttgactcctttggaggtttggtttttagttttggataagactttggtactctttgcttgtgtcgggtggttcctttagtcactaaagtttagtcgctaaggtaccccgtttagtt

SEQ ID NO: 14361 - DNA, 2416 bp, Zea Mays
cacaaccaaacgcacgaataattatctcgcgtgacccgcacgtgaggcgccctcctccccaaccgaaaagtctacagaggataaggagctcgccgctcttccagtcccacagctaggggagggaaacaaacacccaaatcaaacccgcgcgtcgccagccgcagcaccaatggcgtgcgtcgccgcgctcttcgcctccccggcgctcctccccttcccctccaccacctcgtccatggcctcctgctcgtgccgcctccgccccgccgtcgtcgcccgcgcgccgcgccagcagccgcggggccggcgcgcgctccggcgcttcgatgaggtggaaggggtgtcgaagaaacggcgcggcatcggaggcggtggcggcgtcggcgctggcgggtcgcagccgtcgtcctcgcgcagggatagggggctttccgtcgatttcaaggagccgcaggttgctgagtttgatgatcttgaagaggacaaattccttaatgctgtcgtcaaggtctattgcactcatatcgcacccgattatggtcttccttggcagaagcaaaggcaacattcaagtagtgggagtgcttttatgattggggatggtaaactcttgacaaatgcgcattgcgttgagcacgacacccaggtcaaagtaaagagaaggggagatgacaaaaaatatattgccaaggttttagctaggggtgttgaatgcgatcttgcgttgctatctgttgagaatgaagagttctggagaggaacagaggcacttcattttggtcgtttgccatgccttcaggattcagtaactgttgtgggatatcctcttggtggagacactatatctgtaacaaaaggcgttgtgtcgcgcattgaggtcactccatatgcacatggaacatcagatcttcttggcattcaaattgacgcagccataaatcctggaaacagtgggggaccagcctttaatgatcaaggggagtgcattggtgtggcatttcaggtgtacaggtcagatgaagctgaaaatattggatatgttattccaactacagttgtatcccatttcttaaatgactatcagaaaaatggaaagtacacaggatttccatgtttgggtgtcttacttcagaaattggaaaatccggcattgcgtgaaagcttaaaagtaccttcaagcgagggtgttcttgttcgtcgggtggaacctactgctccagcaagcagtgttttgcgaaagggagatgtaattgttagctttgatggtatcgcagtaggatgtgaagcaacagtaccatttcggtccacagaacggattgctttccgctatctcacaagccaaaagtatgcaggcgatattgcccagctaggaatcattcgtgatggcaattccatgaaagtccagactattttgcagccaagaaaacatttagtgccgtttcatgttgaggggggacaaccttcttatctgattgttgctggccttgtcttcacacctttaacagaaccatttatagaggaggaatgcgaagatacactagggctgaaattgttagcaaaagcacgttactctctagcaacctttgagggggaggaaattgttattgtgtcgcaggttttggcgcacgaggtcaacattgggtatgagcacatgggcaatcaacaagtcatgaaactaaacggaaccacaataaagaatatccatcaccttgctcatcttgtggacacctgtaaagacaagttcctgacgttcgaattcgaagacgacttccttgttgttttgcatcgagaagaagcggatgctgcatcatcggacattctcaaggaacatgccataccgtccatacggtcatctgatctatcagaaccatatgcagaagcaaacaataacgagatacagaaaacaagcgaggattttggtgaaagtcctgtcacaaactttgagatggggatcgattgtctcttgtgggcatgatcgttctcttttaatggatgagctactgaggatgaagtttcagctaaatctgcagtagtgaaatgcaagcatctgccggcgaacaacggtggtcgtaggaatactctcccaatgtgtagtgcatgcaatgcaagtaccttgcggcaaagccgagtcatgttgtatgttagcatagacagaattgagagatatgctgtacgctaggagccataggatgatttgttcattttcaatctttaggcagtcaggaatttaagggattgtacaatttgtccaccagcgatcctgtaaagctcggacatgcaaatatgcaatagaccgtccagaaattttgttggtttatgtttaaaaaaaaagagagaggaagaatctcagttattctgatgaagtattggggatgatgatgatcagttgctatagtttgtggctgttactagattg

SEQ ID NO: 14362 - DNA, 2415 bp, Zea Mays
acaagatcccgctcattcccatcacgcccatcattttccgttcttcaatccgtcaatccagtccccatccccacggcgccgacgactcgggggcttccccccttggacttggcccgggtgggagtagcacgtcggggaagggaagcaagcgtccgcgagtaaggacagaaaaccgaagggaggagtggagaggaggagcttgcttggagcgggtggacgtgtggtgtgtatatagttaagcgggcgggcgggcgggcagccaatgccgtcgggcgcgcagggctaggagcatgggcggagggggcgcgatcgtgcacggcttccgccgctggttccaccgccggagcgaaggctccacctccaactccaaccagtcgtccctcgccggcgagggggaagcggacgacggctcatccgatctcgaggtcatcgaggacccggatctcctcggcctccgcgccatccgcgtgcccaagcgcaagatgccgctgcccgtcgagagccacaggaagaactcagtagaaatggagttcttcacagagtacggagaggcaagccagtaccagatccaagaagtcattggtaaagggagctacggagtagttgctgcagctgtggacacccgcaccggtgagcgggttgctatcaagaagatcaatgatgtgtttgagcacgtctcggatgccacacgcatactgcgggagatcaagctcctccggttgcttcgtcacccagacatagtcgagattaagcacatcatgctccctccttctcggagggagttccaagacatctatgttgtttttgagctcatggagtcggatctccatcaagtgatcagggcgaatgatgacctcacccctgaacatcaccagtttttcctgtaccaacttcttcgagctctcaagtacatacatgccgctaatgtattccatcgtgatctaaagcccaagaatatactggctaactcggactgcaaactgaaaatatgtgactttggacttgcccgtgcatcattcaatgatgccccttcagctatattttggacagactatgtggcaacaaggtggtaccgggcacctgaactatgtggttcctttttctccaaatacactcctgcaattgatatttggagcattgggtgcatatttgctgaacttctcactggaaggccactatttcctgggaagaatgttgtacaccaattagatattataacagatcttcttgggactccatcatctgagaccttatcccggattcgaaatgagaaggccaggagatatttgagctgcatgcggaaaaaatatcccgtgccctttactcataaatttcgacatgctgatcctttggctcttcgtcttctagagcgtttgcttgcatttgatcctaaagaccggcctagtgcagaagaggctctagctgatccatactttgcatcccttgctaatgtggaacgtgagccatcaagacacccgatttctaaacttgagtttgaatttgaaagaaagaagctggccaaagatgatgttagagaactgatctatcgagagattttggagtatcatccacagatgctggaggagtacatgaaaggcggagaacagattagcttcctctatccaagcggagtcgaccgcttcaaactgcagttcgctcatcttgaggagcattacagcaaaggagaaagaggttccccactgcaaagaaagcatgcttccttaccaagggaaagagtggttgtatccaaggatggcaatactgaacaacaaattaatgaccaggagagaagcgcagattctgttgcccgcactaccgtgagccctccaaggtcagaggatgctgacatggatgatgtgaaacccacaagcttaagctctcggagctacctgaagagtgcaagcataagcgcttccaagtgcgtcgttgtcagaaataaacacccagagccagaggatgatggaatacctgaggagatggaaggcaccgtcgatggattgtctgaaaaggtctccaggatgcactcctaaggcaggactgtccatggcgacagcaatctcgacacaagatttctgtctggtgcactgtaatgccgacgacacactgtttggatcttgtgtacacccacagctagttcaactaagatgtagcactagttcgtccatggaggaagcagaatggacgatgaagtgtggtcagcctgtcgaccatgaggtgttttcttccaatggagtctagggtatgtttgagttctacaacggcttgtgccgtacgaagtgtcagcagtgtacgaggaggaggatatcgttgtcagtacacattttgcctgtctagaaaattatgagtactttctccgatcacaagtacatgtacatccatgtttgtcttaagataaaaaaagaaaattcacaaata

SEQ ID NO: 14363 - DNA, 1349 bp, Zea Mays
cgaccaagcgtacgtcattctctcagaggagtggaggacgtggtcgccgactccaagtcgcacaaggtggtggtgaaggggaagaaggcggccgccgaccccatgagggtggtggagcgcgtgcagaagaagaccggccgcaaggtggagttgctgtcgccgatcccgccgccaacgccgccggaggagaagaaggcagaggaggagcccgagccgccaaagccggaggagaagaaggagccgccggtgatcgccgtggtgctgaaggtgcacatgcactgcgaggcctgcgcccaggggatcaggaagaggatcctcaagatgaaaggcgtgcaatctgcagagccagacctcaaggcgtcggaggtggcagtgaagggcgtgttcgaggagtccaagctggcggagtacgtgtacaagcgcaccggcaagcacgcggccgtcgtcaagtccgagccggtcccggcgccaccgccggagagcggcgccggcgacaacacgggggccaaggaggaggagaaggggcaggaggaggagaaggagaaggaaggaggaggcgatggcggtggcgaggagaagaagaaggaagggggcaaggaggaagagaagaaggacggcgagaagcaggaggaggagaaggagggcggcggtggcggcgagaaggtggaggaaaaggagggagataaagacgctgccgctgccgccgccgccagcatgtacatgcactacccgaggttcccgttcccgggaggctactacgcgccgcctccggggtacgtctaccagccggtgtacccggcgccggcgtacgcggcgtacgcgccgccgcaccaccagcccatggcgccgcagatcttcagcgacgagaaccccaacgcatgctccgtcatgtaactaaaaaacagaaggagccttggcgagagagggggagaaaaggaaaaaaaaagaataataagaaggtgggaagagcgagggagctgcgtgcataagccagagccagaggtagggagggaggtcccctgagagaaatgcagcatccagcagtgtcccctgagcgaagcaaatgggcaactttgtttgaaacaaaacaaaaatacccagctttttcggggggggggggggggggaggaggggcgggtagatttcgctcttattttttttcttctttcttttgtaattttaacccttcctttcatcttttttttcctggtgtaaagtaagcgtggactttgtcggtttatggacgctagctatctttatgtaggatgatgccttggcatgtactgcttgcagcttcagacttcatatataaaactgtatgtattataaatttgtacccctttctctgg

SEQ ID NO: 14364 - DNA, 867 bp, Zea Mays
ctgtggcacagtaattactaagtgaaagaagaggcgacacttccatgtttggcataagtcgaatttgatgatgaaggcaaagtttgtggtgttacctcagaaggggagactgcaaaatgcaaaaaggttgtctgtgatccttcctacctacctgacaaggttaaaaaaattggaaaagtttttcgggcaattgctatcatgagccatcccatcccaaatactgctgaatctcactcagtacagatcatattaccacagaagcaacttggccgcagatcagacatgtatgttttctgctgttcctactctcataatgtcgcatcaaaaggcaaattcatcgcattcgtgtcagcacaagcggagactgataatccagagaaggaactaaagccagggatcgatcttcttgggaaggtggacgagttatttatcgacatatatgacagatatgaacctaccaatgactcatcagcagacaattgtttcatctcaacaagttatgatgccacaacacactttgagtccactgttatggatgtactttccctttacacaaagatcaccggaaagactgttgatctcagcgtggatctaagcgctgctagtgctgctgaagatgatatgtgatacttatcgtagtgctatgtggcgtagtgtggaaaatatttaattaagctttgctttggcaacgattattaggttcacctttatttttccaattgttgttattagctgtgttgtgaccatgattaaagattgcatgctgtaaatttgaaggcattttttttatcaaaagttgttaacgcggtgatccgtgtttagatttttgaagggtaactacactggtggtatcaaaactaaaaaaaa

SEQ ID NO: 14365 - DNA, 1444 bp, Zea Mays
gttctttgttattcttcaccatcagtctctagagaacattgttacgttgctctgaactcttatgacgggaaggcatggagctgatcacaaatgtcaccgagtacgagaagctcgcgaaggagaggctgccgaagatggtgtacgactactacgcctccggcgcagaagatcagtggacgctcaaggagaaccgggaggccttctccagaattctgtttaggccacgggtactgatcgacgtctcccgtatcgacatggccacaaacattctgggcttcagcatttccatgcctatcatgatcgctccttcagccatgcagaaaatggctcatcctgatggagagcttgccacggcaagagctgcagcttccgcaggaacaataatgacattgtcctcatggtctacttccagcgttgaagaggtcaactcagttgggccgggcatacgtttcttccagctctatgtctacaaggacaggaatatcgtacggcaactcgtgaaaagggctgagatggctggcttcaaggccattgcactcacggtagacactccaatacttggccgcagggaagctgacattaagaacaggttcgccttacctccacatctggtgttgaaaaacttccaagcgctggatcttggcacgatggacaagacaaatgattccggccttgcttcctacgttgctggtcaagttgaccgcaccctttcctggaaggacgtcaagtggctgcagacaattacctcgttgccgatcctagtcaaagggatcgtgactgcagaagacactaggcttgcgatcgaatatggcgctgctgggatcatcgtgtccaaccacggcgcgcgccagctagattatgttcctgcgactatcagctgcctggaagaggtcgtcagggaagcgaaaggccggctaccggtgttcctcgacggcggcgtccgccgtggcacggacgtcttcaaggccctggcgttgggagcttcaggagtgttcatcggccggcccgtgctgttctcgctggcggtggacggcgaggccggcgtgcggaaggtgctgcagatgctgagggacgagctggagctcaccatggcgctcagcggctgcacgtcgctgagggagataacccgcgcacacgtcatcaccgacagcgaccggatcggccgctcgcggctgtagaatcattgtgcagttcacctcaggaatgatgttggtctcgactgaactgtcctgattcgggatctatttgtagctcttgtgctctcattttacgttaggcaaataaggaagctgcgtgcgtatgtgtgactgctgctgacgtttgtttgcgccgctgtcgtggttgcctggttggcacttggcagtgttgattggcgttagtggttggtttgggtgaaaggagtttatgagatctggtgccggtttctaagatactagcccatcaa

SEQ ID NO: 14366 - DNA, 123 bp, Zea Mays
ggcgaagcgggcgacgcttcacctccgccatgatgaccgcgtcaaaaaaggtgcgccacgtcgttcaatttcgcatccttttcctcttcccctttctctctcttgctacagggaccgggaaag

SEQ ID NO: 14367 - DNA, 524 bp, Zea Mays
ggttttatatatgagacatgtattaattttctgtgcactcagtgctgaaagctcccacacaagtttgttctagcaagcctctctatgtggggggctcttttttatggtggtttcaagttttttggtggaaagaaggaagacaagattgaggcggcatcaggacagacataggtggctgggatgggagttcttgcctatttctgtggccaggcaacaatgttaaataaaaggaatgtgttatattgtgctttcaagttgataaattgtggcaaccaggttttgattatgtaggcaatattttgacaagctactcttatccagcatgaatgacttcacgtttgtgaatgctgcaaatgttgtacttctttcatgcgattgagtagatgttttacttctgttgccatcaccagttcaacgctgtacttttaattgattcgatcacgtgctttctagtttgcgttgttacagatgaatttgacttaagttttattgataattctatttgtgttgcttgcaattagaaa

SEQ ID NO: 14368 - DNA, 321 bp, Zea Mays
aagtgaacgcgatgcaattggagaggctctcaccttgaataatgtcgcgccatgctcggttgacgacagaatgcggctcgactatggtgtatccattatggcgaggaattgccgtgccctccgatcacaatcccacacgaggatacgatgcgcggcctgcctgagtgcagccgatccccaaccccatgatttgtgttggtcgccctacaacggtagagcactctgcatgacttcggcggatgccctcccccctaaacgacgatggtggtagcactcggtcgacgccacccatggacgaagagaggaggttgtgaccacgcc

SEQ ID NO: 14369 - DNA, 1499 bp, Zea Mays
cgccaattagagtccgatgcgtggcgcctatgattttgtgtgcatcttctacctcgtgctccgtgccctcgacaccgttgaggatgacactagcatcccgaccgaggtgaaggtgcccatcctccaggaattttatcggcacgtctacaaccgcgactggcattattcatgtggaacaaatcactacaaagtgctgatggataagtttcacctcgtatccactgccttcctggagcttggtcaaggctatcaaaaggcaatcgaagaaatcactaggcgaatgggagcaggaatggcaaaatttatatgcaaggaggttgaaactgttgatgactatgacgagtattgtcactatgtagccgggctagttggttatggactttccaggctcttttatgctgctgggacggaagatctggctccagattcactatcaaattcaatgggtctctttttacagaaaactaatataattagggattatttggaggacataaatgagataccaaagtcccgcatgttctggcctcgagagatatggagtaaatatgcagataaactcgaggatttcaaatatgaggaaaataccgaaaaggcagtacaatgcttgaacgatatagtgacgaatgcactgattcatgctgaagagtgccttcagtacatgtcagccttgaagaaccatgccatcttccatttttgcgcaattccccagataatggcaattggaacatgtgctctttgctacaataacgtgcatgtctttagaggagttgtaaagatgagacgtggtctcacggcacgaataattgacgagacaaattcaatgtcagacgtctataccgctttctatgagttttcttcattgatagagtcaaagattgatgacaatgatccaaatgctgctctaacacggagacacgtgaattcaataaagcaaacttgcaagtcatctggtttggtaaagaggagggggtaccatttggacacatcaccttacaggcctatgctgatcatgattgtcctcctgctggtggctatccttttcggggcactgtataccaagtgacttgtagctggcctttttcccctatggagacgagacaaactctgccaatctgatccttttcgtactctgtagtccccaatgactgcaggaagttcggaattactggctgtagaagtgtagatcatacggcagcatgctactgcttccatgactccgttactgctctcgattcgtttcttcattatgttttttcgcgcgttgtatcgtttgaagctgttttaagcaacggaaaaaaaataccatgtgacacgtgtatcctacgaacatgggtttctgtttagttagcagtgggcgcactgtattatgttgtcttgttgacatgtcatgttttcaaagctgacgtgtttgtgtttaccagaattgtgtagtggagaagaacatttgccgcgttgaccttgatgagttactcaactatacaccagcaataatagtg

SEQ ID NO: 14370 - DNA, 121 bp, Zea Mays
accttcctgcgtgcgtgtctgcatgtgcgcgccgtgctcctactgcttcctgtgcgcgtagccgtgtctactccttcctcgccgtagtccctgcccgcgtcgagctttcgtgtcgagctct

SEQ ID NO: 14371 - DNA, 1230 bp, Zea Mays
tcactcacctctctagactctagtagtataaactaccggcgcagcttgccctgctagctcacctcgtgctacctgcactgctcgatccaaaccgtccagtccaacaatccaatccaagcagagtttcagtcgattatcatcacagattccacaggcacaggcggaggtgggttcgggtctggctacgggggagaagcagaggacggtggtggtggtcgctgtggacgacagcgaccacagctaccacgcgctggagtggacggtgcggcacgtggcggcgcccggcggcgtggcgggcggggggggccgacctcgtcatcgtccacgccaagccctcgccgtcctccatcgtcagcttcggcggccccggagccggcgaggcgatcaggcacgtggacgccggcctgcgcaagacggcggaggccgtcgtcgccagggcgcgccgcgtctgcgccgccgccagctcggcgcgcgccctggtcgaggtggtggaaggcgagcccaggaccgtgctgtgcagcgcggcggagaagcaccgcgccgacctgctcgtgctgggcagccacggctacggcgccgtcaagagggcgctgctcgggagcgtcagcgactactgcgcgcaccacgcgcactgctccgtcatgatagtcaagcagccaacaaaatccaaatgaaaacaaaaaagaaaaaaaaattgacagcctgctgatgatgatgaaggtggtgatcgagcggccgcagcgcaaatccatgttaccccgttagcgattacaggcagcagccagcccacaggcccagtgatagcgcgctgtgtataaatatgtgcagcgtgtggagtgtgtcctgtgtatgtgttctgtgttgtttaattttgttgcgagtaactgcatgtaaaataaaggagatagggaaatagtaaattagcttccagcgtgaggaggaggtttgactagccacatatccatctaacagaattagattaaaaaaagtgaaatgatttcaccgtaaaaaatattagtgcactcctccttgatcaacccatccggtggcacgagcaagatttgtcgagcaagcaagctcactacaagcgcagtatcaggcgtagtgcaatgaggattttgcaccgaactggacaaagtaaagctcattgttggatccagaaaagtcaaatacacgttgtctcgcaatcgcaacccacgggctcggccaggcccaggcccaggcccttcg

SEQ ID NO: 14372 - DNA, 2851 bp, Zea Mays
aatggaaccagtacctctattccattccaggctgcttcttcctgcgcgattcgacacggactcagaccctcacacgcctcctcaccggctcacgacgtcgccacctcagatccggcgaccgatcccctcctcctcggcgaggcgtagcccgcagagccgagccggacaacacagccacgaccacgaggcgtcgtcgcggagtagtcggagccgtttctgctgcccccctccttcccgccaagtttgtcaagttacgtccgatgctccagacatagtagaaaaccatgggagaagttagtgatgacaattccaacctgtcctttctaaaaagaatcgcaacaagtgacgtaccgctgttgaaagagtatggtgtaaatggagttgtcgtcgctctgcttcttgctgtagttactcccgtcttgctttccatgatgtttggcaagaaaacaaagcagagggcggtgcgagctaatgtgggtggagaggaaggatttgccatgcgaaacagtaggttttcctccttagttgaagtcccatgggaaggcgccaccacgatgtcagctctgttcgagatggccagcaaaaaatactctcgacggaggtgtcttggcacgaggaagctaatcaagagggaatttgtggaatcttctgatggtaggaagtttgagaaactgcaccttggtgaatacgaatgggatacgtacgccgaggcatttaaccgcgcatgtaattttgcttctggacttgtcaagatgggccacgacctagatagtcatgctgctatcttctctgatacaagagctgagtggatcattgctgctcagggatgcttccgacaaaatttgacggttgtaacaatatatgcatctcttggtgaggatgcattggtgcattcactaaacgagacacaggtttcaactctgatatgtgattcgaagcaacttaagaaaatacctgcaatcagctctaaattgcagagtcttaggcatattatctatattgaggatgaacctgtcgaggctgagacactgaaccaagtgaagcatctgacaacattgtctttcactgaagtagaggagttaggcaagacatctagtgttgatgcaaggttaccttcaagctctgatactgcagttatcatgtatacaagcggaagtactggtcttcccaagggtgtaatgatcacacatggcaacatggtggccacaactgcagcagtcatgacaatagtcccaaaacttggcatgaatgatgtttatctggcttaccttccattggctcatgtctttgaactagcaggagagttcctgcaattttggatcgtatcagagatgcagtgtttaagaaagttggtgagaagggtggcctgacaaaaaagctgtttgattttgcatataagcggaatcttgcatcaattgaggggagttggtttggatcctgggcaccggagaggatgatatgggataccattatttataaaccaatacgggcaatgcttggaggacgtgtaagatttgttctttgtggtggtgcacctttatcaggtgacacacaaagattcatgaatatatgtctaggtgtcccagtgggtcaaggctatggtttgactgaaacctgtgctggagcagctttcactgaatgggatgacacaagtgtgggtcgtgttggtccaccacttccttgctgctatgtgaagcttgtttcatgggaagaaggtggttacaagatttctgattatccgatgccgagaggagaggtcgtggttggcggacacagtataacaaaaggctatttcagcaatgaagcaaagacgaatgaagtatacaaggttgacgagaggggtatacgctggttctacactggtgatattggccagttccatcctgacgggtgccttgagattattgacaggaaaaaagatatagtaaagcttcagcacggagaatatgtgtctcttggcaaggttgaatcggctctagcaacaagtagttatgtggagagcatcatggtctacgccgatccgttccataactactgtgttgccctggttgttccagtacgccaggccctggagaagtgggctcaaaattctgggataaactgtgaaggctttgaagagctttgccaaaatggccaggcggttaaggaggttcagcaatcactatcgaaggccgcgaaagcagcgaggctggagagattcgaggtgccggcgaagatcgagctgctgcctgagccgtggacgccggagtccgggctggtgacggcggcgcttaagctgaagagggagcagataaaggccaaattcaaagacgatctggacaagctctaccactgaagaaaagcggggcttgcacccacgcgttcaggagcttgcgctgccaaaacgctgcctggatgcggaatggaacctactgacctgcacgagaccacgagtggtgtgtgtgtgtgtgtggatgtgtgtcggcgtcggtacagcaggagctgcttcttgtgtgatgaaaaataagccaaagtgttggttggaacgatcttgatttgtatagcttcacttaacttgcatgaaccctagctcgaaatcagttgaatctggatggaccggtcgataagagttgccgctatcggttttgatgcctcacgatggttgaagccgggcagccggcaattgtcggggcgttctctgagatggccatagtcgtcgcaatttgacctgtggatttagatatttgttggatatctaatccaatagataccagagccgggtatggatacatgtttttaccacagttttgatgtttttaccacagttttgatctgtggtcagactttaataaaatggctccctgtgctctga

SEQ ID NO: 14373 - DNA, 1242 bp, Zea Mays
tctgactgggagaaccacttggccgcgccggattttcctttttgcccgagatcatgcacgcgatgtggaagcccgccaagttcaaatacatctacctgctggcgacgctgtacgtgttcacgctgacgctgccgtcgtcggcggccatgtactgggcgttcggcgacgagctgctgacccactcgaacgccttctcgctgctgcccaagacccggtggcgcgacgcggcggtgatcctgatgctgatccaccagttcatcaccttcggcttcgcgtgcacgccgctctacttcgtgtgggagaaggtgatcgggatgcacgacgccaagagcatcttcaagcgcgcgctggcgaggctgcccatcgtcgtgcccatctggttcctcgccatcatcttccccttcttcgggcccatcaactccgccgtcggcgcgctgctcgtcagcttcaccgtctacatcatcccggccctggcgcacgtcctcacctaccgcacggcgtccgcgcgcatgaacgccgcggagaagccgcccttcttcctgccgagctggacggggatgttcgtcctcaacatgttcatcgtggtgtgggtgctggtggtcggcttcgggctgggcggctgggccagcatggtcaacttcgtgaggcagatcgacacgttcgggctgttcgccaagtgctaccagtgcccgaagccgccggtcccggcggccgcgcagtcaccggcgccgctgccgcaccactagggcgcgcaggccccgtgacggcatggagctagcgtcgctgcttgcattgcagccggtgttaattgctactaggttttggtcgccttgtaatatacaagcctcctctagggtcgtagaactcgatcacagcagagtcacgcaaaggcggctcgtgccgtgccgtgccgccgccgcgttgctttcccgcccgccctcctctgcctgatcggtccgtcggcattggtgtcgttttgttttcgtttggcttgccaccggtattaaaaagttgagtgatggtcatggcttcttaatccatatgatgatatgacatacgtatcctatataggttcattagttatttttccttgttggttcgtggaggtcggtccatgttgtgtagcgtgtgggtgactgtaatggactgcgctggaatgctagctaaaggcagaaaacaaaaaaccacagtgcccttttgtttgttattgccctctgctcattagtttctcgctggaatttt

SEQ ID NO: 14374 - DNA, 2433 bp, Zea Mays
gatttggcgggggacaaatgagattcaagctgcctttagaactgatgaaatcaggcgggcgcctcctactccgcaggatgaaatgcgtgctggaatgagttattttcatgagactatatggaagggtgtacccaagttcttacgtagggttgacactgctcttaagaacattggcataaatgagcggttgccatataatgcccctatcattcagttttcttcttggatgggtggtgaccgtgatgggaatccaagagtcacgccagaggttacaagggatgtatgcttgttggctagaatgatggctgctaatttgtataatgcccagatagaagacctgatgtttgagttatctatgtggcgatgcagtgacgagttacgtgtaaaggtcgatcagttataccattcctccaagaaagatacgacaaaacactatatagagttctggaagcaagtccctcccagtgaaccttaccgtgtgattctgagtgatgtcagagataaactctataacacacgtgaacgagcacgtcacttattagctagtgggttttctgaaattccagaggaagcaaccttcaccgatgttgaacagttcttggagcctcttgagctctgttacagatctctgtgtgcctgtggtgatcgctctgttgcggatggaagccttcttgacttcttaaggcaagtgtcaacatttggactatcccttgttagacttgatatcaggcaagaatctgaccggcatactgatgttatggatgctataactgaatacctcggtattggatcataccgtaaatggccagaggagaaacgccaagaatggctactatcggaacttaatggaaagaggccgttatttggtccggaccttcccaagtcagatgagattgctgatgtactagatactttccacgtattagctgaacttccatcagacagctttggtgcatatgtaatatctatggcgactgctccctcagatgtccttgctgtggagctcttgcagcgtgaatgccatgtgaaaaaaccactgagagtcgttcctttgttcgaaaaactggcagatcttgagtcagcaccagcagcgttagctcggctgttctccgttgaatggtacagaaacaggatcagcggcaagcaggaagtgatgatcgggtattcagattctggcaaggatgccggtcgtttctctgctgcttggcaactgtacaaggctcaagaggagctcattaatgtcgctaagctgtatggggttaagctaaccatgttccacggacgaggcggaactgtgggaagaggtgggggccctacccatcttgctatactgtcacaacctccagaaaccatccatggatcacttagggtaaccgttcaaggcgaagtcattgagcagtctttcggagaggagcatttgtgctttaggacactgcaacgtttcacggctgcgacccttgaacatggtatgcaccctccaatttcgccgaaaccagaatggcgtgctttgatggatgagatggctatcgtcgccacaaaggaataccggtcaatcgtatttgaggaaccgcgctttgttgaatacttccgccttgcaacgccagagatggagtatggcaggatgaacatcggaagcaggccatcgaaaagaaagccgagtgcgggcatcgagtcgctgcgcgcaatcccttggatcttcgcttggacgcagactcggttccacctgccggtgtggctgggtttcggcgcggcgttcaagcatgtcttggacaaggacatacggaatctccagacccttcaggagatgtacaaccagtggccctttttcagggtgacgatagacctggtcgagatggtgttcgccaagggtgatcctggcatcgcggcgctgtacgacaagcttctggtctcagaggatctgtgggcattaggggcgcgtctcagagccaactacgaagaaacaaagcagcttctcctgcaggtcgctgggcacaaggaccttctggagggcgacccgtacctgaagcagaggctgcgcatccgtgactcgtacaccacggcgctgaacgtttgccaggcctacacgctgaagcgcatcagggaccctggcttccaggtgaagccgcggccccacctgtcgaaggacatcatggacatgggcaagccggcgtcggagctcgtgaagctgaacaccaccagcgagtacgccccggggctggaggacaccctcatcctgaccatgaagggcatcgctgccgggatgcagaacaccggctgaagccagtgtgcctgtcttctttctgtaggggatcatatcatatggcgtgatgaaccagtgaacacctggatatgtggggattagttacaccctgttgcactcgaatttatgccccgcttggccgcgcccttgtcgcatggtttccatatctctcg

SEQ ID NO: 14375 - DNA, 1269 bp, Zea Mays
catctctctcctcatataaaattcgaagcatcctgccgtgcgtccccgaagttccgagtccccattcggtcccccccctctgctctctcgaagcctccaggctccagaacccccaccccctctcctctcgcgccgcgaggggttgatccgtccggcgatctgggccctccggccggcgcccgcgcctgggaggcttttccttacccgccgcacgggcggagatgctctcgctccaacagcagcacggcggcgctgtcgccgccggcggcgatgcgcgccaccacgcaccgcagccgtcggtgctcggtggaggcgcggactggctagtgttcgggggccgcgccgacctggaggagcccgcgaggaatgccccgtcgcccgccttgttccttcttccgcccgcggggctcgatgacagggcggcccagcccgagcccaatcccaagcccgcacagctcgcaggaggcgatcgtgccgactgtttcgactttggactgggagaagtgggcacaaaagctgttgatgaagagcgacatttggcacttgcacatcaaaactacaggtcagggaagtaccgagaggctctagagcatggtaatgtcgtttacgagaagaatccacgtcgaactgataacctcctcctccttggagctatatactatcagattcgtaattatgacatgtgcattgcaaaaaacgaggaggctcttgccatagatccacattttgctgaatgctacggcaatatggcaaatgcttggaaggagaaaggtgatattgatcttgcaattcgttactatcttactgctattcagctgcgaccaaacttctgtgatgcatggtcaaatctcgctagcgcatatacaaggaaggggagactgaatgaggcagctcaatgttgtagacaggcacttgctataaatcctcgattggttgatgcacatagtaatcttggaaatctgatgaaagctcaaggctttattcaagaggcatacagttgctacatcgaggcgttacgtattgatcctcattttgcaattgcatggtcaaaccttgctggtctgtttatggaggcaggagacctcgacaaggctttaatgtattataaggaagctgttaagcttaagccatctttcgctgatgcatatcttaatcaagggaatgtttataaggctttgggaatgcctcaagatgccattatgtgttatcaacgtgcactgcaggcacgtcctgactatgctatggcttatggggaacattttcatgcag

SEQ ID NO: 14376 - DNA, 134 bp, Zea Mays
ggatgagaaacacacacaagacacaaaatcagagcaacaatacacacacaagtcacaacttgagctcacaacacaactcaaagagttctctactcaaatggagctctagttgctatcacaaagaatcgaatgcg

SEQ ID NO: 14377 - DNA, 90 bp, Zea Mays
ttaggatttatgggcttggcccaattaagaaattctaataaatcacaggaaaatctcaaaagcccatacaagtggatggctagggaattg

SEQ ID NO: 14378 - DNA, 3546 bp, Zea Mays
gctcgccgagagcccgaaacagtccaatcccaacacggcgacgacgccagcggaaatcgcatcgccctcttcctctttccctcgctgtgcaatctcccccaaactcccctctcgaaccctcgctctcgtcgccagagcaagcaaagcgcagttgctgaaacccgtgcgctgttgatggatgatgaccgttcccatggatagtgctagcgcagccccgtcctctgcgcgggactttgctgagcgtctccttactaggaataatgaacttgaagatcagcttcgcaagtccgcacaatccaaagtcccatcagatcccagcatatggcttcagatgcgtgacaactttgagaagattattctcatagatcatgacctatctgaacagaaagaggtagagtatctcctatggaagttgcattacaaaagaattgaggacttcaggaggagcattagtgctgcaagctcagctgcatctcagagtgggaagagcaacgctaatccagatcgagtcaagagaattaaattaaccttcaaaagcttcctttcagaagcaactggcttctatcacgacttgatgttaaagatcaaatcaaatttgggccttccactcagttactttccagagggcatcgacaatgcaaacaactctgcgcgagatgacaagacaacagtgcagttgaagaaaggtttgatttcatgccatcgctgcctgatatatttgggagatcttgctcgttacaagagctcgcaaggtgatggtgattctgctagccgtgaatacgcagcggcatctagttactacatggaggctgcttctatctatccttccagtggcaaccctcatcatcagcttgctatactagcatcttactcaggcaacgaggtggtagctgtttataggtacttccgaagcttagctgcagatactccttttaccactgcacgtgacaacttgattattctttttgaaaagaatcgccaaagctatagacagctgccagacaacaacaaagttcccagcgctaaggcattacccccacggctatctgggaggggacaaggacggggagaagtaaagtttcagccaaaagatgttaacgcagaagcagctgaaagggaacaggagtgcaatgttcgtgatacattgaaggccttctatatacgatttgtcaggctcactggaattcttttcacgaggaccagtttggaaacatttggggagctgttttcttcagttagcaatgatttgcagattcttctttcttccggtcttgaggaggaccttaatttcggttctgatgctgcagaaaatgcattagctgctgttaggcttactatcatccttatattcacagtgcacaatgtaaataaagaacctgatagccagtcatattctgaacttgtgcaacgcagagtactgctccaaagtgcgtttacggctgcttttgattttgttggacgaattctcagaaggtgttcagaacttggtgatatcacatcaagcttctatctgccagccattctggtctacatcgaatggctggcgtcccatccagagttggctattgactcagagatggaggaacagcatgcaaatgccagatctttcttctggaaccaatgtatctcatttatgaataagttgatccttaccaaccttgcttctatggaggacaatgacgatgaggcttgcttttctaatatgagcatttatgaggagggtgaaactgggaacaggcttgccatttgggaagatcttgaattgagaggttttttgcccttggttcctgcacataccattttggatttctcaagcaaacacacatttggaaatgttggaagcaccaaggagaagaaagcacgggttcaacgaatttttgctgcaggaaagtcactgctgaactttgttcagattgatcagttgaggatatattttgatccatctttgaaaaagtttgtcttggccaagaactctcctgtttctagaactaacacccctcttcatgaatctcctgatgcacttaaaacaaatgggactgaaatggatcacaaggctgctagaagatttgattcagtttcttctaatgtgggctcactgcagtctaaagtgcagttttgtcctgatggtgatgatgaagaagaaattgttttcaagccaacagcttatgagaagttttcaaaagtttcttcagatctgtcagttaatggatacgtccatcctgtaccagtgtctgctgctggtgggccaaccaatgctagtttagtgcctgttcagaacactgcatcaatgtctgcaactcgtttaccatccaatccacatgcaactggtttgccatccaatggtgggtcacttccaagtactgcatctctatcagctgctggtaattacaacactgatcagtcgcttcccaggtcgtctgttggttggactgattgggctgtcaatagtgagcaaaatgttactcctagcattgctccaagatttgaactcatgcagtctgttgaggagcctgtttccagctggacaagcagtggggcacagcatgttggtcctcagcacaagcacacaggtttaactttcccagatgttgtctctgaaccatgtgtatctgcatcaatggttcaatgttttagtagctccgattattcgaaatttctcagagaacaagaaatattcttaatgaatggactgaagactgtcaacataactggaaatggctatctagagcagagattgcagcctggattgagtggtttacagtctatgggttattcatctcagatacctattcaacctggtggtaccactgcaaacctgatgcataatcatgtcaaaattactggagagactgtcccctctacacttgattcagttgtaccttcaatagcaccatcaggtggcatgccaatcaaacttacagaagcaccactaactgcttcgaagaagaaccctgttagtcgtccatcaaagcctgttggaccacctccaggatttaatcatgtaaccccaaagcgtcaagatgattctattccggttgaaaaactgcagaacccacaggtcgatgattacagctggctagatagctatcagcaatcgattgatcatgttcacagcttaagaactatttatcctggtgtcagtgatactagcactgcatttgccactccattctctttccctgggaggatacacacacaagggaccaatgaaaagacttggcaagatttccacctttttgagccttcaaaacagaacatgttccaaacttaccaccaaagaaatctgcaaagtggtcaaatggatgaacaagagccagcaaattctatctggtctagcagttaccatgtgtgatttggtaacttttaccaggatgattgctggagtttctggggacagactattggattaagtggcacgacctgatctattgagcttagcccatacctgcagcacttagtgttaaatttcttttgagaatggtagtctttcaagcatgacaatggctgctgttaagtttgatattcatctctatctctcagttgtcg

SEQ ID NO: 14379 - DNA, 1430 bp, Zea Mays
cagatgaaaacaagacacctgaaaagaggttctggcagtcaggccagtctgcaattgcccaaacaatttcattactgttacaaaaagcttggttgttgcaagctgacaatatgggctctgcattaccacctccgtcatgcgtaaacgatgcttctgtgctacttgagtttgtcatgagttctgtcacttgcatggaagaaacggcaaatctgaaggtctttgaactggtagctacatgggctgacgctattgccaactgggactcctgggaggagatggaggatcagggtgttttcaacacaattaaagaagctgtcaatttccaccagagatttgacctcgacggtctcttcctgaaaacgcttccgtcgcagtctgaaaatggttcacagagttcagtcatcggccgtgtctctaattttgtgactagggcaattgcagcttacccatccgcaacgtggagggcatgctcgtgcgtccatacactgctgcacgctccaaaattctcccttggagcacaagacactagaaagactatttccgaatcctttgcacaagcagcgttttcccgcttcaaatctgtatccgacagtcctgctgggctatggaaaccactgctgttggcgatatcctcgtgctacatctgctatcccgatgccatcgaacaagtcctgaacaacgttgatggtaacggttttgcgatctgggcgtctgcattggcacaagtctcaagcagcttgttcaatcctggcctgtcatctgaatccgagatcaagttagctgctgaaggaagttcaggacgatggggacaatgacgatgatgatgatggtgctgaagatgttgatgacaacgatgaagaggaagacaccgaagatgatgatgaggattcggacgacgacgacgatgcgagagaagaaacagaagaggaatttctggaaagatatgcactagcggcggctgcgggcgagtcagtcgaggaaggagacattgatgaagagacccaagacatcgaattgggctctctggatgacgtggacatacagcaggtggttattcccctgatgcagaaacttcctgctctgcagcccgccggagcgtttccggacagcctggttgaaagaattgcagaaacattcccggaatacgaacagtttttgcaagcccttcgacgagcttagagtataggaaacatgtgcagatttttctctttttgttatatgtttatatttttttgtgtcatttttggtttgcttctaccttgagcgttgttccgagatgtgtttctttttgtcagatatggtgtttattttcccttgatgtgggtggcaagatatgggtgatgatgtacgtacgatggttacaagtatgttgtgagcataattgttatggcaacactatcctccgttcggctattttgcctatttttgtt

SEQ ID NO: 14380 - DNA, 1712 bp, Zea Mays
agaaagcttgaacttggatgccgagcctataaatggcgaccgaccccggccacttccactcaccgcactccagcgttcagcattagacacgagagctcctagtagccagaccagtagtcccgcgaccctgtcgagagaaacagacagagcaacatggcgcctgcattgtcattcccgatcatcgacatggggctgctcgccggggaggagaggccggcggcgatggagctgctgcaagatgcgtgcgagaactggggcttcttcgagattctgaaccacggcatctcgacggagctgatggacgaggtagagaagctgaccaaggagcactacaagcgggtgcgcgagcagaggttcctcgagttcgccagcaagacgctcggggacggccgcgacattgcgcagggcgtgaaggcggagaacctggactgggagagcaccttcttcgtccgccacctcccggagcccaacatcgccgagataccggacctggacgacgagtaccggcgcgtcatgaagcggttcgccggcgagctggaggcgctggcggagcggctgctggacctgctgtgcgagaacctcggcctcgacaggggctacctggcgcgcgcgttccgcgggcccagcaagggcgccccgacgttcggcaccaaggtcagcagctacccgccgtgcccgcgcccggacctcgtcagcggcctgcgcgcgcacaccgacgccggcggcatcatcctgctgttccaggacgaccgggtgggcggcctccagctgctcaaggacggcgagtgggttgacgtgccgcccatgcgccacgccgtcgtcgtcaacctgggcgaccagctggaggtgatcaccaacggcaggtacaagagcgtcatgcaccgggtggtggcgcagcccagcgggaacaggatgtccatcgcgtccttctacaacccgggcagcgacgcggtcatcttcccggcgccggcgctggtcaaggccgaggaggcggcagcgggggcgtaccccagcttcgtcttcgaggactacatgaagctgtacgtgcggcacaagttcgaggccaaggagccacggttcgaggccttcaagtccatggagacggacagctccaatcgcatagccatcgcgtgaaacaccggacctgcgccgagctctggcttactgttcgagatgtacgtgcggcgtactgtactcactaccggaatccgagactttgccgagtgttggcttctttgccgagtgccttttgtcgggcactcggcaaagaaagctttgccgagtgccgtactcggtaacgttaggcactcggcaaaacgtgctttgccgagggctgaacactcggcacagaacggcactcggcaaagacaactttgccgagagtcaaacactcggcaaaggaggctctcggcgagcggccgtcccaaagctgacggccgttagtctttgccgagtgtcatccgttggctctcggcaaagaggttctgtaccgagtgccacatagtaggcactcggcaaagcatactttgccgagtgtcatctctggacactcggcaaagtatatttttatttttttattttaaattcaaataaacaaactaaatgtactagctatagaaaaaactgttataattatcccaaaatggtacatgtaggtctacatagtgtagaaacataccacaaaaatttcgagagactaaataaaaaaataa

SEQ ID NO: 14381 - DNA, 1992 bp, Zea Mays
ccttctattttcgcaccatatctgcaattttcgttctggcatttgcttgacatatgaaaatcagtccgctctgaataaagtagacactcgatggaaaacaggaagagatgtctggtggcaggatgttgtgcctgatttcccaactaaatgcgatgtggaatgggttgatgcagaggatccactgtttcttttgtacacaagtggcagcacaggaaagccaaagggtgtgttgcatacaactgggggatatatggtctactctgctacaacatttaagcatgcatttgactacaaaccaacagacatatactggtgcactgcagattgtggctggattactggacatagttatgtgacatatggtccactattgaatggagccacagttcttgttttcgaaggggccccaaattaccctgatcctggccgctgttgggacattgttgataaatatggagtgacaatattttatacagcaccaacacttatacgctcacttatgcgtgatggtactgagtatgttgctcggtactctcgcaagtctctccgagtacttggaagtgtgggtgagccaatcaaccccaccgcatggaggtggttgtatgatgttattggtgactcacgatgccccatatcagatacttggtggcagactgaaaccgggggattcatgatcactcctttacctggtgcttggcctcaaaagccaggatcagcaacgtttcctttcttcggtgtgcagccagtcattgttgacgagaaaggtcgggaaatggaaggagaatgcagtggatatctttgcataaagaaatcatggcctggggctttccggactctgtatggagataaagagagatatgagacgacatacttcaaaccatttgctggatattatttctcgggcgatggctgcagcagggataaagatggctaccactggctgactggaagagttgatgatgttatcaatgttagtggacaccggattgggacagcggaagttgagtctgctctggtttcacatccaaaatgtgctgaggctgctgttgttggtattgatcatgaggttaaaggccagggaatatatgcttttgtgactttggtggatggtgttccctacagcgatgatctacggaaaagcctcgttacgacggtccgcagtcagattggtgcgtttgctgctcctgacaagatccattgggcacctgggctccctaagacacgaagtgggaagatcatgcgaagaatcttaagaaaaatcgcatccaggcaactagatgagctcggcgacacgagcacgcttgctgaccctggtgttgtggaccagctgattgcactcagtgacagctaatctatcggctatgtgggagggggtgagacatgatcactgcctgcactatacttatgcaaaattcagctttatgatgcgaggtctgttgggcccagcgttctcttaattgcttcggtgtcatggggatgccaacaaaagagagatgctgcgaacttggggagatgcggacatatgcggggtgcgtctgtaaattgttggatcgcagtcactgatagttattgtacattggtaaataaggagatgaagtgtatatgcgagttttggctaaaatgtttaatgatagatctcgcattttatggttacgtacaggattcagccatggacattgaaggacaacgtgtttactacacctctttgttcgctgttcaaagcatgagcaccatcttagaaacattggaatttagggatctacatgagaattgagctgcttcggtcgaatttctgcggaggcagctgggatgtgtcccaaactagacacggtcggtaccaatactccttgaaccaatggggcacgggaatttggcagagttccgctcccaacttcggagcggattctacgtatctctaccaaacacgatacaattgtattttggtaggtgataaatcgcttcttcatttatactattgagttctgacttctg

SEQ ID NO: 14382 - DNA, 757 bp, Zea Mays
atatgcaccagtttcgactgattggtccttacatgcttgaacatggtgcctgtaccattcatcatcctctacctgaagaaactcgcaacgtttctgtctcagaacagcgcgtccgcgactcgaattatggacctcctctttgagcgggcacggcgcaaggctgctcctgttgaggaattccagtggctcggcttgatgctgttcgttgccgttccattcccaggcacgggagcgtggacaggggccttcattgcatctgtactaggcatgccgttctggtcaggttttacagcaaatttcgtgggagtcgtccttgcagggctgctggtgaacttgctcatgaatcttggcctgaaatacgcgatcgtcactggagtagttttgttctttgtctcaaccgtcatgtggagtgttcttcgttcccttaagaagtccgttaatgtcaagtgatctagtagtctttatcaaactgttcctaatcccttcagagttcagccttgcgtaggaagcttagttgtgtaattttaagtggaactttcagcttccaagtggatttacaagagagagtaacactccatatctccagcgagctgagaattggccatgcttatttaagtcgcaagtaaaaatgtctttctcatccaataattgaatatgcgatattttagctattaggctatgccaatcagtgattttgttatccactaaagttctaggaaaagatgtgttcaatgacctttgtcccattacgatttcc

SEQ ID NO: 14383 - DNA, 2220 bp, Zea Mays
aaaaaaattgtgttctcttcgaaggcagaagacctcccttttttactttacccctccaggaagcgccaaaaaaaaaaaatccatggaagggtaatggcagctcgtcccgcctgttgctgaggaaagagttctgtgacgggagaaaggcaacgattacctagtctcgtcactgtaagttggaaggccatgtctaccttcatcggcgttcttgtctccgatccagggctgcagagccagttcacccaggtgcagctcaggacccttcaaacaaagtttgcatccgcaaagcgaccaaacgcagaacatgtgaccataaaggatttgcccccgatgatggaaaagctgaggggcatccacgaagtcctgtccgaagaagagatcagcgggtttttgagcgagacctatcctgacatgaaccagcctatagaattcgagccgttcctcaaggagtacttaaatatacaagccaaagggagcagcaaatcgggaggcaagaagaagctgaaggggtccgtgtcgtttctgaaggcttccaccaccactctccttcacgtcatcaacgagtccgagaagacttcctacgtgaaccacataaacaatttcctgaaggaggatcctttcctgaagaatttcttgccgctggatccggcatccaacgagctgttcaaccttgttcgggacggcgtgctactttgcaagttgatcaacgttgctgttccgggcacgatagatgagagagcgattaacacaaagaagcatcttaatccatgggagaggaacgagaaccataccctttgtctcaactctgccaaggccattggttgcactgttgttaacattggaacacaagatctgattgaagccaggcctcatctggttcttggactgttatgccagatcataaagatacaactactggctgatctgaatctaaagaagacgcctcagttggcagagttggtggctgatgataatggcaaggaagtagaggagctggtcaccttagcaccggataagatgttgcttaaatggatgaacttccatctcaagaaagcagggtataaaaaaactgtgacaaatttctctactgatgtgaaggatggtgaagcgtatgcttaccttctcagcacccttgctccagagcttagctcaaaaaccatgatagaaacttcagatccaaaggagagggcacagaaagtacttgaaaccgcagaaaagctcgattgtacaagatatgtaacgtctaaagatattgttgaaggttccgccaatcttaacttggcattcgttgctcaaatattccagaacagaaatggtttatcaaccaacactgtggctcccgttattgaagatactcctgatgacgtggaggcatccagggaagagagagcatttcgcctatggatcaacagccttggaattccaacttatgtcaacaatttgtttgaggatgttaggactggatgggttttgctagaggttcttgacaaaatttctccagggtcagttaactggaagcatgcatccaaaccaccaatcattatgccgtttagaaaggttgaaaactgcaaccaggttatcaaaatcggcaaggagctaaacttttctctggtaaatgtagcaggaaatgatattgtgcaaggaaacaagaaactgattctagctttcctgtggcaactcatgaggactagtatcctacaattgctgaggaacttgagatcccactctaaagagaaagagatgacagatgctgacattctcatttgggctaatagcaaggtcaaggaatcaggcaaaaattcacatattgaaagcttcaaggacaaaacgatagcagatggggtgttcttccttgagctcctaagtgctgtgcagagcagggttgttgactggaacatggtgaagaagggggaggatgaggaggagaagaagctgaatgcaacatacataatcagtgttgctaggaagctaggttgcactgtcttcttgctacctgaagacataatggaggtgaacccaaagatgatcctcaccctgacagcaagcatcatgtactggagcctgcagaatcaagggccatacaagagttcaggaccacaggatgctcttctagaggaagaggaaggcgaggaggaggaagaagaagaagaagaggaggaagaggaggaggaggatttcgaaggaggtgtcgaagatggtgtctctgaaacgaccacttga

SEQ ID NO: 14384 - DNA, 505 bp, Zea Mays
cttgaaacggtagcatcaagctcactctgctgatatactgatgctaaacacggttacagttgctaaatctgttgattttgtctagattttagcaccacagttgtatgaatgaacaacaccaaacacgacatccccaatgtttagcttgatttgcatagaatatcaaatattgataccttcctagatttcttgcgatcactgctatgcctccgagacttcttagcatcgtctttatcatccctctcagagcttacatcatctgtgtcatggtgacgtctcttatgtttcttttctttatctttatctcttttcttatcttttgcaccatgggtgttcaaatcagcaccatcaaactccatttcatctctccttgatcgatccttccctttctccttttctctctcctcccggtggtctctttctttttctttgcgttctttctccttcctttctttctctttcttcttctctttctcctcacgctctttctctctttttgcctaat

SEQ ID NO: 14385 - DNA, 2166 bp, Zea Mays
ctggaattcacttctttgggggcctttagatccgccattagttttgtacatggtcgcactcgcacaattcgcacgtcagaaagcgagagaagtccgtctgctggtcgcaaccgagcaggatgctgtcattgcccagaacggcggcggcggtgactgtgtatgcgctggtcgctcttatcgccggcgccgccgcggcgggaggtggcgagcagccgctgtcgaggatcgccatccaccgcgccaccgttgcgccccagccgggtgccttcgtcgacgcttcgccggcccttctcggccgggagggggaggacagagaatgggtgaccgtcacatatagtaaccccaggccctcgaaggatgactggattggagtcttctcccctgctaatttcaatgattccatttgtccaccagagaatgaatgggtggagccccctcttttatgcacagctcctatcaagttccaattcgcaaactacacgaatcgtgattatggaaacactggaaagggatcgttgaggcttcagctgataaatcagagagagggtttctcttttgcattgttctctggaggcctgtcgaatccgaagctcatcgcccactcaaagagtgttactttcatcaacccaaagactccggtgtacccgcggttagcacaaggaaaatcctggaacgaaataacagtgacatggacaagtggctatggtaccaatgaggctacaccatttgtcagatggggcatagaagggcaaatccaaaccctttctcctgcaggcacccttactttcagtcgcgacaccatgtgtggtcctcctgcaaggacagttggttggcgtgatcctggtttcatacacacaagttttctcaaggacttatggcccaatctcttgtacacataccaagttggtcatcgcatttttaatggttctatagtttggggacatcagtatagcttcaaagcacctccttatcccggggaagactctttgcaacgtgttgtaattttgggggatatgggcaaggctgaggttgatggttcaaatgagttcaatgactttgagcctggttcacttaacacaacaaaccagctaattaaagacttgaagaacattgatgtagttttccatattggagacatcacatatgccaatggctatctttcacaatgggaccaattcaccgcacaggttgagcccattgcttctactgtgccttacatggttgggagtggtaaccacgaaagagattggcctggatcaggatctttctatggaaatcttgactcaggtggtgaatgcggggtaccagctcagaatatgttctacgtgccagcagaaaaccgtgagcagttctggtactcaacggactacggaatgttccgtttctgcgtagccaataccgagttggactggaggccaggaacggagcagtacaggttcatcgagcactgcctgtcatctgttgataggcagaaacagccatggctcatcttcctcgcgcaccgtgtcctgggttactcgtcggccaccttctacgccgacgaaggaacgaccgaggagcccatgggccgtgagagccttcagccactctggcagaagtacaaggtcgacatcgctatgtacggccacgtccacggctacgaacggacctgcccagtatatgagaacgcgtgcgtggccaaggggtccgacctctacgccggcgccttcacggcgacgacgcacgtcgtggtgggcggcggcggcgccagcctcgccgactacacggccgcgcgggcgcgatggagccacgtgcgggaccgcgactttgggttcgtgaagctgacggcgttcaaccacacgaggctgctgttggagtacaagaagagccgggatggcagcgtgcacgaccacttcaccatctcccgcgactaccgcgacgttctggcctgcggcgtcgacaactgccccagcaccaccctggcgtcgtgagcgagcggtggtgtcgattatattcggtttgtgtcgctgttggattttgatttcaagatcgatgcactgtgctgtactgttgtggacggaatgaaatacctgagtgaggaagcagctgctggtgcagcaggtccacatgctgcttcggagtgtccccacggccaaaaatgatcacacccctgaattctttgcttac

SEQ ID NO: 14386 - DNA, 126 bp, Zea Mays
agcacaacaccaccacgagatggaggcaaactggctacgacggcttaggacatgtgaggaggctgacagcaggggacttcgcgatggttagcgagacttgacggtgaatgacgactaccggcgagg

SEQ ID NO: 14387 - DNA, 87 bp, Zea Mays
aggaggtacctgatgcgccgactgcagggggtgccgatgccatggaggaggggggcgcagaaccgcggcccgtcctggggagcggcg

SEQ ID NO: 14388 - DNA, 1389 bp, Zea Mays
ttatctaagggtgaccaagtagatgaattccagccactctgtgaagtacagagtgacaaagcaactatcgagataacaagtcgtttcaaggggaaagtacataagattcactttgtccctggtgacatagtgaaggttggtgaaactttactgaaaatggttgtgggtgacagccaaattgtttccccagataatatagttccatccgctggtaagtcccttggagtagagtctgcagttttctcaagtgaaggcaatgttcctggtggaaatctctctacaccagctgttaggcatctagcaaagcagtatgggatcagcataaatgaaattgttgggacagggaaagatggtagggttttgaaagaagatgtgttgaattatgctgtcagcaaaggtgtttgcaaacaacaatcgttagcttcggaagggaacattggtcaagttgagttactagaggaagggaaagcattactcgatgaggacttctatgaagataagaaaatccttctcaggggataccagagatcaatggtcaaatcaatgagcctggcagcaaaagttccacattttcattatctagaggagataaattgtgattctcttgtgcaactaaaaaccacatttcaaaatgagaacaaggatcaaactatcaagcacactttccttccgttcctcataaagtcactttctatggcactgagtaaataccctatgttgaacagttctttcattgaggaaactaacgaagttgtgttcaaggggcctcacaacattggggtggcgatggctacaacacatggattagtcgtgccaaacatcaagaaagtgcagtcgctatcaatattggagatcacgaaggaattggcgcgattgcatgagatggcatcacaaaacaggctaagcgctgcagatattgaaggtggcactataacacttagtaacataggtgccattggtggcaagtttggctctccacttctgaacctacctgaagttgccatcattgcccttgggcggattcaaaagcttcctcgcttcgatgatgacgaaaacgtttacccttcatccataatcaatgttactgttggagccgatcaccgagttgttgacggggccacggttgcaagattctgtaatgaatggaagagcctcgtggagaagccagagctgctcttgttgcatatgcgatgacccagtaatgtaccggtacatactacgacctgaaacggaggcattttggcataaaaaaataaatccatgtattcaaataaataaccaacgtggcttctctgcctggaaacagtggaaataaattgggagttattttcggagtcctaatcttatgttttcctttgctgaaattcatttttagggctatttgggaac

SEQ ID NO: 14389 - DNA, 539 bp, Zea Mays
gaagaactgaagaagcaagcaggttctgaatgagttcgctgcagttgaaccatctcttccatgcaagcggctagcggatggctccaaacgggttcaactccctcagttcctaaagcagcagccgtcgaaggacaacaaattaattgaattgagccagacccagtgcactgtgcatcttggttcataataacaccaccagagccagttaacggagcattgtacacaccgaattatgtgaatcatgcaccacataacattatcaattcgttgtatacttctgtattgcatcagaacctgtagtgattgttgtataagctgctaattgctgcatggacatgtctgaatccatcatggatttcttgcgaccgttagtctgttctaggaaacattatataggaataattcgtaaccatgacccgtattctctagggaaaaaaaataatgatcctaggtcactcattttggttggtgttattctgttattcttccgcatgagctatctatggactttggttcttcaatctctacttttaaatagg

SEQ ID NO: 14390 - DNA, 1500 bp, Zea Mays
gatcagatgaatgagctaggtggataggaagtacaaacactattatcatcagatgcaacttgtaatgtcatcgtttaatatggttgctggtgctggagctgccaagccttatactgcagttgccctccagacaatctcacggcatttccgatgtctaaaggatgctatcaatgatcaaattagtgttatccggaagaaacttggagaggatgacaatacatccggcaaagagggcaaactaacccgccttcgttatattgatcagcaaataaggcaacagcgagctttccaacagtatggtatgctacagcaaaacgcttggaggccacagagaggactacctgaaaattcagtctcgattctccgggcttggctttttgaacatttccttcacccgtatccaaaagattctgaaaagctaatgttatcgagacaaactgggttgacaagaagtcagatttcaaactggttcatcaatgcccgtgtccggctgtggaagccaatgatcgaagacatgtacaaagaagagattggtgaagcggagctagactccaactcttcctccgacaacgggcagcgaaacaaggacaaagcaccatctcccgaagaaaatgaggacctgcagaccccaacaagccaggcttgccaaaccagccagctcggccagtccaaagccatcgttggtggagtgatgggctttagtggagtgctagccggcggcttccacaccgaggccaaccccgacgacagcttcatgagcctgatgctaaaggcccagagacctggtgaaaccgaaggcaccggtctcctccacgatgccgtcgctcaccactcggacgacggcgcccggttcatggcctaccacctggcagagttcgggaggtacgggaacagcagcaacgtctcactgacgctgggcttgcagcacgccgagaacagcctcgcagtcccaccaaacactcagccaggcttccccggcgtcagagaccaagacatgtacaacgccacggctcctcctctcaacgtcgcctccacatcttcagagtatgattcggcgagccaaattgatcagcaacagcaacggcagcggttcgagccgtcacctctgatgcatgatttcgtggcctgaatttcagctcgcccactggaaaacgtgggggaaaactactgccaatttgtagtgtgtgccaggacgaataacttgcctggactgaattttcaggcgtgggactgttagctgtagttaacgattggggatttggggggtacagtacaggaggtatatagcgtaaatgtgatgtaaatttagtgggggtgatagcggtaaagaaatcctgtaaagatggaatgcatttatacgtgtatttaagggccatgctgtaaaaatagatttacctgtaatgagtacttatgatccagtatatatactgtgcacgttgttgaaaccaaaaaaaaaaaaagaagaggggggtgggggtaaactgaaatggattgcaggag

SEQ ID NO: 14391 - DNA, 521 bp, Zea Mays
ttaattttgagacatggatctggtccatggagtgagccacggcctcttggcaataggggccatgaagtgactgatgcagactctgcaaacacgctgcgaaggcggcctagaccatttggtgccaatatccacactctggggagcgaggatcatggtccgtctgatgaaagaaatgttttctggaacgggaactcgacagagtttggaggcgacgacagaaaataggttgtggcgtggctggcagggcctgggacgacactatcagacagaatcaaagttgcgaatagacagctgaaacaaatgcctcgacaggcttattgaggaataagtattgagattatagtgctgaaataatcgctgaattgtgatgtttacatttgtggaaacatacggtcgctggatccgtatactcgttgtatagtacatagccacagatatattaaatccgaactgcttggttctactgtctgatcgaacgacatttgttttggcgttggctacgaagaaaatttgccgctacc

SEQ ID NO: 14392 - DNA, 130 bp, Zea Mays
tcagaggacacttgccttcaccaaacagatgctcagggtcttcaaccatgtagaactcgaagagccagatcacttggtcgccaacgcttgatctttgatccctcgaagcttgaaaacggatcgtagtcta

SEQ ID NO: 14393 - DNA, 2198 bp, Zea Mays
aagtcgagaaggcgcaataacacgctgctccgtctccatctccatctccaattacctatcctctccgtcgaatcagaaaccctaacctcaccgtaccacggcctacgagccggaatgaccacatcagccgccgacgatggcagctctttggcgcctaccatcaccgagggagaaaccacagccgacgccggtgctggggcaggtgttgagtgcgtcgagggcaaagagatgaaggttggggccgcggctccagttgaggagccggataaggaggcggcgcgggaggaggatcctggtgatgatgatgactatgaggaggaggaggaggaggaggaggaggaggaggaggaggaggaggaggaggaggaggaggtggaggaggagacggaaactgcgaatgggaaagaggctgagttgatggagccattggcggcgctgaagcctggggaggaggtcaaacctgaaaagctagagggggagaaggaagagctggatgaggagcccgaggcatcggaagaggaccccgaggaggtggaagagttgaaggaggagggcgacggtattgcggaggaaggcttggtggatgggtcggaggcgaacgatgataaagatgctgatcaattgagcagtgggagtgatagtggtggaagcagaagtcgtggtatgcagaactctgaacttgctggaggtcttgaaatatttgttgatgacttgcctcaagattgtgtcaaggaagacattgctatggccttttctcaatcaggggaggtcaaatctgttaggataattaaaaattcatcaactggaaagaaccaagacattgcatttgtttgttacacaagtattgaagctgcaaagaaggttcttgctgaatttaaggagggaattgaggtaaaaggaaaaatggtcagggtatctgcttgtcaagataataataccctttacctggggaacatttgcaagggttggaccagagatcaggtgttgaacaccctaaaaagtattggaattcaagagtgtgagataagctttcccagttacaagggaggaagccgagggtttgcttttcttaagttcacctcacattactatgctagagcagcacttcgtcgcttaatgaaatccgatgctatttttggtactgatagaagcgctaaagtatccttttatcgaacccccacaaaatcatccaagagacttatacaggcaaaaatagtatacctggaacatgtccctctttcttgggatgaaaataaagttaaggaatactgtgaagaatatggggagatcctgaaagctgatgttttccagatatcaaagaatatggaaaatgaaacaatttcttttgttgaattctcatccaggaagggtgcgttagcttgtgtgacaggaataaacaaagcaaatattgttgatggaagcttcaagttgtgtgcatatcttgcttggccaaaaagtgcttcaaaggtcaatagtgctgcaccttcaaatgctgccaccgcaaccgagaaggacaaaacccacacagagaagattcttgtagacatcgatttgcaacataaattccagaaaggcgacaagagcaaacttacatctcagacaaaggaggcaattatgaagaagaaaaaatcaagtaaattaccaaatgacaatgatacaaaactaacctcacaaggtgctgccgaagtaccacaaacctccaaatcttctgaaggcaagaggaaagttggaaaaaacaaacatgcctctgtataccaaaaaccattgaagaaagcaataaataatcgtaacgttgatgagagccagctaactcatcggagtgctgcagtactgcaaacgtctaacacttccaaagggaaaaggaaagccagtgagaacagaagtttatatttaaacgaaaaggctctcaagaaagcacgtggcaatagtaatttgggtggaagttcaagatctaaatcatatgcctctgatctggaacctcatgctggattcatttcgcctgcgattcgagataatggcagtgatgcatataatcgacagagaactgcacggtatgatatccatcctatagatgtccatccttatgctagagttgttttagaaattatgtcagggaaagtgggtaaccaaccagtcaactgtaggccataaaatcacaagaaaaggatgatgtaagcgactctgaattcaactactta

SEQ ID NO: 14394 - DNA, 909 bp, Zea Mays
tcacggtccccttagtatatagtaccttaaattgccattcacctggatgcctctgatgctccatgtttgttcttttctttgagtacccgacaaaactagtggtgctggtaagctgggaacctatgctccggtgcacgaatgaaatatgtgagcgacacgccaaagccgcgaggtccgaacgccaaccggaagaggaacggccggaaacagaagctgttccccaagcactacgttacatccgaagatgatacggccggttcctagcatcagcagcacggtagcagtttgaccgttggctttggtgatgtcagcagtagggagggcacatcatgtcgcctctgccagctgctgtgatctgaagaggcgtttagctcatcatatgcctttagtcttttgagaggtctttagggttgaaaggtacttcgaaaaccgaaccagcgtctacaggcctaagagggatttccattgaaactcgtcgatgatactacagttttctttccccatctgtgccggttgtgttgtactaccactaccagtgacagtgagtgacttctaagctattcatttttttaactggagaagttgataccatgataattaaaaaaaattgggtgtgtattgaactattaccaagaaaatagtacttggattgtgatgttctgaacattatgttttgtaggcaatcgtgacttgaaagcggtcgaggtatatcttgttattttgtttccctccgatttttcaatatccgattgattttgttttgaagcaaatagagagcatgtccgtgagaatagtcatgaagcaaatagagaacatgtccgtgagaattgtcggttaatataatttttagtttttaatttgtacatgccactcttgagaaagatctctctcaagcttgtccatgtgcgt

SEQ ID NO: 14395 - DNA, 76 bp, Zea Mays
tcttcctcctcaaacctttgcagccctcaccatacaaaaccctagccgcccccccccatttctccccctcctccaa

SEQ ID NO: 14396 - DNA, 1914 bp, Zea Mays
gccgaggactgtcatttcgtctggacctagttctgaccgaacccaaccgttcccacttcccacaccgtctgcggtctgcctgaccgaaaccgaaccccccagcctacaccacccgctgtcctgatggcgacggaccccgcgccggtgccggcgatgcgctgctactcgctgccgccagtccgcctccccgcggaggacattctcttctgcgtcgacgttgacctcgaggcccgcgccgagatgaagtccgccgccgccgccgcagcgtcctcgggctccacctccaccgcttcgccgcagccgacgcagcccgcgggggccgggggtgccccggcggcggggccccggaccgtggtcaggcggatggacgcggtcaggcaggcgctgctgctgttcgtccacagcaagctcaccatgtgcccagagcaccgcttcgccttcgcctccctcggcgagacgttctccatggtgaagaagggcttcagcagtgatgctggtttcgcaatggaggcaatccattccttgtctgcttcagaaacaagatatgctatggctgatctgacccagctctttatgacagcttgccaggaagggaaaagagcagaatcgcaaggccggattctccgggtggtgctcatatactgccgttcctctacaaagccacagcatcagtggcccgtgaagccaaagaatttcaccctcgacataatctatctccacgacaagccaaatcctgacaactgcccacagaaggtatatgatgccttggtcgatgttcttgagcatgtcagccagtatgaggggtacattctcgagactggtcaagggcttgctcgcgtgctctttcgtcagatgtgcattcttgtatcccatcctttgcaacgttgcatgcaagatgaccttgatattcccaaacaagtcgctaagaaaatcgtggcagccgaacctgcacagaatgaagatgccgctccagtctccagccaacagtagggtcttctagttgaacggtatgcaaacatgaagttactcgcaagcggttggcattaccgttctactagatcagaatgcctgttctgtgtgatggagattccatcccagaatttgtgtactatgctttaactgtccaaggagtcatcctcttgcccccgtcccttgtttgcttgggtattcagcatgtagttgcacatgatacaaataactcaaatctttggcacttgaatttcatttgtttgcgaactttaagttgtgctgcaggtcgtatcatgttcagctcatctgagagaactctgctgaattttgtgttgtgctaggggaaccttctctgccgtgtaaccattaagccagagttatcttacatcatgaggcccctgtgattttcctagttgtttacatccagattgaggtcatgttagcaaagtaggaggatcattacaactccactttcagaactgaactgtagatggcattcattatagaagcgtcgaaattgacttggaattgttcagtgtctccatagtacataaaaagatcgtttgcaccgccagtgaagcaatggctatttacagagacatcatgctggccgctgcattttgcttgcttatcagcagcaggggaagcaggagaacaagccgccctttcctgcctccggtttgcttcttgtctccggctgcggctccgccttcgcttcaactactggcggtgctggcgcggccttgaccgcctccgtcgttgctgctgctgcttccggctggtggtctcgatgagactgcttcttggagtagttcctcttgtcctctatcaaactgcgccatcagattttgttcatcagttggtccggtcgagaagattcagctttctaaaacaacaagaacgtgtcgcatggaacgaggtggcggtatgcgtagtactttggga

SEQ ID NO: 14397 - DNA, 1297 bp, Zea Mays
agcagatgttcgatttgttattcatcacagccttagcaagtctatggagacatactaccaggagagtggtcgggccggacgggatggattaccttcagaatgtattttgtattatcggcctggtgatgttccacggcagagttcaatggtgttctatgaaaactgtggcctgcaaaatctttatgacatcgtgcggtattgtcagtctaagaggagttgtcgtcatggtgcattctttcgccattttggagaggtccctcaggactgcaacggaatgtgcgacaattgtgcttccactattgagcagaaggatattgatgtcacctaccatacaaaaattatagtttcacttcttcacgatatgcaactttaatgatcaaagagctacactactacagctggtggataagttcaagtcaaagtggaaaggtttaggtagtttcaatgaagctgttgatcttagaaaagaagaagttgagcagttgatagttaaccttatactcgacaatgttttgaaagaagaatttcagcacacagcatattcaaccaacgcttatgttaccttaggagcattgtggaagccagcactacaaggaaacagagtagtcaagcttgagattgctattgcttctaaagatagagatgttagatccaagggcgcaaaacgaggtcgcatgagtgatttggaagccaaactagatgaactgcgtagggatctgtcatccacgggtagcgatgccatatttccccatgcagttcttactgcgcaacaaatttcactactgagcagccagaagccaaccactccagctgagctagaaaaggttatagggaaggtgaagacaaggaagtacggcagcaagatcattgagctgatgaggtcacatgacaattcaggaagtggccgaggcaaggaggctggcgatgaacacagagctaagaagatcaaaacgaaggatgaggatgttgtttgtgttgagagtagcgaggaagaatagaatatgcccttcacatacttggctttttagtctatcatctcatggttaattattttgccaatcatttcctccgacgtcatctttctgtaatttagactttcacggattaatgcacagtcatatttcttacagagaaagcctcgagcatccttttgaccggttcatagtcttttgcttcggtagctttgtatcttgttgatgatcggattaatgtgcgaatacttgggattaatgtgcgaaaactttgtgccaagtgtttgaatgtactatacacatgctgaggaatatggtaatcggta

SEQ ID NO: 14398 - DNA, 1091 bp, Zea Mays
tcttcttttataagtttttggaccttgatatttgggcaaagcagaggcgctaaatgcaagctccagagctgctctaatgctcaaattggacaggagtggtacagcaaccagcttaactggtggtattggtgctgctggagtggctgtaccagctacttcagttattggggcagcaggagctgcttctcttctgtcaccaacagtttctgctgttggatcagttcctggggcacctgtgcttcctattaccgctcagaatgtgatcatgtccacacctacagaattcttgttgcttaaaaacatgtttgacccatcattggagacggatcctgattttgacttggatattagagatgatgtccaagatgaatgttccaagtttggtgcagtgaagcatatttttgttgacaaaaatactgcaggcttcgtgtatctgcagttcgatagtgtaactgcagcagggaaggcccaacaagcacttcatggaagatggttcgccggaaagatgattacagcgacatttatgtccgatcaggaatacagtactaagttcccaaacttgtgagcatatgcggggaagagttggtcagacccgcatagttcgttcggagagtttgctagtgctgtatcgttggatggtagactagacgaacaccttattgattgtatgacaggatagtttcagttgcagcgctggtcgtgcgtacaatgtttgatgtactttatttacggcatcacacacagtgaccatcccttattttgtccaccgaatgaaatgccctatgatctccaggcacgttggcatatggtttatttatgtacgatctgttggcactggtacgtatttgtatactaagcaaaagcgttacataatcacaatggtacctttattagtcccctgtcgtgggatatgcggccgcattttggccagctttccaatgtgttccattttatttttgttctcatgatgtttcgacatgttttcatcagtttttcctttcaccaaggtcactatttcattccgtttcattttcatttactccactgatactgtatctagttattttatttggtttatcaagaaattataa

SEQ ID NO: 14399 - DNA, 75 bp, Zea Mays
accgcgcaaagctggattgggaaagaccctccgtcgcgaatatatgcgggatatcggagcacggattcggaataa

SEQ ID NO: 14400 - DNA, 4555 bp, Zea Mays
aacatttcgtgagggattgcgtaactgatggcaaagatgaatgagattgtgaagcttgcagatgagttacttccttctctgcctgttgggaccatttctttaccagtgtattctggtgttcacatgaaaggttgttctgtaaagaaatccacttctagtaagcagggtgaacatggttcaacagcaaatgaactatcaggtcgggagaagttattgcgtgatcagcctgaacttctgcagcaatttggcatggacctgttacctaccatgacacaggtgtatggctctagtgtaagtggaccaatacggcacaggtgcttatctgtcattgggaaattaatgtactatagctcagctgagatgatccagtctctccttagcacaacaaacatttccagctttttggctggcattttagcttggaaagatccacaagtgttgatccctgctcttcagatagcagaagttttaatggaaaaacttccagagatttttttgaagatgtttgtgagggaaggcgttgttcatgctgttgagtcacttatatgcccagaattatctggtcaggtgactcctcatgtggattccattacatcttcacataataggcgcaaccgccgtagaaataatgctgtgaacactggaaataacttgcctgatggaccaaaaggttccaattctatgattgccaattcacccccaagcatggctgaagttccaaataatagtcttcgtgctttagttagtaatcatgcaaagtcatttaaggataaatatttcccttccgagcctggctcaagtgacattgcagttaccgatgaccttcttaaactgagggcactttgtgcaaaactgaatacaacagctgacactatcaaaacaaaagctaaaggaaaatcaaaggtagtgtctgacaatagttttgatgtcttgtgcaatattgaggagcaattggatgatataatagctgaaatgttgtctgagcttagcaagggtgatggtgtttcgacatttgagttcatcggaagtggagttgttacggctttgctaacctatctgtcatgtggaacatttgggagggaaaaggtgtctgaggcaaacataccaaatttgcgtcatcaggcagtcagacgatacaaaacatttatatcttttgcacttccaaatgataaagatgggaataaaactcctatggcattcctagtccataaactgcaaagtgccctatcttcgttggaacgtttcccagttgtgctcagccattctggaagggcatcgactttgggaggatcccgcctgacaacaggtttaggatctctgtcgcagcccatcaaattgcgtctttgtcgagcgcctggtgagaagtcacttaaggatttttcgtccaatgttgttcttattgactcattagctagtctggcagctgttgaagattttctttggcctagagtccagcgcactgaaccagtattgaagcctccaatgtcatctgcaaataattctggatctggagcagcaagctccacagcttgtgcgccttcaattccatcagaaactcaatctgtccgtcgcacatcgttaagatcaaagtcatcagctgccaccagtggtgcaattaagaaggattatcaggagggaagcataaacacctcaaagggaaaaggaaaagctgttcttaaattgagtttggatgaacctaaaggcccacatactaggaatgctgcgcgcagaaaagctacttcagagaaagatgttgaactgaagccatcacatggtcacatcacttcagaggatgaagatcttgatgcttctcctgttgagattgatgatgctttaattcttgatgatgatgacgaggatgtcccagatgatgaagatgatgatcatgaggcggttctccgaggttctcttccttcctgtgttcctgagagagtgcatgatgtgaaattaggagatgctgatgattctagtgttgcctcattggcaaatgataaccaggcacagccctcatctggttctagtacaaaaaatacttctagcaggggattggacactgctgaatttagaagtccagccacatttggttcacgaggtgcaatgtcgtttgctgcagctgcaatggctggattaactccagtaggtggtcgtggaattagaggtagccgagatcggaatggccttccattgggtgctcgtgcaactgagcattacaacaaattgatatttacagctgctgggaagcagctgaacaaacatttgactgtatatcaagctgttcaaagacaagtagttcatgccgaggatgatgaagatcgattcggtggatctgatttacctgatgatggtaaccacttctgggatgatataaggggtgatgtgttcactataacgtatcagaaggctgataacacagcggagaaggggtctgttggaggttcagcttcagtgccaaaatcttccaaatcagattcttgcagaactttgtctgaaaaacagtgtacttctcttcttgatagtattttgcaaggagagcttccctgtgatttagagaaatcaaaccaaacctacaatatcttatcactattacatgtgttggagggtttgaatcagttatcacctcgtctgagactgcagtcagcctgtgatgattttgctgaaggaaaagttgctacattaaatgggctatacgatgttggagctaaggtaccctcaaaggagtttatcaacagtaagatgaccccaaaacttgctcggcaaattcaggatgttcttgcactgtgtagtggcagtttaccatcttggtgttatcagctgacgaaagcttgtccttttctgtttcctttcgaaacacgaaggcaatacttctattccacagcttttgggttgtctcgtgcacttcatcgtcttcagcaacaaccgggcaatgataataacactgcttttgaaagagaagtcaggattggtagattgcaacgccagaaagtccgtgtttctcgtaaccgtatcttggattctgcagctaaagttatggagatgttctctaatcaaaaggctgtcctagaagttgaatactttggtgaagttggaactggtcttggtccaactttggagttttatactctcttaagccgtgagctgcaaagggttgacttaggattgtggagatctcattcttcagataattctgggatgcaaattgatgcgaatgctgatgatttaataagaagtaaaaatcatgaatcagaatcacttactgagagcaggaacatagtacaatcacctcttggattatttcctcagccttggccacctactgctgctgcatcagaaggtagcaaattcttcaaagttgtcgagtatttccgcttagttggtcgagtgatggcaaaagcattgcaagatggaaggcttctcgatttgcctttgtcgacagcattttacaaacttttgcttggacaagaacttgatttatatgatatattatcttttgataccgagttcggaaagacattgcaagaattgcaaattctcgttgcacgtaaacaatttttggactcctgctctagtgagagccaaaagatagatctatgtttccgtggtgctcccgttgaagatttatatttggacttcactcttccgggctatcctgaatatgttctcaaggaaggtggagagaatgcagaggtcaacatttgtaacttagaagagtatatttctttggttgtggatgctactgttaagaccggcataatgcggcaagtagaggcatttaaggcaggattcaatcaggtgtttgacatatcatcactgcaaatattttctcctcaagaacttgattatctgatttgtggtcgctgtgaactttgggagccggaaacactgcctgaacatataaaattcgaccatggttatacctctaagagtcctgcaattattaattttcttgagatcatggcagaatttactcctgagcagcaacatgctttctgccagtttgtgaccggtgctcctcggcttccacctgggggtttggctgctctaaatcctaagttgaccattgttaggaagcactcttctgtggcaaataataattcaaatgcaactggagcgacagagtctgcagatgatgatttgcctagtgtcatgacttgcgccaactatcttaaactaccaccatactccaccaaggctatcatgctaaagaaactgctttatgcgatcaacgaaggccaagggtcatttgatctttcgtgaatctcaacactaacataggtattggtccacctagaaatctgcgtcattgttacccagagttagtttctacctcattcatgtatgacataggttaaactcagctctccggagtcccaccgaaggtttggagcccgtacctttgggtgtggatgtctatactctcttttcttcttggttgtatattcttgcggatctttatagtgaataatagtaataaattgttttgcgcttcttactatgctaatcatcagtgccccacccgaagcgtcagtcgtacaaattttgctcgatggtttcgctg

SEQ ID NO: 14401 - DNA, 923 bp, Zea Mays
caagaagctttgtcaaattttgaagatggcagacgtttggtcttgtggagtgactctttacgtgatgctggttggtgcatacccttttgaggaccccgatgatcccaagaatttcagaaaaacgattgggagaatagtgtcaattcaataccagataccagagtatgtccacatatcccaggattgcagacagctccttgctaggatcttcgtcgcaaatcctgcaaagagaataacaattagggagattaggaatcacccctggttcctgaagaatttgcccagagagcttacagaagctgcgcaagcgaagtactacaagaaggacaacggtgcccccaccttctctgatcaaacagtcgaagagatcatgaagatcgtagaggaggcccgcacgccgccccagtcgcctgctccagtggctggttttggttgggcagaggaagaagagcaggaagatgggaagaaacctgaggatgacgagcaggatggggaggatgagcaatacgacggcgaggacgagtatgacaaacaggtgaagcaagtacatgccagcggggactttcgacacctaataaaatgaagctcctagcaagaccgagttctcaactgatgagatactgtctggttttgctgtagtttgtggtgctaagatgatgcaccctcggtgcttacgtagtatacttctgtctggattcacctttttttcgcatattgtgttaatactctgtaaattatcaaactggcttcctcaatgctcgtgtaattaaatgaaccgttgagtgattaagctagaaggcaagatatactttctatggagtaaattctgaaagtatcaatatgtgttgaactagactaatttaaattttattttcgcaaccattacatactattgaatagtctatttcattctgtgtacctag

SEQ ID NO: 14402 - DNA, 638 bp, Zea Mays
ggaattctagaagggaggacacaaactgttggggagtgcttgcagcgggaatatagaatggtctgccatgtcatgcgtggtgacttcagcagagacttctttgagggatgcagggctatattgctggataaagaccgaaacccaaagtggatgcctccaaggttggaacaagtgcatgacgaggctgttgaacagtatttctccagaattgatgatccacagtgggaagacttgaacctacctgctagacgctcccacggaagaaatatcgagtccaagctttgatcgaaggtcatgggagaaaggtggaactctggaacggagccttggtagtggtcagaataacacattattgcacatcatctcaagtttgaagagtctgcagactattgataaaataaacatgaatgtgccatataggtcaacttatatcacagaaagaaactctttgctgtttatacgtggagactggagtcatatgcatttttaaataattataagtaataaaatcgaaaaagaaatcgttggaaagacttttcttggagtcagaccctacttgatggtgataatcgatgagctttctacacgaccaattgttagatgaacgcgtagggctgtggagctggcccatgtacggc

SEQ ID NO: 14403 - DNA, 550 bp, Zea Mays
atcgccgcccacgtcctcgccctcgctcgccacggacgggtccaggcagcccgcgcggagcaagaagcactaaggggacggcgcccgcggccggatgtttggtaccttgcttgttgagcacttgttgaataaaaaaggcttgaaaccagtttgttatttcagtcctgcatccttggcttgttgatctccaaccttccaacgtcagatgatggcgtggaaagttcctgaaagaactaggacagggaaccgatcttatccaatggtttgttcagatgttggtgtcaaaagtgacgatagctgaatagctgatatgtggaaggaggcccttttgagcataaatagttttcggttgctggataggtttgacatctctcgacctctccgtgtaaagaacagtagctagacagatgtgccgtttcatatgttgtggcctggtgggcttttgtaattcatgagcagcattttattactgggcaattaagttaacgaggcatactataatgttatgagagagagctatcgaatatcgtctaagagaaataataaggat

SEQ ID NO: 14404 - DNA, 3274 bp, Zea Mays
gcaggaaccaccaaccaccttctcctgtcccgctccgtccggttccattcctctcctcctcctctcttctcttccctcgaacgaaggggaggaggaggaagcgcctcgccggcattgccctctagctcctgtcataccacaaacctcgattgtcatcttgtcaaaccacgaaccaccaccgtcttcttgccggaggttggatccatagcaagaaaagcagacgtggagtacagcaatggctagcgaggagcggatcctagtatcggtgcggctacggccggtgaatgcgcgagaggcggagcgcggcgacggctccgactgggagtgcgccggtccgaccacgctcatgttccacggcaacatcccagagcgtgcaatgttccccgcctcatacacctacgacagggtgttcaaccctgagtgtagcacacgccaggtgtacgaggaaggggccaagcaggtggccctatcggtgctcagcggcatcaactcaagcatatttgcgtacggccagacgagcagcgggaagacgtacacgatggtcggcatcacggagcgtagcatggcagacatctacgactacattgacaagcatcctgagagggagttcgtgctaaaattttcggcgatggagatatacaatgaagccgtgagggatctcttgagacctgacgcaacacaactaaggcttcttgatgatccagagaaaggaactgtagtagagaaactcaccgaggaaacccttagggacaaaggccatctcttggagctccttgcagtgtgtgaagctcaaagacagattggggaaactgccatgaacgaaacaagctccagatcgcatcagatactccgactgacgatcgagagttcagcaaagcaattcatgggacgaggcaaatcgagcacccttctagcttgtgtgaatttcgttgatttagcaggaagtgagcgcgcctctcaaacacaatcagctggtgtgaggctgaaggaaggtagccacattaacagaagccttcttacattgggaaaagtcattcgccaactcagcaagggaagaaatgggcatatcccttacagagattcaaagctcactcgcatattgcagtcatctttgggcggcaatgcgagaactgctattatctgcacgatgagcccagcacatagtcatatcgagcaatccaggaacacacttttgtttgcaaactgtgctaaaaatgtagttactgatgcaaaggtcaatgtagtgatgtcagacaaggtgttattgaaacatcttcaaagagaaattgcaaggctagagaatgagctaaagtttcctagaccaacctcttgcagcaactatgctgaggctttaagagaaaaagatgagctgatcaaacagctagaaggacagttgaaggaattaatggagcagaaagacaccgttcagtctcaacttgacaattttcgtagagttacaagtgatggaaatttcaatgatcatgcaacaaggcaatgggatcaatcgaacaggtcttcagagtcccttccatgtagtgcgtctgaagacacactttcttttgatacttacagtgatgtttatgaagaacaagatgatctaggctccaaaggatttgatgtgtcacatgtctataatgattatcatcatgatgtgtatcaccaaaaagtagacgaacacccaatgtctagtttgcatcaaccaagaaaccatatttctaatagaacacagatgtaccaaccaaatagggagacttcaccagaggtccctaaggagcattgcaaggaagtccagtgcatcaaaataaatgagtttaggaggagtcggtctgacgaagaaaaacatggtgaaaacataacatacacatcagagggtgccatcaaactgtacacatgtgattctgagccatcttctgatactgaaaaaacaaataatgacgaatctttagtcctgaagaggtgtgtgataagctccagagacagtgtactaactagaagcagaagttgcagagctagcttcatggtcattccgaatagttggtttgatgattcagcggatatgagaatgacaccaccaggtgacattttaaaatatcctcacagaaggctagagaaggttaggaggagcatgtactctgaaaatggtcattgtcaaaatgatcttacattagactgccctgtggtctctggaaaagttgcatctgacatggttatagacaaaaacacttgcaatgaagaagatggatatgccaacaataaattcagctgcatcacaaaggttaaagagaagcaagaagactattgtacatcccaactagagggcaatcaggacaacgttactgcagaaatcttggacatgaaacatgcaaaaaatattgacaaagatatatttgtggccaatattgactccccttcacggtggcctattaattttgagaaaaaacagaaagaaatcattgagttatggcatgaatgcaatgtctctatagtacacagaacatatttcttcctcctcttcaaaggagtcaaagcagacaatatttatttggaagtggagcacagaagattgtccttcattcacagttctttcattgccggatgtgagcctaatgttactgttacatcaagcttgagaaatcttcggcatgaaagagacatgctctacaagcaaatgctgaggagactccatcttctagaaagagagagcctttatagcaaatggggaattgatctgaattctaaacaacgaaggctgcaactatctcgccgcatctggacacagactgacatggaacatgtgagggaaagtgccgctcttgtcataaaattggtagaacatctggagaaggggcaagccatcaaggaaatgtttgggttaagcttcacattgaaccaacgagctatccaaagacctttcagctgggttagtgctaactcctaaagcaagcatcgagacaaattatgattatgatggttgatagttgcatgggacaacaaacaatgccatgatgaaatacatagtagaggagacctcttgtcagtcacccatacgagcattgattttcactgatgcccctgtatatttcgtatcacttattatgtagatgtacatgtgatggattttgcattgtggaactgttaaaatgaaccgacatgagatgccaaatctttgcaccaaacagtatgatgtattgctgatctgatttttttgcatcaaatgtatatctaatataccatattttttgcttaagtaaatcagatgctatgaatgccaact

SEQ ID NO: 14405 - DNA, 609 bp, Zea Mays
aagtgtttggttcgtgactaactttaggcagccacaaaaagtgtggcgaggttccctgagcttgccatactttttttcgccgcatctggggcgctcgttttcgatgccccagcaccgctacgcgccgcacttcgcccccttctctccctctcatgccgctggttgatctctcgtcatctcctcctccaagcacggatcttctcgtcgtctcctccaagcacggaccaggagcactgaaattctatctcaaccggttctgccgactgggtaacttgaattctaaaggttgatccaagcaggaggtgaatgtgtgatggttggttattttgcatttcttctaggttgatgcatgacggttcatggagaaggctggtggttgtgatagctatcacacactcttttggttaataattagatactctttttgttgagcaatgtgaacctttaatggtgtttatgggtcttgtggagttgtgatggggctattatgaagatgctatggcctgttatggatgattggacatgttatgggctctatatattaatctgttattttggtttcctcatattcatcatgtcatggggctattatgaaggttcttgcagctg

SEQ ID NO: 14406 - DNA, 2096 bp, Zea Mays
ctcgatttctctcttttccacaccctactcatgtcagcctcgtaggcatctcttgactactggatggagttcatttgtcaataaaaagaaactggtttctggggatgcggtcttatttctccgaggtgatgatggtgaactaaggctgggcgtacggagggccattcagcttaaaaatgaggccctttttgacgatttcagttgcgacagtacaaaacggcatacattgttggctgtagctgattccttgaagcacaaaagtgtttttcacatttcttacaatccaagagctactgcttcagaatatattataccacaccataagttcctgaagagcctaaatcttccattctgtattggagcaaggatcaacttacagtgccataatgaagatgttagtgaaaggcgatctggaatggttgttcatgtcagtgaaatagatcccatgaaatggccaggctcgaagtggagaagcctgctggtaagatgggaggatggtgttgaatgtaacggccaagatagagtatctccatgggagattgagatagctggtggctctgtctctgttgctcattctgtgtccgcatctagctctaaaagaaccaagttgtgtcctcagggaaatttggacgttccaacaatgtggaatgggaatggttgtactgactccgtggaaactggaaagtttcccagggtcttgcaaggtcaagatttgatgagttttaggactcgtcatgttccgtctgctcctcaaactgttgaggctgcaaaacttcaatcttctggtgctagtaggttcctcagtaatgcacgtggctgcgcattgggtggtccaacaagcagactcgcagtgcataactctgattttacctaccaatctgtaggcttcaatgaatctattggattctcagaggtcttgcaaggtcaagaaatttctcgggcagttcctatgttccaaggaatgatgtctgaggcttgttcactaaaaggaggatatgggctgcatagttatatgcgtaccccagttgctgttactggattgtcagccacaactcaagagtgttctctcacactatctactccgccaggagcacaagttccttctgtctaccctgataatatttttaaccgaactgtggttcgacagcttggactggcaagcaagtttgatggtggagctacaaatgcccagcagtctgtcccatttgataggccgagggaaatttggagcaagccacagcatgaaatatctgatcaaacgaaaatggatcactttgagactagaagagcttcagcacctggagatgatgctgctaagcatgggtctggtggagaggtggttcgcaaaactagctgcagactttttggtttctcgttgactgagaagatcttgccagcagatgatgatggcatcaaggaagtgacctatgagcctgagtgccagaatccacggatgctggacctgttcgggtacaactgctcagccccaagtgctgctcttccagctctgtgtgctgccccctttggaatgtgatgctacttcaataacgctgctgagtatttccatgtactcttagaagttttactttcctaatacccaagtgtatgtcataagctgccttttgacatcattccccctgttggtctgcctcaagcgaagcagtcatttgcacaagtaaacaaaggatcgttgatgatccacttctcgccatgcctcaccctatcgctaagatattgtaattagtcttaggatacgaagaggcagtacattgtaactgactaacttctgtggctgatccttcagaaaagttgtgcgatgaagcaaacaattttctttagaagttcttcgctggcagattttagattcatgtggggaggtttgtcagctcagctttaatgtactggttatgtatctttaaatcagctgctgtacgactttttttttagctccaagccctggttgcagtcgcctaggccgtgtgattgtatcagtatgtaagacatgctatattttaatattcttatcgatatttattctgatgcattgtgtgtgaatattctgttcttcatcgcatgcaatgcaagtcatgtcttct

SEQ ID NO: 14407 - DNA, 2571 bp, Zea Mays
ggcagagacgctcgtggtttcatttcttccccccttctcgtcacgtgcaaaggggggaaaacttctttctctctcttttttttccctcccccgcccgaatctgatgcttaaaccctcgccgggaggaggattccaatcccgacgcaccagcccgcgcccgccacctacagccgcgcccggatctccgccatggccgccgcgccgcaccaggcccagggccccgcagatagtgtgattccgctgcagtctgaacctgcacttgataataatccctccaagagtgcaaacgctagggaccagattctttctggtacggagaatgtgactacaggcaatgcacgcggcggcagctccttgaaatcgcaaaaaggcccgccagagaaggctagctctgtcggaaaacctggagaacaaccttttccctaccatcaaaatgtgtatgcaccacagccacaaccactctatcctggaggctacatgaacccttcaggacaatgggaggaatatccccattatgtgagtatggaggggctccattccgtatctcccggaatctacaatgacaaccagtccctcatgctatctcctggatatgcaaacaatccccaaatgatgtatggagcatattctcctgtttccaccgttggggatggccaacaatacctccctatgcattttcccttctcaagtccttactatcaaccaccagcttctcctagcatgggatattcaagctctgcgactggaatatcccaaggagaccctatgctgcagcaagagtacttccttcctgatggtcttctatattcacccacacaagggtatcatcaaccattcagctcattcgacagagcaccaacacaactaaataatgctcctgggttgtttggtcaagggaatctaccactggcttctggaatgcaccatggatcgatgtatggtcctggatcctacaagggacgccagcaaggtagcaaatttggtggcagtactacaagttggagttctgctggccgcagatttggtactatcgacttgagtggcaatcaacaaaggggcagcatgccatttggtagtcacaatggctctctggagttcatgaatgagcaaaaccgtggaccacgcgctacaaaaccgaagatacaaggcacagagaacacctcaggagatgagagaagcgagaaaattgttcctctgattgatagcgaactgtacaatcgctctgattttataactgagtacaaggatgccaaattctttgtaataaagtcctacaccgaggaccatgtacataggagcattaagtataaagtttgggccagcacagccagcgggaacaggaagctggattctgcttaccatgcagccaaagagaaagaagagcattgccctattttcttgtttttctcagttaatgggagtggccaattctgtggcgtggctgagatgattggacctgtcgatttcgacagaagtgttgattactggcagcaggataagtggagtggccagttccctgtgaagtggcacataattaaagatgtaccgaacaaccttctgcggcacatcattcttgagaacaatgacagtaaacctgtcacaaatagcagggacacacaggaggtgaagctggaacagggcctccagatgctaacaatcttcaagaaccatgaggctgagacaacgatcgtggaagatttcgacttctatgagcagcgggagaaagccttgcaggagaacagacgtcaacagcagcctcccaccacctatcctcagaagctggtggataccaacgctcaaggtcctgtggccgatatatcagatgcatttgccaaggccgtccagttgaaggatactgcgaacagcgggacgaccccgaaagctgagggtgcctcagctgaaaatggatccgctgccacagccaaggttgaagggagtgcaaacctgaacacaggccctgtggagtagagtccgtttcccttctttctgctaatttggagcagcagatgaattgcatgctgcaatgtgaatgccggaaaagtggaaagtgcaggttgatcgtgttaaatatggtcgtggctgcgtcagttgtacaacatcataggctttgttttatctccatttatgttatataagttcaatatcatagttccaaaattattgttcccagttctcttctttcctgctttattttgcttccgacttccgtggtcctcgtgtcgcaccatgaatgatcgttccattttagcgggtttataggcataagaagctgcagaattatgctgcgatgaagttgcattttctgcagttgaatgtgatactgtcgagtcttgcactgtctgtaatttcagagatcctctagtgtatcttcgtcttgttactctcagcatgtacaatctgcagtagttctcttggtcacattgctccaaatccctaacacttgcacattacaaatgaaatgtagaactctctaataccttcaggtaaagccgttgttgcagcagcaaacctaaaatcacctgcaactgttacacatgttaaagaaacgttcaatagtaatcatgacctgct

SEQ ID NO: 14408 - DNA, 2020 bp, Zea Mays
tccgcggtcttgttacgacagcctatcgcttgggcccacgcccagcctggacccaaaagtcgccaaccaaaaaaaatccaggaaactggcactgtagccgtccgatcaacaaacgcacggtggagagatgggcaagccacctgggctgggccccaaccgccacagcacaaggccaggtccacagcacctccagctcgaacgaagccccacctcggcaagacggcaacagagcataaagcagcatttcaaatccgtcctcacgtagacgagacccgtgcgccgctcccgcccccgtcttcttccttcccccgcccgcgcccgaccccagcaggcaggcaggcaggcgtcagccatgagggagatcctccacatccagggcgggcagtgcgggaaccagatcggggccaagttctgggaggtgatctgcgacgagcacgggatcgacgccacgggccgctacgcgggggactcggacctccagctcgagcgcgtcaacgtctactacaatgaggccagcggcggccgcttcgtcccgcgcgccgtcctcatggacctcgagcccgggaccatggactccctgcgctccggacccttcggccagatcttccgccccgacaacttcgtcttcggccagtccggcgccggaaacaactgggccaaggggcactacaccgagggcgccgagctcatcgactccgtcctcgacgtcgtccgcaaggaggcagagaactgcgactgcctccagggttttcaagtttgccattccttgggaggaggcactggatctggcatgggcacccttctcatttccaagatcagggaggagtacccagacagaatgatgttgaccttctctgtattcccatcaccaaaggtctcagacactgttgtggagccttacaatgctacactttctgttcaccaactcgttgagaacgctgatcaatgtatggtgcttgacaacgaagctctgtatgacatatgctttcgcacgctaaagctcgccacccctacctttggcgacctgaaccatcttatctctgccaccatgagtggcgtgacatgctgcctgaggttccctggtcagctcaactctgacctgcgcaagcttgccgtgaacctgatcccgttccctcgcctccacttcttcatggtcgggttcgccccgctgacctcccgcgggtcgcagcagtaccgcgccctcacggtccccgagctgacccagcagatgtgggacgccaagaacatgatgtgcgctgctgacccccggcacgggcggtatctgacggcctcggccatgttccgcgggaagatgagcaccaaggaggtggacgagcagatgttgaacgtccagaacaagaactcgtcctacttcgtggagtggatccccaacaacgtcaagtcgagcgtgtgcgacatcccgcccaagggcctgaggatgtcgggcaccttcgtggggaactccacctccatccaagagatgtttcgcagggtgagcgagcagttcacggccatgttcaggcgcaaggccttcctgcactggtataccggcgaggggatggacgagatggagttcaccgaggccgagagcaacatgaacgacctggtcgcagagtaccagcagtaccaggacgccaccgctgacgaggagtacgaggacgaagacgaagaggaggccgtgtccgaatagcgatgagctcccggtgccctttccttcccagggcagggcagggccgccgcatccgacaagattgtgcctctttccttttacttttttatgtgcttcttgtaggttgcatgatgaatcggtaattggttgtgcttcccgctgttgccgttggggttgcgcgcctgtgcttcggctgcggccactgtaatgtatgtatgtaatgtatgtagcggctttgcactgatagtgctctcgtcgcctgtaatttctaacgagtaatcatagtgagtggttttttcttgtttttttcgatgaatagaccaacaggctttgagggtcaatgatgtacat

SEQ ID NO: 14409 - DNA, 563 bp, Zea Mays
tttttacgctaaaaaaaaggaaacagaagtccacgcatatccggaagaccggaagcttcttcctcctcgcctctgacatggccggcggcaacctattcggtcgagcgctgagctacgttgtcaacgagttcttcgtccagggcctcgccaacaaccgtgcagtccagaggtttgctgtgaagaccaacaagactcttgagagcctatcgtctaaagccaaggaaatgagggaggagttatcggaacaattcaaggatgctcgtggccagaaagatcacttcaagcagtgaagccgatccccaaagttgattcaacgacacgaatctagctatgagttttttctagttctcgtccgggtcctatttatgaatggcatttgaagggatttcttggtgtcgttcaatggacggatccgttgtataaagtttatctgcacttagattagtagatatattggtagacacatcactttctgctgcccctttttcataaatacatatatctcgatctctactgtattagcaaaactacctcagtttctaccgttttcgtgctctacacaa

SEQ ID NO: 14410 - DNA, 555 bp, Zea Mays
ctgattttagcgatttcagctctggaatgcataatctattcagttcctaataattgcctcccatggtaggcacgctgctatcactcccgtcttcactgaactgaaaactcttatggaagtaggaattgattgactacttcagtaacgtgtttgtgctgtgctattgactgttgtcatgggaataagatacgtcaaaacacaaaagataatgcctgctggaattgtcgcttctatcagtgcactcgtactgatattttacgtgtacaagatatctaccggtggcaacaaggtttatatgtcggtgagtgccgagtgaatctgctgggcgtgtggtgttccgtgtacatgtttgtacggcagctaaatgtgaagacaacaaaatcatctgtgtatcaattgtattttagtgaggcaaacactgtaccaaacaatgatggcatgagttagttaagatgtggatgtggacacatgttcaatttaagctttttgatagtacttgttaaattgctgcaacttcctccatcaatgatgacacacgacacttcaaaattaaaa

SEQ ID NO: 14411 - DNA, 874 bp, Zea Mays
tctgcctgttgaggcaatcaaattattgtccacaagaggaaaattgctattgcaaaagcacaaggcaatatgtcgctagcaattggttatctcaataagtatctggaattatttatggcagatcatgatgcctggagagaacttgctgaaacatatgtttccttacaaatgtacaagcaagctgccttttgttatgaggagctaatattatcccaaccaactattccactctatcatatagcctatgctgaggttctgtacactatgggtggcttggaaaatcttcagacagctaagaagtactatgcatcaacaatccagttgactggaggcaagaatacaagagccctctttggtgtatgtctgttgaccaaaggaaggaataaagaggaagagggctcggagctgcagagattggctgcagaagtactgctgaataattacaagcagcaggctccatcaaaggcgccccttatcagcagcttgttgaagaacatgaaactcagctgataccaactagctctacacattcagaatgtcctgattcgatagatagttaagttaaattgatgtggcataatgcttgtttttttttgtggcactggcaccaacattgtgcaatggttaaaaagtaggtgctcccaaggccatgggttgtgtacactacacctgtttgcttgccgagaaatatgcatgacttctttttcattggatgttctattatagatcacaataaaccccggccattgtacttcagcacaaacaaaactttgaatcagtcgctggtgaagttgtacctgttgattttgattggtatctgactgttgtagccttgtagatgaatccctgactcggagcatttttttctttatcg

SEQ ID NO: 14412 - DNA, 124 bp, Zea Mays
acgaaggtactcctgatgccgaagctgaacaggttgttgctgaagaagaaaatgttgatgaagttgaggaagattacagtattctgatccccacaaaacccagccatctagattttgagaaatt

SEQ ID NO: 14413 - DNA, 2485 bp, Zea Mays
attcttaatatagattcctgcagataaataaatcaagggtgtgctgttagatgacctcctagttgctgaagatcttgctgctgctgaaacaaccagtgcagctaatcatgcagcagcagcagctgctgcatcctcaaatgtacaaagagaaccgggtagatatgcctacaacgatgaacaatcaggacaaacagttacagtttcaagtcctgatggagctgttgttcttgggactccagttgctcctccagtcaatggggacatgtatactgatattagtcctgagaatgccattatccagggacagagaagattgagcaaaggtgttgattacttggttgaagcatcagctgcagaggctgaggcaatcagtgctactttagctgctgtaaaggctaggcaagttaacggtgagatggagcattcacctgacagggaacaatctccagatgctgcaccaagtgccaagcaaaattcaagccttataaaaccagatcctgctcttatgaacaattcaacaccaccacctggggttcggttgcaccatagagcagttgtggtagcagcagaaactggaggtgccttaggtggcatggttagacagctctcgattgaccagtttgagaatgaaggtagaagggtcatttatggcacccctgagaatgcaactgcggcaaggaaattgctggatcgacaaatgtctattaatagcgtgcccaaaaaggtaattgcttctctgctgaaacctcgtggttggaagccccctgtgcgaaggcagttctttcttgactgcaatgagattgcagatctatgtgataatgctgaaagaatattttcaagtgaacctagtgtcttacagcttaaggctcccattaagatatttggtgatctgcacggtcaatttggtgacctcatgcgcttgtttgatgaatacggtgctccttcaactgctggagacattgcttacatcgattatcttttcttgggagattatgtcgatcgtggtcagcatagtctggagacaatcagtcttctccttgcactgaaggttgaatatcctcacaatgtacacttaatccgagggaatcatgaagcagcggatatcaatgctctatttgggttccgaatcgagtgcatagaaagaatgggtgagcgggatggaatctggacctggcaccgtgtgaacaggttatttaattggcttcctttggctgcactaatagaaaagaagataatctgtatgcacggtggtattggtcggtccatcaaccatatagagcaaatagaaaatcttcatagaccaattaccatggaagcaggctcagttgttctgatggatcttctatggtctgatccgactgagaacgatagtgtagagggtctcaggccaaatgcacggggccctggtcttgttaccttcgggcccgacagagttatggagttctgcaacaacaatgacctgcagttgattgtgcgagcacacgagtgcgtgatggatggcttcgagcgtttcgctcaaggtcacctgatcactcttttctcagcgacaaattactgcggaacggcaaacaacgcaggagcgatcttagttctcggaagggatctggtcgttgttccaaagctcatccatcctttgccgcctgccattacgtcacctgagacctcaccagagcaccacattgaggacacatggatgcaggagttgaatgccaatagaccgccaacaccaaccaggggccgccctcaagcgcccaataacgaccgaggctctgttgcttggatatagcggcctggccatattatgaaacagtcagatttctcgcctcccaccagtggcttgaggcttatattatccatccatcttgggcacatgcaggcggtctgtgctgaaagcacatgcttagcccaaaacaacatcgaaagggaactgttcagggagcgagactaagcggtgctctgaagacagaaggccagagaagactcaccagtcaccgtcgacagtgctctccaaatccttcccctccaaatgacatgagaagtagaagaacagaaccaagtgttggcaaaccacagggtcttgcctgaggtcacgcctgtacatactcagatgccagcagataggcggggttgtgtactgtgttctttttgtcgagcgtccaaagtggtagcagcagtccattgtgctaggtattcatttgctgtagggtttttgtttcttgtccctcatgttgcagagtatggaagtgataaaaatgggtcgttctgtcaggtcgtgtataatagcgttgtcgcttgtttatgggtagtagcagcgagtcagctgtcagcacgccttacacctccctcgtgttgtaattcccgtcacctgtgctgagagtgtgcacaatatatcgtcgtctgttgtccaaagttttgggtcatggacgggtttggtgatttgagttgatttattagagaagcaatgtgttgttcgattttgagcttt

SEQ ID NO: 14414 - DNA, 583 bp, Zea Mays
aacaaattcaagggatagaaatgccggagaggagcggttctcggtacaggtggacgaggaggagagggtgtggtacgaggtgctttctttctcgaagccggcgcacgtcctggcgacgctgtgctacccgtatgtgcagctgaggcagaagcatttcgcgcagcagtcgggacaggcgctcgtcaggcatgtgtccacctgctcttccaagcagaagcagtagtagagctttgtggagatgcactgcacagagaatgctgtatgtattccccctttgaattctattccgacatggcctggtttggcggcgctggggcctgggtgggatgatatatgttcgggcattccgagtggagtttgcccatcccatattttaatttcttcatgatggtggtggatctgttgcagctgaatgaattaagacaggaagatatataaaattcatgcgcacacagaatgaacacgagatgagaatcgagaaggtgcagtgaatgatttatccattatttatgaagtgattaatttagtaattaatttaatcttcaaagtgcgtagttatctaacaaattattagaaaacatgg

SEQ ID NO: 14415 - DNA, 2852 bp, Zea Mays
gtttcgctcgcccccacgcgcgcgcacccgccggccgaactgccattccggactcgtgtccctccttccttgcgtgcttccttccccttccttccgttccgtcctccccgcctccgcccccgcctccgccgcgcggtatttttataccgctctcccccgtctcctcctcgcctactcatccactcgccacgccacgccacgccacgcctccaactccaagcagatagatagactagatagctgttggcgtgcgacgcgtagcgagagcgtgactaaccgctgcctaagcaagcatataagcatttgattcgttcctaggacaggggagggttaagtttgggagcggatcccagtcatctagcatcggttgcagtcgaccgtctccaagcagagcttgcgaaagatggcagagatcctgctgaaccatcatctttcaaagttccaaagaaagcccctgctgcagccggaagatctgccttctcccagtccttgactaaaaagaaagataagggtgcgctggatcaattttgtttggatttgaccacacaagctagtggaggtttcattgatcctattattggccgtgaagaagagattgaaagagtagttcagatagtatgccggcggacgaagaacaaccctattcttttgggtgaggcgggtgttggcaaaactgcaattgccgagggtctggctcttcgaattgcaaatggagatgtccccatttaccttgtggcaaagcgcatattgtcgctagatgttggtctccttattgctggtgcaaaggagaggggtgaactggagtctagggttactaatataatccgcgaggtccgggaagcaggcgatgttattctttttattgatgaggtccacaaccttattggatctggaactgttggaaagagtaagggttctggtcttgacattggcaacttgctgaagcccgcgcttgctagaggtgaattgcagtgcattgctgctacaactctagatgaacaccggatgcattttgagaaggataaggctttggcccgccgcttccagccagtactagtagatgagcctagtcaggaagatgctgtgaagatattactgggtcttcgtgaaaaatatgaaacttaccataaatgcaaattcacattggaagccatcaatgcagcagtttatttgtcagcaagatacattcctgacagacagcttcctgataaggctattgatctgattgatgaggctggaagtagagctcggatggaatcatttaataggaagaaggaagggcagtcttcgattctcttgaagtcaccagatgaatactggcaagagataagagctgctcaggccatgcatgaagtggtgttatctaacaaggaaaaatattctccaaatgagaatgctgaagagagtggtagtgctaacgttgaagcactacacagagacaatattgagtcaacatctacttcatcactctcagctgatgaaccagttgtagttgggacagaggaaattgcaagggttgcctcattatggtctgggataccagtacagcagttgactgccgacgataaaaaacttctagtaggactggacgacgaactcagaaaacgtgtcattggccaagatgatgctgttgtggccatatctcgtgcagtgaagagatcacgtgttggccttaacgatcctgatagacctattgctacgctgcttttctgtggtccaacaggagttggtaaaacagagctcaccaaagctctagcagctagttattttggatcggaatctgctatgcttaggttagacatgagcgagtatatggagaggcacactgtgagcaagctcataggctctcctccagggtacattgggtatggtgaaactggtactttgacagaagcagtcaggagaaaaccatttactgtggtattgttggatgagatagagaaagctcaccctgatattttcaacatccttctccaaatatttgaggatggacatttgacagactcacagggtcgcagggtttccttcaaaaatacgttgattgtcatgacttcgaatgttggttcaacatcaatttcaaaaggaagacagagcataggtttcttgaaggaagataccgagtcaggctcatacttcgcaatgaaatccttagtgatggaagagctcaaggcatttttccgtccagagttgctcaatagaatcgacgagatggttgtgttccgtcctctggagaagactcagatgctggccattcttgatatcatcctaaaggaagtcaagggccgacttttggccctcgggataggtttggaggtgtctgatgcaatgaaggacctgatatgccaagagggctacgacaaaagctatggcgctcggcctctgaggagagctgtcacccacattatcgaggatgtcatcagcgaagcgattctttttggcgagttcaagcccggtgacacgatactgatggacatcgatgcagaggggaagccatgcatgggccatctggaccaacagatcgtccaggtctctgacccaacacgggcaatctgaagctgtgttggaccttttccagtgtagtagattagggatctaaatcttttattctttcaagatagagattattaattctttgttacgtagatatatagagtagtatttcattatgtatatatatcaaccagatgatccagataggggaatctggtcagtcattggagttatttgaaattttcatccagctgtatgtatattgttgaattgtttctgattcaactggccatatatatcatcattaaactatcttcatcggcttacccatttatctcttattttaaacttcaatatagtct

SEQ ID NO: 14416 - DNA, 2625 bp, Zea Mays
agggtgtgaaacaaaatgacagcgacttgagaacacactaaactatggccttgagagagtctgggctgttggatacatgaagggatcaagaaggatggtgattggttatgacgagggggccattatgataaaaatgggccgtgaagtacctatagcaagtatggataccggtgggaaaatcatttgggcgaaacataatgaaatacaaactgtaaatattaagacagtcggtgcaggctttgaggtcacagacggagagagattaccgttggctgtaaaagagttaggaagctgtgatttgtacccacagagcttgaagcataatcctaatggacggttcgttgttgtatgtggagatggtgagtacataatttatactgccctggcctggaggaataggtcatttggatctgcactggaatttgtttggtcatcagaaggagaatatgcaattagggaaagtacatcaagaataaagattttcagtaaatcatttcaggagaagaaaactatccgcccttcattttcagcagagcgtatttttggtggggtattgttggcaatgtgttctagtgatttcatctgcttttatgactgggttgattgtagactaatacgccgaatcgatgtgaatgttaagaacgtttactgggctgatagtggtgacctagttgcaatagcaagtgatacatcattctacatcctcaagtacaatagagatgttgttgcttcttatctagaaggtggaaagcctgtggatgaaggtgtcgaagatgcttttgagctgcttcacgaggtcaatgagcgagtgagaactggaatttgggttggagactgctttatctataacaactcgttgtggcgcctaaattattgtgttggtggtgaggtcactacaatgtatcatttggatcgccctatgtacctattgggatatcttgcgaaccaaagtcgagtttatcttattgacaaggagtttaatatcattgggtacacattacttctgagtttgattgagtacaagacccttgtgatgcgtggggatttggaacatgcaaatgaaattttatcatccataccaaaggcacaatacaatagtgttgctcattttttggaatctagaggtatgttggaagaggctcttgagatagccacggatgctgactacaagtttgacctagctgtgcagcttggaaaattagatgttgcaaaggctatcgtcatagaagcacagagtgaatctaaatggaagcagttgggtgaactcgccatgtccacaggcaagctagagatggcggaggaatgccttcttcaagcgaaggatttaagtggcttgttgctattgtactcatctcttggagatgctgaaggaattgaaaagcttgcttctttggcaaaagaacatggaaaaaacaatgttgctttcctctgccttttcatgcttggtaaagtggaagattgcatacagttgcttgtagacagtagccgtatacctgaagctgcactaatggcgcgatcgtatcttcctagcaaagtaccagaaatagtagcaatttggagaaacgacctcagtaaaattaatccaaaagctgcagagtctctggcagatccttctgaatatccaaatttatttgaagactggcaggttgctctaactgtagaaaaaagcgttgcttctcagagggatcattatcctcctgctgaccaatacttgaatcatgctgagaagtcaggcatgattcttgtggaagctttcaaaaggatgcaggtcattgagcatgaggaacctgaagatgcagctgaggaaaatggagaacctgatcaacaggcatcggaagagaaggaaatgcataacacagatgatgctgatgaacatgaagagacagtttcagtaaatgggaacgagggtgaggaacagcaggtgctaactgaacatgaataggggccgagggaagcacaacgcattggctgcaaatgttattttttcccgagggtaacaaatgtggcccccagttttaccctgaagcaccggaaactggtgatgcttgtggccattggaggccacctgatgcttgtccgatctttctgagtgaaccccaagcttgacatattgatgcttgctacacttttggtgtcgatatgcttcttctgccaacaacataggcaattctttcttctcggatcatctgcggacccgatttctatgcgctcgaaccaatgaactgggtggggactgtggagccattttgtgatgaatagttcgaataatcagtatagaggtacgttgtaagatatgccagattaccatagccatcgaattctcctaggagatgacagtttttgttagccattcattgtaatgatgttacttgataaggaaggttacgtgtagtatatgattgcggttgcgggccgagggttttgcccatgttatacttatatatagtggtatcaatccatcggatcggaggctctcgtctactgatgcctaatcaatgccgatgactgcgagaattcaatgcctagatatgcagtgtaacagtgtctcgctgcacacctattcatcgtttcaaaccatggtccatggaatttattttgatgctggaatgctgcggcatgtacaac

SEQ ID NO: 14417 - DNA, 4204 bp, Zea Mays
ccgccgccgtttcttgattctcccatctacatcttcctcgcagcgccggcgcggcggcgctccatcttccgctccctcccttacttgcgcttggcacgcaggcgacggcggcggcgcccagtctcgtactctcagcggcggcgtcagtggcttcccctcccgcctctcgccagtcgcctcgcgccctcgcctccggtcctgcgcacgccggcctgttaccctgcgacattgttgaattctctgaagtgtgtgctcttgtaaaggcttgctaaaatggcaaatttaaacataaccaacatcttggagaagatgacagggaaagataaagactacagatatatggcaacatcagatctgcttagtgaattgaataaagaaagcttcaaagctgatcaagaccttgagccaaagttaacgattactgttcttcaacaacttgaggatgcttcgggagatgtttctggtttagctgttaaatgcttggccccactcgtcaagaaggttggtgaggacagggttgtggagatgaccaataaactttgtgataagttgataaatggaaaggaccagcatcgggataccgctagtatagccctcaagacaatcattgctgaagttactacaccgtcacttgctgaaaagatcttgctttctcttgccccgcaactcatcaagggtgtcaatactgcaaaaagtgctgaaattaaatgcgaatgtcttgatatattggcggatgtgcttcatagatttggcaacttgatcacaaaagatcatgagtacatgctcaatgcacttttatcccaattgggttctaacccagcaagcgtcagaaagaaatctatttcttgcattgcatcacttgctccaagtttatcagatgatttgttagcaaaggcaactttgcaagttgtccagttgctgaaaaatagaggtgcaaaatctgaaattacccgaacaaatatccagatgattggttctctaagtcgttctgttgggtaccgttttgggccacaccttgctgaaactgttcctttgcttataagctattgtacaagtgcatctgaaaatgatgaagagctccgtgaatacagcttgcaggctcttgagagctttatgctcaggtgcccaagggatatatccccatattgtgagggcatcttgaatcttgctttggaatatgtgagctatgatcctaatttcactgatagcatggatgaggatactgatgaggaagcgaaggaagaggatgatgacgatgagagtgcaaatgagtacacagatgatgaggatgcaagctggaaagtccgtagggcatcagcaaagtgcctatctgcaattatagtgtctcgtcctgaaatgttgtcgaagatgtttctagaggcttgtccaaagttaattgaacgatttcgggaaagagaggagaatgtaaagatggatatatttaacaccttcattgagctgttacgccaaactggtaatgttacgaaaggacaaggcgacatcgatgagtccagccctcgctggttgctgaagcaagaggtcccaaaagttgtcaagtctatcaacaggcagttacgtgaaaaatcaatcaagacaaaggttggggcattttcagtactgaaggagcttgtggttgtattaccagactgtcttgctgatcatttcgggtcacttgttcctgggattgagaaggctttgaatgacaagtcttctacctccaacctgaagattgaagcccttgtattaacaaggcttgttatggcttcacattcaccatctgtgtttcatccatacatcaaggctctttctgcacctatactgtctgctatcagagatagatattataaagtcactgctgaggctttgcgggtgtgtggagagctagtccgtgtccttcgtccaaatctcgagacaacctcagttgattttaagccatacattggtccaatctataatgcaatactgggacgtttggccaatcaagatcaggatcaggaggtaaaagaatgcgccatatcttgcatgagtttggtggtctctacttttggtgatggtcttgaaagagaattaccagcatgccttcccatactcgttgacaggatgggtaatgaaattacaagacttacagctgtcaagttattgcgaattcacctctacgtattgatctctcgtgtgtcctggatcatgttgtttctgagctcacagctttccttcgcaaggccaacagagctcttaggcaggcgacgttgggaactctaaattctttggttgtcacatatggtggtcagattggctcttcttcgtatgagacaataatcgcggaactttcaaccctcataagtgacatggatttgcatatgaccgctcttgcattggaactttgttgcacaataatggttgacagaaaatctattcaaaacgttggtttagctgttagagataaagttttgcctcaggcccttgttttgatcaggagtgccctgttgcaagggcaggcactgcaggctcttcagaggttttttgcatcacttgttcaatctgcaaatactagctttgatgctttgttggagtcccttatttctgctgctaagccatcacattcaggtagtcttgctaagcaagcactgtcttctattgctaagtgtgttgctgttctatgcttagcagctggtgaccagaagtgtgcatctacaattgaaatgcttaaaggcattttgaaagacgacagcactactaactctgctaaacaacacatggccttattatgtctgggagaaattgggaggaggaaggacctcagcaatcatgttcaaattgagaacatcgtcattgaatcgtttcaatcaccttttgaggagattaagtccgcagcatcctatgcacttggaaacattgctgttggcaacctctccaagtatttaccatttattttggatcagattgacaatcaacagaagaagcaatatctgttgctccattcacttaaagaggtaatcgtgcgacaatctgttgatcatactggccagagtgagctacaggattcaaacattgagaagatattggcattgctcttcaatcactgtgaaagtgaggaggagggagttcggaatgttgttgcagagtgtttaggaaaaatttctctaattgaaccaaaaaaactagtccctgctttggaggtacgcacgtctagcccagcagcaaatacaagagctacggttgctattgctataaaatattcaattgttgaacgacctgagaaaatagatgaaatcatgtactccaagatatctactttcttgatgttgattaaagacagcgataggcatgtgagaagagcagcagttctggctttgagcacagcagcgcacaacaagccaaatttgattaaaggtcttcttccagagatattacctcttctatacgaccaaactgttattaagcaagagttaatcaggacagttgatcttgggcctttcaaacatgttgtagatgatggtcttgaactcaggaaagctgcctttgaatgtgtggatactttattggacagttgtcttgatcaagtgaatccatcgtccttcattgtacctttcctcttgtctggtttaggtgaccattacgacgtgaaaatgccttgccatttgattctatcaaagctagcagacaagtgcccttccgccgtccttgctgtcctggactccatagttgaaccaatcgagaaaactataagccacaaacccaagggggatgcagtgaagcaggaggttgatcggaacgaggacatgatccgcagcgctctcagggcaatatcttctctaagccgcataagcggcagcgactacagcatacggttcaagaatctgatgaacaagataacggccacccccgcgctcgccgagaagtacaactcggtgcgcggcgaatgagacctgggttcttgtacatggtagaggaataggttaaacacccagagttgtcgcgcgctcgtcaatcctgttgccgcttccccgcatggttgctgaggcaaaagtctgtactctgatgatgacggtggttgatttttgactgctggacatagttgtcttgtacaaaatctggtggtaaattcagtagaattgccgccgatacatttacctggtggttctcttgtcgcagttcagtttcagttgacctatgaagcgctgatgcagatcagactattctggca

SEQ ID NO: 14418 - DNA, 101 bp, Zea Mays
ctggaatcggttcagccggaggtagggtccagcggccgggaagagcaccgcacatcgcgcggtgtccggtgcgcccccggcggcccttgaaaatccggagg

SEQ ID NO: 14419 - DNA, 1307 bp, Zea Mays
attaggcccatctgtcagttgacgtgcgcctttccgattacggaaagcgttggagctttctctgccaccagacgctcaggggcaccccgggcctacctgccagcgtcggtcagagacccgcctccgtctctgaatcggccgctgccgctaccgccgccggcggcgacgaccatgccccgcgccgctacgggtgcgatcactgcggcgttcctgcgcgcgcaggccccgcacatggcgccgctggcatcgcgcatcgcgcgcgcgttccccggcctcgccaccgccgccgcgacgcgcttcgctccctcctcgtccgcgtcctcgccgcggcttggcctcgtcccgcgcctccgatccgcgcgctccttctccggcgcccgtgcgtctcccgttagcggcgcggtttctggctcctcgacgtcggaggagggccagcagctgcagtcggagctcatcttcctgggcacgggcaccagcgagggcatcccgcgcgtcagctgcctcacgcaccccaccaagatttgccccgtttgcaccaaggcggctgagccagggaacccgaacaggaggcgcaacacctctatccttctgcgccacgccaccccgtctggcaccacaaacatcgttgttgatgccggcaagttcttctatcactcggcactccagtggttccccacgtttggtttgaggacaatcgatggtgtcattattacccattctcatgctgatgccattggagggcttgattgtcttcgtgattggacgaacaatgttcagtcatcgatcccaatttatgtggcagaacgtgattatgaggtgatgaagatgacccactattatctcatcgacacaagtgtagttatacctggagccgcagtttcagcattgcaatttaacattataaaagaggaaccatttatggttcacaatcttgaggtgattcctttacctgtttggcacggtcagggttaccgctctcttggttttcgttttggtgatgtatgctatataagtgatgtcagtgatatacccgaagaaacatacaagcttctggaaaactgtgaacttcttataatggatgctctaagacctgatcgttcttcatcaacacacttcggactaccaagggctcttgaggaagttaggaaaatcaaaccaaagaaaacactgtttactggaatgatgcatttgatggaccatgagaaagtaaacagtgatcttgccaggctgattggaacagacggtcttgacatccagcttagctatgacggtctcaggatacctggaatagcgatggcagacctcag

SEQ ID NO: 14420 - DNA, 3540 bp, Zea Mays
gggttccattgcccatcatccaccagcgaagaaacatagggaaaagggaaaaaagatggtcgtgctgccgcgccattatagccccggaatccgcggcgcgcccccgccttccgtcctctctcccgccacaaatcgccgggcgcccgcgccgccccagcctcccttctccctccctccctcatcccctccgtgtcccggagcccagggagcggaggcgggcgggccggcgggcggccatggacgtggactgcgtctcgctgcccgacgccccggcgggcgacgtggatggcggcgccgcccggccgtggcccaaggccgtgaccaacggcggcgtccacgagctgctggagtgccccgtgtgcaccaactccatgttcccgccgatccaccagtgccccaatggacacacgctgtgttccacatgcaaggccagagtacacaaccgttgccctacctgcaggcaagagctgggcgacatcaggtgtctggcgctggagaaagtcgccgagtcgctggagctcccctgcaggtactactcgctggggtgcccggagatcatgccttactacagcaagataaagcacgaggcgcagtgcggcctgagaccgtacaactgcccctacgccggctccgagtgcggcgcggccggcgacatcccttccctcgtctcccacctgagggacgaccacaaggtggacatgcacagcggctgcaccttcaaccacagatacgtgaaatccaacccgcgggaggtggagaacgccacctggatgctgacggtgttccactgcttcggccactacttctgcctgcacttcgaggcgttccagctcgggatggcgcccgtgtacatggccttcctccgcttcatgggggacgagaacgaggccaagaactacagctacagcctcgaggtcggcgccaacgggaggaagatggtgtgggagggcaccccaaggagcgtccgcgacagccaccgcaaggtgagggacagccacgacggcctcatcatccagaggaacatggcgctcttcttctccggcggggaccggaaggagctcaagctcaggatcaccggacggatctggaaagagcagcagacaccagacggcgcatgtactccaaatctgtgcagctaattaagcaatcttcaaacaaacaacaccttgcctgtccttctttctctttctaattaatcgtggtggtggtggtggtgctcaaagggatttatttatttattactaattattaggaggatgtaggatgctcgtgtaaatgaaactgtgtatattatatggatggcatggcatccctggccttaaatcatgtcacagcacagtactgtactgtacctacgggtggccggctgatcaaaagatctttgcttgctgacaaagctgtgtctgcatcttcatgactccatgtttgcattctattcctcccacacaacagtcaccagtgggcgtgccacgtggccgctatcccatccaatggttccacacctcctctttcccaataatcccaggcgccgcgaggcaaacaatctcctcttctctccccagattcactcaccgtccgtccgtccagggagccatggcagcagcagcagcagcctgcatctgtctgcagctctctctcccaagcaaccattcttcctctgcatgtcctccagcatacaggaagcgtgtcgcgctagccccagggagaggaaaccgtcttctctgcactgcatctggcgcctcttcttcttcttctgtggtggtgaccaaggagcaggaggaaggatctcctgagcccgaaatctttagctacaaagacgaccccaacttcaggggctgcaagggctgcggcagggacgagcttcagaggggctgcaatggacaaggccggatccagggcggcatagccgccgtcccgggcttcggctggtggcccatcaaggcgtaccggccgtgccccggcttcgtcgcgtccggcggccgctaccggcgccagggccaaagcatggacgacgttgcatccggcagggggaaaaagaaaccctctcccgccaaaaaacaagcttaacccctctagctagtttatgttcatcaggtgaattcagaatctacccaagatgggagggaactgggggaagctcaagttattcaggaacagcagttttttttgggtccacaacgccaatgtatatgcactagtttggagtactgtttgcagaaacaacaattgtatcagtagcttggaacatctgactgtaccctaattgtattattgtcttcatcaagtggcgaatgcaggatcttgcactggtataagcaagcacccacccacaggatgatgtgcattattacgctgctgccgtcttcttgacgaactcgtccctgagctgcctccgcaggatcttgccggacaccgacttggggatggcgtccacgaagcgcagcagccggagcttcttgtacgacgcaacgcgccccgccacgtacgccatcatgtccgcctcgctctccggcgcgccacgtcgccgcaccacgcacgacgccgggacctcgccggcctcctcgtccggcagcctgcgcccgcatacatgcatgatgacccgcaggaacacacacgcacaatctccaactgcatgccgcggtccgctcggtcgcttacccgaagacggcggcgtcctcgacggacgggtgagacagcaggatggcctccagctcggcaggggcgacttggaagcccttgtacttgatgagctccttgatgcggtccacgatgaacacgtcgccgtcgtcgtcgatgtacccgacgtcgcccgtgtggagccaccccgcggcgtcgatggtgcgctccgtctcctccttcttcctaccgctccggcggacatgatcccgaggctcaccacggggtacaccgccaggttcgggagcgcgaccaccacgacgtggcccctgcggacgccgatggaccgcagcgccctggcgaaccgcgccacgagcgccgtcttgtccgcgtaggcctcggcgtccgccagcacgaactccggcacggtgacgtcgtctggtacggccacgggcgggaaccggctccggaagatgtgctcctcctcagactcatgcaaatgcacggcggcgatggccgcgtcgcccatcctcagctgctgctggtggtggtggttgtgggtatggagctgaaggaagggcgctgcgttggcatttgaagagacgaccggaggtcttggcattgggccacgcgaggaaggtgaaggcatgttggtggtggcgacacaattcttgcgtggtgtcaagaaaggtggtgtgcaggtgaggatcggttgtgtcatggcctttgacctcgtagaacttggctgggtcatgctcatgtcctttgagctcacagagcttagagccaccggtcaacagtgacacgcgtgaaagcagcgttgtcgtgttcatcatagttcgcaatagagttcagatgatataatagttggttaagtgcatgcacaaattcttcaaatgaaagaaatatcaattcgcccccata

SEQ ID NO: 14421 - DNA, 1419 bp, Zea Mays
cttcagtactcattagcagtgaaagaaatggaaccacagatcaggtcgagaagattgtcaaaaccctgaatgaaggacaggttcccccttcagatgttgtggaggtcgttgtcagccctccttatgtcttccttcctgtggtcaagagccagctgcgccaagagttccatgttgctgctcagaactgctgggtgaagaagggaggtgctttcactggtgaagtcagtgctgagatgctcgtcaaccttggtgttccctgggtcattcttggacactctgaaaggagagctctgctgggagaatcaaatgaatttgttggagacaaggttgcgtatgccctgtctcagggactaaaggtcattgcatgtgttggtgagacccttgagcagagggaggctgggtctaccatggatgttgttgctgcacaaacaaaagcaattgctgagaagatcaaggactggagcaacgtagttgttgcctatgaaccagtttgggctattggaactggtaaagttgccaccccagctcaggctcaggaagtgcacgcctccctgagggattggctaaagaccaatgccagccctgaggttgctgaatctactaggatcatctacggaggctctgtaactgctgcgaactgcaaagagctagcagcacagcctgatgtcgatggttttcttgtcggtggagcttctttgaagcctgagttcatcgacatcatcaacgcggccaccgtgaagtccgcttaagatgctacgctgaagacgaacatactttttttttgctcaactgtgctatgtaagctagtagcttttgcgcaggagcagagactgttttgcctgcccccaacttctagcttgagcttgctaataatgtttacctctggacgtatcaataatggtgcttatgtatccccttttttttgtgccgaattacggtggatccgtcatctgaaccatgggtttggtgtatgtaattgcgtcacccgatgcctagggtgtgagactgaagtttttggacatttgggacaaggtagccttgtgcccttgtgccccacattggtcgaatgctgccaaaactgtaccggtcatctgtgctccgtacggattagcctgatctgcgaatgcaacttgtcagctaatcgttgcacggaggcagccagacaattattgtacgatatatattcgatctccccaggcataggggattgaatatctattcttgtttttacaaatgaaatacggatccaaacaatgtccaaaactattgtttacttctttttttttaaaattaaatacacatacgtacaagaatgggcgtggcttaattagtgggatgaaacctgtcgattcaagataagtcggcatgggtggtctcgtattcctagaactagcaaagtatagatataaaccaaaaaga

SEQ ID NO: 14422 - DNA, 1349 bp, Zea Mays
tgatcacccggctactcctaggagctaggaaggcctaaaattgaaaagctggagattgaaggaagaggtttccacactgacctatatgccgttcagggtacctatagcggaggcaaagaaggcaagagtaaaatacaatggctcagatcgatggttggaagccctgatcttatctccatacctggcgaaactggaagaacgtatgaagctaatgttgatgatgtagggtataggcttgttgcaatttatacacctgtaagagaggatggagttgagggacaacctgtttctgtttcaacagaacagattgcagttgagcctgaactttacagggaagtgaaacagaagctcgatgatggttcagtcaaatttgaggttctgtgtgacaaggaccgaacacccaaaaaggcacaagtaatgggccatttggagcggagggttttggaagtcaaccgaaagaggataaaagtagtaaagcctggatctaagacatcattcccgagtactgaagtacgaggaacctacgctccaccgttccatgtcgagctgtatcgcaatgaccagcaccgcttcaagattgttgtcgacggtgatactgaagttgacttaatggtgcaaacacggcacatgcgagaccgcatcatcctcacgatcagaggcctcgcccagaagttcaacagcacctccctcaacacacttctcaggatcgagtcatgatagacctgacagtgtaaaaaccaactattacgggaagctgtaccccttgttccgattggttagagtgcgtggttttagtaggattcgtgacatgccagccttttgtgtgtatgggtgtgggacgggccgagcgtgttggattacaattttttccctgacacatctctcaaatcagagcagcatcagctggttgctctgactggtgccgtcgtgcgtcatgaaatgtacatagggtggttagagcgagaaagagagtggtgtttcttggtgctgtatttattatgcactggttgggttgggttttttcgactgccattctcatactaagtattggttctttcttttttcggtcgttgggtttgcatatacttgtaccgacaacacagcttggggtgattgggcgagtgctgttcagaatgcctggtccacacttgtgtacgactggaatcctacggtggcgtattcacatgctgttttatggtgcaaatgtaaattcatctgttcataaacgagaatcaaaatcgtcggccacgtgtattcgtcgtattcgtaccgatgtatactaccttataaaccagtactaatctcacggtggcatcaattatcttcctctgtttcacaaggcacacgtt

SEQ ID NO: 14423 - DNA, 1285 bp, Zea Mays
ggaactggttgccaatctgtgatccgtagagaggaaaatggcggattgctcaagtaaaggagaaggaacggaggaggactttggaggagatactctatgctctggttgttgagaagtttgttgaagccggcgtttccttggttccggcactctcacgctccatcgactcttctggaagagttgatcagtgggcagaaactgtggaaggaaggctccagcgtttgcactcgcctgaggcctatgaaatgatcgagaaccatctcgccctcattctggggcagcgtcagagtgatgccactattgcagccataagtaagctccgtgttggccaggtctatgccgcatctgtgatgtatggctatttcctgaagagagttgatcagaggtttcagctcgagaagacaatgaagagcctcccttggggatcagaagaggaagacggcgctttgtatcaagttatgacgaccgactcgatgccttcagctcagtcttctagctctcacccagagatgggctcctggaccgccgcgcctgacttcaacgcaggaggtcctagcgaatctatcaagccttgtcgccttaggtcgtatgtcatgtcattcgatccagatacgcttcagaggtatgcaacggtcaggtcaaaggaggcctttggtatcatcgagaaacacacagaagcgctatttgggaaagcagagattgtagtcacacctggaggcacggttggttcatccaaggatgagcacattaggataagctttgccgggctgagaaggctggtcctggaggctgttactttcggatcattcctctgggacgttgagagctttgtggattccagctaccattttgtgaccagctaagattgtcatcctaagtaaagaaaggttcgtggtttacgtctctggtctgaatgtctgtgggcttcggaaagacttgtacaatgatgctaggctgttaccacaccccttactgatgcgatggtatcaatgatttgcgcagttctatggcatcgcattatttgtaaagaccaactgccattatcctgatatttagccgttatgttctattaacatctgtgctgcccggggggcgtagcgatgtatttttttggctatcccctctgcaaattgtaagaggaattctaggctcatagccaattctttggcgaagctattattctcgttttacagattgccgttatgatgatttgagtctttctttttgagagcacagccatttcgtactacagaatacttgtgcgtatttgaatagggatgaagtt

SEQ ID NO: 14424 - DNA, 69 bp, Zea Mays
cttgatcatttgcatctcccccttgatcattgccatcatcttgagttggctcatttgcttgatcttcta

SEQ ID NO: 14425 - DNA, 811 bp, Zea Mays
ccttgattcaagacaatgatgtgtaattgcaagaggtgtccaaggatatcaagtatgctgacaatcaaccaatagtgctttggggaccaagattctccagatcaacagtgaaggacatgcgcataaatatggcaatatcagcagcatttgaatatggcgaggttgaaggacgaggaataagaatggcaaaaagagtagtccgtgctctgggtttgatttttggatgtgtgttcactgcatccctggcttatacagcagctagtaacatggttgagctttcattgcagtatactccccgtatgttttactactatcaggagctgattgttactgtggctgcctccgttcttctgtacatcacggcttcatggtaccgataaacacgacaaacaattatggcctggcttagatgattgcgagatgttaggacatgccttgagtttcagatagagaccaacctgtggtgccttccgcatctaagggatagccaagaacccgcaaattctgtagcattcttccagctttgaggcaggtagttcttagtggaggatcatgtgaccagctatggattcagtagtacaatgaagatggccaatggatgaaaattgtttcgcgagaatatttgaacagcggtgttgtccatgcaatttttaattagatcttggacatatgcttagacgacatacttaactgtgatgtgcatgtgcttttttttgcctgaatgagtgctgagcttcttctgtgttaggctgcctctcgggagctcccatttgtcggacacccatgagcatgagtagctgcactagttaag

SEQ ID NO: 14426 - DNA, 1685 bp, Zea Mays
ccactattagatctcgacgctgttgggttgtgacttggaagaagaacttatgaaagttgaggaacaaacagtgaagctggagatggaactgttcgttaaggaaaaggaaacatttaaggtcttgaaggaactacaggaaacaaagcaggttatagatggcttgaaaatacaaatagagaaggtaacatgggaggacacaaatgctgcaaaaggccatgctgatacagggatggtacatccacttcctgctgtcgaacaaaataccgagccaccagtccagagcgcaaaaggtacacagtccccactaaccacgttgatcaagctcaatcaggcaaaagcattccttaacacggataccgtcaacatgctaaagagccagatacagaaggagaaaggctcgcttgagaaaacccgcgaaaggttacaattcaacctggggaaggcttcatcgttagaagcagatttgacgaaaactgtcgcacggctgcaagcagcaaaagctccacagcctgtccttgagccttctgaaatctggttgcagatgaagcacctgaatgctgacaaggcgaggcacaagaaggcgtcagaggatttgaggaacgagatctgtgagctgacagctgcaatcgagcacacgaggtctaagacgaagactctgcagttcagaatcctcatggctgagaaactgaaggaagcttcccaacgtggagaatctgttgctcttgcagagatggaaaaactgagcaacgggcgggacccgaacggcagtacttctgatgctgtcacactctccgttgaggagcactccacgctcgtgctcaaagcgcaagaagcggatggtgccgccaggaagaaagtggacgcggcaatgcaagggctcgatcaagcaaaccggtgtaagctcgaactcttggaaagagtagaggaagcaatggcggctgtcgagacgagcaggaaggctctggaggaggcccagaggagggaggagtcagagaccaaggcaaagctagtagccgaagagacgctccgaaagctgcggtcggaccaaataatccagaactggcgcccgaccaacagcagctccgtaaaattcaagaacacggcgctgctggcgccccggagagcagcagcgggcgctgggatatacgacgtgaacggcctgagcctggtggccgccgggccgaacagcgtgaagacggtgtccatcgggcagatcctgagcatgaagctggaccgcgagctcgagatgacgaggacgaccacgacgagcgcgaggaagaagaaggtctctctcgggcagatcctgagccagaagtacgagatgttctccccgctgcggatcgaccacgactgtgcctcgcacaggcagttccagcagccgaggaggaagaggatgggcttcgtcgtgtacgcgctgctgctcgcgcggcagaggcataggaggcggaaggctgcctcctgcactcgtggtggcttgagctagctagctagtttggatggtcggtgggtgctcagccgcgtcgtagtcgtttatatgcttttattaagagataagcgatcggaataatcgttatatttgtaatatagctagttctatgaacaaaaagttggtatttttagcagctactcgccttgctctggccacgttgattcgggatgatttcggacccgtcgtctcgtctcat

SEQ ID NO: 14427 - DNA, 1175 bp, Zea Mays
gtatgagtgactatcgcgccaacaggattttcatgtagccacgaatatctagttaggaggcgatggagagttttactaatgggaatgttcgattactgaagcatgagcgtagcattgtcgcagaggatgatcttgaccagcgatggcaggaagccactggagagtctgtttctgaggtcatattcctcagcaaacacactgcagtctccaaacgtccagcactcacagtgcatccaattggtgtgccacatctgaaggaggatgaaaccccaccccaaggaggaactcctggatgggcagcaattccaagtcctcgaattggaccttggctccggttgatgcaaaagatagctgtagaacaaggccttgttccagagtttgaggttacgcttgaggctactcaccatggaccagttaccagcacacccaccatgtttgttgagataggaagtacagaagaccactggggtcgacaagatgctgcacaggcaattgctctagttctatggaaaggtcttggtctggaggatggaaatgctgttggaacttggcagaggaattgtgaaaaggttctattaggtataggaggtggtcactatgttcctcgtcacatggatattgtcatcaaagatggtgtatgggtcggtcatttactctctggttactccttgccaatggacatgtcgtcgcaagtaaatgtaaagagttctgaagaggttgctggaatgtggaagcactccatcaaagtttcttatgaagcaacaaaggcagcatttcctggtggtgaagttatcgcgcatcttgatcacaagagcttcaagggctggcagaagaatgctgttacatgcttcttgcaggagcagaacatcaggataggaaagcctagcgatttcctgtgacgtgctacgacagtgctggacaggacaggtggagaggctgtgaatgcttgagctgatttccctatgcgcacgctgaataaatatgagacataggggctgtttggttcgtggctaaatgtgtcatactttgcctaaggttagtcgttcgaattgaataactaaccttagttagaaaagttagtcaaaatgtggtaaattaggctcaaaccaaacagccctatagtaagactcgatccttaatgcggttcaagagcttgaatttgccgttagcccgca

SEQ ID NO: 14428 - DNA, 2416 bp, Zea Mays
gaggagcgccggctcggtcgatgacgcggcagcggtcgcacagaaagatcaaggagtcgataagccgtcttccgccgctgcagagagttcaaagcggaggaaggagcaggagcaacagcaacccgcagtgccatgggcgaagctgctctcggagtgctcacagactcctcactatcccatcagtgtggatcagatttctgttggtcaaagcaaaaactgtaatttgtggctgaaagaccaacctgttagcaaagtgctttgcaagctgcggcgccttgagcaaggaggtccatgtgagttagaagttatagggaagaagggtatggtccaattaaatggaaggtccgtaagtccaggcacaaaagttccccttacaggaggggatgaagtcatattcagttcatgcggcaagcatacttatatttttctttatcctttgaatgacaaagttcctaaaacggtgctatcatctgctgttagccttctagaagctcctgttgctagtgtaaagcgtatccgtacagataagagaacaggagacacttcagctgttgctggtacagagatgatgacatctacatctaatcagaaggatgtagcagcagtacctcccgcgtcagctggagagaacagccaaagagtagtgcggccattggcatcatctgcttctgataaattgaaagggcgtgctgtgagccctgaaaaggaatttgcgaatggggaaaatgctaatgaggttaattctaacatcgaagactctccaatggttgttgctgcagcccccatatctcctgatgctgctgcgaacgatacctgtcaacaaaatggctttgtctctgattctcatctcggtgcggaaatcggtaagactgcaacctataagataaggccagttctgaggatgattacaggatcaactatatccgagttcgatttgactggtgatgatctttttaaagctcttgaagatcagagggatcacatcatcagggagcttaacgcttcaaccaacgtgcctccaagtagatgccaagcctttaaggatgggatgaaacaaggaattatcaatccaagtgatattgatgtcacctttgagaattttccttattatctcagtgagaatacaaagaatgtgctcttgtcatctgcgttcatacacttaaaaaagaaggagttcatcaagcaatttgttgagatctcatcaataaaccagcgaattttgttatctggtccagcaggttccgagatttatcaggaaacattggtaaaggcacttgccaaacattttagtgctagactccttgtggtggattcacttttgctgcctggggcaccttcaaaggatccagaattccagaaagatgttgggaaggctgataaatcaggggataaggcagctgccgagaagtttgcaatatatcagaagcatcgttcttcgttggcagacactgttcacttcaggaggccagctgcaccaacttctagtgtgaatgctgatattgtaggaacatccactctgcattctgcatctctaccaaaacaggaatcgtcaacagctacatccaagagttatacttttagagaaggttttgttaactattcttcattattacttaatgtattgagttattttttctctcaaggtatgattttgcttccaggtgatagggtgcgttatgtgggtccagctcaaccatgctcgttgtcacaaaggggaccaagttatggttatcgaggtagagtgatgcttgcttttgaagataatggatcctcaaaaattggagtccggtttgacaagcagatccctgatggtaatgatcttggtggtttgtgcgaggaagatcatggcttcttctgctctgctgaattactgcgcccagacttttctgctggtgaagaagttgagaggctagctatgaccgagttaatagaggtcatttcagaagagaacaaatctggacctctgatagtgttacttaaggatgtcgagaaatcattcacgggggttacagagtcactatcatctttgaggagcaaacttgaatcgcttccacctggtgttcttattataggatcccacacccagatggacagccgcaaagagaaggcacatcctggaggttttcttttcacgaagtttgccagtagtagccagactctttttgaccttttcccggatagctttggtagcaggttgcatgaaagaagcaaagaaagtccgaaaacaatgaaacatctaaataaacttttcccaaacaaaattttgatccagcttccacaggatgaagctctacttacagattggaagcagcagttggatcgtgatgttgaaacccttaaagccaaatcaaatattggtagcattcgcatgggcctgtgatgcctggactaatgtggtcgtgggttcgaagcagcc

SEQ ID NO: 14429 - DNA, 3755 bp, Zea Mays
caggcgcctgcaaggaaaacacaagacactgacaagtgggcccattactaaccctattaggccagaccagagctgaagcagagcggagaggtctgctcgccggccatcgaatccaggctcctccaaggtgatctctctcgatcgcttccggcctcaccgtagcccgatccacgcaggctcggccacgacccgcggcctccgcacgacctggatctgacgcgcctccccctgcccccgccctccgcctcgtacttcctcgctgcggccgccgtgctcgcgctactcggcggactcctactctatatgcttccccggaagcggggggtcgacgccggcgaggaccaggacttgcacaacaaggcccttcgcgccgccgcagttgctcaggacaaggagaaggtggttgcggagatgggcggcagggcgccagagatcgatgaggacctccacagccgccagctcgccgtctacgggcgcgagaccatgaagcgcctcttcggctccaacgtcctcatctccggactgcagggactaggcgctgagatcgcaaaaaaccttgtccttgcgggtgtcaagtccgtaaccttgcatgatgatggcaaagttgagctatgggacttgtcaagcaactttttcctctcagagaaggatgttgggcaaaaccgtgctctagcttgcgttccaaagctacaagagcttaacaatgctgttatcatctctaccataactggtgatttgatcaaagagcagctttctaattttcaggccgtggtttttactgatatgagcatagaaaaggcagttgagtttgatgattactgccatagtcaccagccgccaattgctttcattaagtcggaagtttgtggcctttttggcagtgttttctgtgattttggtcctgagtttactgttttggatgtcgatggtgaggagccacatacaggaattgtggcatcaatcagcaatgacaacccagcacttgtttcttgtgtggatgatgagcgtctggagttccaggatggtgatctagttgttttctctgaagtgcatggaatgaccgaactcaatgatggaaaaccaagaaagattaagaatgcaaggccttattcttttactctagaagaagacaccacctcatatggcacttacattagaggcggtattgtcacacaggtgaagccaccaaaggttcttaatttcaaaaccttgaaggaggcaatcaaggagccaggagaatttctcatgagtgatttctccaagttcgaccgcccacctcttgtgcatttggccttccaagctttggacaagtttaggactgagttgacacgattccctattgctgggtcagctgatgatgtacagaagctgatagaccttgctattagtattaatgaaactcttggtgatagtaagcttgaagaaattgacaagaaagtcttgcagcattttgcaagtggttcgagggctgttttgaatcctatggctgcaatgtttggtggtattgtaggtcaggaggttgttaaagcatgttcagggaaattccatccactgtaccagttcttctactttgattctgtcgaatctctgccagttgaaccgttggagcctagtgatttgaagccagagaacagtagatatgatgcgcaaattagtgtctttggggctaagcttcaaaagaaactggagcagtcaaaaatcttcatggttggttctggggctcttggatgtgaattcttgaagaaccttgcgttaatgggtatttcttgcagtcaaaatgggaagctgactgtgacagatgatgatgttatagagaaaagcaatctcagtcgccagtttctcttccgtgactggaacatcggacagcccaagtccacagttgctgcaaccgctgctatggcaattaatcctaagcttcatgtggaggcccttcagaatagagcaagtcctgagactgaaaatgtgtttaatgatgccttttgggagagtttggatgctgttgttaatgcattggacaatgtcactgcaagaatgtacattgattccagatgtgtatattttcagaaaccacttcttgaatcgggtactctgggtgccaagtgcaacacacagatggtcattcctcacctaacagaaaactatggggcatccagggatccaccagaaaagcaggcacctatgtgcactgtacattcatttcctcacaatattgatcactgccttacgtgggccaggtctgagtttgagggtctacttgagaagactcccactgaagtaaatgctttcctgtcgaaccctggtggatatgcaaccgcagcaagaactgctggtgatgcacaggctagggatcaacttgagcgagttattgaatgccttgagacagacaagtgtgagacattccaagattgtattacctgggcccggcttaagtttgaggattatttctccaaccgtgtaaagcagctgacattcactttccccgaagatgcaatgactagctcgggtgctcctttctggtctgctcctaagcggttcccgcgacctctggagttctcgtcttccgactcaagtcaccttaacttcttgttggctgcatctgtattaagggcagagacatttggaatacacatacctgattgggctaagaacccaaagaaactggctgaagctgtggacaaggtcattgttccggatttccaaccaaaacagggtgttaagatagagacagacgagaaggctactagcctatcctctgcgtctgttgatgatgctgctgtcattgaagagcttattgcaaagctggaagaaatttttaaaacattgccaccaagattccatatgaaccctatacagtttgagaaggatgatgataccaatttccatatggacttgatcgctggttttgccaacatgcgggctaggaactacagcatccctgaagttgacaagttgaaggcgaagttcatagcgggaagaatcatcccagccatcgccacctcaactgcaatggccactggccttgtctgcctggagctttacaaagtcctcgctggtgggcacaaggtcgaagactaccggaacacatttgcaaacctggcaatccccctcttctccatggcggaacctgtgccacccaagaccattaagcaccaagacatgtcgtggactgtctgggaccgctggaccataaccggcaacatcacgctgagggggctcctggggtggctcaaggagaagggcttgaacgcctacagcatatcctgtgggacctcgctgctgtacaactccatgttccccaggcacaaggaccggctggacaagaaggtggtggatgtggccagggaggtggccaaggtggaggtgccatcataccgccgccatctggacgttgtggtggcctgtgaggatgacgacgacaatgatgtcgacgtcccacttgtgtccatttactttcggtaaagaggggctcaccgcccgtttacatgttgatcctgtgcgatatttgtcaatgtttgtctcagaaggatcaagtgtataatttgcgatagcaaccgtgaactagattgtgtttaagcacatactgatgatttcctgtgctgccatctggttagacttggctgggaattgtcgctgagatttggaccactgttatggaattcttaagcataacattatgatagctgttgcatgatactgtcgtcgctaaatgttgttatcttggtatttcaatgcatgtactgctgtgactcgtattc

SEQ ID NO: 14430 - DNA, 2870 bp, Zea Mays
ccagtttcctccttctggcgtgtctgaatgaatggcagaagcgcaggacggggcagcggcagcgtgagcgacgccaccacccaagcggacggcaataatggacgctaaccactcgccgccggcgcagccggagaggaatcatggcagcttaaactacgacatcgagagcacggacggcacgtggcgcggcgcgggggcgtggcaggagcaggacccatcgtcggaggccctgatgcggtacgacgacgacgggccccgggagccgctgctgcgaaggcgcaccatgaacaccacctcccagattgccatcgtcggcgccaacatctgccccatcgagagcctcgactacgaaattgtggaaaatgaccttttcaagcaggattggcgatcaagaaagaagcagcagatattccagtatattgttctgaaatggtcattagttcttcttattggcctgtgtactggacttgttggcttcttcaataaccttgcagttgaaaacattgctgggttcaagttgttgcttacaagtgatctgatgctcaagcaaaggtacttcacagcatttctggcatatggaggttgcaatctagtcttggcagctgctgctgcagcgatctgcgcttacatagcacctgctgctgctgggtctggtatccctgaagttaaagcataccttaatggagttgatgcttatgctatattagctccaagcacactgtttgtgaagatatttggttcaatacttggagtttcagctggatttgtccttggaaaggaaggtcccatggtacatacaggagcatgcattgccaacttacttggtcaaggggggtcacgcaagtaccatctgacatgtaactggctcagatactttaagaatgatagagataggcgggatttgattacttgtggctctgctgctggagttgcagcagcattccgtgcgcctgttggtggtgtgctctttgctcttgaagaagcagcatcatggtggcgaagtgctctcctgtggagaacattctttacaactgctgttgttgctgttgtactgaggggtctgatccagttctgtcgtagcggaaaatgtggtctttttggtcagggagggttgattatgtttgatcttagctcaaccgtaccgagttacagtacccaggatatcattgcaattattgtccttggaataattggtggggtcttcgggggcctgttcaactttctcttggataggattctccgagcttatagttttatcaacgagagaggtgctccatacaagatccttctcaccgtcacaatatcaatcatcacatcagcatgctcctatgggctaccttggctcgccccatgcactccgtgccctgctgatgctgtggaggaatgccctaccattggccgctctgggaattttaagaactttcagtgcccgccgggctattacaatggtcttgcgtcgttgttcttcaacacaaatgatgacgccatccgcaatctattcagcagtggcaccgagaatgagttccacatgtccactcttttcgtgttcttcactgcgatttactgccttggccttgtgacatacggtattgctgttccatctggtctcttcatccctgttatacttgctggggctacgtacgggcgcatagtggggacccttcttggtccaatttcagaccttgatcctggactattcgcacttcttggcgcggcatctttcctcggtggaacaatgaggatgactgtgtcagtctgcgtgatacttctggagctcaccaatgacctccttatgctcccgttagtcatgctcgttcttctgatatcaaagaccatagccgacagctttaacaaaggggtttatgatcagattgtggtgatgaaaggcttgccattcctggaagctcatgccgaaccatacatgacgcacttggttgctagcgatgttgtgtctgggccactgatctccttttcaggcgtcgagagagtggggaatatcgttcaggcgttgaggatcacaggccacaacggatttccagtggtcgatgagccacctctatcagaggctccagaacttgttgggcttgtgctcagatcccatctgctggtcctgctgaaaggtaagggcttcatgaaagagaagatgaaaaccagcggtagcttcgtgctggaaagatttggtgccttcgattttgccaagccaggctcagggaaaggcctgaagattgaggacctggatttcactgatgaggaaatggacttgtatgtcgatctccatccaattacaaatacatcaccgtacacggtggtagagaccatgtcacttgcgaaggctgccgtccttttccgggcactgggactcaggcacatgctcgttgtgccaaagaccccagggagacctccaattgttggaatcctgacgaggcacgatttcataccggagcatattcatgggctgtttccaaatatacacaagtcacactaatggaacactcaatcagtccatatcttttcttttcttttttgccgtcgccttgtaggttgtagctagctgtacgaaaacgaagctacttttgtccaatatttgctatcggccatctggccttttcttttccattttgtttcttcaggagtactccagaatcatataatcactggataatattgtatttgttcaagagctggttccctggcagaacactccataagtgatatttctgtctttttctcaaatacgcagaagatctacgtatcaatatattatataggaaaacgaccaaattactaccatcacatatggacagagtttacctaatcttttgatttatttggctctcccgctcctttcttttttccttttttgttatgta

SEQ ID NO: 14431 - DNA, 2709 bp, Zea Mays
taatcgcgccgcgcaggcggcatcacactccagtacagctctcactgcgccctgcccgcatcggctccaccacgctccacgccccacgcccccctacacacacacacaccccgacaccccggacagagggggcgcaggcacgagaacagctcagtcgcggcgagctcccgggtctccagcgaaagtgccggaggagagagtggtggcggctggcgcgggctccctccgaggctctacgcggcgcctcagcgtaatgctggccttccccggggacagatcggcctgagtcgccgttgccgctctcgaatcggcgtcttcctcgcatggttccggccagagcttggatctcgcggcggaagacgcgaggcggaaaagtggggagggtgtcgttccttggttttcttctcgccaaagaggattgaagttatgatggaaaagcttgtatagtagcgctaaatctaattctcttgaagcaagtctcaaccatgcagcgtcttacagcgatagtcttcgtggctacttctttccttattgcaagtgttccacatgccaaaagtgctgatctgaactctgataagcaggctcttctcgcatttgctgcatcactgcctcatggcaggaagctcaactggagctccaccacacctgtctgcacttcttgggtgggggtgacatgcacaccagataagagtcgtgtacatacactgcgcctacctgctgtaggacttttcggtccaataccatcagacactcttgggaagcttgatgcactggaggtattgagccttaggtcaaatcgccttactgttgacctcccacctgatgtaggatctattcctgccctccattccctctaccttcagcataataacctgtctggaatcataccaacttccctctcttccagtttaacattcttagacctgtcatacaacactttcgatggagaaatcccattgaaagtgcaaaatcttactcaacttactgcattgcttctccagaataactcactttctggacccattcctgacctccaacttcccaaattgagacacttgaatttgagcaacaataacctcagtgggccaataccaccttccttgcagaggtttccatcgagttccttcttagggaattcttttttgtgtgggtttcctttggaaccatgttttggaactgcaccttctccttctccagtatcaccaccatcccccagtaagaccaagaagagcttatggaaaaagatcagaactggtgtgataattggaattgctgttgttggaggggtattgttgcttattttgattctcgtgctcttgatatgtattttcaagagaaagggacacactgaacctaccacagcttcgtccaaaggaaaggctattgcaggtggcagggcagaaaaccctaaggaagactacagcagtggtgttcaggaagcagagaggaataaattggttttcttcgagggcagttcatttaattttgacttggaggatttgttgagagcttctgctgaagtccttggcaaaggaagttatggaactacctacaaagctgttcttgaggatgcaaccatagttgttgtcaagagattgaaggaagtggtggttagcaagaaggattttgaacagcagatggagataattggtagggttggccagcatcaaaatgtaattccattgcgggcttactattactccaaggatgagaagttgttggtgtttgattatgtcccatctggtagccttgctgctgttttgcatgggaataaagctgctggaagagctccattgaactgggagacaagagtcaagatatctctggacgtggcccatggaatcgcccaccttcataccgagggaggagggaagttcatccacggcaacatcaaagcatcgaacgtcctcctatcgcagaacctcgacggctgcgtctccgagttcggcctggcacagatcatgaccaccccacagaccccgccgcggcccgtcgggtaccgggcgcccgaagtcctcgagaacaagaaatcgacccagcagtccgacgtctacagcttcggcgtcctgctcctcgaaatgctcacgggaaaagcccccctcaggtctcccgggcgcgaggacccctccgtcgagcaccttccgaggtgggtgcagtccgtggtccgtgaggagtggaccgccgaggtcttcgacgtggacttgctacggcaccccaacgtcgaggacgagatggtccagatgctccaggtcgcgatggcgtgcgtggccgctcaccccgaggagcggcccaagatggaggaagtgatcaggagggtcacggaggtccggaattcttactcttctgggacgaggacgcccctggaggacaagccatcggagactgcacgagcgccatgagggggtacagcgtagtttagcaggagacggtagctaggttgcatagtggattccttatagagcttcagcaaagttgatagccacctgcatagcgcagtttccctcgcgattcccgatcgtttccagtaaatctgttgtgttgtttcctctctttttttccccctgattctagcggtctggttgtcgatccatgccattgtattgttgttcagttaaatcagcagctcttctggttagtgttgcactgtaatttgacataatctttgcagcgtgattaatgaatttcatttgccttctgtttctgccagat

SEQ ID NO: 14432 - DNA, 4492 bp, Zea Mays
agattcgtcactgcggctatactgaaactgggtcaagcaatcttggatatcatcttgagctggaaagcaagaagaaacatgtctcttgttgttaagctacgatacatcttgaagttactatcagctgcttcttgggttgtgattttgcctgtaacttatgcatacacttggaagaatccaactggtcttgcaagagcaattaaaagttggcttggtgatggtcagaatcagccatcattatacattttggcagttgtgatttatttggcaccaaacttgctgtccgctacactatttcttttccctgtaattaggagagctcttgagagatcaaatcttaaagtcgtaacattcataatgtggtggtcgcagcctcgcttatttgttggaagaggaatgcatgagggcgcattctcccttttcaagtatacaatgttctgggtcttgcttttggccactaaattggttgtgagcttctatgtggagatcaaaccacttgtgcagccaacaaaagatataatgaaggagccaatacgaacatttaagtggcatgagtttttcccccatgcaaataacaacattggtgttgtcattgcgctttgggctcctattattcttgtctatttcatggatactcaaatttggtatgcaattttctcaacgctaattggtggtgtctatggggcttgtcgccgtcttggtgagataaggacattggggatgttgagatctcggttcgaatccctgcctaaggctttcaatcaatgcttgattccatctgacacaagcaaaaggagaggattccgggctgctttctccaaaccttctaagacatctgaggataccagagaacaagaaaaaatagccgcaagatttgctcagatttggaatttaattatcacaagcttccgtgaggaagatttgatagacgacagagagaaggacttgttacttgttccatactgcaaagatcgtgatatggatataatccaatggccaccattcctgcttgccagcaagattccaatagcattggatatggccgcagatagtggtggaaaagatcgtgatctaaagaagaggatgaaatcggatccatattttacttatgctatcaaggaatgctatgcttctttcaaaaacatcatatatgaactagtgatcgattcacgagagagaggttacatacaaaagatcttcgatgcggtggatgagcacatagcagaagagactttgataaaggagctgaacatgagtaaccttcctaccctaagcaagaagttcattgagctgcttgacttactggaaagtaacaacaaagaagatcatgatcagatcatcatattgttccaagacatgcttgaagtggttacaagggacataatggttgaccagctcagcgaactactggaattgatacatggtgcaaataataaaagatctgaaggaatgacatcacttgaccaacaagatcagttgttcacgaaagctattgattttcctgtaaagaaaacccaagcatggaatgaaaagataaaaaggcttcgacttttactcacggtgaaggaatcggctatggatgtccctacaaacctggatgctaggaggaggatatctttctttgctaattctctttttatgtcgatgccagatgctccaaaagtgcggcaaatgttgcccttctctgtcttgactccttattataaagaagatgttcttttctcttcacaagcactagcagaacagaatgaggacggagtttccatccttttttatttgcaaaaaatctacccagatgaatggaaaaattttcttgaaagggtgcattgtgagagtgaagatcaactccacgagactgagcattctgaagagcagcttcgcctttgggcatcataccggggacaaactttgacaagaactgtaagagggatgatgtactacagacaagctttagtccttcaggcttcccttgatatggccagagatgatgaccttatggagggttttagagcagctgacctgttatctgaatctgatgaatcaccactattgactcaatgcaaagctatagctgatatgaaattcacatatgttgtatcatgccagcaatacggtattcagaaacgttctggtgatccacatgcacaggatattctgagattgatgaccacttatccttcacttagggttgcgtacatcgatgaagtcgaagagcctagcaaagacaaaaataagaaaatagagaaggtttactactccgcattggtgaaggcagcagtaacgaagcctgatgatcctggccagaaacttgatcagggatatatataggataaagcttccaggaaatgcaatgctaggtgaaggaaaaccagagaaccagaaccatgccataattttcacacgaggtgaaggtctccaaaccatcgacatgaatcaggaacattatatggaggagactttgaaaatgaggaatttgttgcaagagtttctgaagaaacatgatggtgtgagatatccatcaatacttggtgtaagagaacacatcttcaccggaagcgtgtcttctcttgcatggttcatgtcaaaccaagaaacaagttttgtgaccattggacaacgtgtacttgccaatcctttgagagttcgatttcattatgggcatcctgatatctttgatcgacttttccacctcacacgtggaggtgtaagcaaagcttctaagattatcaatcttagtgaagacatatttgctggatttaattcaacactgcgtgaaggaaatgttacacatcatgaatacatgcaagttggcaagggcagagatgttggtctcaaccagatctcactatttgaagcaaaaatagcaaatggtaatggtgaacagacgctgagccgtgacgtgtaccgtcttggacatcgttttgactttttcagaatgttgtcctgctactatactactattggtttttacttcagcacaatgataacagtttggaccgtttatgtattcctctacgggcgcctgtatcttgtcctaagtggccttgatgaagcattagccactggaaagaggtttatacacaacgagcctctccaggttgctctagcttcacagtcttttgtgcagcttgggttcttgatggcgctgcctatgatgatggaaattggtctagagagaggattcagaactgcattgagtgactttgtacttatgcagctccagttagcatctgtgttcttcacattctctcttgggaccaaaactcactactacggaaccacactgctacatggaggagctgaatatagagctacagggcgtggatttgtggtgttccatgccaagtttgctgagaattatcgattgtattcgcgaagccattttgtgaagggcattgaactgatgattttgcttattgtgtatgaaatatttgggcagtcataccgaggagctattgcgtacattttcatcacattttccatgtggtttatggttgtcacctggctctttgccccattcctgtttaatccttctgggttcgagtggcagaaaattgtggatgactggactgactggaataagtggatcagtaaccgtggaggtattggggtgccgccagagaaaagttgggagtcatggtgggaaaaagagcaggagcctcttaggcattctggaaagcgtggcactgttcttgaaatagtgctttcgttgcgcttctttatttaccagtatggtcttgtttatcatttgaacatcaccactcacacgaagagcgttctggtttattgcatctcgtgggtcataatctttgtcattttgctcgtgatgaagactgtatcagttggcaggaggaaattcagtgcagagttccagcttgtgttccggctgatcaaggggctgatattcataacgtttatctctattatcataatcttgatagcaatcccacacatgacagttcaggacatctttgtttgcatccttgcgttcatgccaactggatggggtttgcttctgatagcacaaactatgaggtcagctatttcacatatggggctatggggatcggtcaaggcgcttgcccgaggctatgagatcatcatgggcttgctgttgttcaccccgatcgcattcctcgcttggttcccgtttgtttcggagttccagacaaggatgctgttcaaccaggccttcagtagaggtctgcagatttctcgtatcctaggcggacacaagaaagaccgggctgcacggaacaaggagtgagtagccgagcagcgtgagcctggtagtgctgacctacatacaattcaaccatgccccacgtggcattatacttgtactggttattatgccaggttgtatattgcaaggaaaggaattcatctctgctaacgtgccagattgtatgtgtggcagcaggtactcgatcggtgagcactcctatagcttttttattattatttatgggtaaagtcaaagaaactaagg

SEQ ID NO: 14433 - DNA, 52 bp, Zea Mays
accgtctgtcacacccgggttttaggggtccaaagcccgggcgcgaacataa

SEQ ID NO: 14434 - DNA, 172 bp, Zea Mays
ctgccaccaccgccacctcctcgtcggaaaccgctgtccccatcgccaccgtgctctccactaaacgacaaaccaactcccagatccagcaccgacaccatcgaaacaaacccattcctctcccagccaccatccctaccgacgagcacacacccgccacggccacctccgg

SEQ ID NO: 14435 - DNA, 528 bp, Zea Mays
ctcccacgcggacgcgctcgcagagtcgcaagagaagagccgcatcgcgtccattaggtccatagcatctggaggggacccgtctggcgtctgtctgggaccgggctgcccagccgctcgatcgacgtttggcgaggacgctgctccggtactccggttggttggaccggaggcgcggcgatgggggcgctgtcgcggccggaggaggtgctggcgctggtgaaattgcgggtggcagcggggcagatcaagcgtcagatcccgcccgaggaacactgggccttcgcctactccatgctccagaaggtctcccgcagcttcgccctcgtcatccagcagctcgggcccgaactccgcaatgccgtgtgcatcttctacctcgtgctccgtgccctcgacaccgttgaggatgacactagcatcccgaccgaggtgaaggtgcccatcctccaggaattttatcggcacgtctacaaccgcgactggcattattcataagaggtagtgaagcctgaatgatgtgtgtca

SEQ ID NO: 14436 - DNA, 611 bp, Zea Mays
cctcatggaaatccttacatctcagaaaggcccataggatccgctttgaattccacaaaggcgcagcagagcacacgttcatgagggttgacggagagccctggaagcagccccttcccaaggacgatgacacggttgtggtggaaatctctcaccttgggcaggtcaccatgctagcaaatgagccgtgcaggtccaagagcgtcaacgaccagtcgtcactgtcgccggcgcacgacagtcatggtgattacaatgatatcgctgaggaggacgaagacgagtgggaggacggcaggaggaagtttggggcggcagatacatttaagattcctgacgagattgacattgctcatttcagttgagctttgactagtgcatcgtcgtgtgcgttctgatcatacgagtatggtttggtttataaccatctcctttcttttgatttcatatatttgcgatatgattgttgcagccatgtgtaagtgaatcctaggtaaccaagtgctgcgttgctatatatgaccaatgtatgtatagattcagtggaacggtaaaaacacgcgaactctacggttttctccttaaaaataaaaaagaaaataaaataaaaa

SEQ ID NO: 14437 - DNA, 1319 bp, Zea Mays
ccgcagctatataaaaatgttctttcacttggctccctcgtcgtgtccgtggcaacgcagacactgccgccgctcccagagtttactctctactcctactctgctctctctctctctctctctctctctctctctctctctctctctctcatggcgtactcctcgagctgcgggacgaaaccctaatggagaaccggagccgccgccacgcccccgcgccgcagcgagctccgtctcaaggtacgactaccatgctggtttttggggtgtcatgggacgggaatgtattggcattgtccctccatttattagagaatttaattatccgatggccaaaaattgtgccggtggggatacaggtgtttttgtcaatggcagagaactgcatcaaagagatttagatttacttgtaggaagaggactaccacggacatctggcatgtcatattctattgagatgtcaggcaatgtaatcgatgaagcaactgggaaaaaactgcgcagtcttggaaaacttgctcctacgattgagaagttgaagcgtggttttggcatgcacgtccctgaagagttcagataagctggttctagtgctgaatattggctttgccaattatccactccacaaggctgaccatggggtgccaaaccaacgatttctgcgattgtgatgttaaatcctgcgattgtgataaatcgcaggtttctctgaattggactggggctctgcgagccaagataatgtggtccagtgacttaaccaccgattatagtatccctcctgctaatttcatcacttcaatggaagcgacgtttgctagtgactctagcctgccaggcagttcttaacttcactgctctgcctgtacatgttatattcctcaaatgtgtcgtctttatcagtacattgccccatcacaggcacagacatactgttagatgtatgagcaattgtcggcttgtaatttattggtagagctatgcttcccctaacatttatatgtatatatgtgctcatgattcttgaaactctggccgatatgattggctttcggctctcctgaaccctgttagagtcccattttgaagcctgaaacgcccctggccaccatactgtattgtgtatccaagcctgatggagtgatgggcacagtcttcgaaaccacgaatgtgtcactttcgcttcacaggtgactgacgtttagttgctgttgactcggcgacaatacagctatgccagtacactggtgtcaggtgataattgcttctggtttcggatgctggagttggagctatctgctgtacttgcactgattgag

SEQ ID NO: 14438 - DNA, 2228 bp, Zea Mays
acagctgcgtgcccacccgatcctcgcttgacaccggggaaatccacggcctgctgctacagagcatcgccgctgagcacactggggtgacagtgacaacccgtctccctctctctcgccagatccccctacctccgcgtctctctgtctactttttttttggggagggggggggggggggggggggggggggatccgcgtcgaggcgaggtctgctctggtcacctctggcgatcctccttcgcccattgcctccgccggtcaattcccttcgctggtactcagagatcggcgccctcctcccgtcttcccacgcttgcgggcactaactcagagtagtgtcgctcaatgaatttcctctaccgaactacgcagcctgcagcgactgagctgccaagaatttcagagcaagatcacaggaatgccttacaaaagacgacttcgacactggagggtctcattgcggacgattcacaccaccagccctcctctgcccacatcgaagatggagctgctaataatgggtccagggatatcagtggggattcttcatctgttgatttgaaaagcccagtcccactggggacacatgccgatgtcatggaagacgaaggatggatcacaattccatgcaaggcacttcctgaaagttggaacgacatatcagaaatggttcagttgcaggctctggaccgttccttcctttttccaggcgagcaggttcctatactggcgtgcctgtcagcttctaagcaagatgtacaggttatatccccctttagaattgctgcagtaatgtctaagaatggaacttctatgcaaaactttacaaataaatctagccctgtcagtgcaaatggtcatgataatggagcagctggagaaagtggctatcaggatgttgaacccaatggtgaagcatctccttcaggacatgatattttggagactcaatctctccttcagatggaggatcataagcagcagatcgaacatgtgttgcgaagatttagagaatcaaatttttttgtccggattgcggaatcagtggaacctctatggtccaagaaaagtgtaacttcaactacgatggcagatgaacgatcagataaccagggaaatagtaagagctcaaggagtaatgtttataataccatttctgataaaggggtttttgatggtaacacatctgggggagttgctcgagatgttgtcaagtgttattctctgcaaaatggagacatagtggttgttttgcaagtgaatgttagcgttaacaaattggaagatcctgtgcttgaagtccttcagtttgagaaaacctcttctgttcagacaccaaataatataagaccaccaccaatatctgaaagtcaagaatttatgcctgaaaaacctgcaaaaaccccagatattataaatgatgggcaactttcgtttagaggagttcctttagaacctgaacggtattctaatattgctcctactcatgcaaaagatatagtcgtattcatcgatgcaattactattgtatttgaggaggcatccaaaggaggtgctcctttgtctttaccaattgctagtattgaggttgggcatggtcacagcttgccaaacctagcactcaggaggggcgaggaacactcttttattctcaaaccagcaactatgtcctcaagggaacggaagaccaacagtcatgcacctctggccttatcactcccaacgatgaccggtgctactttaaatactcatacaccaaaggctggtgagccgtatgctgatctaagcgaccaatatgctgtactgatactaacactcgaagctactaatatgacatccgaaaaccttacattaactgtccttgctcctgaagcatctggttcttcttcagttgtatccttgaactcatctccaaccaccccaaatggttcttttgatggtgttaatgagtcatcaaaaagatctgggctgggaaaagatggaattggctttcgaagattgaattctgtcctagctactccaaaagaaggtgtgttcctgcccgctcaagcaccactgtcaaacttgagctgctaccattatcagatggaattatcacacttgatactctgcaaataaccgcaagggagaaaggccttgcttacattccggagcactccttggagatacatgccacctctgtactggaagcagaatcccagatcatggcccggattgaacggtag

SEQ ID NO: 14439 - DNA, 2256 bp, Zea Mays
gtcctcctcgcggcgaaaccctagcccgccccccatggacgatccctcctccgcctccaacaagcacaagcgcaagcgggggcgcaagcccaaggcgtcgccgcccttccccgaccgctcctccccctctccctcggccgcccccgctccggctgggcgtcgtggccgcaagccgcgacgtcacgaggcccccgccgacgcggacgccacgcgtccgccgtccccgccccgccgcggggagccgaagccggtggcaaacggaggcgatgtggtggcagtggcggagtcaggccccgcgagctgggatgaggtggtgagggtagtgccgtgcatggacgctgtggtcaaggtgttctgcgtgcacacggagcccaacttctcgctgccgtggcagcggaagcggcagtacagctccagcagcagcggatttatcatcggcggccgccgtgtcctcaccaatgctcactccgtggagcactatacccaggttaagcttaagaagcgcggctccgacaccaagtaccttgccaccgtcctggccatcggcacagagtgcgacattgcgctcttaactgtcaatgacgatgaattctgggaaggagtttcacctgttgagtttggaacattaccagcccttcaggatgcagttactgttgttggttatccaattggaggagataccatatccgtgacaagtggagtggtctctaggatagaaatactttcatacgttcatggttctacagaacttctaggattgcagatagatgcagctattaattcaggaaattcaggtggcccagcttttaatgataggggaaaatgtgtcggtatagcttttcagtctcttaaacatgaagatgcggagaacataggttatgtgataccgactccagttattacacatttcattgaggactacaaaaaatctggagaatacacaggctttcctatacttggagttgaatggcagaaaatggagaatccagatctccgcaaagcaatgggaatgaaaccagatcaaaagggtgttcgtgttagaagggtggagcccactgctccagaatctggatgcctacgaccatctgatattattcttagtttcgacggtgttgacattgctaatgatggaacagttcctttcaggcatggtgagcgcattggcttcagttatctggtttctcagaaatatactggagagaaagctcttgttaaagttctgcgtgattcaaaagttcatgaatttaaaataaggttagcaactcacaagcggcttgttgcggctcatgtgaagggcaggccaccgtcatattacatagttgctggctttgtttttgcagctatctctgttccatatcttcgatccgagtatggaaaagattatgaatatgatgcacctgtcaagttgttggtgaaacatttacatgcgatggcggaatcacctgatgaacagctagtggtggtatcacaggtgcttgtatcagatatcaatataggttatgaagaaatagtcaatactcaggtacttgctttcaatggccagcctgttaaaaatttaaagaacttggcgaccatggtggaaaattgcaaggatgaatttttgaagtttgatctggagtatgaccagattgttgtcctcgagacgaaaactgcaaaggctgctacccaggacattctgacgacgcactgtataccttctgcaacgtcggatgaccttaaggcctagtgggaggagaagggagcatgacgcagccctgggcctgagccagggccatcaggtgggccaatagtttgggccacaatttcggctgaattgattagcgcagcgtacgatccgtgatgaagaggaaccccaatgtttatctgtttaagttaaatatcttttgaggggttgtggatgtgagagtgctggctggtgtctaaagctccgccattatagaaggtttgagggactgtcactgtcagataacaataaactggagttgttacagacagagtcatcgtgaaaacgatagtgtctagtaagaagctgagtttgttttttctttacatgatttcattacaactacaccaaattattgacggggaaaggaatcataattggtccgtgatttcattacatccttggtgtctcaagcttgttccgcatagtacctgctatttgtcaacgatacttttacttctgcttgtaaagtatttgcatcttgtttctggacaagtggtacttaaaagatatttaagcgttgtgaaccaaag

SEQ ID NO: 14440 - DNA, 1724 bp, Zea Mays
gctattactacttcttcattttcattactagttctctctgctcctctttcacgaaccggcgaccgcgatcgctctagttctgctgccttgtccacttcactgaatgggtggagcctttgtagtttcgatatgcctcagttcattggtaatgtggaaagtacgaaaagaacatctacaaacgcaacgttagatcaatggcacgctagctagcggaacgtattttatggtttaacctatgcagctggttatttatagagaacagtcaacgtctcaacaaggtctttgcgtagacctgaatgccagcagcagacgcgaaacattacggccattttgaagtatataatactctgagagcaagaggagcaaaagttccgaaaaccagaaagaccccgatggctgtgtcaaatccgaaacaagttccagagtatgaactgaacccacttgaactggagtttcgaagaggagaggaggtcacaaagggtacatatctggcaaaatggtatggctcgaaagtttttgttaagatactagacaaagacagcttctcagatgctgaaagcataaatgcgttcaaacacgagcttaccttacttgagaaagcacgacatcccaatttggtccaatttgttggagctgtcacgcaaaatgtcccgatgatgattgtttcagagtaccatcaaaagggtgatttagccagttatattgagatgaaaggtcggctgaagcctcacaaagctataagatttgctcttgacattgcgaggggactgaattatctccatgagtgcaagcctgagccaatcattcatggaaatttgtcgccaaagttgcagaaacatcattcgggacgatgaaggacaacttaaggtggctggttttggatcactgagtttgagtaaagtttctgaagataaagtacaaatggctcagccagttacaaaatttgacaatgtatacatcgctcccgaggtctacaaaaacgaaccatttgacagaagtgtagatgtatttgcatttggtctcattctttatgagatgattgaaggagctcctgcttttcacccaaagccacaagaggaagcagctaagatgatttgcttagaggggctgagaccaccattcaagaataaaccgaaatactaccccagtgatgtgaaagagttgatacaagaatgctgggatccgatgccttccgtcaggccaacattcgcggagataattgtgcgcctgaacaagatacatgcgaactgtgctaagcagggtagctggagagacaccttcaagcttccatggaaacaaactggagagagataattgtaaagccccgcgaggctgccgtgtcaagatttcgccccttcccttcagcaagtgtgagtaaacacgagtcaagaaacgtacagagttacaaacagaaaggcaaagttcctatttagttcaggtttcagaccagtttgtgctttgtagcctgtataactgtatctaggcttatgccaccggcccaatttctcttgagctatcttcatccaaacgggaacaacagagtattaatcagtattctgaacattcagggcgtgcctattccttttgaactcctacgtgaacgttgtaaattctgcacgatttcctttcgtgccttttgtgtacgttgtgctgaaagagaaccagaggcatacgcatatcccgagaaaatgctgcagcgacgaaggaaaagcacagcgaagaaa

SEQ ID NO: 14441 - DNA, 1690 bp, Zea Mays
ggcatcagcacagctccgccagcctcggccacggccagcctcgctcctcactcactcccccagccagcgttacaataggaaggagggaggagcaacctagcggcagccacagcagcagcgtagctgtagccacagcagagcagcggcggctgcgttcagacgaccactacttgttcctcctcctcctcctgctccttcccccaaattccacccccctcaaataataaacaaatcaaagcaagcgaggaggtgagcagcgtccgcaagggaacagggaccgcgggggttgcaggcttgcagccgtgggggaggggagcagatccgcgagatccggcgcgccgccgatgacgagcggcgccgggggagccgcggccgggatcgggggcaccagggtgcccacgtggagggagcgcgagaacaaccgccgcagggagcgccggcgccgcgcgatcgccgccaagatcttcgccggcctcagggcctacggcaactacaacctgcccaagcactgcgacaacaacgaggtgctcaaggcgctctgcaacgaggccggctggaccgtcgagcccgacggcaccacctaccgcaagggatgtaaacctctggcaacagagcgtccagatccaattgggaggtctgcatcaccaagcccctgctcttcatatcaaccaagtccgcgagcctcatacaacccaagcgcggcatcctcctcgttcccaagctctgggtcctcctcccacattactcttggcgggagcaacttcatgggaggcgtcgagggcagctcccttatcccgtggctaaagaacctctcgtcgagctcctcgttcgcctcctcctccaagttcccgcagcttcaccacctctacttcaacggcggttccatcagcgcgccggtgacgcctccatccagctctccaacccgcacgcctcgcatcaagactgactgggagaacccgagtgttcagccaccgtgggctggggcgaactacgcgtctcttcccaactcccagccgccgagccctgggcaccaggttgctccggacccggcgtggctagccgggttccagatttcgtctgctggcccttcgtctccaacttacagccttgtggctccgaatccgtttggtatcttcaaggagaccatcgtcagcacctcaagaatgtgcacccctgggcagagtggaacgtgctctcctgtaatgggcggtgcgccgatccatcacgatgtccagatggctgatggtgccccagatgacttcgccttcgggagcagcagcaacggcaacaacgagtcgcctggtctcgtgaaggcatgggagggggaacggatacacgaggagtgcgcctcggacgagcatgagctggagctcacccttgggagctcaaagactcgtgcagatccttcctgatcatgctgcaagagacaagtcttcacctgttttttttttttactttcatctttattcggacggtgctcctctgctttatgagttcaatgtttgtagaaagagggaagggattcagagaccttatcctgctcctctggagatgatatccatcctctttcaaggatatgaactttattctagcttaagcaaattgttaacttatttatttcattttttcttcatatcctttttttttttgaaaaaatggtttccttttcatttctaacgagaattgtcta

SEQ ID NO: 14442 - DNA, 949 bp, Zea Mays
tgccaagtaaacttggccttcgtttggttggatgccgaagtgttgatggccagccaagccaaattctgttcaacaacaaaaaaaacttaagtgaactcaggtgattaaattaagtacacaaaatggtgttccgtcggagtacacagatatgatctttcttcaaacaaatctggataaagtagaaggaacacaaaaggtcaagcaaaaactgaaaggacacaaaggcagagatgagcaacagatttatggcctgaaactgggattcggtaacaaagatgctacacgggaaaatctcatcacaggatttggagacatgaatccggcagagaaatctgtgatgctccaaaagggatcgggctgttgcagccgcgtcgcagactgcctctgctgcatgtgctgcatcaaggcgtgcaacaggatgaacgaccagtgcgccgttctgatggcacagatctgcgcggctctagcgtgcctcggctgctacgagtgttgtgcagaggtgtgctgtggagggtcggagtcgtagtaggaagtgttttgtatatttgtatggaagattggagaattggagtgtacataatagagttcgcggaagcccggttctggcccggctcttggttgtatccgtccaaacgttctataatttgctcgttacatgcaatgcaaaagagggatggcacacttgagtagtattttgctgttgtgcagtgcaaacgagggatgtatctgctggcagttcgtgtgcttggagtcggaggtgatataaaataacagttatcattagatctagatcggatgtaccagatcgtttgattgcatgcttgcatcaggataagtgattgcataggatattttcccgacttgttatgctattaagtagctaaaattagggtacaggacccgctaaatttagaggacgtagatctggagggagtagaggacgtcctcg

SEQ ID NO: 14443 - DNA, 1063 bp, Zea Mays
tttttgttcttacttggatgaatttaagaaaaagcccgttttggtttctgtgcatttacatatttgttcggtgaggacatcatgtggagttttgcatcaaatgccatagctggaagcttaaagaaaaaagcacaaccctcaaaatgcagcatatccaatgcagattattctgatgatgaagtttcttcatgtacaagcagagaggaaggccttgattgtccaatatgctgggaatccttcaacctcgtggagaatgttccctatgtcttgtggtgtggccacacaatgtgcaaaaactgcatccttggtcttcactgggcagttgtcaagttcccgtcccttcctatccagctgcctttgttcatctcatgcccctggtgcaacctgctgtctttccgcctggtttacaagggcaacctcaggttcccacgcaagaactactttctgctctggatggtcgagagcatgaacggtgggagagcaaaattccattccactaaccatgacgagcatcattccacgtggcattcaagtgccggcacaagctccagccatcaacagcgaagaaatgctgctgtaggatcagagagctcttctggcagagagacaggcgtaggccgcaacattttccacaccgacaacattagtgcttctctgcaaaagcttatggtgtgcttcatgcagctgacggccaagttcccactcgtgataatctttctgctgatagtcctttatgctgtccctgcaagtgctgctgttctggttctctacgcccttgtcacgtttttgtttgcactgccctcatttttgatcctctactttgcctaccccagcttggattggcttgtcagagagatcttcgcttaattcgtgctgtctgaaatgtccgcgcagtttgtatccctgcgacaaatgatatatattggtatatgtattccatgggccacctgccctcgtaggccctgtatagtttcttcttattctctgtccttgtagcactctatttctgttgtaactaacagcttattaaaaatgctctgcaatgcttttatttgtggttcta

SEQ ID NO: 14444 - DNA, 766 bp, Zea Mays
catcagtgtaaaattcagaatgcaaactcaagagaggtgaagctaaacttctctcagaagattgggaaggagcagttcaggatttaaaagaggccgcccagaaatctccacaggacatgggtatccgtgaagcacttatgagagctgaaaagcagcttaagttgagcaaaagaaaagactggtataaaatccttggtgtttcaaagacagcatcagctgcggagataaaacgcgcctacaaaaagctggcgttgcagtggcatccagataaaaacgtggataaccgggagaaagcagaaaacatgtttcgagaaattgctgctgcttatgaggtgcttggtgatgaagacaaacgtgtaaggtatgaccgtggagaggatgtggaggagatgaatatgggaggcgggggtggcttcaatccttttgggggaggcggccagcagtacacgtttcaatacgacggtggcttccccggcggcggcttccctggaggtggcggctttcagttcaactttggataaactgtgccatgcaccatgacattttcttggcactggaattgttttaggaattcttaacggcagctggtagctattcttaggcaggctgagactgttctactatgttacataataatgacaagtgttacgattttttccttcatcatttgtttcctgcttacatacacacgcacacattgtctctctgatacatcagttgaatgtaagaatggaaataaagttactttttttttcttggggaggat

SEQ ID NO: 14445 - DNA, 1200 bp, Zea Mays
gcatgcagagtgcagtagaacggcatcagttacactagtagtgctcatctcgctggtactgctgagctgaccaccgccgatccttccaagatggcgaggcagggtgtcgtcgcttccatgcatgcgctggcattgcttctcggagcattcgcagccattcctacaggagtccaatccatcggcgtgtgctacggcgtgaacggcgacaacctgcccccggcgagcgacgtggtgcagctgtaccagtccaacggcatcaacctgatgcgcatctacttcccggacgccaacgcgctgaacgcgctgagcggcaccagcatcgggctcatcatggacgtgcccaacacggacctcgcctcgctggcctccgacccgagcgcggcggccgcctgggtgcagagcaacgtgcaggcgttcccgtcggtcagcttccgctacatcgccgtgggcaacgaggcctccggcggggacaccggcagcatccttcccgccatgaagaacctcaacgcggcgctggccaacgccggcctgggcggcagcatcaaggtgtccacggcggtgcagagcgacgtcacccagggcttcccgccgtcgcagggcaccttctcgcagggctacatggcgcccatcgcgcagtacctgcagagcaccggcgccccgctgctgtgcaacgtctacccctacttctcctacatcggcaacccggcccagatcgacctcagctacgcgctcttcacctcgccgggcaccgtcgtgcaggacggcagcaacgcgtaccagaacctcttcgacgcgctcgtcgacaccttcgtctccgcgctccagaacgccggcgccggcaacgtcccagtcgtcgtgtccgagagcggctggccgtccgccgggggcgacgccgccaccgcggccaacgcgcagacctacaaccagaacctcatcaaccacgtcggccagggcacgcccaagcgccctggccccatcgagacctacatcttcgccatgttcaacgaggaccagaagacgggagccgagtcggagaggcacttcggcctcttcaacccggacaaatcgccggcgtaccccatcaatttctcctaattcctaaacaagacgccgaggtccattccaagacatttataaggcaatacacacacatagatatatacatacacatacatacgggagaaagtagaataaataaac

SEQ ID NO: 14446 - DNA, 1269 bp, Zea Mays
gtcgcgcaccacccgcagttaatccgagccgtctatcgcgcttctacacggccgaccttctgtgacagttcgggcaccgacgtccgtctccgtacttccggctgtgtgcgaactgcgaacgcgtgatcgggaccctccgcaaacgcgacgcgaaggtgccggaggcggcgacagcggcagcgacgacgacgagccacaggaatactacaccggtggcgagaagagtggaatgcttgttcaagatccaacaagaagaaatgatgtggatgcgatatttgaacaagccagacaagcgggtatcaaaggaatgcctcctcctcttggtggcgagtcttccagctctaggagctttacagggactggccgacttcttacaggggagacaatatcatctgctgcacctcaggaaccagtaccaattcgagtacgccacaatatacatttgtggaacaatggctttagtgtggatgatggtccactgagatactacgacgatcctgaaaatgcagagttccttgagagccttaagatgtcaaagtgccccaaggagctggtgcctactgatggagaacatgttgatgcgtctgttattagaaggatggaagattacagggaacctgtaaggcctcgatcagctttccagggtgttggaagaacccttggtggtggaccttccccagatgagagcgcaacagctgctcctgcatcagcggcccctgctgcttcgaggtccgctggcgttgtcgtggatgactcccagccatttacgtccatacagctgaggctggctgacggcactcgcatggtcgcccggttcaacatgcaccacaccgtgggagacatcaggtcctttatagacgcagctcggcctggagctgcaaggccttatcagctgcagacgggtttccctcccaagcagctggctgacccaacgcagaccgtggagcaagctgggcttgcaaactctgttatcatgcagaagatgtaaatgcttcggctggcaacctggggagctcggatgcatcgtactgcatcttctgaaaaccgtaatattatggttgatcatgttatcagatactgctctggtgcatcattctcattcatggttacttacagtagcatctggtgcctcgttgggagcacaggagtttataattcatctaggaactgaagtatgctttctgatttacggcagagcgccgaatcgatggttataagttcagcgatgagttaccgcaatgaccaaatgcccaggccagggtgtgtgcg

SEQ ID NO: 14447 - DNA, 846 bp, Zea Mays
cagcttcctccaatgtgccatgaccgtgacctagactttggaggacaaacttaaaggaaaacctgggtatgaacatctgaacgagccactgcatatattaatcgaggctgagttaccagcgaacattgttgatacaagactgagacaggcacaagaagtcatggaggaattgctaaagccagtggacgagtcacaagatttgtacaagaggcaacagctgagggagttggctatgctaaactctactctgagagaagacagtcctcaccctggaagtgtctcccctttcagcaacggcggcatgaagcgcgcaaaaccaagccagtagagaaaggtttcaggctctcctccaccctcctccactccagtcgttcttggtgcagcaccagcaaggtgtgcctgcccttgaacctgcgctgcttcgtgtcgtgggtgcttgtgtaagaaaaaaaaggtatatgcattttgctgctgctggacggacaggtggtcgagacgaggaggaaatcgctggtcgttgaactgtctccatcttcggtggatccggccattttgctgctgtaaggtgatgggcattcgttctattcgttactgactgttgaccagattatgatgccgtggtttcaggggagactagctatgcctatggccctgataattagtgtgagctggttcgtttaggtgtttaattagtttgtattattattattcgcgttacgttgtggagtagtagcaaacgtcacagctggtgatgcactccgctctgacagtttgatgaggacagctttgaataaaccatgtgaattcagaatgttactgaaacggtgggacgtccgttctatgcct

SEQ ID NO: 14448 - DNA, 4858 bp, Zea Mays
gctcattgaggataagctgcggttactgatcatctagtcccatgtccaccgccgccgtgctcccgtcgccggcgtcgaccagacacccggccggcggtggcgccctgacggcggaccgcgcagcggcgctactggcgggctgcgcgtccgcaagccgcgccgccgagatccacgccgcggcggtgcgcgccagcgtggaccaggacaaagcagtggccttccggctccagcgcgcgtacgcggcgtccggccgcctggacctagccgtggcgctcctccggcgcacgcccgacccgaccgccgtcttctacacgtccgccatccacgcgcactcctcccggggcctccaccgcgcggcgctggcgctcctctccgagatgctgctgtcccaccacggcctcctccccaccgcgcacaccctctcggcctccctcccggcgtgcggcggcctcgcggtcgggcgcgcgctgcacgggtacgccgtgaagctggcgctctccggcgagccgtacgtggccaccgcgctgctgggcatgtacgcgcgcgccggggaggccgccgcggcgcgcgcgctgttcgacgggatgcggccggacccgcacgtggtgtcggtgacggcgatgctgagctgctacgccaagatgggccagctggacgacgcgcgcggcctgttcgacgcgctgccccgcaaggacctggtctgctggaacgccatgatggacgggtacacgcagcacgggcggcccagcgaggcgctccggctgttccggcagatgctgaggtccggggtggagccagacgaggtgtcggtggtgctggcgctctccgcggtggcgcagctgggcacggcggagtccgggaggtggctccactcgttcgtggcgaacggcggccgccgggcccgggtgcggctcaacgccagggtcggcacggcgctcgtcgacatgtactacaagtgcgggagcctggaggaggccgtggccgtgttccgcgacctcggcggcggcggcgacagggacgtggtggcgtggaacgccatgatcaacgggtacgcgatgcacgggcgcagccgggaggcgctggaggcgttcgggcagctgcgggcgcaggggctctggccgaccgacatcaccttcatcggcgtgctgaacgcctgcagccactccgggctcgtcgacgagggccgcgcgctgttggcggcaatggaggaagagtacggcatcgtgcccaaggtggagcactacggctgcatggtggaccttctgggccgcgccgggcgcgtcgaggaagcgttcgacctggtgcggagcatgaaggcgaagcccgacgcggcgatgtgggcgtcgctcctcggcgcctgccggctgcacaagaacctggcgctggggcagcgcgtcgccgactacctcgtggccaacgggctggccaactccggcacgtacgtgctgctgtcgaacatgtacgcggcggcggggaagtggcgggaggtggggcgggtgcggtcgatgatgagggcgagcggcgtgcagaaggagcccgggtgcagcgccgtggaggtcgggcggcgggtggtggagttcgttgccggggaccggagccacccgcggtcggcggagatctacgccaagctagaggaggtgaacagcatcgcgagggcgcgcgggcacgtgccgcacaccgagctggtgctgcacgacctcgacgacgcggccaaggagagggcgctggcggtgcacagcgagaagctcgcgctggcgttcgggctcattagcacgcctccccggacgggcatcaagatcgtgaagaacctccgcgcgtgcgccgactgccacgccgtgctgaagctggtgtcggaggcgacggggaggaagatcgtgttcagggacaggaacaggttccaccatttcgtcgacgggtcgtgcagctgtggggattactggtgaatgctgctagctcttgtgcacaaagtttgcagaaccaaccaaaaaacaaagaaaaagacattgccatccgtcctaaaattagtaaaaccggaggctttttttttttttgcgctggctggttgcaattgcaaagcagcggcgattaatgcagaccaccaaatgaatggcaagcagggatccctatttattaggccgatggaagcagaagctccagtcagtgagggacgaaagaagtcgcctaattctttcgatcgaattaggcgccttcttcgtcccacgctccgtctttatttgtaatctgaagcttacaggaacatttgagtggatcatggacggattggtaggcctcttgaaagtccgggtggtgaggggcatcaaccttgcctaccgcgacgcaagaggcagcgatccgtatgtcgtcctacgacttggcaagaagaaacttaagacgagcgtgaagaagagatctgtgaaccccatctggcacgaggagctaactctgaccgtcacagatcccagcctagctctgaagctggaggtgttcgacaaggacacgttcagcagggacgacccgatgggggacgcggagatcgacgtggcgccgctggtggaggcggcgaacgcgagcccggaggcgagcctgaggaacggcgccatcatcctgtcggtgcggccgagcgccacgaactgcctcgccgacgagagccacgtgtgctggaggaacggcaagttcgcgcaggacatgatcctccgcctcaggaacgtggagagcggggagattcagctgcagctgcagtgggtcagcatccctcctgctgcagccagcaggtgaaggaaggaagaacaggcgacacgaagcaatcgcattttcacctcttgtgaatgtcggattgtaaacttaatggggtctgggtcagtcagggtagttcatgtgttgcctattaatgtacagttggggacagcatgaaatccaagccaagtcactcaagtgttgtaggatccttcctgttcctgtttgtgtctggtctacaacaaaaatggtgcagtgcagtgcagccgtgcaggggataaaaaggccctccagatccagacaaaaggctggaggagtggtaggataccataccatgtggcacaatggaatgcatgcaatgcaagctgagctgagtatagaacaagcttcgttctcgtcagtgccagtgcacgctgatggggcgggcagttcaggttcagtgctgaatgaattgcaaaagctgcatgatctggcacgggtcgtcgtcgtctcgtcgccggccgccgggggcttctccaccgcaggcgcggcgatatcccaaaccagtggccgttgatccgcgtctcctcttatcctctcccacccaaaattctccacggtcgcaacgcgacaagttcacattatttattccaaacctttctgcctccagccagcagtcagcacagcagcggtagagtacaaatcctcgcctgcccccctgcttcctgcttttcgtcctcatccacccacaggccacagtccactcacaactcccccggaacggcggcggcggcgacggcggagaaacctctcgactacgaggagctgaacgagaacgtcaagagggtgcagtacgcggtgcgcggggagctgtacctccgcgcctccgagctgcagaaggagggcaagaagatcatcttcaccaacgtcggcaacccgcacgccctcggccagaaaccgctcaccttcccgcgccaggtggtggcgctgtgccaggctccgttcctcctcgacgatccccacgtcggcctcatgttcccggcggacgccatcgctagggccaagcactatctcgccatggcgcccggcggtctaggtgcgtacagtgactcccgcggcatcccgggaatcaggaaggaagttgccgacttcatccacaagcgtgatggatatcccagtgatccggaactcatctacctcacagacggtgccagcaaaggtgtgatgcagatcctgaacaccatcattagaaacgagatggacgggatcttggtccctgttcctcagtacccactttattccgccaccatttccctctatggtggttctctggtcccgtactacttggaagaagaggctaactggagcctcgactttgtgaatatccggcaaacagtggcggaggcacggtccaagggaatctctgttcgagcgatggtgatgataaatccaggaaatcccactggccaatgccttagtgaagcgaatataaaggaacttctgcaattttgctaccatgaaaacttagttctgcttgcagatgaagtgtatcaacagaacatttatcaagatgagcggccatttataagcgcaagaaaggttatgttcgacatgggtccgccaataagcagtgagcttcaggttgtttctttccacactgtgtcgaaagggtactggggagagtgcggacaacgtggtggatacttcgaaatgacaaatcttcctcccaagacagtagatgagatctacaaggttgcatcaatagcactgagtccaaacgttcctgggcaaatttttatgggagtaatggttaaccctcctaaacctggagatatctcgtacctgaagttcgctgctgaaagcaagtccatccatgaatctttgaggaggagagcacgcatgatgacagatggtttcaacagttgccgaaacgtcgtgtgcaatttcactgaaggagctatgtactctttcccccaaatacgtctgccaccgagagctattgaggcggcaagaagagccggcaaatcagcggacgtcttctactgcctcaagctcctggaggcgacaggaatctccactgtcccgggctctggttttgggcaaaaggaaggagtgagaaacctgagaggacgttactgaagtggtg

SEQ ID NO: 14449 - DNA, 359 bp, Zea Mays
tgggtatcaaaatacggaactttgtattgtctcccatgtggacacatctgcttcttgagctgctatgctatcttaatgggcacgaaggccccctccagaaaaataatgaacaaacgcccgatcataattctcaagcactggtagacggtgcaaagcatgctcttgttgaaagaagcaatctcaatggcgggggtacaaaactggatatggtgggatctggttggggcattctatttgtagaaaaacttgtaccaatcattgccaaccttttcttggaggctccaccaaatgaaaggtttagtgtctctcctgaagtcattcaaggtcttggaaggtatttgctttttatgatttatatc

SEQ ID NO: 14450 - DNA, 1608 bp, Zea Mays
ctcccaccctcccatcgcgcggcgatttgtttgcttcgtgttggagccgtgctctaagaattggcgaccttggcctccgcccccgcggcgcggaggagtcaactgtggtagcaaccaccgcggaggctgcaagccttcggtaagggaggaaagttgacttgttggaagccggtccagggccgcgatgacgtcgaccgccgccggcgcgtcgtcgtcggcggcgaagagcgagtcctacctgcgggccgacaagatcgacctcgagagcctggacatccagctggagaagcagctggccaagacctgggagaagcacaaggggtcgtacaaccaggggcccagggaggactgggagatcgacctcgccaagctcgagattcgctacgtcatagcgcagggcacctacggcacggtgtatcgcggcacgtatgatgggcaggacgtcgcagtaaaactattggattggggtgaagatggctttgcgtcagaaactgaaactgccacactgcgagcatcatttaagcaggaggttgctgtctggcatgagctcaaccatccgaatgttacaaagtttgttggtgcatcaatgggtactacagaccttaagattccagccaatagttctaacagtggtgggcgcactgagctgccgccaagagcatgttgtgttgtggtcgaatatctcgctggaggatcactgaagcagtatttaataaagaacaggcgaaggaagcttgcatacaaggttgttgttcagatagcactggatcttgccagaggattgaactatctacattcaagaaagatagtacatcgggatgtaaaaactgaaaatatgctgctcgatacacagcgaaaccttaagattgctgattttggtgttgctcgtgttgaggctcagaatccaaaggacatgacaggcgcgactgggacacttggctacatggccccagaggtgcttgaaggcaagccatacaacagaaagtgtgatgtctacagttttggcatatgcttatgggaaatatactgctgtgacatgccatatccagacctcagttttgcagacgtctcgtccgccgtcgttcaccagaacctgcggcctgacatccctcgctgctgcccaagcccaatggcgaacatcatgcggaagtgctgggacgcaaacccggataagcgccctgacatggacgacgtggtgcggttcctggaggccctcgacacgagcaagggcggtggcatgataccagaaggccaggcaggcgggtgcttgtgtttcttcagagcccgtggtccttagaaccaaccaaccctttccagccatcctctacttgtctctgccctactacagtattggagccagatgtaggcctttgttgttcatcggataggggattgcagataacttgatgacaatctttgtgattggttgacacttgttatacgttctatagtgatgtgaataccagtgaggagtccataatacagagttatttcaaccagttcatggttgcatgctcttaatggtttgtttgtggaaatcacatactgggccatcattgattaactgggagaacatatgtgatacacgcattcgccatcgttttctcg

SEQ ID NO: 14451 - DNA, 2157 bp, Zea Mays
taccaaaaattaagatgatatttggtaggatgtgccaaaaaacgtgtagaccatcaactctgttttatttaacaaaattattcaattgtgtgttgtccagtccttgtttagagttagtcagaggacaatatttcattgaagtttcagcaacaaatatggaatgctttttttttggatattttgggataaaggattcatgttggcttaagtgtcaatcttctactagcaaatcaatttctagtgaaattaccgtgggaacatgttggcctcttcaattgaattttcaaatgagtaatggatttctattacaggatagagatcctttgccatgacataaatgtgcatgtcccacaccatatttctccaagaattccaagctataaccttcgtgctgcttatgattccatcaaacagaactggggcaagtatgtcaatgaagccaactggaattggcgattgatgaagacgatactgacgagatgccatgtgtacgacaaggagagatactatgttccgttcgatgagctcgcgcctcaggagtcccaaccaatcaaattccttaggaagttcatgccagattacgcatgatgccatcatcacagctgttgactagttgagattattcagtattgtcggcacaggtggacagtcacattttcagtgattacgcatgtcccaaaattttgactggaatactccatgttacactattattcgtgcagtaggaaagcacgtagcgtaccaaaatatttatacttcaggaaatagacaaagacattggtgatgaaaacggacagaatcgtgtggaaaacatctcttctcttgtcatttctatattttttttccggaaacagaaacacgttcaaaattcccggaattgaaaacagggttgggatatgtggttgttcggaaacaaactaatttactaataaaatacgacttgcacaggcctgctgggccgccgcaacctaagaatggacaccgtcaaatgagcccaccccttaataaaccctagcccgcctccgccgccctataatccgacgccggacgccccatgatttcgctttcttcttcccgtcgagacccaaccataccagcggcgccgcaggctgacgaggaggcggagtagagtggccggactacctcgacacctccactgcaaccatgggtatctcacgtgattcgatgcacaagcgccgtgccaccggtggaaagcagaaggcgtggcgcaagaagcgaaagtatgagcttggccgtcagcctgctaacaccaaactgtctagcaataagacagtgaggagggtccgtgtccgtggaggcaacgtgaagtggagggctctccgattggatacaggtaactactcgtggggaagtgaggctcttacccgcaagacccgcatcctggatgtggtctataatgcatcaaacaatgagcttgtgaggactcagactcttgtgaagagcgccattgtacaagttgatgctgctccattcaagcagtggtacctcactcactatggagtggacatcggtaggaagaagaaggtgcctgttgctaagaaggatgcgactgagggacaagagggtgaggctatagctgaggaaacaaagaagagtaaccatgtgcagaggaagattgagaagcgacagcaggaccgtgcactcgacactcatattgaagagcaatttggcagtgggagattgttggcctgcatttctgcccgtcctgggcagtgtggccgagctgatggctacatccttgagggtaaagagctcgagttctacatgaagaagctccagaggaagaagggcaagggtgttgcatcttagagcattcttttagctagaactgcaaaatatcttctacttgggggttttgttgttagtctttatgcatatcatttgcggacctgatgaacacttcataagtgaatcaactctcgattccaagaattgataattttcacatgcggtggttgtaattgtgatatttaggtttgctatttattgaaacttcttgtctaaagcagttttagtttaccttgaagatgattgttagaaacgagatcctatccaatctatattgctgtttggttttcactttatagctgctaacatttgattgcatagtaagaactggtcacgcgtacgacaatc

SEQ ID NO: 14452 - DNA, 2669 bp, Zea Mays
ctcgcatcccgtggctctcgcgccccctccacccctccccttcccctgccactctccgcctctggcctagcgcccccgcccgctcgatccgcctagtaggtaacggcgaggctcaccgcgtccgcactcgcccgtgaatccgtgatttctcccaccttcctttcagcgccgctctcccaccttcctttcagcgccgcccgccgtccttttcgatcagtatttaaaaatcaagatggttaacttcgggaagaaattgatggcagatcaaattccagaatggaaaggatattatatcaattacaagttgatgaagaagaaagttaaacagtatggccagcagctccagcagggggaaaaagatcgtcgtcgggttctgaaggatttctcgaagatgcttgatgatcagatagagaagatcgtcctgtttctgttggaacaacaaggactattggcaagcaggattgagaagttaggaaagcaaagggcaatactacaagagcagccagatatatctggcattgctgagttacgagaagcttatagggaagttggtatcaatctcatcaaacttctcaagttcgttgaccttaatgcaactggcattcggaaaatcttgaagaagtttgataagcgttttggctatagatttactgattactatgtgacaagtagatcgaatcacccttactctcagctgcaacaggtctttaagcatgtggaccccatcattgatatgataaattcttcagttgataagttgacaaggtcaactaattttcttcgctttttggggcaacatgccatgattgtggatgaggagtctcctagcactgcaggagaggaagaaatagaagatcagaaataccatttcatgtcccttatgctgaacctggtgaacacattcctttacatggtcaacacgtacatcattgtgccaactgcagatgactattcagtgagccttggggcagcttctactgtttgtggtgtggtcattggttcaatggctgttgcgcaaatattttcctctatttacttcagtgcatggtccaacaagtcatatttcaaaccgcttgttttcagtagcattgttttgttcttggggaatatatgctatgctatggcatatgatatgaagtctctaacggtccttattatcggccgtttactctgtgggatgggttctgcaagagctgtcaatcgccgatatattagtgattgtgtccctgcaaggatacgcatgcaagcttcggctggatttgttagcgcaagtgcacttggcatggcctgtgggccagcgctagctggtttacttcagtggaaattcaaggtctacatggttacattcaatcaatcgactctaccgggttgggtgatggcagttgcatggctattgtatttgatttggctatggttctcattcaaagaaccgaaccgtgctaccgaggtgaatgaagccccacaaaatcctgcttctggacaaactgttgatattggacgactagagaatggaattgcacagcctctgctcaaggattccgtggataaacaaaatgaagatgaagacgaagttgatgatattgaagaaactgcagatgattctcgcaaacctgcaacatcaattggctcagcataccgattgcttaccccgtcagtgaaggtccagttgttgatatacttcatgctcaaatacgcaatggagattttgctttcggagtcgagtgttatcaccaatcactatttcagttggaatacaagcgcagtggcaatatttctagcaatcctagggttgacagtccttcctgtaaacgctgttgttggaacatacatcagcaatatgtttgaggacaggcaactcctcatggtgtctcaaattacgttgctagtaggcattatcttcagcttcaaagtcacgagcacatactatgtcgtccagtatgttgtctcagcactggtcacatttgtttctgccgaagttcttgaaggcgtcaacctttccctcctatcgagcgtgatgtcgtcccgcctctcccgtggcacgtacaacggtggtctcctctcgacggaggctgggaccctggccagggtggtcgccgactgcaccatcaccgcggcggggtacctgggcgtggggaagctcctcaacgtcaccctgctaccgtcgctggtgatatgtgttgcgtccatcgcctgcaccttcctgacgtacaactcgcttttctgatggagcttcgcgacgtatttgtgtcgtcatgattcgttccaaatcaaggcagctgggagaccgccgttgccattgcccgaaggggctgttgtgttattatattatatatgtgcgtcgatttgattgctgtaaattgacaaaatgatggcagccactggccttgccctgcaaaattttgatcgcttatgtccgtgacgttgtcaatgctatgttgtgttgacgtgttggtccaaactgtaattatgctactctcgactgatctgatctccgctgcgatgcggttttgagagtggagtcgtacgagagtggatcggcgtttttgtccattgggcttgattggatttatgagataaatagtttgtcggctaattttagtaccttttcgattattagctgaagggctactaaattgtttgttcattagtcatttgagattactgatagg

SEQ ID NO: 14453 - DNA, 853 bp, Zea Mays
acatcaagatgctacaagggtcctgaactacttgtggatttgttagattatgattactcattggatttgtggagtcttggttgcatgttcgcagcaatgatattccgagtggaccctttctttagtggccaggataattatgatcaattagtgaaaatagctgaggttcttggcacaggagacctgtataactaccttgaaaaatatggcctccagcttgacccacagcttgaaagacttattggaagacataataggaaaccatggcccaagtttgtgaatgctaggaacagacaccttgcaacacctgaggctattgatttggtagataaactcctccggtatgatcaccagaaaaggcctacagccaaggaaaccatggctcacccgtatttcaatccagtaagaagccccgaaagcaagacgaattcacaatagctaattagctataaggtgcacaaaggtgcacattttttttcacccccaagttgcctgcaaggcaaatgtggcatatttgacggtctttcccttttgaagtagagtgaaagatgtagagaaatacttgatactaaggttatgcttacccatcctcttacccatcctcttacccatatttaaattccattctgcgaacaataagtctacgttgcaaaatagtattttggatgaccatgagtgaactgctggcagttgcattctgaatgatgtcttggtcagcattacatttttttttggtgccagttattctcttcctgccgttctggtgcgaaaaaaatattttaccaatgggcttgaacacagcgtgactgatttatggccattaaattcctcaagtcacatttcaatgttaaca

SEQ ID NO: 14454 - DNA, 106 bp, Zea Mays
ttaccttaacaagctccacgtcattgatcattgctgcagtatgtaatgcagttctacagtgtggatcatcttgtgctgtaggatcagcaccagcagcaagcaatat

SEQ ID NO: 14455 - DNA, 779 bp, Zea Mays
atggcatcttttgttacataactctcaccgtgtgaagtggaatgaggacaatttgtatgaaattgagtcaaacaaaccggtgaggcagaagataacagagccaaagacaccatatcacccaagatagatgatgatggatcattgtcgccaacacgtcctttcgacaaatgtcttgatgagactgtccaggctgaagctatcttaacagccttaaatggtgtggcttcttcaagcattagcatttcaaaggatgatggttggggatcgtcagatgatgatacagatgccatagatcaagatgctgaccctgaagctgacacgacaaggttgagtttcaaggagcatcgccgtgcccactacgatgagtaccgcaaggttaaggagctgatgaggactggatcccttactgctgaggaggccgatgaggataacagagctgccaccagctccgaagacaaaggtgtggggaaaggagggccgaatgataacatgaagccctcgcctcaaacatgaggagttcatatgaaggttctgattcctctgttatttattgtatcattgtatgcaatacagttgttactcttgttttgttttgagatgctggtgtgccaaaatggatttgatgaccgataattttattggtgttggctacctggtcgaatggtcgtcgctccattttgttggtgacttaacaatttcaattgagaaaatatgtttcaaaccgagcaaactgcttgatgctgaaatcagttattcgccaagagtgaatcttcctatca

SEQ ID NO: 14456 - DNA, 1005 bp, Zea Mays
aaaataagcccctcccgaacaaaccgacacatactgttagagaagtatagtctgatgtcaatacagtagcatttgctgatgaaaccggccatctcatatattctggaagtgacgacactttatgcaaggtctgggacaggcggtgtttgtccgcaggacaggctgccggagttttgactggacatttgcatgggataacacatattgatagtcgtggagatggccgaagtttcatatccaatggaaaagatcaagcaatcaaactgtgggatatcaggaaaatgatgtccaatgctgatagttgtgcagatggagccccagcctgggactacagatattcaaggtatccgcatcaacataaacagttaaagcatccgcatgatcagtcaatagcgacgtaccgtggacatacagtcctccggacattgatccgttgctacttttctccttcgtatagcactgggcaaaagtacatatatacagggtcgtatgattccaatgtttgcatctatgatgtggtaagtggatcccaggttgcgaagctgaaatggcatcaaatggcgattcgggactgcagttggcacccatttgagcccacgcttgtgagctcatcctgggacggccgggtagtgaaatggaccagcgcacgtgatgaaggggcttctgatgtcgattgagttgagtcgaccgtgcaggtgcagcgcgagtgatctttactgttcgtggttgtgggctaaaaaaaaacatacccaatcttgcactaaaaaaaaggagagtaagcacagctcgtaataaagaaagaagatcatgtgttgcagtggtaatttgtaaatgtaaatactgaactgaaaccatgtgggcaggaccgagtgcataagcacctttgtgaatatggttgttccataaagccttttccatgtcctttggagggagcgtgtttttgttggcatttggttttcgacgttccgttttttttgggtatgggtatgggcaatgcgctttttt

SEQ ID NO: 14457 - DNA, 751 bp, Zea Mays
tcggaaaccacttacggatctgccttcactttcgaagtactcctgctcagctactcctgacccctccctgcggtatgccatcacaaaagcttttgttatagcttttgtgatgactttcttctcagtgtttgacgttcctgtcttctggcctatactcctctgctactggattgttctctttgtccttacaatgaagcgccagattgtacatatgatcaaatacaaatatgtgcctttcagtatcgggaagcagaaatatggtgggaagaagagtgccgtgagcccgagttcctcaaaagactgattccgaacctgccccagtagaaacttgccaggggaacaagatacgttggatgatgatatttgatgtgctcaataccaagtgtaatacttcattcatatctaggaggtagacggattttcgctcctgtttctgactctgggctcactgtttaattccatgttgtgcttaggtcgcttcctcctatgcttgtatagcgagtttcgcgtctcagataaattatttcgttttagttactacatatctgggccctaaaacaataagctctatgctctcagcaagtttggttgggtgttgagctgggtgaggtaggcggttggttatttttgtatcgaactggaacaggatgctaaactttaaacgcagaatattttgacccactgtagcatatcatagatagtacgtatcaaacatcgaaattcaaacgcagaatattgctgtctgcatttg

SEQ ID NO: 14458 - DNA, 1321 bp, Zea Mays
cggcgacagcccactgcccaccccacccgctttccgttccgtccccggccggcgccaacgccaacgccactccagtaagccgaagcgaggaggtggagacggtcacggtgggcagagtggcacgactctcgattccgccccgctccagattgctgtgctcgcccactcactcacccatggcgctcgccgcctcccaccaccgcctcctgcccgtcgcccccacccccgctgccacccgtaccccgtcgcgggggcacctgcgcttccgcgccgcgcgacctctgccccgctcccggagaatttgttgtcaatctatcaactcaactaatgttttgggagcttcttcgaagacatctgatgaggcaatcccagtcccagttgtccagatagatcaagactcagaccgtgatgcaaccattgtgcagctaagttttggagatcgtttgggggcattacttgacacgatgaaagctctcaaggaccttggccttgatgtctcaaaaggaagtgtggcaactgactcagctgtcacacaaacaaagttccacatcatgcgattcgggcgcaaggttgaggatcctgacatgttagaaaggatacggctaaccatcatcaacaacctgctccagtatcatcctgaatcaagtgagaagttggcaatgggtgaattttttgggataaaacctcctgtgaagaaggttgatatcgatattgcaacacatatagttgttgaagacgacgggccaaaaagaagcatgctttacatagagacagccgatcggcctggcctacttcttgagataatcaagatcatcgcggacacaaatattgatgtggagtcagctgagattgatactgaaggtttggttgcgaaggacaagttccatgtgagttacagaggtgcaaaactaaacagctcctcatctcaggtgttgatcaattgtctgcgttattacctccgaaggcctgagacagatgaagacagctattgactgttgtgttgttgaaccttgctagtactacattaaaaccagaaacttcaaagtttggcttgagttccttctctatgagcccccctgtactgctgcaaatggagtttccattgtagctgataaagtgcaggcaaggcacatgctaatgtgcataggtggcattgaaattgggctcacagtcactgaaccagtttgatattttgtagtcatatacagctgggagcaacagaagttaggtgtcgatcatcattatcccatttggttcctgttacaagggatcacattggaaggtgtggagcacaaggatggtggttagcggtgaaagaacg

SEQ ID NO: 14459 - DNA, 614 bp, Zea Mays
cacgtccagattgggaattccatcacgcctcgtcctctccgtcccgaccagaatcatcgcttcttcctgctccggcgatatccgccgccgcctgcggtccggccgagatggggagcacttcctctatgctcacccaatacgatatcgaggaggtccaggaccattgtaaccacgcattctcgcagcaggagatcgtatcgctgtaccaccgcttctgccagctcgaccgtaacggtggtggcttcgtctccgctgacgagttcatgtcggtccctgagttcgccgtaaatcccctctcccagaggctcctgaggatgctggatgggctcaacttcaaggagtttgtagcatttttgtcagcttttagcccccgcacaagcctgcagcaaaagattgaatttattttcagggtttatgatactgactgcaacgggaaggttgcttttgatgacatcttgagcatcttgcgagatctgacaggttcatttatgacagagcaacagagacagaaagtcttgattcatgtgttagaagaagctggatacacaaaagattcacattttacactcccagactttatgaagctggaaggaagcgccattttttcccttgac

SEQ ID NO: 14460 - DNA, 2104 bp, Zea Mays
agtctggaccgagaccccggatcgccacgctccttacgccgccgccgttgcccacgagccgggatgctccgcggcgccatctcccgcctcggtgctcgcctccgcctccacgccgacccctctccggcctctcctcgcctccgcgtcctctccacccgccgcggtaaacgctcctcccccaccctgtcgcccgcggactgcgatgacgagggacccctgcgcggcctcttcgtgctatcccgcgaccccgagtgcccaccgcggctgctggtggtgcagccgcgcctccgccccggaagcctcctcgagtccaagctcgccgaggcactcaacctcgccaactccctcgaggagcgccgcgacggcttctaccacagcgagttcggcgccaagggcgcgccgccgcacctcgtcgtccagaaccccgcctcccgcggtcgctcacacgctgatacatattttgggcctggaactgtggataatgtcaagtgctacctgagtgcaacggaatcagaggaagatgtggatgcagtttttgtcaatgcgattctctctggaatccaacagagaaacttggaggttgcctggggaaagtcggttttggatcgtgttgggcttataattgaaatattcaatgctcatgctgaaacaaaagaagcgaagttacagtcagagttggcagctctcatgtacatgaagactaggcttgtccgtgtacgtggcccaggtggacgactaacttttggtccaagtggggaggctgaggttgtcagtgcaagagggagaggtagtggggggaggggattcatgagtggtgctggtgaaacagagcttcaactacaacggaggagaatccaagaacgccgtgtgagcttgttagctcaaattgaagatgtacgccgcactagagcgatacaacgttcaagtcggaaaagacatggtggctcgtttggtcaagagcttgtaactgttgcagtcgtcggatatacaaatgctgggaaatctacgcttgtgagtgcactttctgaagctgatttatacagtgatgacaggctgtttgcaacagtagatccccggttacgaagtgtgattcttccatcagggagaaaagcacttcttagtgataccgttggcttcatctcagatttaccagtacagcttgtggaagcatttcatgcgaccctagaagaagttgttgaagcagacatgttagtgcatgtgttggattcaagtgcatctaatcttgaagagcatcgatctactgtattgcaagtactgcagcagataggggtttctcaggagaagatcaacaatatgattgaagtttggaacaagattgatcttgtggacgagaatgttaaatctgatgggattgacgatgaagtcttcctgaccgaaggtgaacaggaggatgacatattctctgaagatgatgctccatcagaacaaacatcttttgattctgtagatgtagatgacggagcagattcagaatatttatcagaagaaaattctgaagatagcaatgaactgccatctaaaaagtcatttgctgagccaactgagatgggagcaatgaaagagttgtcatcaaaagaatgttttggagaacttcgtgtcctagatacaaatggacacactttcccacaaccagcttccacttgtcatgtaaaaacttctgctgtgacggggacaggattgcaagagttgttagcattgatagagaggaaactgactgaacaacaaactgtcgtgcaaagaagctatggacctttcgacagaaaatggagacctacctctatggattgtgaaaaggctgcagagccgtaggtatgggattcctccttcccctcttctatatgggattcatccttcccctcttctatatgctgctgagatcagtagcagtaaccagtttctgagtttgcatccctagagatggaaaccacacaatgtgtttgaatatgcgcttgtgcatgatgtatgatgtatcattcaaagagtatcttgatattctttctgcagaacatgaagaaactgtaggaagggaccgtatgagttttgatcaatgtcagtcactttaacagacattttgtaaataaaa

SEQ ID NO: 14461 - DNA, 624 bp, Zea Mays
ttgatctaaatggcatctctgagatgtacaagtcttatgaggatactaacttatggattgtagagaatgtaccaaggggtgttcatattaattttctaaaagctgaacgaagtttgcatagatgggctctcgaagacctccaaagaatttatactgcggaggaattagctgcagatgagggtggaggagttgaaatgcacgtgcttgaagacgctggacactgggttcatgcagacaacccagacggtctctttagaattctttcgtcaacctttcgaatcgaaactactataagaggaatgcaggactgaggatcaaacctttatcgatccaatgacaatagaggggaggcatttctgaatcgattctactgtaagaggaatgcaagaggatcaaaccttaattgatccagtgacaatctgagaggaggcgctgacactatcagaagatgtgtacattacaagcagggaggtggagccagcatttttctgaatgataggcgtctttgttcatttgttcattcttttttttacaaaaaaaaagagtatgtaacatgagttatacaactaggctgttcttcgagaaacaacctgtaactgtctgtcatatacttgacgaatgaga

SEQ ID NO: 14462 - DNA, 613 bp, Zea Mays
ttagatatatttcgcccatttgttggttttcgtgaagttcgtcttgtcaacaaggagtccagacatcctggtggagatccacatgtgttgtgtttcgttgattttgacaaccctgctcaggctacaattgctctggaagcattacaaggttataagtttgacgaacacgagcgtgattcagcccatttgcgtctgcaattctcacgctttcccggtccaaggtcagctggtgggcctcgcggtaggcgttaagacgtgcggacctcgtggttgccgaacctatcgtttatacgagcgatccaactacggtgggctaacgcttcgatatgcgctgaatttcggggcggtggctttttagggttcgtcagctcatttcgtgaatgcgtgaaagggacaatgcaataagtgatattctgccatatgttattagatgccgtataatgtgttaggcatggaaagttattcgacatactgtatctgctgccttagctattgtggtctactgtaacttcattaccttgcttcacatccgagacaatttgagtttgttatcatgtggattatctgttttgaaaatgaaaactagatgatgttagcctattttaaaaaaaat

SEQ ID NO: 14463 - DNA, 2103 bp, Zea Mays
atggagattggagaccttgtccaggaaccttcaaattcctcccctggccctatctctccatccgcgcgctctgctctccctgcccgcaccccgcagatcccgaatggccatgcctaccgccgcctgcaggtcggggccggatgcactgcaagctgcggccccgagcaccgggctgaactgaagaggtgtcgaggtcgccattaatcctcaacaaccagctgccaccaacgctatatgctcaccatcgccagcaacttggtggcatctgatggctggggtttataaatggaaactggcatcttataaacagatggaacgtacgaaagttgcatcagagaggttgtcattaagatctaatagcaccaagcatcacgatactgtacatcttggtcttggtcattttgggaaggatggcaatctcatttgtcgttcacttaagtcaatattaaaaccaaaggcaagacagtatgctattgtcaaggtacataataaagatgttgacgagggttgcagctccaaagacaatgagattatttctagtccatctgataggaaagaaggaagtcagctgagggcactggaatcttatttttctaaattcaatccctctcagcagttatactctttgcctcagaagaagcacaaaagtggtccatcatcgtcaaatgaagttgatgcaatcattgctgatgaggatgctaatttgaagaacagggcagactctttgcaggtacagattgacagaggacacacaggtatcaagagtaatcaaaatactcccaacgaggtttacaaggagtacttgatatttgatgaaaaaagtctcctggacatgcatacagatgatcaagcgtctggtttctgtttgacaaacttattggctggtgttaatattgcagttctgttatttgaaatagcaagtccagtgaaaaattctgaaaatgaatatttatccctccctttgttgtatggtgccaagataaacaacttaatactttcaggggagtggtggagactactaacaccaatgtgcctgcactctggtttcttacatatagcccttggttgttgggcattgcttatatttggacctcgagtatgcagggcatatggtcaaaggacattttttctgatatacatacttggaggaatctgtggtaatttgagcagttttgttcacactcctgagataaccgtttgtggcacaggcccagtattttctttaattggagcatggctggtatatcagggtcaaaacaagcaagtcattgacaaggacgtttcagaaagtatgttctggcaggctgtgatagctgcagctttgagcttcttattgagcatttttgggagaattgacaactgggcacatcttggggcgaccatttctggaattttctttggttatctgacatgcccaagtgtagaatttgacaattctgcaaagaacggtcaaaaggaagccgtggctcttattaggcaacaagctcatccatgcaaatccgctgcagtctttttcataaccatacttgcgtttgctgtactcgccttcgcttatgggacacaattcaacaatatggatctggaataggcaaatagctaagtgttgtcatggttcacttcatatatatatatatgcatgcatgtagcccgacagctatatattccggaatgtgaatgagcccgagatgtaagaaaacgttgtacactatagatcagttctatgcgtaaccaggtgaagccacggacggcataactatttgtacactcggtttgcataagaaccgactgcacatctgcatttgcaccgtcggttgcaagttgtgatagactcggcgggaagttttatgtaatataaaataaagtataggtgaagtacatgtttttagtataaatttttatcctgtaattttatagttattgaattttatgactaagagttggtaatcgtgctagtagtgttttatcttggatcactgcatatgtccccttgatgcagtttttggttgtaatccgagcggtttgagttcgtttgaggaaaccccaatacaaaatcttagttttgtctgtattttcagatatgtgattgatttataaatctgattg

SEQ ID NO: 14464 - DNA, 899 bp, Zea Mays
attttcttaaaaaaaatctcaatcgcaacaacacaaaaaagacccgcaatatcgattagcgagagtcgttcctccaccaaaccaaccaattcgcttctccgtcaacttcacttcctcgtcgacgcctccgtcccaccaaccatgccggcggccatggcggctgcggcggcgcagaggctcctcgcggcgagcacgaaaatcatcggcgttgggcgcaactacatagcccacgccaaggagctcggcaatccggtccccaaggagcccgtcctgttcctgaagccgacctcgtcgtttctccacgctggtgtggccaccgccgccgtcgagatcccggagccgctcgagtcgctacaccacgaggtcgagctcgccgtcgtcatctcccggcgtgggcgcgacgttcccgaggcgtccgccatggactttgttggaggttatgcacttgctttggacatgacagcaagggaccttcagtctgttgctaagtctgcaggccttccatggactttggctaaaggacaagacaccttcaccccaattagtgcagtagttccaaaatcagctgtcactaatcccgatgatctcgagctctggctgaaggtagatgatgaactaaggcagaaaggaccgacaagcgacatgctattcaagattccttttctgataagctatatcagttccatcatgacattaatggagggtgatgtgatactaacaggtactcctgagggtgtgggtcctgtccgagtaggtcagaagattacagctggtataactgacctaattgatgttgagttcgatgttcagaggcgcaatcggtcattttccacatgatgcaataagcaagaaagtaatgcaaaacctgtttacccatagcaagaccagtctgatcagag

SEQ ID NO: 14465 - DNA, 598 bp, Zea Mays
cttcttcctgggatagtttcataaggggagagcaaagtctttaaatctgccaactcacataaccatagacgctggaagaacacagattgctccaaattcaaggacagtcatggctattctggggccagctgatatggttgatgatgttactggcggtctgaagcttttgtagaaaaccaccttgtcagcattttcaacttgggtcttcatagagcagtgctgggactttgcaggccacagtggtctctgcacttgtactgatgtgcggcagaagaatgaaccttggccccgttggttgacctgagtttcttgtccatgaatttatttggaaggagagcttgcattcttttttcacttgtaccgaccgttatctttggagttgtgatgttagcagttcgaattctggtgttgacaacttatagaccatcatttcttctgtaacatagataagaaaatactatttgactattgtccatttccccttttttattttctttttaataattcgtgcagtagtggacacaatactgagttgctttggagaagtcatcttgattgcggcagtgcaccgggaatcataggccctgtttgtttcggc

SEQ ID NO: 14466 - DNA, 1942 bp, Zea Mays
cggagacggcaggtgacgacaagggccacggcggcgagctcccgtgggcagcccgcgggcgtggcacaggcagggggagaagagggcgacagtatcaggcggctgcagaacgggtcggacgtgcggggcgtcgcgctggagggcgagaaaggccgggccgtggacctcacgccgctggcggtcgaggccatcgccgagagcttcggggagtggctgcgagaggaggagctccggctccggggccaggagcccgagcagctgcgtgtgtccgtcggccgcgacccgaggctgtcggggccgcggctcagcgcggcgctcttcgcggggctcgccagggcgggctgctccgtcttcgacatggggctcgccaccacgccggcctgcttcatgagcaccatactgccacgcttcaactatgacggctctattatgatgacggcgtcacacctcccctacacccgcaacggcctcaagttcttcaccaagcgcggcgggctcacctccggcgacgtcgagaacatctgcgaccgcgcagcgcacaagtacgtggcgcggaagacgggagtcggcggcggcggcaggggcacgccgccggtggtgatgcgcgtggacctgatgagcgcctacgcgcagcacctccgcgacatcatcaagcagcgcgtggcgcacccgacgcactacgacaccccactgaggggcttcaaggtggtggtgaacgcgggcaacggctgcggcgggttcttcacctgggacgtgctggagaagctgggggccgacaccacgggcagcctccacctggagcccgacggcaggttccccaaccacatacccaacccggaggacgccaccgccatgtcgctcacccgcggcgccgtgctggcgcagggcgcggacctgggcgtcgttttcgacaccgacgtggaccgcagcggcgtcgtggacgccgggggcgcggccatcaacggcgaccgcctcatcgcgctcatgtcggccatcgtgctgggcgagcacccgggcaccatggtggtcaccgacgcgcgcgccagcgacgggctcacgaggttcgtcgagtccaggggaggccgccactgcctgtaccgcgtcggctaccgcaacgtcatagacaagggcgtgcagctgaacgccgacggcgtggagacgcacctgatgatggagacgaccgggcacggcgcgctcaaggagaactacttcctcgacgacggcgcctacatggtggtgaagatcatcattgagatggtccggatgaagctagcaggggtggagggaggggtagggagccttatcagggatctgcaggagcccgccgagtccgtgctcctccggatggacgtcatgggtgagcccaaggatgccaaggaaagggccacacatgcagttgaggcttttaagaactacatccaggaggacaaacttttcggttgggtgctggacgactgcggggattgctcagttgccgagggatgccttatggacacaaacaatgatcccatcgatgttgatgcacacatgtacagagcaaaactatacgacgagaatcagagagcagtaggcatggtccacattcgtcaaagcgtgcataatcccaacatagcactaaacatgcagtcctatgctcctggtggctgcaaatccatggcaaaggatcttcttgagaggttcttgctggcaagcggactgaatgggtttcttgacataagccaagtagagaagtttgtccagtagttcttatgcttattataggatcttagatttacctactctgtatatgtaacagctcagaacctagctaggagttcactactgttgcgagtgtacatctattacattattctcctatcccatccatggtaaaccttgtatgtgtttagcaaatatacatagcattaccttttttgattttagcgtttttctaaaagtattc

SEQ ID NO: 14467 - DNA, 512 bp, Zea Mays
catggcaggccatcgtcggtgtgaagtgtaccaggcacccaggtgctctaaattccaaattgaccaaagctacgtgataaagagaaggtagcgaacaaaagggagggcgtgttaccatgggttgagccgcagggattccagtcgatggtcgaaggcggatctgcggctgagatggcgcctcggtgaaattgcatggtctccaggggtgttcctcggatacaagggtcgcggataccttcgtggcgttatggcgaaccctcatggtcagacacgaggtcggagcaccgtcgaagattcaagcgcaatggcgacggcccttgcgctcattctgtttctcaaaatctctctcgcgtcaaagagggagaacaggggaaggggcggttttactaggatatggtcgaggcactggtgaattgagcggtccgcgaagggtatggcaaccatataatgcgagaaaggcacacgcctgtcgagcgatttccggagtttagttgtgagctccgccatttccg

SEQ ID NO: 14468 - DNA, 4345 bp, Zea Mays
gtttccttctccgggatctcaattctcatctgggagagggcgggcgagatccattccagtcgcccccattcactccccttcctcgtccgtcctcttcctccctccgatccaccgctccccctacccgccgggccgccgctacctcgagcgagcggagatctctctcctcgaacggggggggaggaagatgctcaccaagttcgagaccaagagcaaccgggtcaagggcctcgccttccacccgcgccgcccatggatcctgtccagcctccatagcggagtcgttcagatgtgggactaccgcatgggcaccctcctcaaccgcttcgacgagcacgacgggcccgtcaggggcgtccactttcacgccacgcagccgctcttcgtgtccggaggtgacgattacaagattaaggtctggaattacaagactcaacgctgcctattcacacttcatgggcacctcgactacattcgcactgtgcaattccaccatgagtgcccatggatcgtaagtgctagcgacgatcagacaatccggatctggaattggcagtcacgcacatgtgtggccgtgctaactgggcataaccactatgtcatgtgtgcctccttccatcccaaagaggatctggttgtatcggcatcacttgatcagaccgtgcgtgtctgggatattggggctctgagaaagaagtcagcatcacctgccgatgacatcctccgcctcactcagatgaacacagatctatttggaggtattgatgctgtagtcaaatatgtcttggaaggccatgaccgcggggtcaactgggcctcatttcatcccactttgcctctcattgtttccggggcagatgaccggcaggtgaagatatggagaatgaacggtaatagtcctattactaaatggtctgcacttcacatgcttttgataccaaggcttgggaagttgatacgttgaggggccacatgaataatgtgtcttgtgtgatgtttcatgcgaagcaagacatcatcgtgtctaactcagaagacaaaagcattcgtgtttgggatgccacaaagagaactggcattcaaacatttaggcgggaacatgaccgtttctggattcttgctgctcaccctgaaatgaaccttcttgctgctggtcatgacagtggcatgattgttttcaaattagagagggaacgcccggccttctgtgtcagtggtgacacagttttttatgtgaaggaccggtttctaaagttctttgaatactccacacagaaggaagttcagttggctccaataagaagacctgggtcagtcagcttgaaccagtcacccaggacactatcgtatagtccaactgaaaatgctgtcttgatttgctttgatgctgatgggggttcatatgaactctacattgctcccaaggattctgctggcaaggctgattacttgcaagaggcaaagaagggagctggtggttctgctgtatttgtggcacgcaacaggtttgcagtccttgagaggagtagcaatcaagttttggtgaagaatctgaagaatgaaatcatgaagaaaagcccccttcctattgcgacagatgcaatatattatgctgggacaggtaacttgctgtgcaaggctgaagaccgggtggccatctttgatcttcagcaaaggctagttcttggtgagctacagacacctgctgtcaaatatattgtttggtccagtgatatggaatctgttgcattcctgagcaagcatgttgtggttatagccagcaagaagcttgtccatcaatgcacactgcatgaaaccacccgtgtgaaaagtggtgcttgggatgagaatggcgtgttcatctacaccacactgaaccatatgaagtactgccttcccaatggcgacagtgggatcataaaaacccttgatgttcctatttacataacaagggttatcgggaataacattttctgcctagaccgtgatggaaagaacaagctgattgcagttgatgcaacagagtacattttcaagctcgctcttctcagaaaacgctatgatcatgttatgagtatgatcaagaactcccagttgtgtgggcaggctgtgatttcttatttacaacagaaaggttttccagaagttgctcttcactttgtgaaggatgagaagaccagatttaacttggcccttgagagtggtaacattcaaattgcagttgcttctgcaaaggagattgatgacaaggatcactggtacaggttgggaattgaggccctgaggcaaggaaatgttggtatcgtggaatatgcataccaacgaacaaaaagttttgagaggcttgcttttctgtatctcattactggttacttggacaaggtgggcttcatgtacaaaattgctggacagaataataatttgatgggacaatttcacaatgcattgtatcttgggcatgttaataagagagttgagatcttggaaaatgctgggcagctgcctcttgcttatgttcttgctgtcacacatgggctcactgaaattgctgagaggattgctgctgaattaggcgagcatgttcctttgctgcctgaaggaaaatcacactcgttactgatcccccctgcacctctcacagcctgtggtgattggccattgctgagggtagtgcgtggtatttttgaaggtggactggattctactggaagggcagagcttgaggaagatgatgaagcttctggtgctgactggggtgatgaggacttggatattgttgatgcaagtgaggtggtggcaaatggtggcgattattttgatgcagagggtgaaccaaacgaggaggagggtgaggaaggtggctgggacctggaagatctggaacttccacctgatacagagactccaaaatctgctggcaatgctcgctctcctgtatttgtcactccaacagcaggcatccctgtcagccaaatttggactcaaaaatcttctctggctggggagcatgcggctgcagggaactttgatacagcaatgaggttgcttagccgacaattgggcatcaagaactttgctccgctgaagcccttgtttcttgatctgcatatgggcagtcattcatatctgcgtgcccttgctgctgctccagttatatcagttgctgtagagaaaggttggaatgagtccgcaagtcctaatgtaagaggccctcctgcacttattttcagcttctcacaaatggaagacagactcaaggctgcctacaaagccacaactgagggcaggttcccagaagcactgaggcagttccttagcatcttacatacgattcctgtaatcgttgtagactcacggagagaagttgatgaagtgaaggaattaattgagatagtgagggagtatattcttggtctgaagatggaactcaagagaaaggaattgagggatgatgtgacccgccaacaggagttggccgcttacttcacaaattgcaagcttcagagaattcatatgaggcttgtgctttctagcgccatggctctttgcttcaagcagaaaaactatgctactgcagcacactttgcaaggatgcttcttgagaacagccctcaagaggctcaagcaaggaaggctcgacaggtgctgcaagcttgtcaggataaggatgattctcaccaactgaactatgactttagaaatccatttattgtttgcggtgctacatatgttccaatctaccgtggccaaaaggatatttcttgcccatactgtggatcccggtttgctccttccatcgaagggcagctttgtaccatatgtgagcttgccatagttggggcagacgcctcaggcctggtctgctcccctacgcagatgaagtagacgatgttatcttacctcctgctgtccgcatcttcagcagcaccatctcgcaatgatgcctggatgtcttgatttggaggggatgaaacaattcaccgaacaccaaacttatcaacgccctccatgtcattccaaattttcgtctggaggggattcatcttggtcttgtctcaattatcgcagctgcgttttcagctctattttgtaaacatattgatgtacgatagctgatgtgagtgctggttcactgaaacgattttctgttatggcatatgccattttaatctctacagtttcagtatattgcacagtagattgtactcaaacatttaaaatttgattgtaccaaggattgagaccagtgttttaacactgaaaaattatgattgatacacaaccttttgtcactgaattgatgggtagtaattgcaatatcaatatattttttgtccactttata

SEQ ID NO: 14469 - DNA, 661 bp, Zea Mays
aaaaaagttgcataatgtagaagcccatgttgaagatgagagaaaatagaaccacattccataaacccaaaatagcaatcagctcatctgtcagcgccacaggtgaccggaaaaccacggccggcgttcctgcttctctacccggtccgaattgctgaccggatcaacccgagaccttgcaggattatcgatctgattgcggcatgatccgcttcatcctgctgcagaaccggcaggggaagactcgactggccaagtattacgtcccgctcgaggactcggaaaagcacaaggttgaatacgaggtacaccggctcgtggtcaatcgggaccctaagttcaccaacttcgtcgagtttcgcacacacaaagttatctacaggagatatgctggactgtttttttcaatatgtgtggacataactgataatgaattggcatacttggaatgcattcacttgtttgtcgagatattggaccatttctttagcaatgtttgtgagctcgatttagtgtttaattttcacaaggtttacctgatactagatgaatttattcttgctggggagctgcaagaaacaagcaaaaagggcgttaactgcgtagtcattactcattacaagaaaccagaaatgccatgtacaatacaaagaacggaaca

SEQ ID NO: 14470 - DNA, 507 bp, Zea Mays
gtaattttcaatcttgtttgttaaatttgtattaatttgatacaatcaatttaaatttatctttaaatattgtacttctagcgggaacagattccccgcggggttccccacggggataaattccccgacggggacggggatgggagaaaaagctcccccgtgagcgttcgcgggaacggggacggggaatttttgtccccgcggggacggggatgggaagccattccccgacgggaaaatccccgttgccatccctaaccatgggtggtacgaaaatagaaatgcaaaattaccatagtaagaagaccggcgaccttcatgaccagaatcataccttactctagttctgctgcgcatttcttctggcctttttcgtgactcagcagcaagaacaacagctatttcccgaccaaagaaaacttggcgattcatgtgatactgggcttcagaggcatcgtaaggatcaacaaactctacaaaggcaaatcctcgaggctccccagagta

SEQ ID NO: 14471 - DNA, 1165 bp, Zea Mays
taccctggagaaccttgtacatgctctaaacatcgctggagatgaatttaagccagcatcaattgacaagactcaagctgggtctctgcagagtaccaaagataaccgggttactgtggaattctataataatcagcctggcaaaccaaaggtgacatttgagggaagccaagaagagtacaaggataatgatggtgtcttattttttgatggtgagacctttcgcctagagaggttgcatagggctgtcaagaggttaaggcatgtccgagttccaggagagtctgcagcagttaatttggcagctacaactactggaatgggtgcagaatcacagtctcctccattacctaaagtcaacaagtcacagagcatgaacaaacctgctgttcactcagttccagttgaggttgagcgtattgacattggtgaaccagaaaatccaggcccaaaatacaacaacaggagtacatatcaatctgttaccgtagacccatttgccctttcacctgatccaaatgagcaagagaaccttgacatacttggtgacgatgatggcaatgcttcaccaaacaacttggctgcaggacaagaggcatctgttcgtggttttgacatcaacttaccaaatcaggacgatatggatgatgaaattgctgatgtagatgtaaatgatgacacggatctgtggatcaatgcagccgatgcgctgcgagctcaagtgaacgcagaggagcatcaggagcagcaggacagctcaagctctagtgggagcagcagcagcagcagcggaagtgagagcggcagtggaagtgggagcagcagcagtggtagcgatggtagtgatgctgattcggcaagttccggaggtgatgttgatatatgagcttgatacgcaagcttttgttttgacacatgccttgcttcacaagttttcattcacaaggtaggtgtaggatatgtatatgttcagctaatattgctccagtgagtgcattaaattttcactaacaatggtggcctgggtccgtttttatgtttgctagacctggattggaagaatagaatctgtaaacatatctgtacaactatttgcttatgggaccatggatgttacaattgttcggttgaaatgacaaaaggtatactgctatgcttgcctatt

SEQ ID NO: 14472 - DNA, 803 bp, Zea Mays
tacattttgcaatggagtattggattagaggcaaagattcctgatatagagaagtgtttggatattgtttcaacattacaagctaaaaatgatttgggtgaggcacttatagctgattttgaattatccgaggggatatactcctgtgcgaaaatcgaggatactgactcagtgtgcctgtggttgggtgcaaatgtgatgctggagtactcttgcgatgaggccaatgccctcttgaagaaaaacttggaaaatgctaaggccagcttagaagtccttgttgctgatcttcagttcttgcgagaccagcaaaccatcactcaggttacaattgctcgggtattcaactgggatgtacaccaccggagaagcaaacaggctgtaaaggaaccttaatcagttagatcacgaggtcaaccaatgtgattgggacaaattttttcgtaccttttggtacctctggcagattagtccatcatagcgagctctttgtttgttgatggtttctttgctgtgtaacaatgtatcggtttattctctttaatggtgtgggaacattagtagaagatggaacattttactgcctttttccccactggatgtccactggatcacgtcgcaaaatattttttttttcatgattcatgcataattcctgctttccaaagggcttcctttatgtttactgcattacagtccaggagatagacggtccattgtcatgttgagcaaagatagaagaaaatcgacaacaggtgaggtgactcgtttttacatatgtagggctttactgcttgacactt

SEQ ID NO: 14473 - DNA, 444 bp, Zea Mays
  misc_feature (444)..(444): n is a, c, g, or t
agcggtagcggccagccgggtggaatcttctctccgtccctggtctagcaatcaagcgccctgccgctctaggcaccaaaacctcgcgaggcaaccgcccgccggcgccgccgacgtagcaagagggtgagctgaggactagaggagagggaagatgtcgttccgcgcgcgggagatgtacaagaaggtggtgcggcgcttgggtggcgaggggaagctgccggctgagctgatgaagtcggtgaaggacatactgccggacagcaacgtcgtcatggggcgggccaagcgcggcatcttcgcggggcgacacatccggttcgggaacaaggtctccgaggacggcggcaacaattcaattttgttgcttcggtatttcgagagatggctgagcttcaccgctgcgagatcatgctggagcatatgaagtgtggcactcgtgcn

SEQ ID NO: 14474 - DNA, 3662 bp, Zea Mays
ggcgtttggcacgtcactacgtcagaggtgtctcggtccgacttggtacttggcggctccactgctcacgtcacgtgcccgcgttctctctccgactcccatgcctctccggcgagctagtctggtatccatcggcgagctagttttgtctccaccggcgagcacgcgtctgtaacctcctccacccccatcgaactccacctgctctccaatccgctagatctcggctccgtgcaggttacgtggatggctgtgtggtgttgctttgctcgctaatttggttggatcaggagtgtcctgggagctatgctgtgctgattgtgaggaatttggtagcacctctatcagggttttaaaactagagtgctgccgccccagcatacataatatggacgaagaaaatgttgttgagctgctgcaacgttatcgccgtgaccgtcaagtattactcaactacattctttctggcaacttgatcaagaaagttgcaatgccacctggtgcaatctctttggatgatgtagatatagatcaagttagtgttgattatgtcctcaactgtgctaagaaaggtgaacctcttgaccttggagacgccatccgcctttttcatgatagccttgactatccatatgtgaataacactggagctgtggatgagttctatttgcttacaaaaccagaatattcaggaccagctccaacacgagaaccaccacctatcccagccactgcaccatcatcagttgtgataccaccaccggatgtggaaccagcaccaattattgtgtcatcgccagtcacagctaccaacttgccaaaatcacaaccatttgattctccgaccgagaaggagttaactatagatgacattgaagactttgaggatgatgaagatgaatttgatgggcgaagggcttctagaagacatcaaactgacgctagtgatctatcgttgctgttaccatcatttgaaacaggtatcacagacaatgatcttcgtgaggcagcatatgagatccttgttgctgctgctggtgcttcggggggccttatagttcctcagaaagaaaagaaaaaagagaagagacacagattgatgaggaaactcggtcgtagtaagagtgaaagtgtggatatcaacactcaacggcaacctggtttagttggtttgcttgaaaccatgcgagctcaacttgagataacagagtccatggatattcgaactaggcaaggattactcaacgctatggttggcaaagttggaaaacggatggacaatcttttgattccattggaactattatgctgcatatccagaactgaattttctgacatgaaagcataccttcgttggcagaagagacagttaaacatgctggaggaaggcctcataaaccatccagttgttggatttggggagttaggtcgaaaagtcaatgagataaggagcctttttagaaagattgaagaatccgagtccttgccaccatctgctgcagaggttcaacggacagaatgcttaagatcactgagagaagttgccacttctctatctgaaaggcctgcccggggtgatcttactggtgaggtttgtcactgggctgatggataccatctgaatgtagcattgtatgagaagatgcttggcagtgtttttgacatcttggatgagggaaaacttacagaggaggcagaggaaatccttgaactcttaaggtcaacttggcggacactaggaatcacagagactgttcatgatacatgctatgcatgggtattatttcgacagtttgttcttacaggtgagcaaggacttctgaaagtcgtgattgacaatttgaggaagatacctttgaaagaacagcgtggtccgcaagaaagattacacttgaaaagcctgcgtagttctgttgatgctgagggtagctatcaagacttcacatttttccagtctttcctgtctccaattcagaaatggacggacaagaaactaaatgactatcacctacatttctccgagggctccagcttgatggctgatgttgtgacagtggcaatgcttacaaggcggatccttggtgaagaaaatgacaaggtagcggagtctcctgacagagatcagattgaccgatacatcacttcttcagtcaaaaatactttcttgaagatggcacattctgtagagttcaaagcagacactacaaatgagcatgttttagcatctctagctgaggagacaaagaaactgctgaaaaaagatacagccatttttacacctgttttgacaaaatggcatccacaggcagcagttgtttctgcttccctcattcataaactttatggaaataaattgagaccatttcttgagcatgctgagcatcttacggaggatgtggtttctgtatttccggcagctgatgctttggagcaatacgtaatgtctgtgatggcctccgtcacgggagatgatggtttggatagcctatgcagacataaactagttccatatcagattgaaagtaaatctggtacattagttttacgctgggtaaatgggcaacttgagagaattgaaacttgggttaaaagggctgctgaccaagaggtttgggaccctatatcccctcaacaacgccatggaaattctattgtagaagtctatagaatcatagaagagactgcagatcaattttttgcatttaaggttcctatgcgagatggagaattaaatagtctatgccgtggtcttgacaaggcattccaagtttatacacagctggttactgcacccctagttgataaagaagatttagctccgcctattcctgttcttactcgatataaaaaggagcttggaatcaaggcttttgtaaaaaaagaggtccaagaagttagaacagttgatgagaggaaagctagcgaaattactcagcttacaatgccaaagctttgtgttcgtcttaacagtctatattacggtatcagccagttgagtaagttggaggacagcattaatgagaggtgggctcggaagaaaagtgaaaacactaacatcagacgaaaaagtgaaaagtcaaagagtgccgtccctaatcagaagaatcaatttgatggcagcagaaaagaaatcaatactgctattgatcgtctctgtgaatttactgggacaaaggttatattctgggacctgcagcagccatttgttgagaatttatacagaaatggtgttgctcaagctcgattggacaccataactgaagtgcttgatttggtccttaatcaactttgtgatgtcattgtggaacaactgagggatcgtgtggttacagggcttctgcaagcatgcctggatggcttccttcgtgtgatactggatggaggttctacacgtgtcttctctccaaatgatgcagctttattggaggaagatcttgaaaccctgaaggaattttttgtttctggtggagatggactgcctcgtggaactgttgaaaacttagtctcgcgtgtacgtcctgtaataaatctgatcaagcaagagacccgcgtgctcattgatgacctacgagaagttactcaaggtggcaagagcaaatttggagcggactccaaaaccctccttagggtcctgtgtcacagaaatgattcagaggcatcac

SEQ ID NO: 14475 - DNA, 481 bp, Zea Mays
ctagtgtctgtcgtgtccactcgtaagattcgagctggaaatgacagtattattaaaaagctgacattaactcaggccattgacgcaagagatgcactagcaaagtcaatatacgccaatttatttgactggatcgttgagcaaattaaccacacacttggaacggggaggcaatttacatggagatccataagtatattggatatttatgggtttgagtgtttcaataagaatggttttgagcaattttgtataaattatgccaatgagaggctgcagcagcacttcaaccgacatcttttcaaactacaacaggagaaatccatgctctgaaacttgatccaggacatagagcccttggacctaagtgtcatccagaaagatgttgctcctgaaacagtagatgcaatgaagaggactatttctggcatgttgggtcttcttccatccgatcagttctgtgtcattaaaaaaaaaaaaa

SEQ ID NO: 14476 - DNA, 3851 bp, Zea Mays
ccgcagccatagaaaccatctgactcccgtcggcgagccgcgagaggcgcaacagaagttgtgatatgcaccatggttgggagaactattcaggtccaaggttttgctctaactgacagtgccgaatctgtcaaattgtttttggagcgaattgctggtgctggaaccatctgtgctctcaagctcaggcatccaaggaacatctctgccaactcaagggcatttgctatagttcagttccagtcacaggaaagtgcttcattggtagagaatgcggctcaaagacaggttctcaagattggacggttttatctgagaaccagacctgcagaccgggacattgttccaagaccaaggattccaatgttttctctagaggacattgtgctgcatttgggatgcttggttaaggaaaatatcctatctgctctttttagagcaagtaatgtttcggttcaatttggatttgatatgaaaaagatctacttctacctctcctacaattttactaaatttaaacttgaactttcttacgaaagtatatgggagatgcagcttcaccgtccacctgcttataggtcacggacacagttccttttgattcaggttcaggcagctcctaaaatttataaactgctcccaggccgtccaggtcttatgtttgaggatcctttcttcaactggtttagggatgacacagatgaacaatggaccaggacaattgattttactccatcagctagcatcgggcaatcatctattttatgtctggaggtgccacaacagtgtgagcttccaagaattggcgactactttgtttactataaagagcagaatcttgactttgaatgtcggaatgggtattcatattcctgtggtagcaaccttgtaccaattgtgaaatctcctgattacatagaggtcccttatgagatactcttcaaaatcaaccatttggttcagaatgggacactcagtgggccaacagttgatcatagtttcttccgtcatgttagcccaaaatttgaacctattgatcatataaaacgagcacttttaaagatgacatatttgaaaagcacctgcttgaacccaacagattggttatctgtgcaatactccagaatacggaaatcacgccatgcatcacaaaagttatctaatatatctctggatgatggcttggtctatgtccacagggtgcaagttacccctgctaaagtgtatttttatggacctgagataaatgtctccaatcgcgttgtgcggcatttctctgcagacatagataacttccttcggatttcatttgttgatgaagactgtgagaagctccgttcagctgatttgtcacctcgatctacttctggaaatgatgcaaggagaactgctctgtataatagagttttgtcagtcctttcaaatggcatcaatattggtgacaagcactttgagtttcttgccttttcttcaagtcagcttcgagataactctgcatggatgtttgcttctcggcagggattgactgcgagcgacataaggaagtggatgggggactttcgagatatcagaaatgtggcaaagtatgctgcaagacttgggcaatctttcagttcctcaacagaaactttaaaagtacacaaatctgaggtggaacgaattcctgatattacaaatggcacaaagtacatattctctgatggagttggaaagatctcagctaattttgcagtggaggtggctatgaagtgcaaattgaaacgctttgctccttctgtttttcagataaggtatggcggttacaaaggtgttgtcgctgtagatacaagatcaaatcataagctttctttgagaaaaagcatgtcaaagttccagtcagaaaatatcactcttgatgtccttgcatacagcaagtaccaaccatgcttcctgaatcggcagttgattactcttctctcaacacttggggttagcgataatgtctttgagctaaagcagaaggaagccttaaggcagttgaacagaatggtaactgaaccacaggctgctcgtgaagcagttgaacttatgcccatgggagaagtaaccaatgtagttaaagaattgttgtcatgtggctaccagcctgatcatgagccatatctttccatgctgctacaaacttttagagcatccaagcttctagagttgaaaacaaagtcaaggatattcatcacacaggggcgagcaatgatgggttgcctggatgaaacctgcacacttaagtacggccaggtattcgtccaagcttcttacagtgcagatgaccatcgcaaggtcgttgtaactggaaaagtagttgtcgccaaaaatccttgtctccaccctggtgacatacgggttctccaggctgttgatgttcctgctctgcaccacttgtttgactgtgttgtctttccacagcagggaccaaggccgcaccctaacgagtgttcagggagtgatcttgatggggacatatattttgtttcttgggatccacatcttattccgagtcgtttggtggatcctatggactatactccagcttcagcagaaacattagaccatgatgtcactattgaggagatacaggagtacttcacaaactacatagttaatgagagtcttgggattatcgccaatgcgcatgtggtctttgcagatcaggaacgtatgaaggctgagagtccaccgtgcgttcaactggccaagctcttctctatagctgtcgatttcccaaagactggagtgccggctctgattccacatgagctacatgtcaaggagtatcctgacttcatggagaaactcgacaaagtcacctatgaatcaaagggtgtgatcgggaagctctatagggaaataaagaagcacacaccacacataaagcacttcacgagggaagtggcaaggcggtcttatgacaccgatttgattgttgatggctatgaagattacattactgaggctatagagttcaaggaagagtacgatttcaggctgggtaatcttatggaccactatggcataaaaagtgaagctgagataataagtggatgtattctaaagatggcaaagaatttcaccaagagtagtgatgctgatgcaattagaatggcggtgagatctttgaggaaagaagctaggtcgtggttcaatgagatgagcacaggagaggatggccaagatgccatggaggccaaggcctctgcttggtaccatgttacttatcatcagcagtactggggcagctacaatgaagggtatgatcggccgcatcttattagcttcccatggtgcgtatatgacaagcttgtggccatcaagcaggggaggaatctcctcacgcggatggatcgaaacttgaggttccgttgagcattgccagcaggtttgctcctgtacatatccctgatcgtttgcactcagcactgccagcaagtgtgcatgaacgatctgatgaattaagacgggcaaactgccgcaagctgacgctctggcctacgtgcgtcttgaaactttcggatgctgccgtctaactaaatgcatgttccttgatttccactgggaccttgagtttgaagtgtgtaaatatgctgcttatgatgtttttagtattggacctctatcaactgccgttctagttagtaacaatggttgccagtcatggattaccaggtttcgccgagctcctgtatggacgaccacgaaggtctatttcttccattaccaagtgcgaagtgtcacatctaacttgcgtagttgcattcaccttttttctcaaaaaaaaaatgcattcgccctgcaccatcatcaattgcgtagttctg

SEQ ID NO: 14477 - DNA, 2830 bp, Zea Mays
ctcgcacgctcgatctgtgactatgccgggagaagcagcgcaaggagtcctctcgtctacaaaccgtgaaccggaagctgagtgcgatgaacaagctgttgatggaggagaatgaccggctgcagaagcaggtttcccgtctcgtctttgacaacgggtatatgaagaatcgactccacagtccttctgtagccaccaccgacacaagctgtgagtctgtggtgacaagtggtcagcacaaccaacagcaaaacccagcagttctgcatcctccacaaagggatgcgaacaacccagcaggtctactcgctattgctgaggagacattggcagagttcatgtccaaggcgactggaactgctgtcaactgggtgcaaatggttgggatgaagcctggtccggattccgttggaatcatcgctgtttcgcacaactgcagcggcgtagcagcacgagcttgcggccttgtgagccttgagcccacaaaggttgctgagatccttaaggatcgtgcatcgtggtatcgcgattgtcggcatgttgatgtcctccatgttatccctacgggtaacggtggaacgattgagctgatctatatgcagacttatgcactgacaactctcgcggaaccacgagacttttggacgctccgatacactagtggtcttgacgatggcagtcttgtgatctgcgaaaggtcattgactcagtccactggaggtccttctggacctaacactccaaattttatcagagctgaggtgcttcctagtggttatctgattcgaccctgtgatgggggaggttccatgatttacattgtggatcatgttaatctgaatgcttgtagtgtgcctgaggttcttcggccactctatgaatcccctaagatactggcacagaagatgactgcggcggcgttgcgacacattaggcaaattgcacatgagtcaagtggtgaaatgccctatggtgctgggcgacagccggctgttctcagaactttcagtcaaaggctcagcagaggcttcaatgatgctgtgagtggctttccagatgatggctggtcttgtttgttgaacaccgatggtgctgaggatattacagttacaatcaactcatctccaaataaacttgttgggtctcatgtcagcgcttccccattattttctgctatggggggtggaatcatgtgcgcaaaagcatcgatgctgctgcagaatgtgccacctgctctacttgtgcgatttttgagggagcatcggtctgaatgggctgatcctggcatcgatgcttattctgtcgcctctttgagggccaacccatacactgttccaggtttaagggctggtgggtttatgggcaaccaggttatactgccccttgcacgcaccttggagcatgaagagtccttggaggttattaggcttgaaggacatggctttagccatgaggaggtgcttatgtcccgggatatgtttcttctacagctgtgcagtggcgtcgacgaggatgcacctggtgcgtgtgcacagcttgtctttgctcctattgatgaatcttttgccgacgatgcaccgttgctgccctcaggcttccgtgtgataccgcttgatgctaagacggatgtgccaacggccaccacacgcacgcttgaccttgcctctgcgctcgaggttggatcaggtggaagcggcatgcgcgcttcatgcgatggttccggcacgtgcgccacgagatcggtcctgaccatcgccttccagttctcgttcgagaaccaccttcgcgagagcgtggcggcaatggccaagcagtacgtcaggggcgtgatggcctccgtgcagagggtggccatggcgatcgctccttctcgcctcggttcgcgtatcgaactgaagcatccgccgggctctcccgaggcacttgcactagctacgtggattggcaggagctacagggcgcacactggaacggagatccgctggtcggacaccgaaggcgcggactctccactgatgctgttctggaagcacagcgacgcgatactctgctgctctctgaagccgccggctttcacgctcaagttcgccaacagcgccggcttcgacatcctggagacgacgatggtgaacatccaggacctgccgctggaggcggtcctcgacgaggagggccagaaggccctgtccgcgcagctccccgcgatcatgcagcagggcctggcgtacctccccggtggcgtgtgcaggtcgagcatggggcggcaggcgtcgtacgagcaggcagtggcgtggaaggtggtgggtgacgacggcgccccgcagtgcctggcgctcatgctcgccaactggaccttcatctgaggctcgcaacatcgctcggcagcgccagaccggatgccgccttttgccctactacgtatcattagttgcttttccgttgtgccgcctgtgttaagaatttgtgtactgtgtggatgatcgagaactgactctgtttgtgtgtgtgcgtgacaaacaactacaacagctgtatgcgtgcctggtcgtggtctcgtctccccggcttgtcgccggcgacattgatcactgttgcaggttgcagtattactatttgctagttctgcttgctcgatcagtactcgcattgcaggttgcagcatgcagcggtagctccactacagggcacacgcagtatcggagcgggcaatggcggcggcatgctctgcgcttgcttgcagttgaagtgttgcctccgtgttggtgtggcctctctcatcgtctacggcacccacttggagccgcccaatgataacattaatgggccgaat

SEQ ID NO: 14478 - DNA, 760 bp, Zea Mays
tttccatgaaaactgaagaaactcaatttggtaagaaaggtgcagatcaagttgcagatggagagaaaaaggaagatgcacctgctcctctagaaagcaagaactcaaagaagaagaaatctaagaaagaaaagtcttcaaaggagctaaaggaagcgcaggatcaagccaatgggttggaagcagcagctgttgcagaacctgatgaagatacagcctctgtggatgtcaaggagcgcataaagaaggtagcctcgatgaagaaaaagaagtcaagcaaagagatggacgctgcggcaaagattgctgcatccgaggccgcagcgaggagtgcccggcttgccgctgcaaagaagaaagagaagagccactacaaccagcagcctgtgcggtgaactcccctgatctgaggccgcagcgaggagtgcccggcttgccgctgcaaagaagaaagagaagagccactacaaccagcagcctgtgcggtgaactcccctggtctggtgtctctagaaaccttttgagctctgatgtcccctgttcgttttggacctgcaataaaacttttgagactgttttttgacatggtggaggtgccgtctgatgctcgttttgggaattaaattacatataggtacataggggttgtcttgtcgctggattctgtttggtgtaatgagctatgaactgttcgtcaatcgtcatatgaaccctgctgactatttatatggaaaatgtgggatatttgatacctaactaa

SEQ ID NO: 14479 - DNA, 805 bp, Zea Mays
aggcccgtaccgaaaatcctcccacacgctgacgctggtgcccgttgctctgtcctctgttcgaaaaatttcctcttgttgagacctggggcatctctctctctcgccccccccccccccccccccccctgctcgcggcgcagcggagccgacgcgatgccgccgaggaggaaacggcgagcaccaccggccaagtcgcagaggcagacggagccggatccgcaaccgcaagtgccccctggcgccgacgcgccgctggaagagcggctgatatggggcagccaacaagaaagcgagcgccggattactgccatcaaagccataaaagacgcggaggctgggaacatacattaccagttgcaattggcacggtcctattattccgaggagcaattggagggaaacgccatgcagtattttcaggagaacttgcacaatctgtcggttgttccgaacgaggaatatgatgtgcttgagctgaaatggaataacggcggcgaatggatgattggagactttgcagatgacaggactctacgggcttcgattgcatcattcacagctgctgatggacttcagttcccaagggattcagacttctatacgcgcactagcaatttcagtgactttgcttggagtgagcagcctgaaggccaaatggcaggagcatcagaagcttttcagacacctggggctgtgagtaaccggctatcctgtggcatgacacccaaaactgtgaggctacccaagaatgtttcccaggcagaagccccattaggtgttttcctgttaaccacttttctta

SEQ ID NO: 14480 - DNA, 1707 bp, Zea Mays
ccccggacgtcaagcaggaacagcaacccagatccagatccccggcggccccacgagaaacctgcaccaccacccaggtggccagatgctcgctgcttagtgggatccagccgtcagccagcccaccagtagccatccgactccccactctgctacgggggctccggtgcggcgtcccatcaatcattcgcctcgccgttctcgcgtagctcgccttcccaaggatttggcccttcttttcctatctctcccgtacacgacgagacgaggctttcccgtaccgtcccgcccctctatgcgcctacggcctacgcccccccaaccccagcccacccacaagagtagggagtggtgcgagaaatcaatccgccccatgcccacatccgtcgccacccacgcaaccctcctcatcaaagccgcagccgccaagcccttcttctccccccgcccggcggcccggatccccgccccttctcctcaccctcctcccccgcccgccggccgccgcctgccgaacacggcggccgctctcgcagccgcagcccgccggttccggtggccgtcggcggccgcgtcggcgcgggggctgtgcgcgccgccgcattccggcggcgaggggatgggatctgatgcgggggcgggggccaggaagaggcgggactcggccgtgaacgggctcgccaaggacgtgccgccggtgaacgggatgatgatgcccaaggaggagcccgcgaccgcgccgcccaggttgctcacgctgcccaccgtgctcaccattggccgcgtcgctgctgtgccgcttctgatcagcactttctacatggagggtccatgggcagctacggccacaacaggcatcttccttgctgctgcagtcactgattggctagatggttatatcgctagaaagatgcagctaggaacaccttttggtgcatttcttgatcctgtggctgacaagcttatggtagccgcgacattagttttactatgcaccaaacctttggaaacatcactgctcaatgatgggccatggcttctaacagtcccttccattgctatcattgggagagagattacaatgtcagctgtgagagaatgggccgcatctcagaatagtgaagctcttgaggctgttgcagttaacaacttagggaagtggaagacagcaacgcagatgacagcattgactctgcttctcgccagcagagacccaagtgtacctgcgcaaggtgctctagttgcccccggtgttgctctactttacatttccgctggactcgccatatggtccctagtggtgtacatgagaaagatatggcggacacttctaaaatagtattagcacaatatatatagtgtagtagaagaaacagaagcaaggcgaggttctattcgtgatcgtacgatttttggaaggctgcttagttgattggtggactgggacctatctagagctgcttgtgatcctcattcctcagtaacttgtgcgtcatctatttttgccgccaaatttgctgaagtatgccaggattctagacatgatgtgaccctgcgtgcttaaggagatataagtctgcaatgcagaagattgtaacccaatacaaacacaaaacccagaggtttgtgcatgtggagttctatcattgtaatctgcacataatatcatatgccaggagcatgcaattattcttttcaaaaaagaaa

SEQ ID NO: 14481 - DNA, 1748 bp, Zea Mays
atctggtaacttggtagatgccatcagatgaaggatgtagcaactgaaaacttccaacgaatatgtgaagcttatgagatactatcagatgataacaaaagacaggtgtatgacatctatggtatggaaggtttaaattctggcctggaacttggtcccaagctaactaaaccagaagaaatcaaggaacagttagaacgactgcggcggcgcaaggaggaagaaaaacttttcaagcatgctctacccaatggctcaatcattgctaatttctcagtgccacaatatttaaatgacgggagcatcatgagaggaatggcgatgcttagtcaagttgagttgccagtgtccaagcaaaatactgtcgttgttggtgggaatttgattgtaaatggctcagctggatctggagcagcaaccactgtgctgcgacaccagttgtctcctgtttcctctattgagtttatggccacagctggactacgttctgttattggtgggcagatgtttcgtcaaatttcaccacattctacagcaacttctggacttgctgtttctttgagagatgggtctatcaacttgtcaaatgcctggactcgccaattgtctgacaatactgttggaaatatacagctagtccttggcgatgaatcaagtatttctgttggatggcaaaagaaggatgaaaaacgtactgcaactggagaagtaaagtttggaactaatttttttggtgcatctgctcattatacacatcgcttctcctccaaatctcatgcacgcatcgctggtagagttggaagcacaatccttgattttgaaattggaggagggaggcgaatatcagaatttagtactgtaaggatgatgtataacataggaattcagggcgtatcttggaagtttgagttacatcgtgctggtcaaaagttaatcatcccagtcttgctttcaactgatttaaatccattatttgttaccagtgcatttgctattccttcaacactgtattttctacttcagacatatgttgtaaagccttactaccttaagcgagaaaagcagaaaacactagaaaagatggaaggcttatctacacagctaactgaagccagaaaggcagctgaaaaagctcaaaaattactggaacctgtctccaaccgtaagaagaatagacagctagagaacaacggattggtgataacgaaggctctatatggcagtcgccaaaaaatcaaaatgagcagtgaattgaatgatatacacaatgacatggcttcacaagtatttgatgtgaccatcccactgaacttcctcgttactgaggcaggccagctcaagcttcatgacgggataaagaagtctggaataatgggtttctacgatccttgtcctggagacccgaagctattacttgtcgagtatacgtttcatggtcataaatacaaggtcatggtggatgactatgaggcgctgttgataccacaagatatccatcaattttgaacggttcctgatgtaaaagccacatcaaaacgattttgggtcatcagctccctttctcacattttttgttccttttgtgttgagctatctctgttttcggtcattccttaatgcgcctcgtatttgtatacacatgtcggtttgtgccacctcgaggtcatacacaccaacagcaggtaataaagctgtagccagtagttttccagaaagaaaaaaaataaaaataaaagtaaaactcaatg

SEQ ID NO: 14482 - DNA, 1362 bp, Zea Mays
gtgaagcttcacaagtcaagctcacagcaaaataaaagccaggcggcggcatatggcgctcagcaaggagcaaaaactcacaatttctgagcaacaacacacggcaagcagcgaacagcaggtggcgctggatgccgagctccagctgtggaaccacaccttcggctacgtcaagtccatggcgctcaaggccgcgctcgacctcggcatacccgatgccatccaccagcacggcggctcggctaccatcccacagatagtcaccaggatcacgctccacccgtccaagacaccatgcctgcggcgcctcatgcgcgtgctcaccgtcaccggcgtcttcggcacccaggagccgcacgatgacgggggcggctgtgacgacgagctcgtctacacgctcacgccggcgtcccgtctccttgtcggcccaccggggcagaacgtgagccctttactgaacgtgatgctctgccccatcttcgtgtcgtccttcctcgacctccgcgggtggttccagcacgagatgccggacccgtcccccttcaaggtgacgcacgggcgggacatatgggagctggccgcccacgacgccggcttcagcaggctcttcgacgccggcatggtcgcggacagcggcttcatcatgaacgtcgtggtcagggagtgcggcagcggcaccgtcttccaggggatcagctccctcgtcgacgtcggcggcgggtttggtggcgccacacaggccatcgcgaaagcgttcccgcacctggagtgcagcgtgctagatctcccgaacgtcgtcgccggcgctcctgctgataccgccgtgaagtatgtcgccggtgacatgttcgagagcgtttcgtcggcagacgctgtcttcctcaagatactgaagaactgcaagaaggccataccagctcaaggaggcaaggtgataatactggatatcgtggttggagcaggatcgtcgtcgtgcgaccggaagaacgtggagacgcaatgcttgtttgatctctacatcatgactatcaacggtgtcgagcgagatgagcgagagtggaagaagatcatctttgaagccgggtttacatcttacaagatcatacctgttctgggcactcgatccataattgaagtctgcccatagaaaccaatataattaaggatggcaacagcctcccatcgcccttgcgagtataattccaaaccagcacttcaatacttgaatccgtgaggttttgaggtcacttacgtgttttactcattgtacgcttttaaacaataactagccatttgtacgtgatttgctacggttgttatatatatcatataaataaatattaagatatttattcaaatata

SEQ ID NO: 14483 - DNA, 1302 bp, Zea Mays
tacatgattgggattaaccactctaaatgcaagacaatacgccgaagagtgctctggatcttcaaaaataatttgtctctctgttcttccctttctttctaccactgaagtggcccacttcacaagatatttccttaggccttctcctccccaacgatactcaatatgtgactggtgattttgatctaatgcaaatgtaatcttggagttgtttgacgtttctccggaatgtgaaggatagtaaatgttactcccactattgcagatgaaagcatcaaaatcagtgggaagcatgcctccagatagtagcagtgaatgtatttctgatatcgttaaggaagttgacagcacaaaaccagttgaacccgacatgttttctttatgtatgacctcaatagcatttctgattatcctgactagaccttccttgttaacagagtctacagaaataacaatgatattcttccttcctgaaataggtgtattactccgctcctctctgttaccaatagcaggagaccttgggccaagagttagtatccttgacaggtaattcttgcaatgttcaggccacgagaattggtgaatatttgtcagtccattctctctgattaatttcaacaggggctccattttttgtcgcaattataggcaaaccattcatagcagcctgcacatgggcacaacaattggttccaattaggacacagataaagcgacatacctttgttcttgcagctaaacgataaatgtcaggaacttctgagtgtttatgatgcttggggtatgccacttgaccatacaggtcatattcgtcaatcaatgtaagcactgatgtcaagacagcagcactcatattgtgcatcttagatatagcttcacggtttcccattatcagtgtctacagcacaaattcaaaagtaagcacagaagtcaagatcattcaatcctaagtgttgttatcgtactgtaacaaacgaaacaaataaagaacattagggcaactaatataaatcttacaagattggcaagctcccttaatggcctgcattcaccaaatgcctttacaagtgtagtaatattcttctcaggataagggcgggcaacagctagaatcataggcttcctaggatttgtaaagaagcgcattatctgccatcggttgtgcatatgtatagtcagtgtttgaaatttgaatgcaggtttgacagattaaaaaacatctaaattaactactgaataaatgcttcactaatgatttagcgagcccttgtgtatactatgataagaatacacagtgac

SEQ ID NO: 14484 - DNA, 1105 bp, Zea Mays
tccaaacgccccgtaagtggtatgggtttgggtaagacaaccgatcccagtgcggccgagcacggagtacgtcagaaaccggcaggaagcaggaaacgggaggcaggcatgtcgtcgtccaaggacgctcctctcagccctcgatcccagctggcgctcagttgcttcgaggagctcctcgactgcgccgtggcggacgtcgcgtcggagtgccaccgcatcgcgcgcctcggcctggaccgcagcgtcgacggcgaggaggaggagctccgcgtctgggcggcacgtgcggcggccgccgccgctggaggtgaccaccaccaccctggaggaggcggggccgccgaggagggtgggagcaagggcggggtcgacgtgttcggccagacgcaccccgccatcgccgccgatgtcgtcgagtgtatgaactgcggtcgccctgtcgtcgccggccgcttcgccccgcacctcgagaagtgcatgggcaagggacggagagcccgaacgaaaattacaaggagcagtacggctgggcgcatgagaagcagcaatggcagcgttgccactccctactctccatactccaccacggcgaaccctaatagggcaagcatccctaatggtgtgactgacggcggcggcggcgcaaggggagattacagcaaccatgcgccctaggtgtgctgactgatcctctactcaagtttggttgtgccgtagcgggtgctggctgactcagcctgtattcatgtttccttgccgtggatggcatgaaacacgttttgttgataagtatggtctatgtatgaacccccgaaaaccactctggtgaccagtgaaggtgaggagccatgggcgaaggtttgaatcatgtctttgaaccccgtcgagaagatcacctgttggtcagtggatttaaccttttgtacagcttgttggttcgatcagtatccagtagtttgttgcagtacattttgtagagcactctgtatgactcgtctatggcgcatctggatttgcgagaagaaaagtgaggcagactgagcaagctgctgaactgatccgtgccaccatcgcccaccattgcagggaatctggatgggtt

SEQ ID NO: 14485 - DNA, 121 bp, Zea Mays
tcagcatgctactcgtccgctggctcctcgccgtcgactctcggtaccacaagctcattttcccttatgcacatctcctcagaccctgtctcatcacgcgtatgcgttatcgatctcgtcg

SEQ ID NO: 14486 - DNA, 984 bp, Zea Mays
cttcaattggcagcagcagtatagttttatactaaccttttcgatccacacaaatatttcggcataaatcaaatttaaaataaaaaagatcttaaacatttcgtgtccctttgtttcctccccagctgagcctgcgcctgtactctgatgggccagcccactaaccgttcagcggcagagcccgttatttcgccacttcagcgccccacacttgcgccgcagcagtagaaggtagaacaccttcttgacccgaattcaatccgtgcgcacgcaccctccgccggcgacggctcacgcatcgctcggcgcccgccccgcgtccccgaggcgacgaccggcagagcgcgctctcgcggcgctacccgacacctgcgacgaaacgccccgagtccactagtcgaggagtgcgtcgacgcaggggctcgggaacgcggtgtcgccatcgcggagccctagcgagatcgtcgggaaggtccgaaggcgagcacgtgtttgtgtaacctttctccccttcttccctttgccggccggcccttcagcggcgacaagtgcccaccaggcggtggtttacgttgagctgaggagtgaggaagatgtctggaaatccagtcggcgtcgacaacacttctaggaggaaatttgacaaggaagagtacttggagagagctcgacagagggagcagagggagaaggatgaagctcggaaaggcaaggaaaggggtcctcctgtgcaaagacagcctttgaaacacagggactatgaagttgatcttgattctcgtcttggcaagactcaggtggtgaccccgattgcaccattgaatcagcaggctggatactactgttctgtatgtgaatgtgttgtcaaagattcagccaactatttggatcatataaatggcaagaagcatcagagagcactgggcatgtctatgcgtgttgaaagggcatcacttgaacagcttctgcttgtgcagaatccag

SEQ ID NO: 14487 - DNA, 1570 bp, Zea Mays
ctttcagattgaacgaagtcctgggctttgtgccggaaattgagaattcagcccaacatcaaacaggaccaacgcgtgcacactgacctttccctgtgtctcgtcttcctagttcaggtctcaccgcaagcacctcgatacggcggagtcgtggggaaccgtggaggtgaggtcgtgaggagaggaaaatttccaccgccgtgcagccatgtcggtgcaggagtacctggagaagcacctgctctcgcgcaagatcgaggaggccgtgaacgcggcggtccgcgccaaggcccccgacccggtgctcttcatcgcgggccacatgcggcgggcggcgcccgccgtgatcacgagggttcgggcgcgccagatccttgacgggcacggcgcgccggctgtcgaggttgagttgcacaccaacaaggccatacaccgagcatccgcggccggctcgggcgcgctcgagggcgccgccgccgacgcggccggggccgccgagaggcggaagatactcgccaaggtggtcgccgactcggtgcggatgatcaatgacaaggtatcggaggcgctcgttgggatggatccgcaggagcagtcgcagatcgaccaggctatcatggacttgaacaaggcgcgccacaaggctgagcttggagttggagcaaatgctatgctggcagtgtcaattgcagcttgcaaagctggtgctgctgaaaaagaggttccactctacaagcatatagcgaatcttgttggcaaaagcgctacaactcttcctgtacctgcaattacagtcattaatggtggaaagcatgctggaaatggtcttcccattcaagaaattatgatccttcctattggtgctaagaactttgaagaagcaatgcagatgggttctgagacctatcatcatctcaaggatgttattttggagaaatatggctcagacagctgcaacattggagatcatggtgggtttgctccaaatatttccagcatatctgaaggcctggatcttgtcattgcggcaatagagagggctggatataatggaagaataaaattggcaattgatgttgctgccactgatttttgtacaggaaagaaatatgacctggagttcaaatcaacaaagaaatcagggcagaactttaaaactgctgatgatatgattgagatctatagccagctttgttcagagtacccacttgtctccattgaacagcccttcgataaagatgactgggagcactcaaaaaaattgaccactctagagctgtgccaggttgcaggggatgacttgttgatgtctgatcctgaacgcattaagcgggcagttaatgagtacacttgcaacgctcttgttctcaaggcaaatcaagtgggcactgtcactgaggccatagaggttgtgaagcaggcaaaggatgctcattggggtgtgatggtgtcacataggtcgggagacactgaagattctttcattgctgacctggctgttggtgcttcagccggacagatcaaagccggtgccccctgccgtggagagtgtctcactaattacaatcag

SEQ ID NO: 14488 - DNA, 945 bp, Zea Mays
aggttcgtggtgacaccagctaacgcttcgtggggaagcgcccagcatttgggtgtgccaagccacgacggcagggcgtcgcagtccggcgtgccgcggtggccgcggacggtgttcctggtgggcgccatgtcgtgcctggccatcagcgcgacggcccacctgctggcgtgccactcgcggcgcgccagcgtggtgttctggcagctcgactacgcgggcatctccgtgatgatcgtcgcctccttcgtgccgccggtgtactacgccttcctctgccacccgccggcgcgggcggcctacctgtccgccatcgcggcgctgggcgcgctcgtggtggccgcgctgctctccccgtcctgctcgtccccgcgctaccgccgcctccgcgcggcgctgttcctggccatgggcctgtcgggcgtcgtcccggcgctgcacgcgctgtggctcaactggggccacgccgcctgctacctggcgctcggcctcgaggtcgccatgggtctcgcctacgccacgggcgcctggttctacgtcagccgcgtgccggagaagtggaggcccggtgtgttcgacgtcgtgggccacagccaccagatcttccacgtgctcgtgctcgtcggcgccgtcacgcactacgtcgccgtcgccgtgctcatccactggcgggagaaggtggctgccgcctgtggcgcggcgtcgtaggcaggcggggcttgctgctcctggcttctgcagcaagccagctgaggtgtttgatcatccagagcttcaatgtgccagtgcgatggattcaacaagcgttcgaatcggcgaacgaagtagttgcagttgcagttgcagcatagatcggctctagagttcgacgatttgtaatttaattgatgggatgattgagtatggtggttcactaatttatgttgagatttatctaaaaaataa

SEQ ID NO: 14489 - DNA, 101 bp, Zea Mays
aatcccgtcgcccccggtcccctcggtcgtctccctctccggaaaccccgcctccgcgatcctcaagcacgcaaatccctacgcgaatggcgacgtgaccg

SEQ ID NO: 14490 - DNA, 2395 bp, Zea Mays
catgggttacattgaacctgctgaatttgcccgactagggcttcttgcaatcacacttgttagtatagcatctcctgataatgaattaaggatgttgggctatgagtgcctaggaacattcaaaaaatcccttgagtatgctcagagaagtaaggaaacctggcagcttcagctgcttctgacataccttcagaatgggatatccgaacagtggcagaagataccttccattattgctgtttttgctgcagaagcatctttgacgctactggatggctcacatgctcaatttactgtcatgagaaattttttaatgcattccacttctgtcaacctgcagagcattccattatttccaaccttattgcagagcagttctgtgcattttaaagccgaacgtctgtggatgcttcggttattatctgctggatcaaatctagctgatgatgctaaaatatacaagagaggaagagtcttagaacttgctcttgccttctgttcttcacccgtttcagattttgaatcaaaggttttagtccttaaggtgctgaagaagtgtgtcaagctgccagttctagctcatcatctagtaaaagagtctggcattctgttgtggttattgtctgttatttcagtccgtagcgaagtgtctgacggttctgaaagctcctgttctagagtaactgagttagcgttggaggtagtcaatggtttgatatcatcaagattgatcacagattggctccaagaaaccgcccttgagcagctctcaacaatatcatcatacctttctgttctaattaacaatgccaaattattgaaaggaaatgttcatttgttgacttcagctctaagtgtgattacatcaacaatgaggttgtctatgaaaaggaagatataccaaccacattttaccttgtccctccatggtgtatttaatctgtgccaaactattggtggtagctcaagaagtacagagcataagcttgtaatggaacttggtatcgatgccattctgatgaatggtcctataccaattttatctgaaatggataagtcaagaatatcaatggttgtttcatgggcaacttcaagcatcttctggttgtactctaaccaaagatcgctgttggaaatatcctgcaaagagccaccaagaaatgagtctctactttcaaagattttgcgcttgttagccgcttctgtaatacttggaaagatatctagcatctttcatggaaagagtgtagatcttgcagggaacaccagtgaaactctttgctctttcttggacaatgcatatgaaagggctgaaacggcaaagagttgcagtgtgaatgatactctagctgtcattatactacaccttcaagaccatatgccaaagaacagtgattccttgccatcagttattgcagccctttgcttgttgcttcttgacagatccagtaagcaagtgaacaaacacctggccaacaaccgagggaaaattgaaatgctttgctcaaagataggctgcccggctgaatcaaatcctgcatggagatggcattactatcaaccatggaaggattctgctttgcagcgcacggggatggagcgactggaagaagagcaggcctgccgaagcctcctggtcctattttccagtgccttcagtgcctgcctgtcagagttcccggtgttgtccctagatgatgttgagaagtctggccttttccagtgggaaagagacttaatggctaaacaatcttccacttagcacgctgaagaactaggatgacccacatttgagctgtgtgtacaatcatgctcgtacgattgatcttgtttagaacttggaagaagagaatgcttcgaccctcagctggattggatggatgaacctacggtgctgcacaagccgaaccggccctgcgcccctgcctaacaccaatatgttggacacttccactactgttcttcacttcccatttgtataacgggacctgcattattgtagcatgggtgcagcgtttcctatgtaatttctgtgacattaccaactcacaatattgatttcatctgaaatgtaacatattttttcacagaaatgcttgcagcccatgcggccatgcctgtttgttcagctgctggtgtgatgactgcgatgcaaccgtgctggcggtgtatgtatgcatctggaccttgaagggcagcagcagcctgccgttctcggaagtcggacagtgtgccctccgggagcaagttgagggacagggttgttcttgcccaccgcacgggcgacctgaggacacgtgcggggtgcgggcttccgactctgatggctgcagacctgcagtctacacagccctgcacgatgtcaccgctgcagcctgcaaagaaggagaagaag

SEQ ID NO: 14491 - DNA, 1368 bp, Zea Mays
  misc_feature (1)..(2): n is a, c, g, or t
nnagaaccaaacatttctgaaaatggaagttctgtggaggctcaggacaaagacgttattctggaaggccttagtactgttagttctcatgatcagtggactccattatctgtcagtggtcttcgtccgaagcctcgttatgagcatggagcaactgtgctgcaaaataagatgtatatatttggtggaaaccataatggacgttaccttagtgaccttcaggctttggatctgaagagtttgacctggtccaaggttgatgccaaattgcaagcagaacctgctgattccactaaaacaacacaaattgctccatgtgctggtcattctttgatttcatggggcaacaaatttttatctattgctgggcatacaaaagatccatctgaaggcgttacagtgaaggaatttgatccacatacttgtacttggtcgattgtcaggacttatgggaaaccaccggtttctcgtggaggtcaaacagtgactcttgttggaacgacgctagttttgtttggtggtgaagatgcagaacggtgtctcttgaatgacttgcacatccttgatcttgaaaccatgacatgggatgatgtggatgcaataggcacccctccttctccaaggtcagaccatgctgctgcttgccatgctgaccgctatcttttaatttttggtggggggtctcatgcaacatgtttcaatgacctacatgtccttgatttgcagacgatggaatggtcaagacccaaacaacaaggcccgactccaagtccaagagctggccatgcaggtggaactgtcggcgagaactggtacatagttgggggtggcaataataaaagtggtgtttctgaaacacttgtgcttaacatgtcaactctgacgtggtcggttgttagcactgtggaaggacgagtcccccttgctagtgagggcatgactttagtgcatagcaattatggtggttatgattatctcatctcttttggaggatacaatggacgatacaacaatgaggtttacactcttaaacttagcctcaaatcagattcacagtcaactttaaaagaagaaactctctcagatactacatctagggtcatagaacctgaggctgaaatttatcaagatgggaagatacgggagatttctgtggacaacgctgattcagacctgaataacagaaatgatgaagcaagtgaacagcttttagcagatcttaaagctcagaaagaggaactagaagcaacacttagcagggaacagctgcaaactgtgcaacttaaagaagacattgcccgagcagagactagaaatgcagagctgacaaagccgttatgtatctttagaagtatactgagatttgac

SEQ ID NO: 14492 - DNA, 3735 bp, Zea Mays
ataaacactgtacgagatcactgaccataatcattagcaatttagcattagcctcagctggcgtaccgtcgagtccattcccacctttctaccccttccagaaacctccaggatccgactccaatcgaatcgccaaagcagacaggggcgctcgcgggggcgccgagctcgacggggcgagatggccgggaacgactggatcaacagctacctggaggctattctggacgctggcggggccgcgggagatctctcggcagccgcaggcagcggggacggccgcgacgggacggccgtggagaagcgggataagtcgtcgctgatgctccgagagcgcggccggttcagccccgcgcgatacttcgtcgaggaggtcatctccggcttcgacgagaccgacctctacaagacctgggtccgcacctcggctatgaggagtccccaggagcggaacacgcggctggagaacatgtcgtggaggatctggaacctcgccaggaagaagaagcagatagaaggagaggaagcctcacgattgtctaaacaacgcatggaatttgagaaagctcgtcaatatgctgctgatttgtctgaagacctatctgaaggagaaaagggagaaacaaataatgaaccatctattcatgatgagagcatgaggacgcggatgccaaggattggttcaactgatgctattgatacatgggcaaaccagcacaaagataaaaagttgtacatagtattgataagcattcatggtcttatacgcggggagaatatggagctgggacgtgattcagatacaggtggtcaggtgaaatatgttgtagaacttgctagggctttaggttcaacaccaggagtatacagagtggatctactaacaaggcagatttctgcacctgatgttgattggagttatggggaacctactgagatgctcagtccaataagttcagaaaactttgggcttgagctgggcgaaagcagtggtgcctatattgtccggataccattcggaccaagagacaaatatatccctaaagagcatctatggcctcacatccaggaatttgttgatggcgcacttgtccatatcatgcagatgtccaaggtccttggagaacaaattggtagtgggcaaccagtatggcctgttgttatacatggacactatgctgatgctggtgattctgctgctttactgtctggggcactcaatgtacccatggtattcactggtcattctcttggcagagataagttggaccagattttgaagcaagggcgtcaaaccagggatgaaataaatgcaacctataagataatgcgtcgaattgaggccgaggaactttgccttgatacatctgaaatcataattacaagtaccaggcaagaaatagaacagcaatggggattatatgatggttttgatctaactatggcccggaaactcagagcaagaataaggcgtggtgtgagctgctttggtcgttacatgccccgtatgattgcaatccctcctggcatggagtttagtcatatagcaccacatgatgttgacctcgacagtgaggaaggaaatggagatggctcaggttcaccagatccacctatttgggctgatataatgcgcttcttctcaaacccccggaagccaatgattcttgctcttgctcgtccggatccgaagaagaatatcactactctagtcaaagcatttggtgaacatcgtgaactgagaaatttagcaaatcttacactgatcatggggaatcgtgatgtcattgatgaaatgtcaagcacaaatgcagctgttttgacttcagcactcaagttaattgataaatatgatctatatggacaagtggcataccccaagcaccataagcaatctgaagttcctgatatttatcgtttagctgcgagaacaaaaggagtttttatcaattgtgcattggttgaaccatttggactcaccttgattgaggctgctgcatatggtctacccatggttgccacccgaaatggtgggcctgtggacatacatcgggttcttgataatggaattcttgttgacccccacaatcaaaatgaaatagctgaggcactttataagcttgtgtcagataagcacttgtggtcacaatgtcgccagaatggtctgaaaaacatccataaattttcatggcctgaacattgccagaactatttggcacgtgtagtcactctcaagcctagacatccccgctggcaaaagaatgatgttgcagctgaaatatctgaagcagattcacccgaggactctctgagggatattcatgacatatcacttaacttaaagctttccttggacagtgaaaaatcaggcagcaaagaagggaattcaaatgctttgagaaggcattttgaggatgcagcgcaaaagttgtcaggtgttaatgacatcaaaaaggatgtgccaggtgagaatggtaagtggtcgtcattgcgtaggaggaagcacatcattgtaattgctgtagactctgtgcaagatgcagactttgttcaggttattaaaaatatttttgaagcttcaagaaatgagagatcaagtggtgctgttggttttgtgttgtcaacggctagagcaatatcagagttacatactttgcttatatctggagggatagaagctagtgactttgatgccttcatatgcaacagtggcagtgatctttgttatccatcttcaagctctgaggacatgcttaaccctgctgagctcccattcatgattgatcttgattatcactcccaaattgaatatcgctggggaggagaaggtttaaggaagacattaattcgttgggcagctgagaaaaacaaagaaagtggacaaaaaatatttattgaggatgaagaatgctcatccacctactgcatttcatttaaagtgtccaatactgcagctgcacctcctgtgaaggagattaggaggacaatgagaatacaagcactgcgttgccatgttttgtacagccatgatggtagcaagttgaatgtaattcctgttttggcttctcgctcacaggctttaaggtatttgtatatccgatggggggtagagctgtcaaacatcaccgtgattgtcggtgagtgtggtgacacagattatgaaggactacttggaggcgtgcacaaaactatcatactcaaaggctcgttcaatactgctccaaaccaagttcatgctaacagaagctattcatcccaagatgttgtatcctttgacaaacaaggaattgcttcaattgagggatatggtccagacaatctaaagtcagctctacggcaatttggtatattgaaagactaaatctttgatctttgctggtcagcagaggaatcaaagcaggaatgtaggatcgaggagagtgacaggacttcccctctgtgcacttcgccgaaaagtaataatgggattgctatgcatggcccttgttgtacactagaaaattgggcacgcaaacttgtgtcagtttttccgctgttgcgaaattcagtgatggtgtttttgtaactataccaacctgtgtcagttttgccgttgttgcaaaactcagtgatggtgttttttgtaattattatacatccgaataataagactggtgtttccagacagactatgcaagctaaggggaaatcacgattttcctagatcaaatatgtaatatgttcttttccgatgca

SEQ ID NO: 14493 - DNA, 356 bp, Zea Mays
cgaaattcgatgaagataatctgattccatgtttcggatttggagatgcatcaacacatgatcaagacgtctttgtttctctcctgacgagaaaccttgcaatggatttgaagaagcttttggacaaggatcaacaccctttgcaccgatgtgaagcaaagtggtggacaataccacgtcctgttgataattgcagatgggaaggacgccatggcagccttgccctgctcccccaacagcgcccacctgcccctttccttgcgcgacgcgagatggatcggcgaatccatggcagcttggcagggtggtctatctcaaagattttcgaaagttgtttcttattatggtctcacgac

SEQ ID NO: 14494 - DNA, 349 bp, Zea Mays
aacattgaaacaaaacctcaaccacgtaaacaggattatcgtggccatggtgatagctgttgagagcgtgatctcttggatgccaatgtattcagaaatgaagctagctttctttgtgtacctgtggtaccccaaaactaagggaagtgacgttgtatatgacacctttcttcgccccatagttatgcaatatgaaccgaacatcgagcagagattgttccatctaagggcaaaatctgggcagttaatttccttctacatgaagaattttgcggataaaggaacagccttcttcatggatgtcctccgttatgtcgtatctgagaaacctgaaggatccaatgcagag

SEQ ID NO: 14495 - DNA, 1975 bp, Zea Mays
ggatggaaggggattgagtatcgagcagcatttcctctacataagcctcccggtgctaacttctatcctcctgacatggacaaagcggagtttgaactttggaagagtaaactgacagataaagaacaaaatgatgccactgggtttttcaccgtcataaaacgacatgactctctgtcttcatcgtcattaacacaatcagatggatcggatcagaccaagactaaagatgatctttttattgttccatactccaaggagtatagaccattcctagagaaagcagctgagcttcttgagaaagcatcagcgtgctctgattctccaagcctcaagaatttgctgagaaccaaggcgaatgctttcctttcaaatgattactatgaatccgatatagcttggatggaattggactccaacttagatctcacaattggcccatatgaaacatatgaagatagcctttttagttataaggcaacttttgaagcatttgtcggaatacgtgatgacacagcaacttctcaagttaaactctttggtgatcagctccaggatttggagaaaaaccttccaatggacaatattttcaaatcagatagtatatctgctgctcctattcgtgtgatcaatcttctctacaatgctggggatgtgaagggtccacaaaccattgctttcaatttgcccaatgatgaaaggattgtgaatgaacgaggaacttccatggttatgctcaaaaacatttcagaagccaagttcaagcatatcttaaagcctatagctgatgcctgcatcagagaggaacaaaaggaatatgttgatttcgagccatattatacacatatagtctgtcatgaatgctgccatggaattggacctcattctatcacccttccaagtggtaaaaaaacaacagttagaagggaacttcaagaattccattcagcattggaggaggcaaaagctgatatagttggtctctgggcactgaatttccttattaagaagggattgcttcctaagagcctgtcacaatctatgtatgtctctttcctggctggctgcttccggtcaatccgctttgggctggaagaagctcacggaaaaggacaagctctgcagtttaactggttgtatgagaaaggggcttttgtgttgcagtctgacggaaaattctcagttgattttacaatggttgaggatgctgtagaaagcctgagcagggagatactgacaatacaggcaaagggcgataagccttctgcccaatctcttctccagtcccgtgcaacattgacacaaccattgagaatggcattggagaggatagagcacatgcaggtacctgttgacatagccccggtattcagcacggcaaacaagctatttgcagacatttaactatttgggctcagaatcgttgtgctttagtaccgcccacaatacctggacgaaaccaggaattgctcaagaataaggcggcactaggaattgctcaagaataaggaagcgccccatgttaagcaaagctgataaaaccatggcgatatgtgagtgacctttttatcggaaggaaaattgtttgcatgcttatgtattgacctcaatttttacgtattggagtgatttgatgtgaaatttaaccaaattccacgtccagtacatggccatccaaacatggcctaaagtggtgtttgatcagtgagaattggaataaacccagctttgcctgaacagttgcgaagtactgagttacatcaatgcatattttgtaacaccaaaaaaagatgtattatcctaatggatgattgaacgaaggcattgtatatcgatccccaatggcccaatctttatgcacattctggcttgatcagatctagtttattagttaggcatatgacatctttaactcttaattttctaatgaacttgtcgaagttccatactagttttacattgactaacagataaa

SEQ ID NO: 14496 - DNA, 2778 bp, Zea Mays
gtccgggtacccgccgggctcacctggcagcgtctgtagaggatctcaatcccacggccacaccacacccacctagctttgctttcctcgtccgcttccggcttgccctgcctctctccgccccgcgtcgcctcatcgccaacaaccgacgagatccggcgcgggaaaacgagccctagatccggcggcaccctcatgcgaccttgttgagtccgggccttcctcctcccgccgctggtgtcgccatggcggggagcgacctcgagccgctgcgcgcgagcgcggcggcgctgccgtcctcgtcggacccggactcgcccgccgtgaccccgcgccggagccgcgtgcgggacctgctgcgcaacctggaccgccggctctccaaccgaagccgcggcggcgcggacgcggggcacggcggcggcgaggccggggcgtcaccgaggaggcccgaggaggatagcgacgagctcggcgacggcgcgccgcccgagtgggcgctgctgctcgtaggatgccttcttgggctcgccaccggcatctgcgtcgctgtgttcaatcgcggggtacatgtcatacatgaatgggcatgggcaggcactcccactgagggtgctgcttggcttcgtctgcagaggcttgctgatacctggcataggatattgttaattccagtgactggtggagtagttgtgggcatgatgcatggattattggagatttttgagcagataaagcaatccttatcatctcaaagggagggtattgatttcatggctgcgatttttcccacaatcaaagctatccaagccgcaattactttagggacagggtgttcactggggccagaaggacccagtgttgatattggtaaatcatgcgcaaatgggtgtgcggaaatgatggagaacaatagggaacgaagaattgctcttgttgctgccggatcagctgctggaatcgcctcaggtttcaatgctgcagttgctgggtgcttttttgctatcgaaacagtattacggccacttcgagcagaaaattctccaccatttactactgctatgattatattagcatcagttatatcatcaactgtttccaatgttctgctaggggaaaaggcagcatttattgtgccgacagctgccactctaccttattctgggcatgctttgcggtgttgtaagtgtggcattcaggcagttggttgtttggttcactaagacttttgacttgataaagaagaagtttggccttcctgctgtagtatgtcctgctctaggtggtcttggagcaggcttaatagctctaaggtatcctggaatattatattggggtttcaccaatgtggatgagattctacatacgggcaaaagtgcttcagcccctggaatctggctcttggctcaattagctgctgcgaaagttgtagcaacggcactttgcaaaggttctggtcttgttggtggcctttatgctccaagtttgatgattggcgctgctgttggtgctgtttttggaggctcagcagcagaattaataaactctgcgattccgggtaacactgctgttgcacatcctcaagcttatgcactggtgggaatggctgctacgctggcttcagtgtgttctgttccactgacatctgtgctgctactctttgaattgaccaaggattacagaattctacttcctctaatgggagctgttggtttagcaatatgggtcccatctgttgtaaatcaatctggtagcaaagatacattcgaggcaacatcaccccgtcatggctattcgtcattgttacctcccacagataggaatgagacagattggaggcgacaagatggagacgatgtggaactcacaattctagacgttgatccctaccactatggtagtaacaatgaggagatgcttcttgatgacttgaaggtatcacaagcaatgacaaagcattatgtgaaggtcacacctacattcaccatcgaggagacaacaaggcttatgcaagagaagcagcaaagctgtgttgttgttgtagataatgaagattttcttgagggaattgtaacattaggtgaccttcgtcgtaaaggatttgtgccaagtgaaaactctgatagtacccaggcaaattcatcaaccgtggatgcaaattcttctcttgtgtcatcatgccttactcgaggttttcagttccatggcaatgaaagaggactggtgacctgctttccagatacagacctgagtaccgccaaggttctcatggaagttaaaggtattaaacagcttccagtggtcaaacgtggtgctggccgtagaaatgatgggaggcgtaaggtccttggccttcttcattatgattcaataggatggtgcttaagggaagagcttgagcggtggaaggcaatataccagagagagaatttccagcagactgcagttaatgggcactgaatatgcaaaattgaaggcttgtttacctcgtagcgaagaagataagatacgaaatatataaagtgacattccgataaaactagggttaacttaggaacactgctgttaaagagtctcctcatcaaagtgtaaattcttgagttttgccaagatatgcattctgtatcaaacatatacgatgaggtttaagaggtgatcgatatataagagatgtgtcatgtgcggtgtgctgttgtcagatttcgttgtggagtgctgaagttcggacacgaaatatgtacagtaacatgctttgttcctttttgggttcaaaaaaga

SEQ ID NO: 14497 - DNA, 617 bp, Zea Mays
ttgctccctcctccgctcggctccacacgttgccggctcatccgagaattcaactccgaagaaagatgtttatcaattgttcgctgagaaggttagggataacaaacagctggaatcaagatgggcaatcatgcaagaaacccgtgtggagtattttcgtggaaaagatttcaatgccttcatcaagaattatccagaagtcagggaaattttggggccagataaggatttagaagtggaagacattgttaacactttgttgaccaagaaccttgtgataaggtgtgaccgagttatgaaaactgtgaggcctggcaagaaaaagttatcatcatggcctgctcacttggagatacataatgaacaagtgtttactgaaaatgatgggttttatgcttggatgtttctgaaaaggcggaccttgtggcagacagttctttcatttgtttggcctctttttgcactggcagtctgcttatttccagtttacccataccaatgcaagattgttgtactgtactcatgtgctggagctctacttttcattgtctccattcttttgctaagagctgccatctttggcatcttatgggttctccttgggaaacgcggtggtg

SEQ ID NO: 14498 - DNA, 174 bp, Zea Mays
caagaggaaccacacaacgaggagtttgatctgatctaggtgacgtctcctagttgactttatggcgccaaggatggaccttagtttgttttatatttaacttttattttgtaagacttccgcaatgtaataagtattctggtgttattgtgatatttatctctatacactctg

SEQ ID NO: 14499 - DNA, 2434 bp, Zea Mays
caatgggctcccgttccggaacagcaccaccagcggtcaatttcgacgcctggagtcaaccggccgagtcgtccacctacgccttcacagttcacacgcgcggcggcggcggcggcggtggagcgggtgatgagggaagtggcgtgaaccaccgaatctcgcggtcgcggagcgggcgtcgcgggcgaacgagccccggtctctctcttctctgcgcgcaacctttccaaggaactcctctgatgctacagtaataatagaagaaagatggacctgctcagcatcattctagttatagcatctctgctcccattcgcagcatctgatggtcaaggtgatgccttgtacgatatgaagctgaaactaaatgctactggcagtcagctttctgactggaaccaaaatcaagtcaacccatgcacctggaattctgttatttgtgacaacaacaaccatgttgtgcaagtaacattggcttctatggggtttactggagttctgtcaccaagaatcggagatctggagtatttaaatgttctgtccttgcctggtaacaacatctctggtggcataccagaagaatttggcaacctctctcgattgacaagcttagatttggaagacaacctgttggttgggccaataccagcttcacttggcaggctttcaaagctccagcttctgatactaagtcaaaacaatctcaatggctctattcctgatacactagcaagcattttaagcttgacagacattcggctggcttacaataaactcactggtcaaataccttcccagttgtttcaagttgcacgttacaatttttcaggtaataacttgacatgtggagcaaacttcctccatccatgtgcctcaaatatgtcttaccaaggttcttcccgtggttcgacaataggcattgtgcttgggacagttggaggtcttatggggcttctaatcatatgggctgtattcattatctgcaatggaaggaggaaaagccatctacgtgaaatatttgtggatgtatcaggtgaggatgatcgtagaattgcatttggccagttgaaaagatttgcatggcgagaattgcaacttgcaactgataatttcagtgagaaaaatgttcttggacaagggggttttgggaaagtatataaaggagcacttccagatggcactaagattgctgtaaaacggttaactgattacgaaagtccaggtggagaggctgctttcttgcgtgaggttgagctaattagtgttgcagttcaccggaatcttttaagattgattggtttctgtacaacacaaacagagcgcctacttgtttatcctttcatgcaaaatcttagtgtggcctaccgtctacgagaatttaaacctggggagccaatattagactggtccgcaaggaagcgagtggctataggcacagctcgtggactggagtatttgcacgagcactgcaatcctaagattatacatcgtgacgtcaaggctgccaatgtcttgcttgatgaaggttttgaaccggtggttggggatttcggcctggccaagctggtggacgtgcagaagacgtccgtgactacccaggtccgtggaaccatgggtcacatcgcccccgaatacctgtccactgggaagtcctccgagagaaccgatgtttttggctatggcataatgcttcttgagctagtcactggtcagcgtgccatcgacttttcacgtctggaggaagaagatgacgtgttgttacttgaccatgtcaagaagctgcagagggaagggcatctcgacgccatcgttgaccgcaacttgaacagctgttacaacgggcaggaggtggagatgatgatccagatcgcgctgctctgcacgcaggcgtcgcccgaggaccgcccgtccatgtccgaggtggtccggatgctggagggcgagggcctcgccgagaggtgggaggagtggcagcaggtggaggtgacgaggaggcaggactacgagcggatgcagcagcgcttcgactggggcgaggactccatctacaaccaggacgcgatcgaactgtccgccggcaggtgacgacgtcgggtcgtcacacggagcttgtcgtcgtcgacgtcgcagtgccgacatgtaactgtatatgtaaggcattgttgcgaagcttgttagcaaaatataatctgtgacactcacttagtgttgatacgtgcctgtattttattatttgtgtgtataaggaaggatgatttaaacgggttcaggtgtttaccggttgtccggctcccatcctgtaaagctctatataggggggtggggaccggttgaaaccacatcacatgcaagctgcaagaattggcttgacaaatatttaacgaactctattgtcgacataaaaagtaagtgataaacgaactctattgtggga

SEQ ID NO: 14500 - DNA, 1787 bp, Zea Mays
tcactctcactctccctttctctcgtggagacgactgggcgaccgccggcgccgacctacaccaggtgcccaggccttcgtcgggaccatcgccggcgacgaacacccaccagctggatctgatccaattacagtcagaaatgtcttcagttgggagaagcaatggcaccagggcggcgaatggtgcagctgccatcagtacttccacgacggaagcaggctcagccgacgccagatttcactcccaactactacatcaggacaggcaaagtagatgggctggctgcttttcaggcttatcatgtttcggatcgcagaagggcgggaaaagaattgttcctgcagcacgcacttctgatgggaatggatcaaatactcgtggaaatggtctccagtctggtgccaattcaaaccaaaatctgcctatgaatttatctcttctagctccaccatcatcaccagcatccttctcaaactctgcgcttccttcgactgctcaatcaccgaattgctttctgtctgtatctgcaaactctcctggtggtccaacgtccaatatgttcgctgttgggccatatgctaatgaacctcaacttgtctcaccacctgtcttctcaacttacacaactgagccatccactgcaccgttgaccccaccacctgagctggctcatgcaactacaccttcttctccagatgttccatatgctagatttctttcttcttctatgggtatcaaaactgccagcaaggatcacaacatgcctttcctatcaacaacctattctggtggttcaggactccagacatcttatccactttaccctgaaagcccctgtagcagcctcatctcaccggcttcagtaactccgaggactggtctatcttcacctatacctgagcaagaggttcctcctgcccattggaagacctctaggtctgcctgcgacacgccatatttcagggcttcgcccattcccgagcaagaaaccactgcacaatggaagacctctagatctgcttgtgacacaccgtatgccaggacctcaccaaccaatatatttgggctggattcatctacaccgagaaactatatgctagacaacaatttctttcggccagcggcatctgctcaattctacctggaccaggctcagcagacattttcacataatggcggaagggtcagtgtatccagggagaagcaaggtgccgatgaaattgaagcttacagggcttcatttggatttagtgcggatgaaattgtccaatctcagtcttatgtgggaataccggatgcagttgatgaatcattcagtatatcaccatttggaaacaatactccagctactgagatctgcccattcagtgatctgcctaatgaggtggataaatcatgtgcctacgcgaaagatgacacaagcccaaagaaatcagcaaaccagctctccactgattctccaaacaaagttctgcgtttggacgtgttcaaaggaacaaaaggaggtcatcagtctgaggacgagtgtatcaggaaagatggtcatcttttcagaaagacagcagatgaaatatccctaaaacccatagaagtaagaaagaaatcgcttcctggccattcttgctcggatgcagagatcgagtacaggaggacacggagtttaagggatgccaacggcgttctatcacggcgcagtgcattggcaagacagctgcactaatatgaatgctggtttggaatctttgtgcctttttcttcgcgtatgtcagcaagacagcaacttgtg

SEQ ID NO: 14501 - DNA, 611 bp, Zea Mays
ttcaggttttcaggctgtctaaatagatgccattgaggaaatcccggaaaatgtcgcctccataccgtgtcatcctgcacaatgacaactacaacaggcgcgagtacgttgtcaaggtcctgatgaaagtgatccctgggatgaccgtcgacaacgctgtgaacatcatgcaggaggcgcacgtgaatgggctgtcagtggtgattgtctgttcccagtccgaggctgaggagcactgcacgtcgctcaggggcaacggcctccggagctcgatcgagcccgcgagtggtggctgctgaggttcgagacttgggggtataccttcttgttttgccagcgtatagtttgtaaatacccagcgtatcaagctaaagctgaaacggattggttatatgcacttatcgatacaacgaagctgagtacccctctcgggtaggtgtaaatcgtgcaagggtaccctgtagaagaagaaacatagtattttcggttttgatttataaaatatttagttgcacatgcctactctgtttatagaaattgcttctactgctttttaacagaaggctaaggacttgtttggaagagcttcatttcaacaatctcaattccat

SEQ ID NO: 14502 - DNA, 2766 bp, Zea Mays
tgagctgtgaatcctgggtgtctcttggaatatgaggttgcggattgggtaaaatttagaagaactgttacatcaccagcttttggctggcaaggtgcaggacctagaagcattggttttgtccagtctgttgtagacaatgaccaccttgcggtgtcattttgtactggagaagcccatgttttgacaagtgaagttatcaaagttattccattaaataggggccaacatgtgcaactcaagcctgatgtttctgaaccaagatttggatggcgtggtcaatcgcgggatagcattgggacagttctctgtgttgatgatgatggaatcttgagggttggttttccaggagcttctaggggatggagagctgatcctgcagaaattgaaagggttgaagaatataaggttggtaactgggttcggattcgtccttcactaacggttgctgtgcatggcatggagtccattactcctggaagtgttgggattgtatactccatcagaccagatagcagtcttttattgggactttgctatttgtccaatccatggctgtgtgaaccggaggaggttgaacatgttgacccattcaagattggggaccaagtatgtgtaaagaggtctgttgcagagcccagatatgcatggggcggtgagactcatcacagtgttgggaaaataattgacatcgagagtgatggcctgctcatcattgatattcctaatcgggctgcaccatggcaggcagatccatcggacatggaaaagattgagaacttcaaggttggcgattggattagagtcaaagtgacagttccctcacccaaatatggatgggaggatgtgactcgaaatagtattgggataattcatagtctacaagatgatggagatgtgggtgttgctttctgctttagaagcaagctttttctttgctcagttgcagatatcgagaaggcacaaccatttgaagtaggggaaaaagttcatgtgtcaccttccatatctgagccacgcctcggctggttaaatgaaactgcagctactattggagccatatcaaggattgacatggatgggactttaaatatcaaggtttctggccgaaaaagcttatggaaggttgctcctggtgacgctgagaggctttcagcttttgaggttggagattgggtccgcccaaaaccaagtattgggagcagacctacttatgactggaatagtgttgggagaataaacattgcagtagtccatagcattcaggactctggttacttggagttagctggctgtttcaggcatgggaagtggctaacccataacacagacattgagaaagtgcagacagtaaaaattggtcagcatgttcggttccgtgctggaatttcagagcctagatggggatggagagatgcgaaccctgattctagaggcatcatcgctggtgtacatgctgatggagaagtaagggtcgccttctttggtgtgccgggattgtggagaggcgatcctgcagatcttgaaattgagaatatcttcgaggttggagagtgggttaggctgaggaacgatgtggagcagtggagatcactcaagcctggtagcattggtgtggtgcatggggtgggatatcaaggtgatgcttgggatggaaccattcatgtcgctttttgtggtgagcaggaaaggtggattgggccttctagccagcttgaaggagttagcaagtttgttgttgggcagcgtgttcgaatcagaggctgtatccgccagccaagatttggttggtccaatcatagtcattcaagcatagggacaatctcatctattgacgcagatgggaaactgaggattcatacaccagctggtgccagggcttggttgacagacccagcagaggtggaaaaagtggaggacgaggaggaagtctgtattggggactgggtgaaggttaaggactcagttggaaccccagtgtatcaatggggtgatgtgaaccacagcagtataggggtggtccaccgggctgatgatggagagctctggattgctttctgcttctgtgagaggctgtggttatgcaaagcatgggaggtggaaaaggtgaggcccttcagacaaggtgacaaagtacggatacgatctggtcttgtatcccccagatggggctgggggatggagacctacgcgagcaaaggcgaggttgtgggtgtggatgcaaacggaaagctgaggataaagtttcggtggagggatagactttggattggggacccggctgatgtcgttcttgatgatgcccatttattgacggaggcttctaatggcttttgacctttttgttcataggcttgtggtattcttttgaccccatatctcatttcttgcacccatccattttgcagcatttcaaatttagcaaaatctcaacctgcagtggagttgcaagttgcacatagttatcatcgcataggcatgcatggcagggtgtatttcttgttgataaccggggaatgagaagacagcgatagtgaaatactcctagagttgataaccaccacctaggtttttttccctttggtctacatgtataattatgccgcctgataccttttgggtttcagtgtaccatatataccagtgtacaggttcggacctgaacattaatttgattgatagtggtctactggtcttgtatgtgctgactcgttgtgcaccgagtggctggcaatgccgcgtgtaccaggagttactgcaagctgc

SEQ ID NO: 14503 - DNA, 1278 bp, Zea Mays
ttttgatgcgttctaatgaattggctcttttttcattcacgtcggccccgcctcttctccccccgacgcgcttgccgatccgcccattccgccgctaccactctcccgccgccgccgcgcgcctcagccgcccgtggcccggacatggagggcgccgccggggaggagggcgcctccacgccggcggcgagagggggagcggaggcaggggcaggggcaggggcaggtggagggatgctgaaggggaggtcctgcaagggctgcctctactactcgtcaaagctcaggtcgcgagcgcgcggccccgtctgcgtcggcgtcacccgcgcccttccccaagtttctgagcgtaaggttggaaaacttgaactggaagctatccaagaaggtcgttatcttgcagatttcagatatgcatgcattggctattcaatgtacttaaatggcaaggaaactcctacgggggtacgagataagccacgtgcccatctgcctgtttgtgctggagtcgagctgttgatagatagaaaagtcccaacaaacgttaagaaagaagctccaaaaccacgtcaatataaaccagggcatgcaggagatgatttcttaacgaaatttcagaggaatgcaggtcttgtggccagtggtgtggctaagaacctgaatagagttgggacctacatcaaagacactgtcagtgatatgatgcagcctcaccgcaagcgtcccaaataaaacataggcctgtctctcctaaatcctgtatggaagtaaacattagaaattagatgatcggggaacatcggatcaatcacttcctcccatacacacccagcgcagcagtagcttagctttctgttggtttcagaaactctagagaattgagagaagatctatggttaggaaaaatagccacttgaaacatgttatccactagctcatggggcttcgattccccctgtctcgccccattttgggagccattgttgttttcactaggcccctccggcaaaacaaccacgttccgccccttctgacaataacgtggtgccgttgagaggtccagtgatgcattttttgttggagcattgaagtatcagtgtacgtagatgatatactaaactcttattctgttactactagatacgtgccctcttattctgttactagattagtgccctcttattctgccttttttatctgcttctagtgctgtggcaagtcatggtccagcacgtcactaagcgccctggatgcttgtacaagctcctctggactgaa

SEQ ID NO: 14504 - DNA, 112 bp, Zea Mays
ctatagttcttaatgtgatatcgacacctagtgttttcgtattaatgttgcgatgtcttgctataagtgtttaatattcttcgagtagctttatctatcttgtgctatttat

SEQ ID NO: 14505 - DNA, 2374 bp, Zea Mays
ccgtcaccatcctagacccttgtagcaacaaaaacgaggcctttggccgggttcgtgcgcctgacacagacacagatctggagacagatgggttggctacttcctcctccagtgcttctgcagcctttgccgagcggcaggacgacgaagcggaggagttgctgtgcggggtgaaggaagaggagtcggctcaggtacaagaaccggccaagaatccggcaggacgtcccaccccactaccccaggaaggggtcgaaacagcggccggccccggccttacttgacctcggcagcactgggttaattccacggagccacgttttctacaagtttcgtgattggtggtgtggggttgatgaacaaaggacttgaagcattactcatccggtcagacgtgtttcgtagaccttgacgctgagctatcggagttgggtttccaaaaaaaggtggagctctgagagagttccgcattcttctaaaggaagtaggagatacccaggaagcagcatggcattttcttacagcaatgggaggacattgccctcgaaatgggaggatgcagagaggtggatcttcagtcccaattccagcgacatgcgtggaagaactacggttgctcatggtcggaggccaaagtctaaaagtggccccctggggcctccaggaagacttggtggacagtattcatctgtttcttcggtgtcattgcttgatagtgagagagttggacctattacatcaaattctcatttttcagcaggagtactaatgccaggacatgtttgtggaggaaaaaatacaaatggggcctattcaggtagaccaattggtgacgaaatcaacattggagaaggagtcagaatttgtccactgaatggtgggtctcatcctattcgaactcccagagttcgcaagcgattagattctgcagtcgaatcatctgcttcattgcctagcacacaagaatctatccaagacgagcaggttgaaatcacagaagattcagcttcaactattgcctgtataatttccaggaaagatgttgcaacacagaccagcccagagctaagtaggtcctcttcacccaacaatagaccaacatttaatcgttccctgtcgacggaacaaatgaaagagagggggagctgtttctcagatcttgatatcagggatgttcagatggatgatcgagtgactctgactaggtggtcaaagcaaaatgtaacacggttgcctaacaagaattcaacaaacataatagagtggaaggaaaaagctgtggaatcaaaatctttgtcctggggctttgccgaagcgaagtgcatatccaagattggtagagaggacacaaaaattactgcatgggaaagtattcaaaaagcaaaagctgaggcagcaattcagaagttaatgattaagatggagaagaaaggatcatcttcgctggataagattttgaacaccctcaagtctgctcagagaaaagcccaggtgatgcttgagcatgagcttgatgcagtaacagcaaaccaagatggaaaaggctctaggaaggcaaaaaagggagcacagcgtagcaagaatggccaaatcagttccctgagtggctgcttcacttgccatgctttttgatacatgtaattccaaaactgagaatcaggatctgagaaattccttcgtactgcctacatcaccgtcatgttctccacatcgaaatctaggtgaacttcagatatctatcagatgtcagtacataatacgataatcccacagctggaaatcagactcggatctttccaagatgctagctgcaggctcttcatctgccatgatagggataatgcaatatctgcagtgccgctctgtgttagtttcgattctgccaatgagacagagaaaatggagcacgaaggaaaaggaggaacggttctgcgtacacctcatgtgcccggttgatgtctcctttatcattgtgtcattacctggcctgccttgtagctaggcactgctgatgtcgatcttgttgccaaaaaggctgtatggatcatacattcacacaaagtgcaattccattccaagatacagcgaaatcttcaggtacgaggagaaagcatggcctgcttgtgcgtgtgactagttgggcaccctgctgggtactggaatggaaccacgctcccttgttgcttttgtttggtacagtgctggttgttgctacctatatttgctttacagcagcgtcggtgtgtagctcttttaggaaactgagatgttggtttggcctggaaacttaacaatatcgtcacacacatatatgtacatatggggatgaagatatgatcgtcagtatgccatcctttaaaaaaaaagattctca

SEQ ID NO: 14506 - DNA, 895 bp, Zea Mays
aatagtcgccacgctcatgctcaggcccacttgtgacgaaaggaaacaactagtccgacccataggctcggtcagcccaccccagacctttccccttccgtccccggccggcgccaacgccactccagtgagccgagggcggagacggtcacggtgggcagagtgacacgccgcacgcctctccgccccgctccgctccagattgcgcgcacccacccatggcgctcgccgcttcccaccacggcctcctgcccttcgcccccgctgccacgcctaccccgtcacgggggcacctgcgcttccgcgccgcgcgccctctgccccgccccgcccggagaatttgttgccaatctatcaactcagctaatgtgttgggagcttcttcaacgacatctgatgaggcagtcccagtcccagttgtccagatagatcaggactcagaccgtgatgcgaccattgtgcagctaagttttggagatcgtttgggggcgctacttgacacgatgaaagcactcaaggaccttggccttgatgtcacaaaaggaagtgtgacaactgactcagctgtcacacaaacaaagttccacatcatgcgatttgggcgcaaggttgaggaccctgacatgttagaaaggattcggctaaccatcatcaacaaccttctccagtaccatcctgaatcaagtgagaagttagccatgggtgaattttttgggataaaacctcctgagaagaagatgctgttctgtatcgtgttatctcggtttggccatctttttaactatgatctgtgagttatcactattttaggaaatggaaatttataaacagttaggctacaaatttactttgttatgctattggtttgtgcttcgacctttgatacattattaag

SEQ ID NO: 14507 - DNA, 1485 bp, Zea Mays
tattcctgtcgtgaaatgatgcggcaacttttggctgctggagggacacattcagtggttttgactcaagaaggtcacgtttggacatggggacagccatggcctcctggtgatatcaagcaaatatcgacaccagtacgcgtgcaaggccttgagaaagtgagggtcattgctgtaggtgcattccataatttggcactcacagaggatggaattttgtgggcatggggtaataatgagtatggtcagctggggactggagatacccaaccaagatcacaccctatacgcgttgaaggactatctgatctctcactggttgacattgctgctggaggctggcattcaactgcactaactatacagggagaggtgtatgcttgggggagaggagaacacgggaggcttggatttggagatgataagagtagtcgcatggtccccctaaaggttgagcttctagctggagaggatattgttcaggtatcatgtggaggaacacattcagttgctctaactcgagatggccggatgttttcttatgggaggggcgaccatggccgtctgggctacggcaggaagctgacgacaggccagcccatgggagtggacattgacctgccgccgcccaagacccgcagcagccgggacgggcagtggcaggcgaagtacgtggcttgtggcgggcggcacaccctggctattgtggtgtgggcagagaccaccgactgatcacggagtgatcaacttcctgaatcctaatctgggtgcaaatctgagtttgacaatcctgctagataattatagtgttagtgaaataagcataagttatgcgacattaggcatcataaatttttatgtatgtgcttaatttggcaaggaacaaaaatagtcgggaagaggactttgtgcagatgggagagcttcagtatttcagcaatatttttcgatggacaattttgtgctgtatcctgtgcttactggctcccgggttgctaccttcactcgctgcacggctacacatctaactgtcaagggtgacaatggatcaagcactagttcaaatcgaatattggagacattcaattagcgacgattaaggagatcatgcttcaactcgcggctgctcaagaacatgcacaaattacctccaaggagcttggcctaaggagacgcctcaaagtgcgcagtgttggcttgaagcacagcaagaatcaggcagcactctcgtctcacgcacatccgttacggggacgcgaacaccaaattcttctaactatgggtgaattatagggcacgccaaattaagggagtatttggttactttgtcatgctactaactaaacttatccctaaattttctatttgaaaagccttttttagttataccgttggaagtttagtgactagattttagtcacttaagttttggaagttggaaccaaacatcccctaaatactgaatacataccaactacaccactg

SEQ ID NO: 14508 - DNA, 1277 bp, Zea Mays
aaaaagcgcgagagcgaaggaaggaggcgacagggagaaagtatcatctatcccgacccgaggcagcaggatatgaggctgcagtgaacgccgcccggcgtctcgagacgaaagggctctgatcctcctcctctgccattcagtcagtcgtcactcccccgccctcccaatggccacctcgtccgtgctcccgttccacctcccgtcctgcgcgcgccgggccagcaccgccgcgcgcgcctccgcggccccggtggcggcggcggcggcgacgaccgcgcagtccctggaggagtcgttcggccggaagggcctgcggttcgtggccgacccggccggcggggcccccgccgcggagctcagcgtgcggaacggcagctcgctgcacctccgcctcggcgacggcctcgtcacgtcctacaagcccaaggtgcagtggaaggacgacgggtgccgggaggtgctgcacaccgtgggcggcaagggcggcgtcggcctcgtcctcagcgatcaggcgtcaggtggccagtcgtcgctgctcgacggcgccgagtgggccgtcagggacgccgactccgattcctacgacgccgtgcaggttgagctcgggtgcaccatggggaagctggacatctcgtacgtggtgacgctgtactcgctgagcatggcgacggcggtgatcgtccggaacacgggcagcaagccggtggcgctgacgggcgcggtgctgagccacatcaagttcgacaagcgaagcggcacggccgtggagggcctgcggggctgcccctactgctcccacccgccgccggccgccgccttcagcctcctgtccccggccgaggccatgaagcgggaggaccccggctggttcggcggcggcggcggcgaggagccgcgccagggcgtctggaccatcgaggaggacctctacaccacgctcaagaagaaggtgagccgggtgtacgcggcgccgccggaggagaggaagaagcgcgtctacagcaccgcgccgtccaagttcaccaccatcgaccagtatagcgggctcgggttcaggctggtgaggatggggttcgacgacatgtacctgtgcagcccgggaggcatgtacgacaagttcggcaaggactacttcctgtgcacggggatggcgtccatgttggtgcccgtcgtcgtcaaccccggcgaggagtggaaggcggcgcaggtcatcgagcatgacaacctgtaacttctgtatacaggtttactgtgctgctgtcgtcctactttac

SEQ ID NO: 14509 - DNA, 873 bp, Zea Mays
gccacccaccgctgcgctgccagcgagggtaaaatacctcgcctcgccgcctataagaaaggtccctctccgtttcttcaaactttagttctagagcccaccaaagaaaaaacaaataccggatagatattaaagcattttcctcgtcgacttaaaaaatagaacaaaaaggttcttccttttcgcagctccatcgtccaccaacctcctccgattcggccgtcgtagcgtatagccgaattgccccactccaggactctcgccagcttctccggccgactagaggctgtttccggcgagtgctcggctgatctcctccgcgcggctgaggagatcacgcggtctcgctcgggggggctggggcgtgcatgatgggactttggttgattccgacgatggagactccggcgaggcttctgtggagcaccagcttcttccgccacaaaatcgccgacatgcttgcatcctcctcctgcttcttatagatcccacccctcgacgtcgtcgccggcagctagctcgctagcttctgtacatacgtcgacgccatatctagctagtctcttcatccagtcccgataagtgataactaataattaggagcttgcttcgacgaccttgcattggtccatggagtccggacggctcatcttcaacgcgcccggctccggcgccgggcagatgctcttcctggactgcggcgcaggcggtggtcccggcggcggcttgttgcatcgaggcgggagaccgatgcttggccttgaagaagggcgcggcgtaaaacggcccttctacacctcgcccgacgagctcctcgaggaggagtactacgacgagcagctgccggagaagaagcgccgcctgacgccggtg

SEQ ID NO: 14510 - DNA, 291 bp, Zea Mays
tctctcctcactctcctcccacagatgacagacccacacacacacactctctctcttcgcagacacaaccaaaagaccaaggtggaaaaatagtaaagaaacggagcgaggctcctccgcatttcttatctatcctgatccaaaccctccgagggggaaacaattcattccgcacggcatccgggaaggtctgcgtcgtcgccatggccaccgaggaagtcgccaagccgtccccgatcccgccctaccccgagtgagctaaccgacggcgcgtcgtgttggttgggcgtt

SEQ ID NO: 14511 - DNA, 2274 bp, Zea Mays
ggcatcttccaccgcatcaccgtgctgtgctgcggcggcctcgtcctcctcctcctccctcctgccctttttataggccgcctccgcttcgtcgtcttggcaagacctgcccccgcgcctgcaatcctacgacaacagggcgccgctcctcctgcccgtcaagatcatggacgccgccgccgacgacaagccggaaatctccgacgatacggcccaccagattagcgttgatccttggtatcaagttggcttcgtcctcacaaccggggtcaacagcgcatacgttctaggatactctggatcaatcatggtccctctaggctggatcggcggcacatgcggcctcctcctagctgccgccatatccatgtacgctaatgctcttcttgcacggcttcatgaagtcggtggcaaacgccatatcagatacagagaccttgctggacacatatatggaccgaaaatttacgggcttacatgggctctgcagtacattaaccttttcatgatcaacactggctttatcatcttagctggacaagctctcaaggccacgtatggactgttcagtgatgatggagttctgaaactcccttactgcattgcgatatcaggattcgtctgtgctcttttcgccattggaatcccttatttatctgccctcaggatttggttggggttctccacgcttttcagcctcatgtatattgtgatagcagttgtgctgtcgtcgagagatgggataaccgcacctgcaagggattacagcatccccaaatcatcgcagtcaactcgagtcttcactacgataggttccatagcagaccttgtgtttgcttacaacaccggcatgctgccagaaattcaggcaaccatcaggcctcctgtggtgaagaacatggagaaagctctatggttccagttcaccattggctccttgcctctctatgctgtagtttttgtgggttactgggcttatgggtcctcaacatcaggctacctcctcaacagtgtcacaggcccagtctgggtgaaagcggttgcaaatctgtcggcattttttcagacagtcatagcgctgcacccccatgtatgaattcctggacacaaaatatggaagtgggcgtggtggcccttttgagatccacaacgtggcgttcagagtagcagtcagaggaggctacctgacggtgaacacgctggtggccgcggtgctcccattcctcggcgacttcatgagcctgacgggcgccctcagcaccttcccgctgacgtttgtgctcgcaaatcacatgtacctgatggtgaaggggcctaagctgggtgccatccagaaatcatggcactggctcaatgttcttgggttcactgcgctggctgttgcagcggcggtctccgcaataaggctcatcatgcgtgattccagcacctaccacttcttcgctgatctttgagatcgatcgttttcttttctttttgttggaatgctgagccagagctagtattttttcattttcagagaattattatccatgtatgtaaggatgacgcatatatatattgaatagatgatttaatatcaggtcagagcagacaaggaggtatggtgtcgatgcacgacttgtagaggatgcggaggtagtcgagcagggcatcctggttggcgtcgtccaccggctccatctcgaagctccacaccaccagcgttgcgcctccgccgtagtccaggaggctgatggtgttgcgggagccggcgaggccgacgttgccgtcctccatgaggtaggtgtaggagcgggcggtgtggtccatggccaccagcctctccctcacccacgacgacccctgctgctgctgggggaacatgaggccgccgcgcacgaggcgcacgtagcccggcacgtcctcgtcaccggccaccgcggtgcacgactccaccatgggcatccactcgcgcagccgagacgtggaggacaccagctcccacacgcgggccacgggcgcgctcaccacgccgctcgctgcgccgcgccacgccttggacgccgcttcatctgactgtccgtgcccatccatggccaagaaccgtcagctccggggccagcggatatagcaagggggtcgctggaaagtcaagctacatggctgcaaaaccaaagctcacctaaaaataaggacaaacataagaaccagattttaaaatccacctgcctaccaatattttatataggtgataatcaccttaaaaaaagatgtggacgacacacacgctag

SEQ ID NO: 14512 - DNA, 1860 bp, Zea Mays
gcttaagtagttaagtttattcctgaaagacctattgcaggaaggtcatccatactgtgggcccaaaatatgctgtaaagtatcacacagctgcagagaatgcgcttagccactgctacaggtcttgtctagaactgctcattgagaatggccttgaaagcattgctactggctgcatttacacagaagccaagaattatcctcgtgaaccagctgctcatgtggcaataagaactgtgagacgttttctggagaaacaaaaggacaaaataacagctattgtcttctgtacgatatcatcatctgacacagagatatataagaggttgcttccactatatttccctcgggacaagcaagaagaagagatagccgcattgaaacttccagctgatgttggggatgagaatggtgagacagtaatagatgaaaggaaaataagaataaagcccttgcctgctggggaagcaaatagcaaaacaccaattcctacacttgcagatatcccgcttcctgattcgagtttgacacgtagaaggaattctttcaagttggactcatatttggatcctgcttttatgtctataattaaggatcctgatctccgacgcaaggagcaatgggaaaaatctcaggcaaacaagggacttaacttggctaacatgcttgggtttggtgatcttggcagtccaccattatctgctgctgaagaatattcacttcattcacgataccttgctaaagcgaattctatgaatctgtcagatgttgctgaaatgaaaataatttaccgtggaggagttgatagtgaagggcgtccagttatggtcattgttggtgctcactttcttcttcgctgcttggatctggaacgatttgttctatatgtagtaaaggaatttgaatctctgattcagaagccttacacaattgtctatttccactctgtggcatcattacaaccacagcctgatttaggattcatgaaacggttacaacagatactaggtcggaagcataaaaaaaatcttcatactatatacatactccacccgacactgggactgagaacagccgttatggcgatgcaactttttgttgacggggaggtctggaagaaagttgtatatgtcgacagacttgtgcagctattcagatatgtaccacgtgaacagctcaccattcctgattttgtgttccagcatgaccttgaagtgaatggtggaaagggcataatcgttgacccaagaacaaagcatatctaccagagaccatctggttgatctgtcataaacctgcaaatgaacgcttcacagtaccactctcactatgcacagactctccatgaatgactctgtccagtcctctgtagaagagtacccttctagagctgtgcattttgtatctagttgacattgttgctctgtgctattccttcgcctttttgggaggcatatttatgtatcttaataactattctgtataaacaaaaaaaatgctaaatgtctctcaatttgcctatagctgggcgtgctcgttaggttctgtaaatttttgacaggtccatagatattgagaaataggattgcagtctgttccgtctgagtaattgatcgccttggaatgtcttaataggctgaagactgatctgtttgctgttgcaaacaataagtagcaagtcccaaaggcgaggaagcataaactctggtctattttgcttttggttaactgcatgagatagtctgttaatttttaagattctaattgtgattctgagggtcaccgtccaaatatggtactctcggtaccctttattttttttttaccatgaacccattttggaggttcttgagttatttg

SEQ ID NO: 14513 - DNA, 561 bp, Zea Mays
tttatgtttgccatgtagctgttactggggctcatatcgtgctcggtaagtatcagcccagtgactcagggaatcataagccaggattgctactaagcgcgagtgtgggaggctcccgattcccgaggatattttaaacctgcagagcctgctcgatggaactgaagtacttactatctgtatataatctggatatggtgttgtgttttgtgtaggctggaataatgtagtaatgagtaacggatagcatgctgttggaccacaggggtatatgttatcttgcagtacgtatcagaactgcctatgtctattttgtagctggtgggatgccaccttagtatagttccgttctcgaatatttgtcgtctgcgagtttatttttaaactaaaccgtgacaaataaaaaagaacggagtagtaagttaatcatggtgtatgattttactagactatgcatgatgtatggtggtggttgtggcacgtagcttatggtttgtttgagcatttgaattgaagcgtgctaactgaaatgaatggataatggtcatcggtcatgttctg

SEQ ID NO: 14514 - DNA, 1551 bp, Zea Mays
tcgaacaagtgatgcgcatccgcgggaaccactttgtatggtcttcatctttgctgagcaaaaagttcttgatgccgctatgaatgacataaacaactcttttggaaaaggaagtgttacaagattaggcagtgctggtggtgcttttgttgagacattcccaagtggttgtctaacactagattttgctctgggtggcggtcttccaaaaggaagagtagtggaggtatatggtccagaaagcagtggaaagactaccctagctttgcatgcaattgctgaaatacagaagcttggaggaaatgccatgcttgtcgatgcagagcatgcttttgatccagcttattcaaaagctcttggggtagatattgaaaatctgattgtctgccagcctgacaacggagagatggcactagaaattgcggaccgtatgtgcagatctggagcaatagatcttatctgtattgattcggtgtcagcgctcaccccacgtgcagaaattgaaggtgagataggaatgcagcagatgggtctacaagctcgtctgatgagtcaagcattgagaaaaatgtcaggcaatgcctcaaaggctggctgtactcttatgttcttgaatcaaataagatacaagattggagtgttctatgggaatcctgaagtcactagtggagggatagccttgaaattctttgcatctgtccgtcttgagatacggctcattgggaagataaaatctgccaagggagatgaagatgttggtgtgaaggttcgtgtcagagtgcagaagagtaaagtatctaggccctacaagcaagctgaatttgaaatcatttttggggagggtgttagtaaattggggtgcgttcttgattgtgctgagctgatggatgtagttgcaaagaagggttcgtggtacagctacaaagatataagattgggccaaggcagagagaaggcactgcagtatctccgagagagcccaaccacctgcgatgagatagaaaaggtggttcgagctatgataccagaaggatccagacatatgagcctactagctttcgggcagtcatcatcaactgaagatgaacaggcgtatgatgaacaataatggtacatgaggttccgaagatggaacacttgtgaaaccgtcaagctctggcttgtgtcccttgcggataacagaaaagatcagaggtaaccaaccaatatggcagttgtgtgagcgctggagtggagttgactaagaccttgttcgtttctgccggattggtgggtcctaacgattcctgaccggattgtttctctaatttatataaactttgattagctggaacgattccgggtgcaatccgacggaaatgaacaaggcctaatgttgtacgtgtactgtggcatggcagaaccgtccggtttaacccaatttcgggcacacctgccagctatttatcactaagtgcaccagagattatatcaaatccgatagtctgttaagcccatccaatgaaagaacttaaaataatccatgtttacatcaggatcataaataaggag

SEQ ID NO: 14515 - DNA, 751 bp, Zea Mays
caaaagcgccggcgccgttcatctccccccccctctctctctctctctctctccccttcctctcgagttcgagtctcgatatcggcaaagcaggggacctacctattgtgcggctgcggcgcccgtcgttgattcatccgctggctcgcgctcgccggtggcgccggggaacagccagctcgagctcgctttcgcttcgcatcatgggagccgctgggttctgagctgcgcggccggcctgtttcagctgagatgaaactggaaaagaatcaaagttctgcatcacctgccacttcgaattttagagtgaatagcaattgccatggggtctggatcagggacactgaagcagaagaaacgagtgaaacatgcaaagaacaaatacttgaaacctggtgccctcgctcagattcgctatagcaggagtacaagcagggacattgggaagaaaaggattttgttgaatgcgaaagatgagctggagttacctccacagcctgaggttctcttagaaagcaatacactagttttgtcccctgcaagactcaattttgagccatttggtagtaatacagggcaggtattgccaaagactccaaggactccaaatgcatctgtgtcctgtggtgattcagggcttgaatcacttcctcttgatttgctgatcaagatcatgtgttgcttgcaccatgacgaactgaaagttgttttccatgtttcaaaaaggattcgaaaagcactcacctttaac

SEQ ID NO: 14516 - DNA, 1821 bp, Zea Mays
cagtcctgggaggaggagaaggacaaggtctctgatcagctccagcttgtctggtcaaagctgaggagcctgcttgggctgcctgtgagtccaagctcgacaggaccactgccactgtgaagcacagcggcagcggcgacgagacgaggacgcggaagctgccaagcggatagatctacgcaaaatggagaccaaggacgtgtcgccgcttgccgccgccgccgcggcgcccgtgcttgcaccggcctctcagcagcagcagcagcagccgccccagccgcagcagcaccaccaccagccaccgcagccgcagcatcagcaccagcaccagccgccgccgccgccgttcccgcagcaggcggccccggcggcggcctcgtcgcccgccgcgtccatgcccggcggcatgcgcctctcgttcgaccatatgcccgggaaggcgcccggggagcagcaccaccaccaccaccacgcggcgccgcccatgctgtacgcggcgccaccgcagggcgcgggtgcgccggggggcagtgtgctcggcatgggcgaactgatgcgcaagaagcgcgggcggccgcgcaagtacgcgcccgacgggagcatggctctggcgctggcccccatctcttccgcctcggccggcggcggcggcggcgccgcagcccccgggcagcagcagcagcacggcgggttctccatcggtagccccccgtccgaccccagcgccaagcgccgcggccggccccccggctccggcaagaagaagcagttcgaggccctgggttcttggggcatcgctttcacccctcacatcctcgccgtcaaggcaggcgaggatgttgcttcaaaaataatgacattctcacagcaaggccctcgcacagtctgcatcctctcggcgaatggcgcgattagcaacgttacgcttcggcagccagccacatctggtggactagttacttatgaggggcgtttcgagataatctcgctgtccggttctttcctgctcgcggaggatggtgacactcgcagcaggactggtggcttgagcgtcgcgctcgcgggatctgacggccgagttcttggagggtgtgtcgctggaatgcttatggctgcaactcctgtccagaggggaagaaatctaagccagccgaagcgcggaaggtcgaaccgatggctgctcccccgccgccgccgccacagatggctgccttcgtgccggctccggtggccaccagccctccgtcggaggggacgtccagcgcgtcgtctgatgactccggcagcccgatcaaccacggtgcgatgccgttcagccactccagtcagcaccagcaccctcaccagcaccagcagcacatgccgcctgcctacgcgtccgggggctggtccctctcggtgcaccagcagaacaggcatgattctgacatgaagatgatgtcgaactaacaggcgccccattcgttggtgtttgggctggagaggaaggaaaggaacctgctgatggttaggttggtactgctgctatgaaacggtcctcttgcgcgtcgtctgtgctctggtcagtgacgacgtgtcgatctgctacttaagctaagctagctaggagagttagggttcatggtctcaccccccgctgttgtgcccctgagtaagattaatttaatttgaattagtcgctctcataatgctgcgagttgtgatggtttcctgatcagatcttcaccttctaggctagttaaaatatcatttctctagtactatggatcatggatttacttggatacttgggtttaattcaggaatttgatcgtattctgt

SEQ ID NO: 14517 - DNA, 1052 bp, Zea Mays
gagtttattggctacactgactttttttattctacagaacaaaggagaaaaaacaaacggatcctttaaagcaggatatagtgcgtcttcatgttcgtctggatcaccaggttatgtttggtgagcatgttggcattattggttcgacaaaagagcttggctcatggaagagtcaggttgatatggattggacaccaaatggttgggtctgccagcttgatgtccctggggaagcacttctggagttcaagtttgtgataattttgaataaaggcaaggacaaaatatgggaggatggtgataaccgtgtagttaatttgccaaaaaatggttcatttgatatgccatgccactggaataagacaaaagagcctttagatcttttaggatcatcagagattaagttgtctggagatactgaggtgataggtgaagatgctaaactatctgaaaatattgctctagaagagatggggagtatctgcaacgctggggttggcgatctgacaccaaaacacgagtcaagcacacttggtggccaatggcaaggtagtgatacagttttcatgcggtctaatgagcatcacaatactgagaattgtaggaagtgggacatgactgggcttgatgcagtatcgctgaaattggtggagggtgataaagcatcaagaaactggtggcggaagttggagcttgtccgtgtgctcttgtctgaatatgttcaagatcagagtcacttggaggctcttacatattctgctatatatctaaagtggatatatactggtcaaataccatgctttgaggatggtggtcaccatcgacccaataaacatgctgagatatctaggcaaatttttggtgaaattgaaaggatatactatggaaaaaacacatcgtctcagggaggattgtaggggaaagcgcagatttcacttcgaggtttctggcctaaaattcctggatttttggatgtggtagctgcctcttggaaccaaccaatttaggcctcctgtcctatggagaggttgtcgctaaagcttaaaagtctg

SEQ ID NO: 14518 - DNA, 1242 bp, Zea Mays
acgatcatatatatgcgtgagagcgtaggtcccttccgtccgtgttgcccttgcatgcatgcatgcatagttgttgaccctgcctttttggtgcactcggacacgtacgcgctggtggtgagcacggagaacatcactctcaacgcctacatgggcaacaaccgccccatgctggtcaccaacacgctcttccgcgtcggcggcgcggccatcctgctgtccaaccgccgcgccgaccgccgccgcgccaagtaccagctcatccacacggtgcgcacgcaccgcggcgcgcacgaccagagcttcggctgcgtcacgcaggaggaggacgacgcggggtgcgtcggcgtctccctggccaaggagctcatggtggtcgccggcgaggccctgcgcaccaacatcaccacgctgggcccgctcgtcctgcccatgtccgagcagctccgcttcctggccaccgtcgtcctcaaccgcgtcttccgcgccagagtgcgcgcctacctgccggacttcaagctcgccttcgaccacttctgcatccacgccggcggccgcggcgtgctggacgagctggagcgcagcctcaacctcagcgcctggcacatggagccctccaggatgacgctctgccgcttcggcaacacctccagcagctcgctctggtacgagctcgcctactgcgaggccaagggacggatccgcaagggggaccgggtatggcagatcgctttcggctccggcttcaagtgcaacagcgccgtctggaaggcgctccgcacggtggacggcggcgaggagggaaacccgtggacgccggagatagacgtgctccccatccacgtgcccaaggtttcgcccatcgatgagaccacctacaagttcgctgacggcgccacgtacaagatctctcttggttaaaatatattactactattgttattattattattattattacatgattgatttctcatcatcagcatgtaacctaatcaagataatttaagaagcagcagcgcgccgttattaattattattgccaggcttgacgatggtgacggggccttactattgccatgatttgcatcatgcatctgtacgtgaagctctatgaactcacgcgccaagaattatacacttcgattgatctactatcttgtcctttggtgatcattgattgcgagatgcaatgcgcacatgcacttgaacgacatgtggtcctatgtagtgtgtaaggca

SEQ ID NO: 14519 - DNA, 107 bp, Zea Mays
cagaaaggtcatcaagcaccaggttggcctaggcgacggtgatggagacgttgccagcgtggcagcgcgcgaggtcgtgccaccagagtaggctgtcacaaccctta

SEQ ID NO: 14520 - DNA, 1225 bp, Zea Mays
agcaacccaacaaatttgggctctatattgaagaggttgcacgggtcgatgcgagctgctccacatttattctagtgcactcctcgttggctatgtccactattgccctttgtggatctgaggctcaaaagcagaaatacttaccatctcttacccagttcaaaactattggttgctgggcattgacagagccagattatggaagtgatgcaagctccctaaggactgcagcaaccaaggtacctggtggttggcatttagatggacaaaaacgctggataggtaacagcacttttgcagatgtcctcatcattttggctaggaatgcagatacaaaccaactaaatggatttattgtaaagaaaggagctcctggtctaaaagccacaaaaattgaaaataaaattggactcagaatggttcaaaatggagacataattctaaataaagtatttgtccctgaggaagacagattaacaggcatcaattcatttcaggatataaacaaggtcctcgctatgtctcgaattatggtggcatggcaaccaataggcatatcaatgggagtttatgacatctgccatcggtatttgaaagaaagaaagcaatttggagctccactggcagcttttcagctcaatcaagaaaagcttgtccgcatgcttggcaacattcaggctatgcttctcgttggatggcgactgtgcaagctgtatgagtcaggcaaaatgacaccaggccggtctagtttaggcaaggcatggacgtccaagaaggccagggaggtggtttctcttgggcgagagctactgggtggcaatggcattttggttgattttcttgtcgccaaggcattttgtgacgtggaacccattttctcgtacgagggcacctatgacattaatagcctggtggctggcagagagatcaccgggatcgcgagcttcaagcctgctgtgtcagcaaaatcacgcctgtgaaagttgtttttttctttgttcccgaagacagtagaaatcaaccttgtacattcagatgattgggaataagaacggtaggaaagctgtaaaactcgacgtgcttcctcgtatgtactgttctgtttcaaattattcgacgttttgtcggaacggaacggaggacctgtatggctgtatatgatactcatcctatatatcacgcagcttttgaagattttgtaaaaaaacaaccataataaaaacaa

SEQ ID NO: 14521 - DNA, 1211 bp, Zea Mays
gggtggaggcctggagccgtgggggtggttggctgccgccttctctggcccatttctcagagaaccccgcccgcacccggccgggcgaaatggacggtgtcgttgtcaggagggtcatcccttcggataacagttgcctcttcaacgctgtgggctacgtgatggagcacaaccgaaataaggcttctgagctcagacaggtcatagcagcaacagtcgctggtgatcctgagaaattcaatgaagtgtttcttggcaaaccaaatgaagcgtattgtgcttggattttggatcctgaaaagtggggaggagccattgagctctctattctatctgaatactacgggcgtgaaatcgcagcatatgacattcagaccacccgctgtgatctctatggtcaggagaagaattacagtgaaagggccatgctcatttatgatggtttgcattatgatgctctcgctatgtctccggctgaaggtgcacctgaagaatttgaccagacaatcttccccgttaatcatgaccgttccattggtccagcagaaggccttgccctcaacttagtgagggaggcgcaaaggaagaggagctacactgacactgcaaacttcactctgcgctgcggggtgtgccagatcggcgtcatcggtcaacaggaggctgtggaacatgcgcaagccactggccacgtcaacttccaagaatacaaatgacagtacaagatcagactgttgtgctgtaaacttgaccatcatttggttccaactgatattctcctcccgttggatatggttggcgctacattgtatcacagtgtaattcttacggggcaaacagaataatggtcaccttcgttctggacaatgtctatcttgcctgccaatgtcggttgaaattgaaagagcctacaatccattgtcgttctacatgccagaagaggtttgttggcccatgggccggatctatattgggcggtgtggcccggctgtatcatatctggtttatctattaggctttattcggttatttcaattctatgtggattggagtgtattggaatgtattgagatgtattttgacttgttatggatttaaaccgactcaataccattcaatccacatggtttaacggtgaaacgaacaagtccttaacgattttttttttcaaaattcttctggggctccaccattgctagtaggctagtagc

SEQ ID NO: 14522 - DNA, 842 bp, Zea Mays
gtttgtggctgattcgaaacaggattaaagcctgagcatcaattacaatgtcagctgtgagagagtgggctgcatctcagaatagcaaagttcttgaggctgttgcagttaacaatttagggaagtggaagacagcgacgcagatgacagcattgactctgcttctcgcaagcagagacccaagtctacctgcgcaaggcgctctagttgcccccggtgttgctctactttacgtctccacgggactcgccgtatggtccctagtggtgtacatgagaaagatatggcggatactgctcaaatagtattagcacaatatatatatagtgtaatagaagaaacaagcaaggcgagcatccgttcgtgatcgtacaacttttggaaggctgttgggtggcctgagccctagagctggttgggatcctcattcatctgtaacttgtgcgtcagtttttggtggatttgccgctaaatttgctgaggcatgccaggatcctattagatttttagaaacaagacatggtgtgaccctccgtgcgtaatgagaattcttagaaacaagaagacatggtgtggccctgcgtgcgtaatgagatactagtctgcgatgcagaagattgtaaccttatacaaatacaatctggaggtttctgcgtgtggagttctaccgttgtactctacacataatatcataatataccaagagcgtacaattattctttcagggtgtgtttgggagcaacaagactgaagacgttaaaatctccttatattcaaagcctctttaattcactttaatccacttgctcccaaacaaaccctagttgacaatatcccgtctc

SEQ ID NO: 14523 - DNA, 1956 bp, Zea Mays
ggtggaataatcccttcctcggcatccttcggtcccggaatatgcccccggcgtctccctcctcgcgttcctctcgtcggtgagctcctgccgcctggctcgcacagccgatttgcctcagtccagatcgtgcctccttcttcctagatcgggtccgaattcggctaccctcgccaccgccctacgccaggtgccgaggcctccgccgatctcttcgccggcgaagagcggccaccagaattatcactatgcagacacctgttatctgaaggcatgggggaggatgctgcttgcagtgcatttgattctgagaaggtaaccttagaggagttccgtaacatgaagcaatcactgatgcgaaacaacaaactagttgttaggattgctggccgctactttccctgggatgctgctgcacctatagtactcggtatgatttctttcagtgaggaacaagtttttgaacccaaaggaatgataaatgtggagcgagttgagcaaagtgcagctccaggtggcagctggagcatctggccatttagtttcagacgaacaaggactattactgctatccagccagtttgtgaaagtattgttgagacttctgtatccactcctaaagaattgacacattttaaagaactagatagagaaaggaataaatccagggtaaagaggattgagaggaaggtgcgatcactcactccaacatctgacgagcttgcatctcttgatctcagagagggcaggaacgtggtaacatttacgttctcaactgcaattgttgggaaacagcaggttgattgccacatatatttatggagatggaatacacgcattgtaatatctgatgtggatggaactatcaccaagtctgatgttcttgggcagttcatgccactagttggagttgattggtcccaaaacggagttgctcatttattttctgcaataaaggaaaatggataccagcttctatttctgagtgcacgcgctatttcacaagcccacatcacaagacagtttcttttcaacctaaagcaggacggcaaagcacttcctgatggccctgttgttatatctccagatggtctcttcccgtcactttacagagaagtcatcagaagagctccgcatgaattcaagatttcgtgtctagaggccatcaaagatttatttccacacgactcaaatccgttttatgctggatttggaaatagagacacagacgagcttagctacctcaaggttggtattcctatgggcaagatcttcataataaaccccaagggtgaagtcgcagtgaaccgacgggtcgatacaaagtcgtacacatccttgcatgctcttgtccacgggatgttccctccaatattgtcgtcatctgagcaggaggactacaatgcttggaattactggaagatgccattgcctgatgttgatttgtgaggtacaagtcgagtctgcacaacagcactgcactaattttatgatgtgccgtagtgatcatgagaaggccattacttggttggctacatgtggatgctcctgctcctgatataagttcctgcaagatggaattttgtatatataggatcataatagatgtagtagctatttcttgtgtctcctgttgttgttgttgttgtcgtcgtaggactggaaatcatacctccgtgtgtcctgtaactgaaggtacaaaatttactggatggagggatctgatagtatgttgcagccccccctttttcgtttcatccttgatgtaattgtggtaccgatgtattttgtacaagaacaaatcaataataatgcaatcgaaagcgagctgttcatacgcagacacaacatgttgcattgaccctaggtgcattcggtaactgaaaatcggagctgtgtatactgtggacatgtcatctttggtatgcctgcgacttttagctgcagctaatgtgc

SEQ ID NO: 14524 - DNA, 2221 bp, Zea Mays
gtaaagggccatttggatgattctaaagaacagagttatcttggtcgggacagtggaatggggtgaattttataggcattccatggaggccactctacaggagtgggttcacaccggcaattgatccagtgcttggaaattattacacatacactgcaacaaacacttctttgcagaggtttgttgttttgccaaatggcacagacatctgctacatggttagaaaatcttcacaagattgggagcttgtctggtaccaaccatcaaatgagtgtgaatactatgctacatgtggtccaaatgcaaaatgcactgcatcgcaagatggcaaggcaaaatgcacctgcctaaaaggttttcatccgaagttgcaggagcagtggaatgcaggaaattggagtcaaggttgcatcaggagcccacctctgggttgtgagaccaatcagtctggggatggatttcttccaatgggaaacataaagtggcctgatttctcatattgggtatctacagtgggagatgagcctggatgcagaactgtctgccttaacaactgctcatgcggtgcttatgtttacacagctacaacagggtgcctagcctggggtaacgaactaattgacatgcatgagttgcaaacaggggcatatactctaaacctgaagcttcctgcttctgaattgcgaggacatcacccaatttggaaaatagccacgataatatcagccatagtgttatttgttttggctgcttgccttcttctgtggtggaagcatggtagaaatattaaagatgcagtgcacggaagttggagatcaaggcattcgtctacccaatcccagcagaatagtgctatgctggacatctcgcagtcaattcgttttgatgatgatgtggaggatggaaaaagtcatgaactcaaagtgtactcgctggaccgtataagaactgctacaagtaattttagtgactctaacaagcttggagaaggaggatttggtcctgtctatatgggaactttacctgggggagaagaagtagctgtgaagaggctttgtaggaattcaggtcaaggccttgaagaattcaagaatgaggtcatacttattgcaaagttgcagcaccgcaatcttgtaagactactagggtgctgcatacagagggaagagaagatcctggtgtatgagtacatgcctaacaaaagtctagatgcattcctctttaatcctgaaaagcaacggcttctagactggaagaaacggtttgatataatcgaaggcattgctagagggctgctatatctccaccgggattcgaggctgcgagttgttcaccgtgatctcaaggccagcaacattctcctggacgcggacatgaaacccaagatatcagattttggaatggcaaggatgtttggaggggaccaaaaccaattcaacacgaatcgggtcgtcggtacatttggctacatgtctcctgaatacgcaatggaaggcattttttcagtcaagtctgacgtctatggcttcggagtcctgatcttggagatcatcacaggaaagagggctgtgagcttccactgtcacgaggactccttgaacatcgctggatatgcgtggcggcaatggaacgaagacaatgctgcggagctgatcgatccagtgataagagcatcgtgctcagttcggcaggtgctgagatgcatccatattgcgttgctgtgcgtgcaagatcacgcagatgagcgacctgacatccccactgtcatccttatgctgagcaacgacagctcgagccttcctaatccgaggccgcctacgctgatgcttcgaggccgtgagatcgaatccagcaagtcaagcgagaaggaccggagccactccattggcactgtgacaatgacacagttgcatggaagatgaagtataacacgaaaaatatactgaatttgtgatatatttggttttttttgttctcccttcctgatgttgataatttgccatttgtcgcggattagtttcctctttttctccttttcatgacggcgaccgcgaagttgtatgaaaatcacattagcgtcatacattaagtgacaattaattttgcaaaggtgagatatttaccatgtggttcttcgtaactttaggtgttgttcggttatttcaattccatatggattgaaagtgtattaggatgtattttgatttgctatggatttaaa

SEQ ID NO: 14525 - DNA, 763 bp, Zea Mays
gtagtgaacagaataagtcagcagatggtggaggaacttgtagttgatgatacacctgaaacttcaagaggaataattggcctctgtagtgatccatctacaggacttttctatgcatatgatgaaagttctatattccaggtttccacttcagacgagggttgtgacatgtggcaagtttacttggatatgaatcattatgctgctgctttatcccattgccgtaatcctttccagcgtgatcaagtctacctagttcaggctgatgctgcatttgctgcaaaagagtattacatagcagcatccttctatgcaaagataaattacatcctgtcgtttgaggagatcagcctgaaatttatatcaataggtgagcaggatgctctcagaactttcttattgagaaggctcgataacctcaccaaagaggacaagatgcagattacgatgatctcaacttgggctactgagctgtacttagacaagattaatcgcctcctattggaggataccactgtcaccattataaattcagtagcagagcctaatagctctgaatatcgttcgatagtaaatgaattccgtgcttttcttagtgacagcaaagatgtattagatgaagcaacaacaatgaaactactggaaagttacggaagagtggatgagcttgtgtactttgccggtttgaaggagcagtatgaaattgtagttcatcattacattcagtggcttcagctgagacaccaggtctaatgtctttttc

SEQ ID NO: 14526 - DNA, 1597 bp, Zea Mays
cctacatgttggaaggatgagaaggaaaaacataccgtttccgtgtccacaatgttggtgtctccacaagcttgaacttacggattcagaatcacaacatggcccttgttgaaacagaaggttcatacacgatgaagcagaattttactaatctcgacatccacgtgggccagtcttactcatttctggtcactatggatcagaacgcaagcagtgattattacatcgtggccagtgctaggtttgtgaacgaatcgctttggaccagagtcaccggtgttgcaattttgcaatattcaaattcaaagggaaaagcatctggtcctcttcctgatccaccaaatgatgagtatgacaaaactttttcaatgaaccaggcacgttccatcaggatgaacgtgagcactggtgctgctcgtccgaatcctcaaggatcatttcactatgggtctatcaatgtgagccaagtttacaagctgaggaatgaaccacctgttatcatcaatgggaagaaacggactacactgagtggtatctcttattccccacccgacactcctctaaggttggcagatctgtacgacaagaaggatgtctacacacttgacttccctacaatgccaattgatggaccgccagtgatcagaacatctgtcattaactccacatacaagaactttttggaaattgtatttcagaacaatgactcaactgtccagacctaccacattgatggatatgcattctgggttgtaggaatggactatggcgagtggactgagaatagccgtgggacttacaacaagtgggatggtgtttctcgttgcacgactcaggtgtttccgggagcatggactgctgtgatgctgtcacttgacagcccaggattttggaatgtacggacagaaaacctggacacgtggtatctgggtcaggagacttacatcagggtggtggatccaaatggaggctataatgttactgagatggtggctccagacaacatgctctactgtggcctcctcaaggataaacagaaggctcagaagcctcatggttcgaggtcatcagcctctgcagcaaaactgaactatcatgtgctcgcggctttggtctctttggtggtagccttggtgttgggccattgacaagaactgcctccagcttgtggtcagctgctgtttgcaggttgattaggcgtttgacagaaatactgttgagtaggtcagtcgaattcgtaggttccattcatgatttgtctggcaattgagaaaaaaaaatgctgtgccattgcgcatcttcgtccatcggaattgattaacatgctgaagaactgtgcagtagcttgagattgagcacaaatttgaagttgtcggcagctggcacccacaagcaaggcgtgtgctgtgctgcctgagtgtgttttcttgatcagtgaatttgtcgagagttggatattgttggttgtatcccatgcatcccattgcaattaccaaaccatggacaatcaaaggcactactgtacacaacagttggtgttactgtgtatctcatcagtttgagcctgttggattcaaaagccaattgttagctggct

SEQ ID NO: 14527 - DNA, 1589 bp, Zea Mays
attgtggacagttcggtgggcgttgcttggaagagatttgtcgccctgaagatccagaagagcgcaagggattacgcgcacgcggctctccacgaaatcgagctactgtcggctgtggccaaaggagacccgacgaattcaaagtgcgtgcttcggttgttggaccatttcaagcacgctggccccaacgggcagcacgtttgcctggtcaccgagttcctcggtgatagcctgctccggctgatacggtacaatcggaacaagggcattgggctgagcagagtgaaggaaatctgccgatcagtcatggtcggccttgattacctgcacagcgagctcggcatcatccacacggatttgaaaccagagaacgttcttctggaatcaacaattaacccggccaaggacccagtgcgctctgggttcacaccgatcctcgaccggcctgtggggaaccagtacggtggcacagtgatcagtttcagtgagaagatgctcaagatgagagcaaggcgtgcagtggctaagatttcgcagagacgggtttcccttggtggggttggggcagaactggagaaagagaggtgcctggatgggatcagtttgaagtgtaagattgtcgattttgggaatgcctgctgggccgatcagcagcacgctggtgaaatacagacaaggcagtacagagctcctgaggttatcattggttctgggtactcatattccgctgacatctggtcgtttgcttgcattgcctttgagcttgccaccggtgacttgttgtttgctcccatgaatcgccagggatgcagcgaagatgaggaccacttggctttgatgatggaaactcttgggaagatgcctcggaagattgctagctcaggaactcgttccaaggattactttgatcggtatggagatttgaaaagggtcaggagactgaagttctggcccctagaccgtgtgctcgtagaaaggtacagtttcagcgaacccgacgccaaagggttcgctgactttcttcggccaatgttagatttcgctccggaggacaggccatctgccgcgcagtgcttgaaacactcttggcttaattgatccaacgcgacacgaaagtctgaccaatagatgtttacatacatcctacgtgcaaattcgctgccgaagactctttgtgactgtgattgcagatatccacggactttgatttgatgtaaccaaggctgagaatcaggagccactttttaggcgcagcctgatgagaacgggacatgagattcagctcggatgtagcaagcgtttcgctggtgtgtttgggggtgcagactgcagagctaatgtgatgttaacctgcatgtgtgttagtagggccaaaatattgatgtattattattttttggtaatgtgatctggccaacaaccttttcctttagctgagaagatgaactgctacagcactgcagtgtagtggttcagctagttatccaatggattgtgtgctgtaacctgtaacatttgtttgaaattgaccttatggatatcggaaaccaaccacttggtggtgcaaatgggacaaaaccaggggcggt

SEQ ID NO: 14528 - DNA, 1023 bp, Zea Mays
ctctgctgcaagcctgcaaatcactaggtcactgagaacatgttgggtggcaagaaagttacagttgtatttgtcctaggtggtcctggaagtggaaaaggcacacagtgtgccaacatcgtggagcactttggattcacccatcttagtgctggagatcttctgcgtgcagagattaaatctggctctgagaacggaaccatgattgagaacatgataaaggagggaaagattgttccatcggaggtgactataaagcttttgcaggaggcaatgataaaaagtgaaaatgacaaattcctgatcgatggatttccaaggaatgaggagaatcgtgcagcctttgagaatgttaccaaaatttctcctgcatttgtgctattctttgactgttctgaagaagatatggagaaacgactcctggggcgcaatcagggaagggttgatgataacattgaaactatcaaaaaaaggttcaaaacctttgttgactcaactctgcctgtcattgagcattacaactcaaaggacaaggttaaaaagattgatgctgcaaaaccaatccccgaggtgtttgaagacgtcaaagccatttttgccccatattctctaaaggcaccacataaacatatctgtgattatgatggaccctttaatatagaacaaaagttttggctcatttgagctaccagcgtaccagtaggcaattcgatttgttaccagcaacaagtgatctgattcccagtggtcctgctagagtaacattttttaccactgtctgttgtctatgtatcctttgatattgtgttgtaccaatgtgcaatttactctatggactgatggaacattgtgccatcccatccaccagatttattgtggcgttatggaaagcatagaaccgctgccatattctttaatttgtacgctgaaatatactcgttggcaccgaacttttggttgatgacttcgtgatataataaccctaccggcagtaaatatctacgctcaacaatgttctcaaaa

SEQ ID NO: 14529 - DNA, 76 bp, Zea Mays
gggcaggcgcagctgcagtcatcacatcacccacaggggtcaaacacagatatgcagcatgccttagctttgcttt

SEQ ID NO: 14530 - DNA, 887 bp, Zea Mays
ttgcagaaagatgctgatgcaaggcccacatgtgagcaggtaaagataattaggcttctgtcacacccattcatcaagaggtatgcaggaactgaagtggacttggcagcatatgtcaaaagtgtagttgacccaacagaaaggctaaagcaaatagctgagatgcttgctatacattactacctcttgtttaatggacctgatgggatttggcatcatatgaagacattctacatggaacaatctactttcagtttctcagagaacgtgtatgttggccagaatgaaatttttgatattttgtcaaatataaggaaaaagctaaaaggtgataggcctcgagagaaaattgttcatgttgtcgagaagctacattgtcgtgcaaatggtgaaactggggttgcaattcgtgtgtctggatctttcattgtgggaaaccaatttcttgtatgtggcgaggggataaaagctgaagggatgcctagcttggatgagctctctattgacattccaagcaaacgcgtaggccagttcagagagcagtttatcatgcaaccgggaaacttaatgtcatgctattacatatcaaagcaagatctgtacattatccaatcctgattgaacatattatttgtaagattattctctgaagcacatgtatagaggatttagaagaattcctttcggacctggttttgaatcttatttactttgtggaactgaaattttgggccaaacctctgacaagaattgaaaagtttaagtcttcaactatattcatgtttagaactgtttttatatttggttggtattgataattttcgttttgtcgtgaggtcccaggaggatgtgtgatttgagtaatggctgaaatttatcatttttta

SEQ ID NO: 14531 - DNA, 541 bp, Zea Mays
  misc_feature (308)..(407): n is a, c, g, or t
cttgccacagccctccacatctagcggagcactgctcccagcgctatcactgttgcttgtaggggaaggtttagaggtggccgctgcacccatctcgttaccctaaacgtgcacagtgcaaggggagggggaagggcgcggcatgcgctgaagacagtctgaggcgctgcgggcagtctaacagcaccccctcctcgctcgcactccgttcgtctgacatctcctcccgtcctttcctttctgaggctcgcgaaccccgacaatggccgcaaccgcggtgtcggtcgacgagaagctcgacaagcttnnnnnnnnnnnnnnnnnnnnnnnnnnnnnnnnnnnnnnnnnnnnnnnnnnnnnnnnnnnnnnnnnnnnnnnnnnnnnnnnnnnnnnnnnnnnnnnnnnnnctggacaagctcgttgtgctcaagctcaacggagggctcgggacgaccatgggtctgcacccgaccccaagtgagtgcactcccatcctcgaattttatcagctctcatatgttggatcatgtatatagctttg

SEQ ID NO: 14532 - DNA, 731 bp, Zea Mays
gtccaatgttgcctccggttcagccgtatcaggacccaaaacgtctataaaagaagccccagggcgctagggtttcattttgtagcggtgtcggcggtgacacccccaccacgatgcacgagccacggtgcccctccctgccgatgtgcaaatggcggcggttccttgagggaacacgatgacgggcatccgaggtgggagcgacggcgacgacctcttctagccgcgagcggcaacgatggatcccatagacgcgcgggatggcggcggctccccgaggccgcgctgcaacagcggtcacctgaggcgcgcatgatggcggcacatccaaggcgagttcgaaggtggtggccccccggacgcgcgaacaacggcggatctgggaggcgcgcatgcggcggtggatcctagaggtgcatgcggtgtcggctccccgaagactcgcgcgacgacaacgacttgctccaatcattgtttatgtatggcgctgttggttgggcacatattaggactttttcatcaattatgatgcgtgggtagatatttatgcaattgtctatgagagtttatgcttttcacgattcctgtcatctattttttgcgtctatacagtgggaacgaaaatgacattcaaaatttgcatgcatgcaatgaaaactctcacaacctaccataatttttggatgtgcataaaagtatgaatcgaatgtatgtgtttgatggttgccata

SEQ ID NO: 14533 - DNA, 934 bp, Zea Mays
tgtataaccagttctaatcttgtttttttattgaacaatgtgtttcctggatctgttaaccagactaacgtagcgcatattttaaattgaagatttttcttttagatattgttgaggaactaataaagtcagggaatgctatagaggctatatatgttgcccatgaggctgatttgcttgggaaatttccacctgtgcctctcttcaaatcttatctgcagaattccactgataaggctcaggcagtgttgaaaagtggaagacattccagttctgcacttgaagaggcaaacagcttggagggcaatgcatacaggtccgtcataaggtgcgtcgagtcctgccagctacaatcggtgtttcctttagaggtcctgaggaagaagttagggaagttggagaaagagaagtctgataggaagaaggcagctggtccaagcagattcccgaacaagcgatcccgcggcgcagctggaccctatcccttccctgctgccaaggctgctaggggctcaagctttggtccgcgtttccagaacccagtctcacgttccttaaactacgcacctcatgctggatatataaacccagcagctgcatcaccattctctgtccctgggagcgtgtcggggagacgaggtggtgtaccatatggcggacctggagccacgtatggtggctcccctagctttgcaaccggtggtgggcagcaaccattccgtcgttaggtctagggctgtttgttgtaactgaatgctccttgttttctggctaatagggataatgtatgcctccagctattcaagcatacttgttcagttcttgatggatgctggatattgaacgtcgtgtagtacacattctatggtactgtgtttgctttgttaaatttgaactgtgtcttccataattttgtggcgcaggcatacgtggg

SEQ ID NO: 14534 - DNA, 2173 bp, Zea Mays
gttccctcaagctctaagcctttaacaactgacctatgcttgttctcataaaccactgggactattgtctctgctggatgaggaatctactttcccgaatgccacagatcttacttttgcaaacaagcttaagcaacatcttgactcgaattcttgcttcagaggagaaagaggcaaggcatttgctgtccgtcactatgcaggagaggtggcttatgatacttcgggttttctggagaagaatagagatttattgcacatggactcgattcagctccttgccaaatgcaaaacttctctgccaaaaatgtttgcatcgaagatgctagttcaatcagataattctatgtctgttccatatagatctagtgctgctgattctcaaaaactaagtgttgccatgaagttcaagggtcaactgttccaacttatgcaaagactggaaagtacaacgccacactttattcgttgcattaaaccaaacaatttacaacttcctgcaatttatgaacaaggacttgtgcttcaacaacttaaatgttgtggggttcttgaggttgtccggatttcaagatctgggtatccaacaagaatgactcaccagaagtttgctcggcggtatggttttcttcttgaggatgttgcatctcaagatccactcagtgtttcagttgcaattcttcatcagttcaacattttacctgagatgtatcaagttggctacacaaagttgttcttccgaactggtcagattggcaaccttgaagatactcggaatcgtactctgcatggtattttaagggttcaaagctgtttcagggggcatcaagcccgtcatcatgcaagagaacgaacaagaggagttttgactcttcaatcattcattcgtggtgagaatgcacggcaaatttactcctctttgttgaggaaacatagagccgcagttgttttgcagagaaatgtgagatgttggcttgcaagaaggtatttcataaatgtccggaaggcctcagtgataatacagtctggtattcgtggcagtcttgttcgaagatgtaatggcaatattgatctaataaatgtgctaagagagtttgaatcaaaacaggaggcacatggtgaccaaattttgatcaaggcctcagtcctggctgagttacagaggcggatactaaaagccgaggccacagtacgtgaaaaggatgaagagaacgagatgcttcatcagcggcttcagcaatatgaaaaccgctggttagagtacgaacagaaaatgaaagctatggaggaaatgtggcagaagcaaatgcgttcgctgcaatcgagcctttccgtagcaaagaagagccttgttttggatgaaacgcctaggatgtcggactcatcagtggatcagagctgggaaagcaatgggaaccaccatgtcagcagcggttctcagctggtgccacacactggtggacgtgaaatgaacgctggcctcagcgtcatcagccgcctggcagaagaattcgagcagcggagccaggttttcgctgatgacgccaagttcctggtcgaggtcaagtctgggcaggcggacgccagcctaaacccagacatggagctccggaggttgaagcagaacttcgactcgtggaagaaagatttcagtggacggatgagggagacgaaggtgatcctgaacaagctcggcaatggcaacgagtcatcgcccaactctgtgaagcggaagtggtggggcaggctgaacacctccaagttttcgtgagtttattatgtattgattggtaatttgtagatgtaaccggtattttacacgccggtgtggttctagcttcctagagtttctactctacgggtgctgtgaaagtccagtgtgttggactggatttgtattccacggagggcgagttgtatagttctcccacaatggcttccttttgaggggtcaaggaccactgaattgtgatgtaattacttgctgaagtagctgtcgaaggggggagattgtgagtgcttaatattccactatccttgtgctttactttctgcctgttgtagattcatagatttaaatgttggtatggtgtgacataatctatcatccgatgactcgtagcatgtttggtttgagaaataagatagtttattatttctcacttattttttg

SEQ ID NO: 14535 - DNA, 3627 bp, Zea Mays
aatgccatctgtatacacctgtctcctaccaacctcaatcctcattgggaagtgatcttctatgataagcatagagttttttgtcagcttccgaatggcgattgggcattatgcacagtaattacaacctctggtgatgagtcggttgtaaaggtttctgaagggaaggtactgagattgaaaaccgagtgtctacaacctgcaaatcctgaaattcttgatggagtggatgatcttatgcagctaagttatctaagtgaaccatcagtactgtacaatctgcagtacagatactccaaggatatgatttatactaaagcaggtccagttttggtggctgtcaatcctttcaagaaagtttcactgtatggtaacgagtacatcgatgcatatagaaataaatcaatggatagtccacatgtttatgcaatagcagatgcagcactttgtgaaatgaaaagagatgaagtcaaccaatctataattataagtggtgagagtggagcaggaaaaacagaaaccgcaaaaattgctatgcagtacctggcttcccttggaggtggaagtggcattgaatacgaaattcttcagacaaatccaatactcgaggcttttggcaatgcaaagacattgagaaatgataactcaagtcgttttggaaagcttatagaaattcatttcagtaccactggaagaatatgtggtgccatgattcaaacatttttgcttgagaagtccagagttgtgcaatgtgcagttggtgagcgatcataccatatattttatcagctgtgcgctggtgcacctgcctctctaaaagagaagttgaatttgaaaaaggtggatggatacaaatatcttaagcagagctgttgctattcaattgcgggtgtggatgatgcccaaatgtttcgaactgtgacgcaagctatgaacattgttcatatcagcaaagaggaccaagagagtgtttttgcaatggtctctgctgttctttggctgggggatgtctcgttcacagtaattgacaatgaaaatcatgttgaaatcatagtagatgaagcttcgaaaacggtttcagaacttcttggctgcagtattgaagatctcaatttagctttatcaaagcgccacatgaaagttaataatgaaaacattgtccagaaacttacccttgctcaggcaactgacacaagagatgctctggccaaatcagtgtatgccagtttgtttgagtggcttgtagaacaaattaataagtctctctcagttggcaagcgtcgaactgggagatctatcagtattcttgatatctatggctttgaatcatttgataagaacagttttgaacagttctgcattaattatgctaatgaaaggttgcagcaacatttcaatcgtcatttgtttaagcttgagcaagaggaatatgtggaggatggcatcgactgggcaaaggttgacttcgaggataatcaggactgtttgagcctctttgagaaaaaaccactgggactattgtctctgctggatgaggaatctactttcccgaatgccacagatcttacttttgcaaacaagcttaagcaacatcttgactcgaattcttgcttcagaggagaaagaggcaaggcatttgctgtccgtcactatgcaggagaggtggcttatgatacttcgggttttctggagaagaatagagatttattgcacatggactcgattcagctccttgccaaatgcaaaacttctctgccaaaaatgtttgcatcgaagatgctagttcaatcagataattctatgtctgttccatatagatctagtgctgctgattctcaaaaactaagtgttgccatgaagttcaagggtcaactgttccaacttatgcaaagactggaaagtacaacgccacactttattcgttgcattaaaccaaacaatttacaacttcctgcaatttatgaacaaggacttgtgcttcaacaacttaaatgttgtggggttcttgaggttgtccggatttcaagatctgggtatccaacaagaatgactcaccagaagtttgctcggcggtatggttttcttcttgaggatgttgcatctcaagatccactcagtgtttcagttgcaattcttcatcagttcaacattttacctgagatgtatcaagttggctacacaaagttgttcttccgaactggtcagattggcaaccttgaagatactcggaatcgtactctgcatggtattttaagggttcaaagctgtttcagggggcatcaagcccgtcatcatgcaagagaacgaacaagaggagttttgactcttcaatcattcattcgtggtgagaatgcacggcaaatttactcctctttgttgaggaaacatagagccgcagttgttttgcagagaaatgtgagatgttggcttgcaagaaggtatttcataaatgtccggaaggcctcagtgataatacagtctggtattcgtggcagtcttgttcgaagatgtaatggcaatattgatctaataaatgtgctaagagagtttgaatcaaaacaggaggcacatggtgaccaaattttgatcaaggcctcagtcctggctgagttacagaggcggatactaaaagccgaggccacagtacgtgaaaaggatgaagagaacgagatgcttcatcagcggcttcagcaatatgaaaaccgctggttagagtacgaacagaaaatgaaagctatggaggaaatgtggcagaagcaaatgcgttcgctgcaatcgagcctttccgtagcaaagaagagccttgttttggatgaaacgcctaggatgtcggactcatcagtggatcagagctgggaaagcaatgggaaccaccatgtcagcagcggttctcagctggtgccacacactggtggacgtgaaatgaacgctggcctcagcgtcatcagccgcctggcagaagaattcgagcagcggagccaggttttcgctgatgacgccaagttcctggtcgaggtcaagtctgggcaggcggacgccagcctaaacccagacatggagctccggaggttgaagcagaacttcgactcgtggaagaaagatttcagtggacggatgagggagacgaaggtgatcctgaacaagctcggcaatggcaacgagtcatcgcccaactctgtgaagcggaagtggtggggcaggctgaacacctccaagttttcgtgagtttattatgtattgattggtaatttgtagatgtaaccggtattttacacgccggtgtggttctagcttcctagagtttctactctacgggtgctgtgaaagtccagtgtgttggactggatttgtattccacggagggcgagttgtatagttctcccacaatggcttccttttgaggggtcaaggaccactgaattgtgatgtaattacttgctgaagtagctgtcgaaggggggagattgtgagtgcttaatattccactatccttgtgctttactttctgcctgttgtagattcatagatttaaatgttggtatggtgtgacataatctatcatccgatgactcgtagcatgtttggtttgagaaataagatagtttattatttctcacttattttttg

SEQ ID NO: 14536 - DNA, 2284 bp, Zea Mays
gaagaggattacccgaaacctggagcggagcggtggtgccttggcgtctccctcctctccgtcgcccgcaggcgtgcgccaccatctacgccgcgccgcccgccatcctgagccgcccgagatgtaccacgcgatgcggctgcgctgcctcctcctgcaccctccgatgtggagtaattcgagctccctcggcatctctgccagcggcgtcagtagaggttccttcgtcaggaggttcagcgcgctcggggcgccgcggccgcctggtcctgcccgacggctgtgtcggttttacggctccaagggcggcgtcgggagcgctgaggcgaggggcgccgctgcgtccccggcggcggcggggagcagcggcaggtgcttcgagcaggagcacgcgcggctcggggaaagggaccagcaggagtggctgagcggcgagaggtttctcaccggctgcaagcgacgggagtcgacgttcctcaccaggcgggagaggttccgcagagagttcctgcgccgcgtcgtgccgtgggagaaggggtcgctctcgtggcagaatttcccctactacgtcaatgacaatgcgaggcagctgctgagtgagtgtgtggcgtcccacctgcgtcacaagagtgtcacatcagaatatggctcacgtttggaatcctctggagggcggatattgctccaaagttctccaggaactgagctttacagggagagatttgttagagctcttgcacatgagttgcaagtgccgctattggttctggacagcagtgttcttgcaccatatgattatggggaggattactcagaaagtgaggaggaggatgagcatgctgagtcagaggatgaaggttcagaatctgaaatggaagacgatggtgatgaagattggacaagcaacaatggaaaatctggtgaaagtgacgatgaggatgctctcaaatctgtggaagatctgaagaaatctgtggatgacctaaaaaagttggttccttgtactatcgaggaatttgccaagagaattgctggtgctgaagaaagtacggcgtcagaatcttctgaaactcctgagtcaccagaagaagagaaaaggcctttccaaaggggagatagggtgaagtatgttggaacctctgcagtcgttgaagcagatcagaggatcattttggggaaaatacctactcaagatggctcaaggagtgcctatacttttattagtggaaggggtctatcaaatggacagcgtggggaggtatatgaggttaatggggatcaggttgctgtcatatttgatccttctatagagaaatcacacaatgcccatgaagatgtaactaacaaggaggaaaatggatcagcaactgtttactgggttgattctcaggatattgcacatgatcatgataccgaatcagacgattggcatattgcacttgaagcactttgtgaggttttgccatctctacagccaataattgtctactttccagacagttctcaatggttatctagagcagtttcaaaatcagatcgcagagagtttgtgcaaagagttgagaaaatgtttgaccggcttaccggaccggtagtattgatatgtggccagaacttactggcagcagcacccaaggataaggaacaaccatccccactgaagcggttggtagggggcctgaagggagaaagatattcaaggtccagtgacatatcaaagctcttcaccaatagtctaactgttcctcttccagaggaagatgaacaactacaactttttaataatcagattgaagaggatagaaaaattatgatttcgaggcataaccttgttaaattgcacaaggtgcttgaggagcatgatctttcttgtgtggagcttttggatgtgaagttggatggtattgttttaacaaaacaaaaagcggagaaggccgttggttgggctagaaaccactatctgtcatcaacaactcttccttctatcaaaggtgacaggttaatcattccccgtgagagtctggatatatcaatcgagaggctgaaggaacagggtataacagctaagaaatcctctcaaaatctgaaggttttggctaaagatgagtatgagcgcaatttcatttctgctgttgtgcctccgaatgaaattggagtgaaatttgacgacatcggtgcacttgaggacgtgaagagaacattggatgagcttgttacacttccaatgaggagacctgaacttttttcgcgtggaaatttgttaagggtatggcttttctgctag

SEQ ID NO: 14537 - DNA, 128 bp, Zea Mays
aaaaaacaaccagcaacaagatcaaaagaaacagactcctaaacaagcaatgcgcctcttcttgggtatgtagtcgtaaatctgtacacaaaccagagcgctagagagtaaatcacctacgtaggtgg

SEQ ID NO: 14538 - DNA, 4701 bp, Zea Mays
cgctccggcctgcccgcccccaccagtacagtaccacccgcgccccgtacggcctccccgtccgtccccgtcgtgggggtggggccggcgccggcggcaccaccacccaccgcacccgtccgggcccgcccccgtgcccggtcgctaattacgcgcacctgccatccggccgtccacgcacacggcgcacgccaccaggcccccgtccgtcgccgcgccaggacgcttacccacgcgggaggtcctcttcctcgcccgctttgcgctgctgccttctctccgctcgattccccgctgcctctctctctagtctctctacacacgccttcctcccagcgccgcaccacaccatcagggcgggcagcacattcctctctctctcccactcccacttcttcatcctccgccgattccagcactacgcaggtggcccctccgctcttccttcaccagatccagccgatgcctccccacgccgccgccgccgcgaagaagcgcggccacccgtggcccgcggccggcgccgcggaggccggcgctgggaactggaaccccaggctgtgggactgggacagccgcgcgctcaccgccaggccgtcctccgatgcgctccgcctcgccggtggccagccccagccggctgctgaggcgcagcgccagggggccggcgcgctgaacctccagctcggcctgcaggaggactccacgaccccgatggacgccagcccgacggctcccgcggcggcggcggcggcgtccccgccagcttcggctgcggcggggcaggagccggtcgttaggccgagcaagcgggtgcggtctggatcgccggggggcgctgggggagggccgggcggcggtgggactgccaacggaggcgcgagctacccgatgtgccaggtggatgactgtcgagcggatctgaccagcgccaaggattaccaccggaggcacaaggtctgcgagacccacagcaagaccaccaaggcggtcgtcggcaaccaggctcagcgcttctgccagcagtgtagtagatttcacccactcgcggagtttgatgagggtaagaggagctgccggcggaggcttgctggccacaaccggcggagaagaaaatcccagccaacagatgttgcttcacagttgctgctacctgtaaaccaagaaaatgcagcaaatagaacacaagatattgtcaatctaattacagtgattgcgcgcttgcaaggctctaacgttggtaaagtgcctagcatccctcccataccagataaacagaatctggtggaaattataagcaaaataaattcattgaacaacgcaacctctccggcaaagtctccttcgccagaagtcgtcgttttgaatacttcacaagagcaacgagagcaaggacatgattctgtagacaagacgaccaacggaatcgacaagcaaactgtaccatcaaccatggatttgctaggagttttttcaactggcttcgcaacttcaacacctgtgacaaatacatctcagtcccaagggagcagcgacagcagtggtaataacaagagcaagagccattcaacggagccagcaactgttgtaaattcacacgatatatcaacccaagattttcctgctgctggtttcatgagaagcaacagcacacaagaaagccgacctcatatatacaagcagacagaacacgagacaagaccatacttgtcactacagctgtttggcagcagtgaggaggatattccacctaagatggactcattgaataagtacttatcttctgagagtagtaatcctctggatgagagatctccttcatcctctccgcccataactcgcaagtttttccccatacattcggttgatgaagaggttcgacaccctcatattacagattttggggaagatgctacaatgggtgaagttagcacaagtcaggcatggtgtgcaccaccacttgatctcttcaaggatttagagcgtcccctcgagaatggatctccaccaaatcctggttaccagtcctgctatgtttcaacatcttgttcagaccattcaccttcaacctcgaactccgatggacaggaccggactggtaggattatcttcaaactatttggcaaggaacctagtacaatacctgggaaccttcgtgacgatatagtaaattggctcaaacacagtcctactgaaatggagggttacatccgccccggttgccttgtactatccatgtacctatcaatgccggctattgcatgggatgagcttgaagaaaatctcctccagagagtcaactcattagttcaaagttctgatttggatttctggagaaaaggaaggtttttagttcgaaccggctccaagttggtatcttataaagcgggaatgacccgtttatcgaaatcgtggagaacatggaatactcctgaattgacctttgtgtcaccaattgctgttgttggtggacagaagatctccctcattcttaaaggccgcaatctatctattcctggcacacagatccattgtacaagtacaggaaagtacatatccaaagaagttctgtgctcagcatatccaggtaccatatatgatgattcaggtgtggagacttttgacttgccaggacaaccagattttattcttgggcgctgctttattgaggtggaaaacaggttcaggggtaacagcttccctgttattgttgcaagttcaagtgtttgccaggagttgagaagtctagaagtggagcttgaggattcacaggttcttgatgtttcttcggatggtcagattcatgactgtaggcagtcaaaaacgagggttcaagttctgcacttccttaatgaactcggctggctctttcagagggcttctgcctgtacattgtccaccagacctgatgtgtctgatttggatttgactcagttttcaatcacacggttcaaatatcttttactgttctctagcgagcgtgactggtgctctcttactaaaacacttctggatattcttgccaagagaagcttggtcagcgaggaattatcaaaggaaactatggagatgctggctgagattcaccttctgaacagagcagtaaaaagaaagagtaggagaatggtgcatttgcttgtacagtttgttgtactatgccttgataattccaaggtttaccccttcctcccaaactttcctggccctggtggtttaactccgttgcatcttgctgcatccattgagaatgcagaggatatagttgacgccttgacagatgatcctcaacaggttggtttgacctgttggcagtcagctttagacgaagatggccaatctcctgaaacatatgccaagttgaggaatcataattcatataatgagcttgtagcacaaaagctggtggacatgaagaacagccaggttactataacggtcaatggcgatgaaattcatatggatcagttagggaatgttgatgaccgtaaaaaatctggggttcaggcattgcaaataagatcttgctcccagtgtgccattttggagtctggtgtgttaaggcagcctatgcggtcaaggggactgcttgctcggccttatattcattcaatgcttgctatagcagcagtctgcgtatgcgtctgtgtattcatgcgagctttgctgcggatcaattctggaaaatccttcaagtgggagaggctggattacggtacaatataattgtggggacacacctgagccttgtggtattattaagttaacaagcagttgttatggagctattttggagccttgaagggtatggagattgtttcatgcttcctcgaaactcgcccatccgtatggctgagtggaataatgtaatatttttgctggacaattcctttacttcctgtgaaatagaagtgttaataggtgagcagccggagatgttaggggggtggcaaaacttggtaccaaatgtggagcttgagcagagttggaacatgtcatggcaagggccgtagcaactgcgctcccacaacatgatatgcatgcaatgcacaaaatgtcgatatggatgcaatccgcaagatggatgtaatcacagttcggggagaatgagcaagtaagtaaccttggtttcctttttgctgctgtaagctcgactcttttggttcatgtatcccaagaatgatgtttaatttatcttgctcactgtttcatatttttgtgtgtgtgtgtgtattaaatacagtacgctagcatgaatgtaccctatatcgactttagatagtagcaggggtaaatgaaaagaggctttgcatatgtctgtgtcgaccattttgacttgtagctacatagaaatgaggcagatctgaagtgtacttggatctttcgttgttgttgttgttgttgacatccaccatatgttctcattctgatgaagcttagttacacctttgtcctatattgttctcttgatacctgccggctgctatcattatcttggttcactcgcactttccttctgacccaagttttcactgatcaaaatcctattgtatgacttgtttggaggctgaaattcatgttcgtttaagaactttgagcgcgttcggctgccctgcacggagcactgttgcagctgcaaatcactgttgcagctgcaatccctagagagaaaatactgtagaagccgcagccgcagtcggatta

SEQ ID NO: 14539 - DNA, 95 bp, Zea Mays
cttagctcaaccgtggatagcttgcaggtttattgtaataccttacatgaagaagttcatgtattgtattctcaactgcatcccaatgtacctgc

SEQ ID NO: 14540 - DNA, 99 bp, Zea Mays
gcttctgtaaactaccacttcatcagcttcgggcagagggacattattttcccctccagccctcacaattgagatatcacgaaagtacctccccctcat

SEQ ID NO: 14541 - DNA, 1218 bp, Zea Mays
gttcactacaactaatgctatggaagcttctaactttgatggaccttgaatgtgatgtggttgctattgttgagaggttggctactgtgaaacacaaattattagttttgtctggaaagggaggtgttggaaagagcacattctcagcccaactctcctttgccttagctgaaatggaccatcaggttggccttcttgacatagatatatgtggccctagcatcccaaaaatgttaggcctcgagggacaagatattcatcagagcaaccttggttggtcacctgtgtatgtcgagtccaaccttggcgtgatgtcgattggtttcatgctgcctaatccagatgacgctgtcatatggaggggtccccgcaagaatggactgatcaagcagttcttaaaggatgttgactggggggagattgactatcttgtagtggatgctcctccaggaacatctgatgagcacatctcgattgtgcaataccttcaagccacaggaattgatggcgctataatcgtcacaactccgcagcaggtctctcttattgacgtgaggaaggagataaacttctgcaagaaggtcggcgttcctgtcctaggtgttgtggagaacatgagtggcctgaggcagccactttcagatctcagtttcgtcaagcctggtgaggcgggcgagacagacgcgacagagtgggccctgaactacatcaaggagaaagcccctgagcttctgtcagtcatggcctgcagcgaggtatttgatagcagcaagggaggcgccgagaagatgtgccgtgaaatgggggttcctttccttggcaaggtgcccatggatccgcagctgtgcaaggcggctgaggaagggaggtcatgcttcagtgatcagaaatgcggtgccagtgcgccggctcttcagagcattgtaaagaagctgatcaagactgggtgagaaaataatgttggcctgctgggaatctggtagtgagaattgagatgaacaggtgtcagagttgtcatgaccaatatatatgttattgtgttttgaacactgaatctgtgtattagactattagtgccagtactagtattggatctgtaagtttttttttgttcgtgaatcaccagtgggtggactgggtgtacaaactgcggccatatttctgctccacgaagtgaaatatgtttcgaggcactgcctgtatcacgaatcatgctta

SEQ ID NO: 14542 - DNA, 337 bp, Zea Mays
tgtgcattgcgtttgctaaatcacaactaaatcatttgagatggcaaattggtggggtttagagttgaggtgcaagagttgtcatgttcttagatcaaggcagacagaattttgagcaacaacggagagagcatcctgatgttgtaacttcggatttgcccagtatagccttcctggagaaggctgcatctgggaacaagtatgaaataacagagttcgttgacgagcctagcttttaccttgctgttttgcagtttcaaggatgatttgttccttttttgcaatatttgtgaagcaaattgtgactgtcttaatgattaagtgtggaacaattagc

SEQ ID NO: 14543 - DNA, 1957 bp, Zea Mays
cgcttttcctcttcatctgaagctgctgccatataccgccctcttcctctcctttatatctaccccttggacctggaggagaggagctagtgagctaccgagaagaagaaggaagggccatcttccgacccacttgtaggcgctgtaagcctgtaagcagtcacctctcagccacagacatggtgggcatgagaggcgcctacggtggtgcttgcaatgacgacagcaagagccggctgcacggaggcaaggcggcggagccggagatcgcgtcgatggcagtgcacaaggtggcgccgccaccggcgcggagcacggcgagcaagatgaaggtgagggtgaaggagaccttcttccccgacgacccgttccgggcgttcaaggggcagccgccggggacgcagtggctcatggcggtcaggtacctcttccccatcctggactgggtgccgagctactccttgtcgctcttcaagtccgacctcgtcgcgggcctcaccattgccagcctcgccattcctcagggcattagctacgcgaagctggcaagcttgcctcccataatcgggctgtattcgagcttcgtgccgccgatggtgtacgcggtgctggggagctcccgtgacctggcggtgggcccggtgtcgatctcgtcgctgatcatggggtccatgctgcggcaggccgtgagccccaccgcggagccgacgctgttcctgcagctggccttcacctccaccctgttcgcggggctggtgcaggcctccctgggcatcctcaggctcggcttcgtcatcgacttcctgtccaaggcgacgctggtggggttcatggccggcgccgccatcatcgtggcgctgcagcagctcaaggcgctgctgggcatcgtccacttcaccaccgagatgggcatcgtcccagtcatggcctccgtcttccaccacaccagcgagtggtcgtggcagacgatcctcatgggcgtctgcttcctcgtcttcctgctgtcggcgaggcatgtgagcatcagatggccaaagcttttctgggtttcggcgtgcgcgcccctggcatcggtcaccatctcgacgctgcttgttttcctcttcaaagctcagaaccatggcatcagcatcattgggcagctcaagtgcggcctgaatcgcccctcgtgggacaagctcctgtttgacacggcgtatttaggcctcaccatgaagactggccttgtcaccggaatcatctcactgacggaaggaatagcggttggtagaacatttgcctcactcaaggactaccagatagatggaaacaaggagatgatggccatagggttgatgaatgttgttgggtcctgcacatcatgctacgtaacaacaggtgcgttctcccgctctgctgtaaaccacaacgccggctgcaagactgccatgtccaacgtgatcatggcgctgactgtgatggtcacgctgctgttcctcatgccactgttcgtgtacacacccaacgttgtcctcggagcgatcatcatcgccgcggtgatcggcctgatcgatttccccgcggtgtaccacatctggaagatggacaagatggattttctggtgtgcgtttgcgcgtttgccggcgtcatcttcatctcagtccaagaaggccttgcgatagcggttggtatatctatatttagggtgttgatgcagatcacaaggccgaagatgatggttcaagggaacatcaaggggactgatatttacagagacctgcatcactacaaggaggcccaaagagtttctgggttcttgatcttggccattgaagcaccgataaacttcgccaactccaactacctgaatgaaaggattaaaagatggatagaggaagaatcttttgaacaggataaacatactgaactccatttcataatcttggatctgtcagataatataaattgtattttcag

SEQ ID NO: 14544 - DNA, 1840 bp, Zea Mays
tgcgaccgcacatgacatccgacagtagatgtttgaacttattgaatcatcatggcaagtgcaataactcaaagaaaaagagtcctttactgaatcatcatggcaagtgccaggattgctcatccaccaaattcaatggtgctagtttgaagctcaatgtaagaaaggaccgttctaaagctaattcaaccagaggttcaagtggttggatttctataaaagcacgtacttctgattggaactccagagaaatggcaaaaaagcgacgtctatcagaaaatgcacaaactgctttgagtaatggtggtgatgatccatttgcatttgatgataccgatcaagaaccttcaaattgggatccatttggtccaaaaaggaaatcaccacagaagcgagcgaaacgatctaatggtgaactagtgctggatgattgtgacactgcagtaacgggaagtcctgaattatgtcaacctgaaggtattaatcagtcaggtgcaacttctgattctaaggctgcagatgagtccaaccttttagaagattgccttttggcatcagttaaggttcttatgaacttggcaaatgacaacccttctggttgcgaacaaattgcgtcatgtggtggaattaatacaatggcctccttgatcattaaacattttccctcatttgatttctccatggacagtaacaatcaaatgaaagaaagagtatcctctggtgatctgtcgtcttcccagaacagcaagtcactccaaatcaaaactaagcaattgcgagcctatgaacttgattttctggtcgccatattgggattgcttgtcaaccttgtggagaaggataaccttaatagggtacgacttgcgaatgcccgtgtttctgtcaatctatctcaaagtccagatactgaagaggtacagagggatgtcataccccttctctgttcaatattcttagcgagtcaaagtactggggaaactgctgaagctatatcaccggatgacgaagaatctttgttgcaaggagaacgcgaagccgaaatgatgatcgtggaggcctacgcagcacttgtgctcgcctttctttcaacggaaagtatgaaggttcgaggagccatttccagctgccttccggacaacaacttaaaagttcttgtaccagtgctagagaagtttgtgtcatttcacctgcagctcaacatgatgacaagggaaacacattcagctgtcaccgaagtcattgaaagatgcaggcagtcatagaagttggaagagggcgccctgtacagattaaccgacctctctgcagtgcagccgaagccacacacaggtgttgctcctcacctggccagggcgcaacgaattgattgatgccagaggctggcttgggagctaacagtgtttctattctttcttttgcccctcctgctgttctgatcctgtcatgtgcatctcctttagtttcttctccacacactcccccccggaaatcatgtagtccatattatgagtggaacaataacagtgtaggctatagggaatgtagttgtggtgcttcagttcttcgtctctgttttacatgttgtattttcgtgtcacatggaatcagtgaccacacatgcctcaatctgacaaattaagagtgtatatcacataatagtagtgtaatttaactatgtctctttttccgtataaagaacctattagttggaagcatcttccggttgcagaaaatgaccatgttgtatgcaaacggtgtaacctggtgtacacaattctttcgttgctatgtactgttctgagggaattagaacccaggtcttctgttgcttgagcttaaa

SEQ ID NO: 14545 - DNA, 1337 bp, Zea Mays
cacagttttacatgtctgttcagttgtttaattatcgacacatggcgaatacattgtccctatacaggactgttaagagattaggaatacctgatgagcgaatcatacttatgttggcggacgatatggcctgtaacccaaggaacagctatcctgcccaagttttcaataatgagaaccaccagctaaatctctatggtgacaatgttgaggtcgattatcgagggtatgaggtgacagttgaaaatttcttgagagttttgactggccgacatgaaagtgctgtaccaagatcgaagcgtcttcttagtgatgaaggaagtcatatacttttgtacatgactggacatggtggtgatgaatttttgaagttccaagattctgaagagcttcagagccatgacttagcagatgctgtgaagcaaatgaaggagaagcatagatttaaagagctgctgataatggtagatacctgccaagctgctactctcttttcacagcttcagtcacctggtgttttggcgattggtagtagcatgaagggtgaaaactcttattctcaccatcttgattcagatgtaggtgtttctgttgtggataggtttacctattatacacttgctttctttgagaaactgaacatgtatagcaatgcctcactgaacagccttttcacctcatacaatccttccatgctgttgtctactgcatattatcgaatggatctttatgaacgtcccttaaatgaggtgcctgtgacaaatttttttggatcagtcatgaagactctccacactgattcagcctacacaggtttcttggctgcgcatgacaatgaaactccaatgtccacgggagataaccttgatgatcatttcatgttaaagggcagggctatcgcacgaagatcaaccatagaaaaggaggcacaattaacaccgcatggatggactgaagttctggctgaacagctggagggaaagaatactgatactgttgtgatgtatggtctgggagctatgggtatactgttggcactttcaacctggttatcaatgtaggcaccaaaaaagtgtggttcgtagtctcttacgctatccatctctggtccgcgtgcgagagagagaaaagagataatatgtttgggaggtcttttagattttttctcttggtttttaaattcattaacgatgattagagttctttagaaaatgctgtatgtagttctttagggattactgtgttatcgttttatttatttaacatgatcttttgggaaagacttgtgcatatggaagtttggttatcttgatagccatttgagtatcttgtctccg

SEQ ID NO: 14546 - DNA, 2054 bp, Zea Mays
agttccccaaagttcccaacgccgccgcgacggcgctgctagctagtctttggtgttgcaggtgttcgattcctgattccaaattccagactccaaactcggttcttcaatcgacagattccgatttacatcccaaagctcttcggattgaaatccagccgcgacccaagagataagagtatttgggattagtagatagggagggtagataggatagtagaatagaagaggagcactttcgctgatgattacggcggaggagaagagccccgaaagggaggaggaggaggaggaggcgaacccgcgcgcggaggcttttctggagatcatctgccgcgtcccggcgggggaggtggaggcggcgctgtccgcttgcggcatcggccccacggccgaggtcgaggaactggtgctcaagtcccgcgaatgctacaagcgccctaagtccgccgtccgcttcttccgctgggcggggcagtccgtgtcgcacaccgcctacgcatggaacctccttgtcgacatcctcggcaaggccgccatgttcgagcccatgtgggacgccatccgctccatgaagcaggagggcggcggcgggctcgtctccgtcgccaccttcgcctccgtcttcgcctcctactgcgccgctggcaacatcaaagatgcaatcgcggccttagacgtcatggaccgctacggcctcaagcacgacgccgtcgcgctcaactcgctgctctcggcgatttgccgcgtcgagggtcgcgcgcaggatgcgcaggacgtcttcgagcgtaccaaggcaaccatcccacccgacggcgacacgttcgcgatactgctcgaggcatgggagaaggaggggaacgcggtgcgcgccaagagcgtctttggcgagatggtcgtccgcatcggctgggacgcagccaacgtgatgcggagcaagggctgcttgccggggatcaattttttttctacagctgtggatctggtcgtccgcaagggtgactacctcaacgccgtagccatctggcacatgatggtctctgaagccggcctcgttcccaatttctcaatgtacagcgccatgattggcctccactgcaatgctggtagcatagacgatgctcttgggttgcttgatgaaatgcccctcaacggcgtctttgcaaattctgtcacatacaacaccatactggaaggattcatcaagcatcgcaaggctcgtgaggctgaaagtttcctaacggagatgagcaagaatgagcaactgcctactgcatccaattgcgctgctgctatcagcttgttctttaaggagtttaacccatctgcagcaatcgacgtgtggcgctgtattgtggagcacaacattaccccagctgaggactctgccaaagagctaatagcagggctgcttgaatttggcaggtttactgaggtgacgaagcgtgctgatgagatgattgacatgagagttgagttgtcacggtccacaatggagaatatgaagcgtggttttgctaaggctggcaggcaccaatcatatgacaacattgcaagaaggctaaagcgatattagctgcacatgaatgctttaatcagctgaaactttgcggctcacggggtagaagtttaacgcctggactgctgaattgcatgacaaccaagaatttggactagcctggatcctggaatgtaagtctggaagtctggaactgtactctgatcccacaagcagtggtcgggatgttagtgtagctcttgtagattccggaccccatttgttagctggttactcatcgagtgtaataagtggctagtttagtgagactgcacattatcgctgtttatttttcagatatattttatgaatatgaaattgggttatgtaagtatcagatattcctggctgtcagcagcgtcaggcgcctctgctgatcctttgaccatattgtttttcgtggaagaagctttttaacttctttttttttttaccgggaaggtttgagcggttggtgttttctcttgtcattcttttaatcaggtcacttgctcat

SEQ ID NO: 14547 - DNA, 1479 bp, Zea Mays
ttattaagtacagttttctttggggcagaggcggggttggggctacactgaggcggatttgtggatcattctgcaagagtgatgcaagccatcacttggaatcgctcatttaaagggatccctccaccagaaaatgtgaagaatgagttggctgatgatgaatgggaaacacatgctaccgtactcgataagttgcttgcatgggagaaaaaactatgccatgaagtgaaggaattcgaggttatcaaagtgacatatcaacgaaagctggctgttcttaacaaaaaaaagcaaagtggtgctagttcttcatcaaaattgatcgtctaagagatcaacagctttacccaaaactccttgaactggtgaagggattcgcacacatgtgggatgtcatgtacgctcgtcacaaagcgcagctcaagatcattacagagcttaaagcgtccgatatctcggttgctacacgggaaacaagtgagcaacaccatgagcgaactttgcagctgtggaacgttgttcaggagtggcatgtacagtttgacaggttcatgacatatcagaaggagtacataggaagcctctacaactggatcaagctaaatgtgatccctattgataccaacattaagcctaattcgtcacagccacatgaggccacacctccaatcaagaggttgctgcatgcttggcatgatatccttgagaagctccctgataatgaaacaaagaaggctatacacacatttgcagaagtggtgaacacaatcctagttcaccaggatgatgaactgaagttgaggttaaagattgatgatattaggagggaccttgagaagaagaggaagcagttcgatagttgggcgcagaaaaattgggacagaggagcaagtattcctgatggcgacaatcccgggcgtgttgatcctgcagctgagcggaaagccgtcgtggatagggtggagaatgcactgaaggacctggaagataattataggacccaatgcaaggtagtcagggataaatccctcaatcttctgcggtcaaacctgccggagctgttccgtgctgtgtcggaattctccctccagtctgcgggttatttcaagggcttgtggtcgatcgcgcaaaccaatgaccagctggatgattgagttcttggtgcattcctatgtttttgttgtggtgacttttgtttgtacatgttgaatgttggtagctccacgtgtttgtttatttagtatgccggttttgagttttggttgtgcaaaagatcagaagatgactgccccttgttctgctagagctatggctgttgtaaatgcaaaatgtagggtatatataaggtgtgtataatgttgggaagagaatcacgattttgtttcaaatttcacgagctttcataggttcagatcctgatatctttgcagcagtacaagaaattcggctcctttgcttactatcattgttttaattcag

SEQ ID NO: 14548 - DNA, 1860 bp, Zea Mays
cgggctttaattatcacacatgccaatcatctgcatgaaggacactgaaggtcatcttctggttggttataccaaagttaattagggaagaacgtgttaggcttatcatgacgatactgctactcatgttcatatttcaatttctccccaaggtctaccatagtatacacatcatgaggaaaatgcagaaggtgacgggttacatctttggatcgatatggtggggatttggtttaaatctatttgcctatttcattgcttctcatattgcaggtgggtgctggtatgttcttgcaatccagcgcattgcttcctgcctccaggaagaatgcaagaaaaacaatagttgtgatctaatatcactagcttgttcgaaggagatatgctttcaccctccttggtcttcgaatgttaatgggttcgcatgtgatacgaacatgacctcctttagtcaacgaaatgtgtctacttgtttaagtggtaaagggtcgtttgcttatggaatctatttgggggctcttcctgttatatcgagcaattcgcttgctgtcaaaattctctatcctatattttggggactcatgacactcagtacttttggtaacgatcttgccccaacaagcaatggtattgaggtgatattcagcataatcaatgtcctcagtggcctgatgctcttcacattgctgatcggaaacatacaggtatttctgcacgcggtcctggcaaggaagcggaagatgcagctgcggttccgagacatggaatggtggatgagacggaggcagctgccgtctcggctgaggcagagggtgcgcaaatatgagcgcgaacgctgggccgccgtcacgggagacgaggagatggagatgatcaaggatctgcctgaaggactgaggcgggacatcaagcgctacctctgcctcgagctggttaagcaggttccgctgttccatggcatggacgatctgatcctggataacatctgcgaccggctgcggccactggtgttctccagcggggagaaggtgatccgagagggcgaccccgtgcagcgcatggtgttcatcctgcagggcaagctccggagcacgcagccgctgaccaagggcgtggtggcaacgtgcatgctaggggcgggcaacttcctaggcgacgagctgctgtcgtggtgcctgcgccgccccttcgtggaccggctccccgcgtcgtcggccacgttcgagtgcgtggaggcggcgcaggcgttctgcctcgacgcgccggacctgcggttcatcaccgagcacttccgctacaagttcgccaacgagaagctcaggcgcacggcgcggtactactcgtccaactggcggacgtgggccgccgtcaacatccagctcgcgtggcgcaggtatagggcccgggcatcgacggacctggcggcgatggccgcgccgccgttggcgggcggacccgacgacggggaccggcggctcagacactacgcggccatgttcatgtcgctccggccgcatgaccacctagagtgatcaggaggggggacgggaccatcctagctgtgccggccgggtcatggtgtctgtacagtgtacactagtggtatgttgttgtcatcttctgcgtgagtgaactggtggttcgggatttgtcatttaaagaaggtcaataatggagaaatagtttcttagcccgattcaattgtcttcctttcaccaagaataaaaattacttctgccggactgcctctccgcgttggtctggattgcttttaccaagaataaaaattgcagccccggctgcagcggctgatggcaggacagattcagacgcgcagagaatacgtacaagtcgccgaag

SEQ ID NO: 14549 - DNA, 1097 bp, Zea Mays
ctccactgtggacaaccatggagttgcagctgctggaagctatgacaaaggagtatgagaatttcaagtttcggcagccataccaacaagtcctatattattgttcgctaatactggaggaccaaacatggccatgggatgaggaattttctgcactttctcaccttgaagctagtgatctgggaatttttttgccccatttgctatcaaaaaccttcatcgagtgttattttgcaggtaatattgaacccaatgaagcaaacaatatcgttcaacatgttgaagatgtcttattcaatgcaccaattagtgcttgcaagccactatccccatcgcagcatcttgccaagaggattgtaaagcttgagaagggtttgagatactattatccagcaatgtgctcaaatcaccaagatgaaaattctgctcttctgcactatattcagactcatcaggataatgttaagcaaaatgttctacttcaactacttgctcttgttggcaagcagccagcttttcatcaattgcgatcagttgagcaacttggctacatagcgcttcttaggcaaagaaatgattcaggtgtccgtgggttgcaatttataatccagtcaacggtgaaggatcctgctaatctggatgccagagttgaaaattttctcaacatgtttgaaagcaatgtctacaatatgtctgatgcagagttcaagagtaatgtaagtgctcttattgatatgaaactggagaaatacaaaaacatacgcgaagaatcagctttcttctatggagagatttctgaaggaaccctcaaatttgatagaaaagaagcagaggttgctgcactgagggagctcaagaaggaagagttggtaggcttcttcaatgatcatgtcaaggtcaatgcaccacaaaagaagattcttagtatacaagtgaggtcgaggcctttatatggatcattcaggggaggcgttggtcagatgaagctatagttcaacattttctcatcattctgtaaaattctgaaaaagagtcatctttctgttcaactgcatctacactaaaaaggaaaaaaaaagaaatattcggttaatcaa

SEQ ID NO: 14550 - DNA, 591 bp, Zea Mays
gggaagtgtagaagttggatcatatgcctgccaactgatgaatggggaagatttcacggcgagtatccttagttcgttatcctaaacctgaggaatttacaaaaccaagttttgggagtcttactcctagcataaagaaatctgcaggttctaagaagaccatgtctcggttcaccggtgtatcaaagaatcccagtagccaaggttcggcgctttcactgggccaaaggagcgcagagccaacacccaaacacaaggggaagagaaaggatgaaagcagcctggggcactcaaatgtgtcgggcaaggccacagaaggatctgaggctcgaggcgcggggagcaacacggcttcagagatgccacagtcgccaccggaaaaatcaaagaagaggaggaagaaggataagatcgttgagtagtagtgtcaccttggcagaattttttgctggagtgcccggtgttgtttgacctgggagcaacctgttgcgtggtgctgaaataccgctatgtatcgttctgtttttggtatgtgaaaggttatctttgttgcgctgttcctgttggtgtgctaagctgagctgatatagg

SEQ ID NO: 14551 - DNA, 402 bp, Zea Mays
cagcaacgcagcatgtcaagagcagctttgtgttgccgagcggatcggtgttgaggtgacgaagtgactaagtgagctaggatggtgaatatacggaggcagaggtagtacccaggatcgcggtcgtcaaggaagccagtgaccccatccttgtggtgaaattcctgtgctggtttgtaggcttgtagctgtatgtatgacaacttattagggttccgttgaacctgctatgcatgcatgcttgctgccctgacagtgacaggcgaatgcgtcccatgcacttgaatatgagggtctgggttctggacttctgggactcttgagttattgaattattgtcgcctagttagacacaaagttatctgccatgcacttaaaaattgaaggtctggaattctggat

SEQ ID NO: 14552 - DNA, 2923 bp, Zea Mays
ccctccggtagtctctctcttttccgtttctcttctccggccttcgtcttcctgcttctccccgtccgccaattcccttccccacccaaaccctagagcaaagctcaatggccctcgtcacgagttcgcgagagactctgcaccgccgccgttgactgctgatccaaccgctcccgcggcgcccggggccctgtcacggaggcggcggcgacatggcgtcgaggcagcacaatgcgcagttccacaaatccaagacgcttgacaacaaatacatgcttggagatgaaatagggaagggggcgtacggccgcgtatacaaggggcttgacctggagaatggcgatttcgtggccatcaaacaggtctcgctggagaacattccgcaggaggatctcaacataataatgcaagagatcgaccttttgaaaaatcttaatcataaaaatattgtcaagtatttgggatcattgaagacaaagagccacctccatattattttggagtatgtggagaatggctcacttgctaatattatcaagccaaacaaattcggaccttttcctgaatctttggtggctgtatacattgctcaggtgttggaaggtcttgtttatctgcatgaacaaggtgtcattcatagagatatcaagggcgcaaatatactgactaccaaagaggtcatcgaaatgtctggtgtttgtgctgcctctgatatctggagtgtgggttgcaccgtaattgaattgctgacatgtgtcccgccatattatgatctccaacctatgcctgccctgttccgtattgttcaggatgtgcatccaccaataccagaaggactgtcacctgagattactgattttctccggcaatgttttcaaaaggatgcgatgcaaaggcctgatgcgaagacattattgatgcatccatggttgcagaactcaagacgtgctttgcctgcttcccttcggcaacctactccattaaggaatatcgacggggatgatgaaagctcaagaggggacaataactcgggtttttgcgacacaccaggagatacccgagcaactattgcttctaatgttgaccaggtgaatgggaggaacggaccaaatatggactctgctgcgcaaagtaaatctgaagagcttcatgatggaaatttagaacttacagagggcattagttcgaacaatgtggcgcttgtgaaagataatgtggtccttaataaagatccgacactagttttacatgagaagttaccggtggaatcttcatttggagatgctgatttgaatggcaaagtaatggcacatgaactattgcaaggtggtctgccaagtaagatagagctggagaataaagaaagttcaactgttgaggatggtgatgtattctcatttcaggctggaagacagaatattgacttccaaatggtggttgaaccttcagttgttgagggaccgaaacagcttagtagatttagtgacaaacctgaagatgcctctttggaagacttatttccaccaatcgacaaacggggagataatggggctgaaccttcaacatcaactactgtccaagaacttcaatataatggtgtacacaatggattcgtgaaggggctcaatgccagggtggagaagcaaaaagaaaatgatagcgagtccatgaatggtggaaaactaattgaatttgccatgcagctagaaaatattgatgcatcgggttttggtgaacatattcctggagagagtcttttccctctgcagtctgtggagtacagcaaaatagtagcacaactgaaaccaggggaaagtgaagatgtaatactgttggcgtgccaaaagcttctatcaatcttcagtcaccggcctgagcaaaaacagatctatatggcacagaatggtttcctcccgctgatggaactccttgaaattcctaaaaatcgtattttatgctcagttctgcagcttatcaacaacattgtaaaagatagtacaggcttcctggaaaatgcttgccttgttggccttattccagtggtgatgaattttgcagaaccaaatcgcccaaaggatgttcgggtgcaagcatccttgtttcttcagcagctttgtcaagccagcaccttgacattgcaaatgttcattgcatgtcaagggatccctgttttggtaagctttatggagcctgactatgcaaaatacagggatatggttcatcttgcaattgacggcatttggcaggtctttaagctccagcactcaactccaagaaatgacttctgccgtatagcagcaaaaaatgggatgcttcctaggctggtgaatacactatatagcttgaacgaagcaacacgatttgcctcagtctcagggtcaggtgcttcagtaacacagaatggctcaaccccccgacgaagatctggccaattagacccttcagttcttgaaagttgcaaggcgaggctggatcatcatcattcatctggttctttgcaatctctacaagcagatgcagataagcaccacatattaatggactcctcgtcatctcctaggttcagcgacaaaacaagcagtaacttggagaggaatgagaacgacttggttattcggccacagaggcttagtgtttctgccggaaggacatctacagacagatcaccgaagcacatagaactagtttcaaatggtcataataacagtcaaaatgaccaggtccgacctctactgagtttattggagaaagaaccaccttctcgacatgtatctggacaacttgattatgttcgccatatatctggtttggaaaggcatgaaaccattctgccactattacatacatcgacagagaggaaaacgaatggtgaacttgacttaatgatggattttgctggagggcaaggagccgatgaccatgg

SEQ ID NO: 14553 - DNA, 2181 bp, Zea Mays
cttcagaccacacttgttgggctctatcagggttcattgaggcccataatcggttcgctgatacagaatgcagtgaggcccacgtccctctcgtctcgtacagacgacgacggaaagaggatgatgcggggagtcggaggtccgctgctcaccatcggggatctactcagcgacctcgctgtcgacgacccactcgtcggcgtcggagatgcgtctgtcccatcatctccatcggcggcgcagcaagcggggaaggccaatccgtccgatctcagccggctctttgaggaacactatgacgatttgatgaaggctctacaagagaaggatccttcatggccctcactgatgctgaagctgtgcgcggcgctgaagactgcggataggctgatgagttgcgcggacacgaacgcggaacagctgctggagaaggtgaaggcactggagggcgtcctcgacaggagcggtcatgcggtggcagagattgtagaagctctccagaggtcaggcctagccaatgatggtcacggttccccgtcaaaatcggctagcaagtagacgttctggtctgctttttgttcgtcttctatcccatgcaaatctctgggtattgtgagtgagttgtatgtcgacctgtgcctccacggctttgcggcctgccttgttttttttttttacccctcaccgctcttggaatgcgcgtttgtgtttatcctgtcagaagtagcgggcgatactggatttgcggtgtacaagcttcttccttcttggatcattagcttggtttcttgctaagttgcaccaagtctgaaatcaactcaaaattctggagcagaaagacgctaaaaatgccagattgcgtacgctttgtgaaacgtgagaacttgaccgccttcaatgtttgaacgcagagcatcttccgaaccagtaaaaaaaagcggtttcatctcatttgtggacgagtttacatgaaacatttcgattcacataaagtctacagtctagcgtgccaggacgtctcgaatttcttccaaaatattccaaaatgggctatcagcatccgaattccgaaggcacgatgaatttgcacttcatatttgggagctggaactacagtccctcaccctgttcattcattcagaaaagtgcggtggtttctcgtgaacgagcaacccagaaaaagtacacctgtcgcgtaagcgtcctcaggcagcagctccccggtcgcggtctctgtctctctgaagggaaagctctgtttccccttcccggtgccggagtcggggaaggtcaccgcgggcgcgagccgatggacagcaacaacctcctggcggcgtggccggtcctggggccgggcgtcgccggcgccgtattcggcgcaggctggtggttttgggtcgacgccgtcgtctgcagcgccgccgccgtgccattcctccactacctcccagggttcttcgcctcgttcgccgcgctcatgttcaactgcgtcaaccgggaggacatcggcgatggctactactcaccgtacgacgactccgagtggagggtgaagctctggctttttatttcgtacgtggtgtcgtttgtttcgctggccggggcagtgggtttcttggttcaagatgcgcttacggatacggggccatctgcgtggactggcagtgctggcatcctgcagtgcgtgtttgtgttagtgagtgggctgatctactggacgtgccactctgaagattgacttaagaagtataggtatatatggccaaggaggaggaggatggagactgcttttctcagaagcgattgcttttccgtagtacgtttctggaggcacctttggaccgtgctttccgaaacgggtggaataaagagccattttctagttgtttcaagagagatgtagataagctgtactactattttacacgtgtttatagtcgtgtatcatgttgcttaaaactactttgtgaggtgttgttttggagcaagaaacttataggggtgctaagtactcgctctgtttctttttagctgtcgccggatagttcaattttgcactatacagcgacaactaaaatgaaatgaatggagtagtcaggaaacatcgttacatttttccctgttggcgaatttctcgtgcaaggtttgacaactctagtctgctcctgtacctcccgagga

SEQ ID NO: 14554 - DNA, 641 bp, Zea Mays
tgatcgatgttcccgatgcgaccaacctcacttgcaacttgcaagccgtcatcattattatcagatcggcgagagaggtggatccatccatggacatccccaacgggctgggcgtgctgttcgcgctggcgcagctgctcctgtacgccatctactacaagaacacccagaagatcgtggaggcacgcaagcgcaaggcgggccaggtcgccatgacggaggtggtcgtcgacggcagcagggcctccaacaacaacaacaacggcggcagcggcacctactgatgatgatgagtacgacgtaatattgtgcatggtgaccacgccaacacaacaccaagcaacacggggggccaacgccaacgccgtgtgtatctagcactagcaagcgtccttcttcctgacgaagggatgatctatgcatcttaagcagccgtcgtcttcttcttcttcttctgttaatccctagcttttattttctccatgcttcctagtaacgaagctttgcccactgattattagtacttatatgttgaatcataatattacgacctcggcagcccaaacacttctcttaatccatctaatcaatagaccttagccaagtcaacttaatcaattgactgatagtactgcttgact

SEQ ID NO: 14555 - DNA, 251 bp, Zea Mays
cgacgatcgcggatccggctagcacccccgaggaaggtcgctggagatggagggaagatatcactgatagggcattcagctgggggctggctcgcgcgcgtgtacatggcagagtttgatgcttccgacataagtctactcctcacccttggcactcctcacctgtatggttcctcaatcatgactcaaaagtggactaatgtatgattaatcgcttagtgtttatgctggagattcttttaattaaattg

SEQ ID NO: 14556 - DNA, 802 bp, Zea Mays
gaagttcttctcctaactcctaagagtttgagggacgacgaggggctgtacctcgccagtgattcggacgagcagctgctgatctacatccccttcatgcaagtggtcaaactgcattccgtgctattcaaaggccccgaggaagagggccctaaaacagtaaaactcttttccaacaaagagcatatgggtttcagcaatgtcaatgactatccaccaatggacacccttgagctatcctccgatcatttgatagagaataaacctttgccgctaaagtatgtcaagttccaaaatgttcgcagcctgactgtatttattgaggacaatcaatctggaagtgatgtctcgaaaattcaaaaggttgctctttatggcacaactgtggacacgacaaatatgaaggatctgagaaagacagaagagcactgagaccatttaaaggctgagcttaatccagtgggtgtatgacatactagaaacagttagatgttgaattgagcaatttctagttgaccctggcaaactttttccccaatttttatacacgaggagttaaaagacggtctggtgatgccgaagctattacctcttggcatcttgtaatcctgcaatttatgtcttggggatccgaattcatttcatgaatttaccaaaattagtccatgcgtcgatggtctcgcaaactttgccagcagagcttagttcgttcatggcgctgtgatatgcgtaagatttaatcaagtcgtggctgtacttgccgtatggctgctggcctggccaatctgtgtcttgctgtttt

SEQ ID NO: 14557 - DNA, 5079 bp, Zea Mays
  misc_feature (5079)..(5079): n is a, c, g, or t
ctaaagctaaagctactctcgctccatcaaaccaaccctcccaccatcaccaaagatatatactattactacatagttaacaaactttatctgcctcctgtcctgctaatctatatatcccctctccactactgctaccttctctcgcgcgtctctgctcaaagaataatgtcagcgtagcctagctagctcatagggattcctctttcatccctcctgagatcgacgatctcaccaattaagaacacacacgcacacagcagctacgtacgtacctagctagctagcatgatggaccatcagctgttcgacgaccccttcgggagcagcatctcgtcgctggaggcggaaatcttctccgccgccgcccagctgccgccgtcgccgccgtggccagacatcgacctcgacgacgactacgacatccacgacctctccgcgccggccgccaacgccgctacgtcctcgggcggcggctacggctccggcggctccggcggccacaggaagctcagccacaacgcgtacgagcgcggccgccggaagcagctcaacgagctctactcctccctccgctccctgctcccggacgccgaccaaactaagaagctgagcatccccaccaccgtgtcccgagttctcaagtacatcccggagctgcagaagcaggtggacaacctggagaggaggaagaaggagctgaccaacgccaactgcaagccgggagttctgaaaaccaccaaggccgtaactcccattgtttctgctacctgcctcaacgacacggagatcatggttcaggtcagcctgcacagcgatgtggccgccacagctctccctctctccaagtgcatcaaggtgctagagaacgaaggccttcatctcgtcagctcatcaacctactcctccgcctttgagaacaagacattctacagcctccatcttcaggtgcatcactgcttcttcttttttttttgaaagaacgactgcttctttcattagatgcatgttcaatgttcctgccttcctctgacgttgacttgaatttctttttactctgtctaattagttagtataattgcactgatttatacaatctaacactattaccacagtcatctcaatttccacccttgcttttctagatgcttgctcaaaaaatacatgcagttccaagctccgaatcctcaagcaagaggtgtcactggatcactgagcatcagtagaatcagagaacgaccacaacagacaaaataaatacagacaggaaacaaatgaactcatcaaactaattaaatatgcaaacaagctataagcatgatcactatgattaaatctagaaagaatccattgagtaagtacaacactaaaccaaaagaacactagtttaatttcaaatttggtaaactactcattagtgattgaggttccacttaccttttgaagatcccaaacaatcgaccattttacagcacatgatgcttagaacattcacccaacatctagattatgcaaatataattaaaatgcccaaaatttccttccagaagactagaacaaggtttggaaactcgactcggcacgaaccgagctcgcgagttggttcggttcgtgagccacaccctgataatataattgaattataaaataaattaaaatatataaatataaaacataaaattatcattcaatattatgagtaatctaaattatgaattgtcatatactccctccgttataaaataacaccgttataaaataatattcattttagcctcatatatcattcaatattttagcctcatatactccctccattatgagtaatctatattcaattggatgatgatgaatctagcctcatatataaaacacatacaaaacacatacatcaagtgatgtataaatctattaatttactaaaataaaatttttaatttaggacagagggagtattcatcatcaaaagctaaacaagcctattatctgtaaatttatccaatatttattattatttggcatattaattagtttggcgagccatcttggctcggctcgctgctctaatgaactcaaaaaataggcacggctcacacgaggctcgcaagccgctctgagctcgagccggctcacaagcctcgaccttttttaagccctaactagaacgacgtagaatatatgaatccaacattacattaacttggtacaaattaatcacaccaaatattatactacttagtatcatatcatgcttagagatacatttcactaatatacgtccactacacaagaactgcaagaacatatctctatcatctgcctcgaatatctatacaccaatcaactaaagctattatcgataaaaaattattatgctatgcacaaagaacttaaaactccatagcttagggatctgcaataataatcaggatctggagacatgaagcagtcgatgcacctagtaagagtgtgccctaacttacagaagccccactatctcgctcaggtgcaccaccgctcaccactcttgcgcgtcgcctatcgcccgtctacacgcaacccactcgcgtcacacgtcgttggactcatcactggttactattgtgctctattttctaaaccgaccatataccttcttatacgtgtcatgcctcgtgccatggcctaggcggcccgaggcccaaatctatccatgtctgtctccattaaccttaaaagaactagcccgaacgtccaatctagcccaagcttaggtcctgatctaggccacacgtcgttaatatgcgtaacacagacatccatctacacacgatcaacatcgacaacatatatttgactgtcgccatcatcaattcacatccatcatcattgatctacatgttgtcattattgatctacatgaccaagccatcaatctacatgccactgttgttgattcgcacgctaccactagatctgcgtgggaggttgagagagagagagagagagcacaagtagatgagggataaagatggaaagggaatagatcttacctgcttttagggttgataatggtctttgaccagtggcgaagctagagtaaattaggggagggtgcatataccttgagggtgcatgataacaatttacaggtggtgcatatatggtgaaaatttggtccaaaccactagatttccaatttttcgtgggtgcatgtgcaccccctaatttctacgtagctccgcccctgtctttgacatgtcaacgagaagggttggagggtgtgtgtagggcaaaaaatagctcgaggcttgcaggccggctcaagctccatacgactcgctcggtttatagtgactcacaaactctgaccgagtctatcatgtttctcaagtttgatccatgacttagccgagtcagctggctgtggctcgtgaactaagtccaaactggcataacagagaacaagagcctaagatgttgtctaactagacaaagcccaagacagacccaaactagcctaacaaagcccaagactgaccaaactagaatttgtatgcaaagtaggatgtatcgtgagccagagtcgagtctctatctcgagctcgtacaccaaaccgagtcaagcatgtctcttctcgacttgtttccaccactaggtgtgtggtgacaacctccatcagtgctgacctcctcgcattctttgcgacccatttaggcatagatcggcacaggtggagggtgtgctcacagctctagccttaagacttcttgcgctctttaaaactgtgtccaacagatcgtgtatatggtcgtgcaaaatatattttttgcactagagatataacacaatttgtagaacgaagtttaaaacaggaggtgagatagataataggataggagtgcttttgggcacaatatccgtagactccagcaaggatgtagagctgaagactatgatggagaagaggggcggatgcgtgatagagaaagggccacgatgcatgagggagggagaggctcaatgtgtggcagagtgtagctagcgtcgggtgcagagtgggtatgagaagagctagggttcatcgtctcttataaattctaggttgatttgggtcaacgactatttatttaagaggcctatctccgttaattgattttaagagacaatcaagttttaagtgtctttgtaaatggtttgtctgtctccaaaaaatcaggggacattttagaagacagtgagattttatgtccacctctgttaatcaaatcgtttgtcttccaaaatcatctatgtaatagtgataatatgataatttattctattgagctaggctcatataaatttagtcaagtatgcttaaatatttctcttattaatatgcaaagtggactctatttgaactcatctaaaatcttcgtattccggttaaaaggttataacacattataatttatttttttttgtaaacgctctaatgtgtttaaggaaaaaatatggctacaactgaagttttattataggaaaattcaacgtcctgtccactgcagtggaagccaaaacacttgtctacaccactctttgtaactaggatgcaggacctaagagcatgtacaatctagatattatgttacggttctctaagcactaatacatctaagaaacttcttcatacaattcaatgtatacaagtcttctatcttattcactagaatctcttaacatatggttcatttatgtgggttgtatggatggaactgtatctaaacttagagaaccgtgctagagacgttcattcaccaaaatatatcttatgttttttacacttatctccttagtaactcttaaaatacagatcatttatgtgggttatacattgccctaacacctatatcttaatgacatccaaaggaaggcatgtaataagaggtacaaacgagctctaaggttttagcctaccatgcatacgaaaaacacaagtatatagatatgtagttttgggcttatttaatctggaacgatagggaaaaaaatgttgtccaacgtaaggattttacttgtaagaaaaaaaaaaagacactgttcatatccacaaaatn

SEQ ID NO: 14558 - DNA, 2448 bp, Zea Mays
gccgcctgtctcagtcgcggccgtcccccggcttcttggactttgtcgtccgctcgtcccgtctcgtgaccctcccgcggctcgtctccctctcacggtctctcacctcacaacctcacggtcctcacctcactccacctcgttcgccgcctcgctgccgcgtcgggccagtgcgtgcgtgggggcgggcgtgagtgactggctctcctcggcgcgcggacccaggggcggcggcgatggggaagaatatgcgcatcaagacggcgcccaaggcgaaccgtgtccccctcctcggcgacggggagacgtcaagggcgctctcggacctggaagagggcagcgacgtccagccagcgaacgtcggcttctgtcgggtcatcaaacttgcgaaacatgacgccggaaagctggtcctcgccacagcggctctgctcgtcgcctccctcagtaaccttctcgttcccaaatatggtggcaagataattgacattgtgtcaagagatgttcggcgcccagaagataaggcgcaagccctggaggatgtgaagggcacaattttgtacattgtgacaatcgtcttagtcggttcagtttgcacggctcttcgggcatggttattcaattctgctagtgagagagtagtcgctcgactaaggaaagacttgttcagccatctcataaaccaggaaatagcgttttttgatgtgactagaacaggagagctcttaagcaggctttctgaagatacacaaataataaagaatgctgctacaaccaacctatcagaggcactgcgcaatgttactactacagctattggtcttggtttcatgttttcaacttcatggaagttaacattgctggcacttgtaattgtcccggttatatcagttgctgtgcgtagatttggacgttttcttcgtgagctttcacatcaaacacaagctgctgctgctgtagcttcatccatagctgaggaatcttttggtgccatccgcacagtaagatcctttgctcaggaatatcatgagatttcacgctatggtgaaaaagtagaggagacacttaaacttggtctcaaacaagctaaagttgttggcttgttttctggagggcttaacgctgcatcaaccatgtctgtggttattgttgttatttatggcgccaacttaaccatcaatggttacatgacaactggctctcttacatcattcatcttatacagccttacagttggttcgtcagtatctgccttgtcaggactatacacaactgtaatgaaagcctctggtgcaagccgtagggtttttcaacttttggaccgtgtttcgtcaatgacaaactctggggacaaatgtccaataaatgaaaaggatggggaagttgagcttgatgatgtctggtttgcatatccttctcgcccatctcatatgattcttaagggaataactctgaagctagcaccaggttcaaaggttgcacttgttgggccaagtggtggtggtaaaaccacaatagcaaatttgattgagcggttttatgaccctctaaagggaaggatcttgcttaatggagtaccgttggtagaaatttcacatcaatatcttcacagcaaggtaagcattgtcagccaggagcctacgctcttcaactgcaccatcgaagagaatattgcttatggactagagggcacaacgaactttgctgacgttgagagtgcagctaaaatggcgaatgcacacaacttcatatgcggctttcccgaccaatataagactgtcgtcggcgagcgggggatcaggttatccggcgggcagaagcagaggatcgccattgcgagagctttgcttatgaacccacgagtgcttctcctggacgaagccaccagtgccctggatgctgaaagcgaatatcttgtacaggatgcaatggactccttgatgaaagggaggactgtccttgtgatagcccaccggctctcgaccgtcaagagcgccgacaccgtcgccgtcatctccgacggcctaatcgtggagagcggcacgcacgacgaactcctggaccgcgacggcatatacacggccttggtgaagaggcagctgcaggggccgaagtttgaggccaccagcagcatcagcgaggcctccgaaattgaagcggaacccagcagtaatgggcaatagcggccccgattattaggaagaccacagttgatttgaatccacacaagtgtatgtaaccctgatgttgacgtatgccactgcgaatcacgcgaaaccattggatatcacatgatgctacggttgttgtaggagtaatttcccacttggttaatccaacacatatggtccagttttgtgtttatgctgttgggattattgggccaagcccgtttgaaattctgaaatagtttctagagaaacacaaaggcccattcataaattcgtg

SEQ ID NO: 14559 - DNA, 1896 bp, Zea Mays
ttcgccggccgggaaacgaggcctttgcccgctcttcactctcctccgctcgccgcctcctctttctcctcttctcctctcctctctcacgagggcccaagacctcaccgctaaggtcccggtctccgcggggctctccgtcgcactttctcgtgcctcggggaccccgatccgccaccgcgcgaccgatcgtcccggatgcacgggccgtacccgacggctgctgctgctgctgcttcttcttcggacgacatggcggcgaacggcatgaaggtggcgctgcaccggcaggtctcggggggctcgatgaagcagaacgcggagctccggcgccaggcgtcgctcgagtccccgcggacggggcgggccaccagccggttcctgttcgggcggcagtcgtccatggacccgaaccggaggcgcggccggagccagagccccgtgcgcgcgccggaggacctgggcgtgccggacaacctggacgccaccatgcagctgctcttcttcgcgtgccagggcgacgcgctggggatcgagggcctgctgcgcagcggcgtcgacgtcaacagcatcaacctcgacggccgcaccgcgctgcacatcgccgcgtgcgagggccaccgcgacgtcgtcagggtgttgatcagctggaaggccaacatcgacgcgcgcgaccgctggggaagcacggcagtagctgatgccaagttctacggccactccagggtctacgatctcttgaaattccatggcgcaaaggttccgagaaccaagaggacgccgatgatggtgtcggccccagccgagataccggagtacgagctgaaccccggagaggtccagttccggcgaggctgtgacgttacaccgggtgtgtaccacatcgcgaaatggaatggcacaaaggtttccgtaaaaatacttgacagagacggttgctccgatcaagaagccgcaaactctttcaggcatgaactgactgtactggagaaggtccgacaccctaacgtcgttcagttcgtcggagccgtcactcagagcatacctatgatgattgtgtctgaactccatgaagagaaagacttatcagtctgtatccagaagaaaggaaagttaaagcctcagaaggtgctaagatacggccttgatattgccaggggcatgacctacctccaccagtgcaagccggaccccatcatccactgcgacctaaagccaaaacatatcttcctggatagcggaggccagctgaagatcgcggggttcggagtgacaaggatgtccaaggtcgggaccgacaaggtgaggttgatctaccatggcgctctcgtcgacagcttcagctaccacaccgcgcctgagctgtacaggaacgacgcgttcgactcgagtgtggactcctactccttcggcttcatcctctacgagatggtcgaagggtcggtaagagcgccggaggattcagggcactcgatccggttcgagggactgcggccatccctcaagggcaggctcaagggctatcctcccgacttcaaagcgctggtggaggaatgctggcacccgcaagccatggcgcggccgacgttctcggagatcatcatccggctcgacaagatctacgcccacttcgacaagcatgggagctggaaggactcgctcaagctttggaaatgatcgatggcatggcctgcactgcacgccgccttctttgtgtacatacataccgcgctgcaaacgcgtctctttcccggggaagattgagtactggttgtaccttgtataaggtggagactggagaatcatgtggcatggtgattggttttttgttttttgctacgaattgtaacagattgtgagtaaaattgggcagaacaacacgtatacgtccccccc

SEQ ID NO: 14560 - DNA, 958 bp, Zea Mays
gataagaagaagggtggggagtgctgggcgcttctgtctcctcttcttcccccgcctcggagcgccagcggcttcatccgatctccttctcacctcctcacctcaggcgcacaccgatcactctcttccctcctccagcagtccagctcacacccaccgccccaccccttccactcaaatccagggacatcgcagatccaccggctctccgatccgctcgcctccgcacccgcccgatcggatcccgcagtgttgatggaacactgaattgtggatattcaagttttagaggaagaagggcaagcatggaagatttctatgatataaaagcatctaaaattgatgataaacaaataaatctcttcggaatttttgatggtcatggtggttcacgtgctgctgagtatttgaaggagcacttgtttgagaacctcatgaaacatccggagttcatgacaaatacaaaattagcattaagtgaaacatatagaaagaccgattcagagtttttggatgctgaaaggaatactcatagagatgatgggtcaacggcatcgacagcagtgatggttgctgatcatctttacgtggcaaatgttggagactcgagggctgttatatcaaaggctggcaaagctattgcgctctctgaagatcacaagccaaacagaagtgatgagaggaatcgaattgagagtgctggtgggatagttatgtgggcaggaacttggagggtaggtggtgtacttgcgatgtctcgggcatttggcaaccgtctcttaaaacaatttgttattgcagaccctgaaattcaggaacaagaaataaatgaggagttggagtttctaattatagctagtgatgggctgtgggatgtggtttcgaatgagaaacaaaattgtaggtatcttggcgtgttttcagaacaatgggatttgagtttattttcaactgctgg

SEQ ID NO: 14561 - DNA, 1315 bp, Zea Mays
gcaaaatctaccaactatatacatgtttaaggttgctgcccttggtgccatttgcaatattgccattaatttgacacccaggaaatcagttcttcttcactccggggttgtctcacaacttgttcatttgtcaaagtccatggatccaatgttgaggctaaaatctgtatgtgctctcaggaatattatgttccttcttagtcctaaggataaagacttcattgttaaggagttgaccttatctactctttcaagcctcatatgtgattctgaacattttgttcaagaacaaacattggcacttgtgcacaatcttgttgatggatatgtggtctctgctaattatgtcattggtgaagatggaatggttatggatgctattgcaagacaactgaacaatgcatctgctccgggagtatgcattcagggtatgtatgtgcttgcaaacattgctgcgggaaacgagtggaacaaggaagctgtgatgaatgttcttctgcctcacagagcagatcgcatcaaaccgtcgtttgcagtgaactttctgaaaagcaaggatagacagttgcgagttgccacactgtggtgcgttctaaacttgatatacccaaaatgtgaagcctcatctggtagagccgtcagactacaaagtgctggagtgatcctacaagtgaaaagaatgataaatgacccctgcttggattgcaagagttcgtatggtgcttgaccactgcttggacaacgctgatgattgtttcatgtgaacaacctgtatttcaccgtggcaacccaagtttacggaactatattcagatcaggaaagaggaaaccagtgtgcttcagatccaaatatatgccactgaacagtggacatgagcacctgcagaaagcttttgctgatctctgcgggtcttcaagaaccagctgccttttttgcaccatgagaacctgacaaccggcatctgttgtgcatattgtccattaccttgttgtgaccgaagttgtctagtgaacttgggctgcctgctcgcagtctgaaaggctttaggcgctatggatccagaaatcccatttttcccagtgcctgccgaacctggtgcatgcttttgaagttgagtctgtaaatgagtgactgctgtaactgttgtacaaaatttgtatttctgttccaataaggccgtatttaacatgcacctatgggttagatgttgtccatggattcccatgttctatgaaaataaagaagatgcaagtttctatgcatgttttgccgcctagtatttcatactgtttgcgggttagctgatcttatctc

SEQ ID NO: 14562 - DNA, 95 bp, Zea Mays
ggtcggattattactacttagtctgatgctatttctcaactctaatcaatgaacatgatgtgattatctatgatacgctgttttcccgttcttct

SEQ ID NO: 14563 - DNA, 2841 bp, Zea Mays
ctcactctcatgtcatgtggcggcgtccttctccctcgctgctccgtctctctcagtctctctcctgccctgtccgtcccactccccgtccagcggagagagaccctgtgggctgtggccgggcagccgtttcccctccccttccctctccgctccctccagagtctactgtagcgcagtgccgtagggtttcgcgtcctatccttcctcgcatcctccatggccgatcctgacgacctcggccgccgcctcgccgcggtcgccgtatccgagtctcctaccgccgccgcggctgcgctggagagcagcaacaacaacctgttccaggtgatgcgcgccgtggaggacgcggaggccaccatccgccagcagctggaggagaacagccggttgaaggacgagctgatgctcaagacgcgggagctccacagaattaggtcagaagccacagaccaagcttcctctcatgggatccgtatccatcaggatcgcgctcttggtgcccacacagacacctcctccactgctcccatcaggactaccgctacagcagcagaggccttcgaatggggagctggggatgccggcatcaaccacaagtaccttgaggccaaccaggctaatggaattccccgtaaatcaccgagcgctcccgatagcgctttcccatctcagctatctaccccgtcttcgcgatccctttcaccaactaggcaccacaaagaaacagactatgattctaggctcaacttatccggacaaggcgcactgcctgtttcagacctcaactcaaacgtcgtcatctggaagcaggatctccttgttaaggtcaaagaacaaggggaggagattgcacagctgagaaggcatctttctgactactctgtcaaggaggcccaaatacttaatgagaaacatgtcctggaaaaacgcattgcatatatgcgcatggcatttgatcagcagcagcaagatctggttgatgctgcatcgaaagctttgtcctacagacaggatattatcgaagaaaacatccgtcttacatatgcattgcaggcagcacatcaagagagatctacattcgtatcttctttattgcctcttctatcagaatataaccttcagcctcctgttcttgatgctcagtctattgttagcaatctgaaggttctgtttaagcatttgcaagaaaaacttattattactgaggagaagctgaaggaatcacaataccagattactccttggcatgctgaatcttcaaataatacaagtgctgctgcacagtcgccttctcatcctcctggaaatgcattgatcaaagccaaccttgacattgtgccccagcaagcatattctcatgtacattctccagtttcttctcctgttcaaactaggcgtgactgggatttgttagggaatgaaaatcgtcaggtcattcgaagtgaggttgccacaacaagtgcagagcatgataatgttgggaggacctctccttcaaccagcagccataatatgaaggatgcccctcaaagaaccgatcatgattcccgtgctgttcgatttaacattgaatccaaggatcaaaacccatcattcaaggaccttattaagagtgatgcctcagaaagtctggagggagctgaggcccaaattccacaagaactttctgcgcagcaggattctggaggctcacctaatttgacatctggtcttgatgacgcaaatccaccatacccttatcttcctactgtccttgaggagcctagttcttctttttccgaagttgcagaggatgatccgcttccagccatagaaggactgcgaatcacaggtgaagcctttcctggaagagaacttcaagcaagtgggtactctatccatggaaccacaagttgtaattttgagtgggtacgccatttggacgatggatcaataaattttatagaaggtgcacggcagcccacctatttagtatctgctgatgatgtggactttgtactagcgattgaagtccagcctctggatgacaaaaaaaggaagggcgagattgtgaaggtttatgctaatgatcaaagaaaaattacatgtgaccctgaaaccaaggagcatattaagaaaattctctctctggggcatgtctcttatgaagttctattacctgttagatttttagatatgtgggaaccagctattttggcaataaagagggaaggttacagcgttaagtgtaatggacagcgcggtgtcgttgtcatggagaaatttcagcaagcgatgaccatcaatatcccatttgggcgtcctactgagttttcaattttgtctgctgatggtgctgagtacaatttaaagcctgcagagaatgccccatcacgagatgccattgttctaatactaaggctattcaggatgaaggctgttgagaagagcaagggaaaaagaaagggcatcttcttcaagtagtttgtagttgtagcagtattactacgtagtgtcatggcaggttgactgtatctgttacctatgttttcgcggttcatgtatgtagaaggaaagagcaagttgtctgcgtgcttatgtaaagttccgattcaattcgattagattcaattggcaccgtacccagttttttgtttgtttttgttctgttgtagggagggatgaattcattttccaattaatgttggtttgtttggccagattgtagattcgtcgggtgctgccgtaaagcagaagcaattcagacgggttaccccagctagactcacgacacacaactgcagagtgacaattcatcattgtgtctagctccatgcgtgcgtgcattcacgtgtagcc

SEQ ID NO: 14564 - DNA, 3713 bp, Zea Mays
gtacaaaacaatgtatttgcatctagttggcgtgaggccaatgacctcatccgatccctttccctttcccatccgcgcgtccctactcctccccctccctcctcaacgacgcgagaagacgcaatcctgggagctccgaaccctagctcctaatttgagccccggtgtcatcgattcctcaggagcccgccgcgattcggctcccgtagcagcatagggctccaccgctccccagctgcatcagcatcgacggcggcggcgcgccgccgcgactacgctcgaggaagcacctagtctcggcgggttctcgttcttggaggccttccataaggcggtttcgtggtgtccgagcccggatctacggcgatctgcaagcggaaggcgatagatgaggcgattcagtggtaacccccaatccggtgggtttccggctggcagaggcggaaaggttcgggccttcggcgggtgatcagatttctccgtgcggcgcgcggcttgtgtctaccgcaacggtgtaggactggagcgcaggagccgacgaggcggtggagatacaaaaaaattgcttgcttgtacacttgttcatgttcatttgttcctgctatctgttgtggtttaaagcatcaattttccgctcaatttaagggcgaagacactttttttgttccttccttgttggtttctatggaataatctctatattacagaagaggagtgtggaaaagcaacaaaaaagaggaatataaaatacaaaaaagatataaccagcagaaaaaagagattttttttgagtgggcaagcaaatggctgtgtattacaagttcaagagtgctagagactttgactcgattccgattgaggggcaattcatctctgttgccaacttgaaggagcggatttttgagtccaagcatctcggcaggggcacagattttgaccttatgatctcaaatgctcagactgatgaagagtatgctgatgaggccactatgataccgaaaaatacgtcagtattgattcggcggataccaggacgaccaaggaagcctattgtcacagaacctgaagagacaaaagctgcagaagatggtgtacaagatgtcatgcccacatcgggtgcttttcttggtgattcatctatgaaatatcctgaagaatctgagtgggatgatgagtttggcaacgaattatatatttctgattcagttccttatcagcctgtttgccaggcggttgatgctattgaaaataaagttgacgaggatagtaaaataaaagcacttattgatacatctgcccttgactatagccaaatccctgatggttatggttctggaagaggctatggtagagggatgggtggaagaatgatggctggacgtggctttggacgtgggctagaacgcaggacacctcctccaggctatgtttgtcacagatgcaaagtacctggtcattttattcaacattgccccacaaatggggatgctagatatgatgtgaaaaggatgaaacccccaactggcattccaaaatcaatgctaatgcaaactccggatggttcatacgcactaccaagtggagctggtgctgttttgaagccaaatgaagctgcttttgagaaggagatagagggcctacctaccacacgtcctgttggtgatcttccaccagagctacgctgcccattgtgcaaagaagtaatgaaggatgctgttctaactagtaaatgctgctttaggagtttctgtgataaatgcatcagggactacataattaacaagtcaatgtgtgtctgtggtgccacaagcatattagctgatgatcttctccctaataaaactctaagagaaaccatcagtcgcatattagaggcaccaccaactagcagtacagaaaatgtgggaagcatggtgcaagtacaggacatggagtcagctctacctgtacaacctaagcataggtctcctgctgtttctgctgcttcaaaggaagaggctaaagcatccacacttgtagaagagtctccagatgctgagagcctcaatggaacaaaagctacaaatattgatgcgagttcttcggataagaaagctttgacagttccagatattgctgaagggaccttggattctaagaaagcgaaagaagataaaccagtagaagcaaccccagtggcaaaagattctcaagaaaagtttcctgcaggggaacaagcggtaaagaagaagaaaaagaagaagccacgtgttcctggaaatgctgaagagcaatggaaaaattttcaagattttggaactgaaaatttttcggggatgcccttgggtccaactggagcattcaacccttactggggcggaggagtgccattgccaatggattacatgaatgcaccgtttcctggtcccatgccttacatgggttatccaccaggtccatttgacccttttggtgggggtgttctcccacaagatccatttatgcccccaggatacatgatgccaggagttcctagggatctttctgaattggcagttaacgctatgggaataaacatgggcccgccagttatgagcagagaagaattcgatcccaggaaacctgaacataggaggagacgtgaaatggatcggttcaatgatagggaaagagagcgtgaccgttctcgagagcgagagcgagaacgggagcgggagcgttccttggagagggagagggagcgggagcgggagcgtggccgttctctggagagggagcgggagcgggttcgagagctggagcgttcccgcgagggtgaccgtgaacggcagcgaggcagggacagggacagggactcacgcagagaggccagagcatcaccaggggccattaatgatagttcctcgatgaggcggaatgataggtcgaggtcccagccggacaggtcggagcgtggcccgccgcagccgtccagccccgaccggcagtcgcgtcgctcctcctccggcaagaagcgttcctcctccgaccgctacgacgacatgccgctcccacctccccctccgctgcccgcgacgcggcacgaggccgagcccgccaaggcaccggggtcgtcgtccaagtccaaggccagcgtcttctcccgcatcagcttccccggagacggcgccaacccctccgacgccaagcgcagccgcagggcctccgacaagccccccgcgcgctcctcttcctcctccaagaagagcgccgcggcagagggcggggacggccgcggccaccgccaccaccgtgagcccgcggccgccgaggaggagaagcctaggcccgctgcctccggtggcgactactacggcggcacggacggagaggagagcgaggacgaggagcagcacttcaagcggcggccgtcctcgtcctcccggcgcgagcgcgagcaggacgcgccggaagagcagccgcgccactcgcgacggtccagggaccacaggcgccggtgagcgtcgccccgtccgtccgtgatatataaatcttagaagcttgagttgggaggtcgtcgcctccgcagatcagagccgtcctgcttccctgtcgcgtcggagttgggccctgtacattgccttcccgcgattatcatgttttgtttaaatcggatcggatcaaatggggattataataagtttgatttgatggatcatcttaatcgctgtttaattatgtttcccttcttgctg

SEQ ID NO: 14565 - DNA, 456 bp, Zea Mays
agccccaaatacacagcctaggcccacctattcggacacaccagaaaagagagagagagaggaaaagaacccaacacgctctctcgcgcggcaagagcttcccggcccgaaaccgaaagcaccaccaccaccaccaccaatctctgcgtttttcgtctgcggcggcggcggcagcagcggaggaggtagacgagatgctgtccgccgacatccccccaaaccagaccatctacctcaacaacctcaacgagaaggtcaagaaagaagagttgaagagatcgctttatgccctgtgctcgcagtatggaaggatactggatgtggtggctctgaaaacacagaaactgagagggcaggcatgggtggtgtttagcgagattacagctgctaccaatgctttccgtggattgcaagactttgatttctacggcaaaaaaatgggcgggcctggtgcag

SEQ ID NO: 14566 - DNA, 429 bp, Zea Mays
tagttcacccggaccattatattttagtgtgacccatgcagatttcaagaaagcaaaggagaaggtgatgtacaagaagaaggaaggtgttccggatggtctctacatgtagtagacgtctcctgccttgtcagaacaagttatcctcgtctctctcgtcatgggagatttgattgccacggcacttgttgcacacctataagtggtctgagaacgtgtattatgctttgattgtttcaagtaaaatttctcttggagaacgctggaaagtttgtgcatcggctacctaccagcatcctcgtaaacacccattaatcagtttgtgcatcggctgcctcacacgtgttggctgctcaatcccatggatgaaaatatgctggagaaagtggagatgggatttcactgcgaaaggggcagcatcaatcagtt

SEQ ID NO: 14567 - DNA, 898 bp, Zea Mays
ctcaaggcttcccttttcagacgacgcccttaattacggtggcagagcgggccttgtttctctggaacaatgaccatatcgaaaacctaatcaagcaaaactacaaggtgctattacctatcatctatccagcactcgagagaaactccagagatcactggaaccaagctgtccgtagcctgacgctgaatgtccgcaagatcttctctgatcacgattctgcattttttggggagtgcgatcagaggttcagtgacgaggagctcaagcaggaggaatctgattcgaagcgagaagccctatggatgcgcttggaggaaatggccgcctcaaaacctcgcgaaaacagtcccttaggcgcaccgaatggcaaacccagccaagctgctggctagaatagcccaccatatcagccgcagccgtgtaactctgactctgggttgtgattttagctttgggacttttttttgtcgttggtttgcctctggccctgttgtaggtgggtaggatgtgtttggttttgtcaggactgtatgttcaaagtgtacacatacagaggaatttgagagatttggcatgtgtagtaacattactcaggattaccatatagcccaataaacaacgtcgattttgattgcaaatacctagtttgggtggtttatataccgaaatgacaatgagcgatgtgttcttgtttctgctgttatattatgtactcctatatgtaatggcgctggaaactgggacatggctgtccgtacactttggttccttcgtgctgttcgtctaattcagagtctggagcactgcacggttttcttgcgatctgttcttttgttcctttggctgaaacagaacagcattgacgtaacagaacacaagtgattctgcttgtcta

SEQ ID NO: 14568 - DNA, 1840 bp, Zea Mays
cgataacaatagaaagagaggcagggaaggccgaagttgacatgaatgatatgcaggtaagggacaaaatattattgcttttggactcctggcaagaggcatttggaggacctggaagtaaatacccacaatatcattgggcataccttgaagtaaagacgacaggtgtggtgttcccaaaacgtcctatggatgccccaccaatatttactcctccagctacacataattctgagacctatggttcacccagatattctgcgggaagtctaagtgacagaatgtcctcagatgttgagactctgagtttaggagatttgaataagattcgaaatgtgacagacctactgaatgatatggtgtatgctttaaacccatctgatcgaatggctattaacgatgaaattatcacagatcttgtgacccagtgtcgctcaaatcaacaaaagcttctgcagtttgtcagttcatcagggaacgaacagttactaaagcaaggactggagacaaatgatctcttacaaagcgtactttcaaagtatgatgctgtggcctctggtgctcctttggcggttgaagcatctgtgagagaggcaatcgaggctcctgcagtaaagtcatatgcaccccctgaacataatgataatgttaacgaagaggaagatgagtttgcccagctagctcaaaggaaaaacaaatccgtcgtaagtagtagcgacgatgcatcatccagcactttgggggaccttgcccttgtacccattgatcaagcagtttcagaatcgccatcttctgttgcaagcaatgcgctggttcttcttgatcctgctcccagtactagcactgaatcaaaagagctggacatgatcgaccttctaagcctcaccttgtgcagccctactcctgaaacttcaacagattcttcagcacaggatcaaaatggaccccagcaacctgcagttacacataatcaaaaagggcttcaggaacctacagttacaaatgggcaacaatatccttctagtgtgccacagtatccttcaaactaccagcctcacactgcaaaccaggcatatgctccacagaccagcaactatgtggcaccttgggcccagaccggagcatatccacctcagcctccggcatatgcatctggctatgcctaccctgcaccgccatgggtggcgcctacacatcctgttgattctaacccttttctttcggtcaattaccaagatccacgccctgctgccacttctgttgctcaaacagcaacatatgcacctcccccagcttcatatcccccttcaatatcttatgcacagtttgcaaccccccagtcaattcagcatagcaattctgtggcttcaccgagcaatggtcagattgcaaatcaagcacaaatgaatgtgaatcaacaaccaaaagattcttcggcagcatctagcagaccatactacatacctgataatctattcagtgatttgatcgatgcaaaaagttttggcggtggaaacaagatgggcgggcccactacaatgggtagctcaaatggtggccagcctatgattggtggaaagaaatagggttatttgtctatatatatacagctgatggtgatcggtagctgccttgttatttattatgattactttgtctggtgtacatttgtacttgtatatcgccattcccccttttgacagatttggctgcattggttgattcgtgggtgcaactgttaagtttaacagagatatggacaattgctcatgtacataaatgattagcatttgctccactgaggtggatggttgtgatgaaatctgttggtattgaattc

SEQ ID NO: 14569 - DNA, 328 bp, Zea Mays
gtgttaataaatagtactccctccttgcttttttacaagattggtcatggtaaaaggggagatgtcacaatactaccaacccttgtcatcaacaacaggcaatacagaggtaagctggacaaagttgctgtcctgaaagcgatttgttcaggattcgaggagacaactgagcctgctgtttgtttgagcgaagaggttcaaacaaatgagtgtttggagaacaatgggggttgctggctggacaaagctaataatgttactgcatgcaaggtacaatttgttaaccaccatgcatgctcatgatgcttatattatgcctcaattcttg

SEQ ID NO: 14570 - DNA, 551 bp, Zea Mays
ttcagttatcttcttgagtggtctgaaggatgagaaagggactgcatcctcagatgcaatggatctcatatgtgacgcagagtggtaggctgatcaataccatgatgaccaaggtgaaccataccggcaaagtgtaccacatgagggccaagcgacaaatggctcaaagcctcggccagatcgcaaagttcaaacgtcgatacgagcaggaagcagtggaaagcaaggacaagtagttgggacggagctatggcctctgtaacctaagtcggttctgttgactgcacagttttcagctaaggacatgattttattttagatcacatcatcttttgttccacttcagaattgggtttgtaccccgtcgttagcaaactatggcacttgttccatcgtaaagccccaagaaaatagtctattgattgcttttttttttctctgtcctttgagtttcatgattcatttttcttttgttattgctatgtttgatgatcttgtcttttatggtctctaacaacagtaattctagtatgtggtgccttgagctgtga

SEQ ID NO: 14571 - DNA, 2020 bp, Zea Mays
gtagcctttctctatgacacgtgccccttcccccctcttaagctaagggacccttgggcagcccggcatcttctccaccctctgcccctctcgatttcttcttcccatctcccaatccatcgcaacccaaaccctactccaggcagatctccgtctccgccgccgctgccggcgtgagcacagcatcagatccgctgtgatggcgttccgccgcatcctatccaccgcggtgcgccgccgctcggccgtggccgccgcggcggccgggaacgcgcgcgaggcctccacggccgtcgctgcggcgccaggtgtgctcgcccccgatgcgaccgcggtgcgcgctcccgtgatgccgtatgaccgcatcgccgacgccgtcaacgccaggctccggcggctcgagcacccagacccgcgcttcctccgctacgccagccccgtgccgtcccacgcggaccacatggccatccttgcggcgccagagacccgggtcaccacactgcccaacggcctgcgcatcgccacggagtcttccctcgccgcgcgcacggctacggtcggcgtgtggatcgatgcgggcagcaggtacgagaacgaggaggcggtcggcgtcgcgcattttgtcgagcacatgctgttcaagggcacggggaagcgcagcgccgcgcagctggagctggagatcgaggacatgggtggccaccttaatgcgtacacgtcgcgggagcagacgacctactacgccaaggtgcttgacaaggacgtgccccgtgcgatggaggtcctctcggacatcctccagaactctaatctcgaccaggcccgcattgaacgtgagcgcgaagtgatcctacgagagatgggggaggttgagggacagtctgaggaagttatatttgatcatctccatgcaactgcattccaatatacatctcttggcagaccaatcttgggttctgcagagaatgtcaagtcaatcaccaaagaggaccttgagaactacattgcaactcattatacagctcctagaatggttatcacagctgcaggcaatgtgaaacatgaagacattgttgagcaggcaaagaagttgttcaataagctatcaactgaccctacaacaacaaacatgttggtcgctaagcaaccagcctctttcacgggttctgaggttcgaatcattgacgatgacatgccccttgctcaatttgctgttgctttcaatggagcatcatgggtagatcctgattctgttgcactgatggttatgcaatcaatgcttggttcatggaacaagagtgctggtggaggaaagcacatgggttcggagcttgtacagaaagcagcaatcaatgacattgctgagagtgtaatgtcattcaacatgaattacaaggacactggtctttttggtgtctatgctgttgctaaggctgattgcttggatgatttggcttttgcaattatgcatgagatgagcaaattgtcataccgggttacagaggaagatgttatccgtgcacgtaatcagctgaagtcctcaatccaactccaccttgatggttcaactgctgttgtcgaggacattggccgccagctgctgacctatggacgaagaattcctaccccagagctttttgcaagaatagatgctgttgatgcaagcactgtgaagcgtgttgcaaaccgcttcatctttgatcaggatgttgctattgctgcgatgggaccgatccaaggacttccagactacaactggttcagacgccggacctacatgctccgttactaagatcaatctgccggtgtaccatgtttacggtgtgcaaggacaaagataaaatttgcctctttcggcgtctgtatatcaaggcctcagcactgcacatcgcttgctgcgatagaggtttgtagcagatattttctctcacaaaaggttggaaccatgatcgacctcatggttagattggtcgtttttcagtatttttagcaaatacttgctctgacagaaggttgaagc

SEQ ID NO: 14572 - DNA, 311 bp, Zea Mays
atacgacctgtgggactcgctttttggtcttattctacgggctacctgctatgggatttgactaaaacacacatttaccttgcttgtggtgagctctttggtgggaaacgtttgatgaagccatgtttccatgtttagagaatcacatcacagtcggacctggaactctggaagagaatacctaagggctagcaggatcaacaattgattacatggtttctgtaattttttgtactgaactgaatttaagcatttatgttatattataaagttcaatttagaaggtaaaaacaaaattgttttgtgctaaa

SEQ ID NO: 14573 - DNA, 553 bp, Zea Mays
gtttatgtgttgatttgacagaaaatagaccagatttctcacatcaggcaggttcattcctgggtgctatacacttgctgtctcggaggagcttccagaagagtatcaagggatttgtcaagacaacaacgtgcagtatgtgccgcccaagcgtgtctaagtatcaagacggcaatgatggtgtcttggtcctgaagcagtatagataattaggtagaagtatctgtgcttgccaagggaactgctcctcttatgctttgtatccgagtgctaaggcagtctatttcatgttagtgataaggctgtctatttaggtggtgaaccggcgggtgattgaatcttatccaataaccttgatgcctgttcttgaaatctgtgacaatgcggctcatgtgcgtctgtcatgttctttcacatctatgtatatatgaagaaaaatgtaatagctaaaggtcgttggaccatgaaccctcggcccctgaagaccctatgtataagggactcaacatgtttaagtgtaattcgagataaaacataaaaatgtgattaggcc

SEQ ID NO: 14574 - DNA, 1531 bp, Zea Mays
atatgcccaaattcttgtttattggaatttgtccaggtcaatgattagtagagatactaccaaggaacaacgagattcagtttgctggacaactccaacccaagggatgctgctacagcttggaggttccgttggggcagagtgagatgctgaatcgtcaggtcgtgaagtctgattcagcgactatcaagattccagagctcgactttgagatccctccagaagctcaacgtggaacactttctactgtggaagggattattatgcgagctgtggatgagctgcaggctcttcaagatgaacggaagaaagtggatcctcagaaggccgaagctatcgatcaatttttactgaagttgagatctcttgggtcaggagaggctgcattcacttttattcttgatgatcctgcaggaaacagctttattgagaatccgcatgctccgttattagatcctttactatctgtgagattctacgaaagaactcgtgaacaacaagcagcacttggctttcttgctgaaccaccaaaagaacaacctggagaggctgtattgcctgcttcagcagtggaatccaattctgatgggttgcaaagcgtgccccatggctcagttggagctgttgcaggtcgtcgtgctatagctcagggaaaccctgatgaagttgctgcagcattgtgtagatattcagcaccagaagaggttgatactttaccatcaacatgtggagcctgtggaacagaatgcgtcacacgtttctttgctacaaaaatcccatatttccgggaggtgattgttatggcaacaacatgtgacatgtgtggttatcgcaattcagagctgaagcctgggggtgaaattccagctaagggaaagaaaattacactgcgtgttcaaaatgcacaagaccttactcgtgatgtcataaagtcagattcagctagcgtaaaagtacctgaacttgagttggaactttcatgtggaacgttgggtggtatggtcacaactgttgaaggtttaattgtgaaaatatgtgaggctctggagagaatacatggatttcaattaggcgatagtacactggaatggaaaaagaagaaatgggatgacttcaaggagagactatccaagcttctgagtttacaagaagcctggactctaataattgatgatggattggcggcttcatttgtggccccggctactgattcgttagaagatgacagccaactaaccattgaagagtatcagaggagttgggagcagaacgaggaacttggtctgaatgacatggatacgtcctctgcagacgcggcttacaacacgaccaacacataatttttttagttttgttgtgccgaatgtatttgttacgctatcagtttactttgatgaactttcagtgtgtatactaatatcaacaacttatatttcctctgacgataaacatcgagcgaacgtgcgaggcgcaaacccgatttgctgtcacccgtgcaggtccatgaattgccaacgttggttcggaggca

SEQ ID NO: 14575 - DNA, 258 bp, Zea Mays
gttaaataggaatcgaggaaaggcttgagcaagagccaacttagatacttttgcagaaatagcttactaaagtgagtccttactttcaatattttaacgccgaattaaatattaatagactctagttgcatctagtctaatttcaccatctcattaatacaacattatttttattcataatgtttacatcctgacctagattgtaggtcagtgaccaagtctccactatctggggatataacggcgatctgaatcgat

SEQ ID NO: 14576 - DNA, 957 bp, Zea Mays
gtgattactgatgcaattaaggatggtgttggacggcctcgtccagattttttctggcgctgtttccctaatggaaatgatgtttatgataacattactactggtgttatatgcaatggagtgaagagcgtaatcaaggaaggccacaagagctttcccagtggacacagttcatggtcttttgctggtctaggcttccttgcatggtacttagctgggaaactcacagcctttgaccgcaaagggcatattgcgaagctatgcattgtgttcctgcctctccttactgccgcacttgtggctgtttctcgagtggacgactactggcatcattggcaagatgtatttgcagggggtcttataggtcttacagttgcttcgttttgctacctacagtttttcccatatcctttcgatggcgatgctttgtggcctcacgcatacgcggtccggttagccgaggaggggaacagcagaaatgcgaactcatacagcgtgagaccaaccgaaatcgaaacagtcgatattcctgggcacggtgggatcatcaccctaagagatactctaaacgatgtggagtctggcagtgccaggagattgtgagatgggtctgcaggtgtggagattgatgtctcagataccatgggagttgcttgcatatgtgtacaggtagatctattgtagagctgttgactgctgccaccgtgataggggagggttgtttagacgggcctggcagtaaatttacttggtagggtgctgtttcttctgagaacctttggcttttgtttgtatatatgctcttatcaaagtgttgagttcagagttgtggttaaagtttgtttgctgacactctttgtaaccagtttggtcgctgcattcagcaactatgatctgatcagatgttgcccagtctactgttgttcttatattaagcgtgaaattcatttgtcacca

SEQ ID NO: 14577 - DNA, 2350 bp, Zea Mays
gaagaaaaaagatttcacaactggcttgaaggtgcacgtgattgggccattagcagaagtagattctggggtactccacttccactgtggatgagtcaagatcgtaaagaaattgttgttatggattctatcgaaaagcttgaaaaattatctggagtcaaggtcactgatcttcaccgacactatgttgatgatattacaattccctctaagaggggacccaagtttgggacgctcaaacgtgttgatgatgtttttgactgctggtttgagagtggatcaatgccatatgcctacattcactatccatttgagaatcgagagctatttgaaaagaattttcctgggaattttgtggcagagggtttggatcaaacccgtggatggttttatactctgatggttctctcgacggcactgtttgggaagcctgcatttaagaatcttatatgcaatggccttgtcttggctgaggatggtaagaaaatgagtaagagtaaaaagaactatccttcaccaaaagatctcattgacgagtttggagcggattctctgcgtctatatttggtaaactctccagttgtacgtgcagagtctctacgattcaaacgtactggtgtctttgctgttgtgaaagatgtcttcctcccatggtataatgcgtacagattctttgtccaaaatgcaaagagactggaagtcgagggtcttgcctcattttctccgatggaacaagcggtacttctgaagtcatccaatgtgttggatcactggataaactcagcaactgaaagtctagttagctttgttcaccaggagatggatgcatatcgtctttacacggttgtgccatatttggtaaaatacattgactatcttactaacatatatgtgcgcttgaaccgcaaacggttcaaaggacgtactggagaagaagactgcagaatttctctctcaacactctaccatgttctcgtaacaacttgcgtggtgatggctccatttacaccattctttactgaagttctttatcaaaatttgcggaaggtatcaagtaaatctgaggagagcattcacttctgcaagttcccttccacaactggtgagagagatgagcgtgttgagcaaagtgtaaataggatggtgaccatcattgatcttgcacgtaatattcgtgagcggcataacaaagctctcaaaacaccactcaaggagatggtggttgtgcatccagacaatgactttcttgaagacataactggtaaactaaaagagtatgtcatggaggaaatcaatgttaagactgtcactccatgcaatgaccccttgatgtatgcttctctgcgagctgaacctaatttcagtgtgctgggaaaaagacttggaaaggacatgggcaaagtatcaaatgtggtgaagaagatgactcaggaacagatcttagacttcgaaaaaagtggagagatttcattcttcggtcattgcttgaagctagatgatattaaggttgtccgacaattcaagcgtcctgaaaacgtgtcggagaaggagattgatgctgcaggagatggcgacgttttagtcattttagatctacgagctgaccagtcattgtttgaagctggagtggctcgagaggttgtgaacaggatccaaaaattacggaagactgctcagcttgaacctgctgatccagttgatgtgtattacgaatctgtgggcagtgacaaaaacacactggaagagattttgaagtcacaggatcagtatattagggacgcacttggttcaccaattatgccaaaagaaatggcaccaacagatgatgtaatacttggcgaggagtctcacaatgtacatgacatgtcatttgtcatatgcattgcaaggtccacccctattcttgcaccagatcttctttctcatgcctcaggcaaaagcaatcatgtggaggcgttgagagtatatcttctgtcaaggtctctttccagattgaagaaccagttccaagctggaaagggcatgattacagttgactgcatcgaaggttatccaccggtcagtttactgctaggaaagcacgttttcctaagtgcaggggatttttatctggctagtcgatcctagtttcgtttgctgcatcccaattttgagctgcttcacccattgttttgccgcaatcagcttaaaacagcttggttccatttatgcatctcaccaaagtcatgtattcagtaaaggtgaaagtctcaatgtatgctaatatgctatagcatgacatgtaagctaagattttcaaatacctggctatgggttcccataggtgatagcatgtttgtttgcaatctct

SEQ ID NO: 14578 - DNA, 2552 bp, Zea Mays
gctggtacgacacagaccacgttcaattcaaaacccaaatcaactccgacgctcccagacaccagaccaccgtcgctcgctcgcctgcacaacctctccatccaggccacagctcgagaccaacgaccgacgcctagacgcggctgggcggtcggcctcacctcgttcccccgcctcccttcttcctgctccgcgtctcgatctcgactcccccgccgcgtcgcgcgacccggccagatctcgcccaccctgcgccgcggccatggataacttgatcaccctcgtcaacaagctgcagagggcttgcacggctctcggagaccacggagaggagagcgccctcccgacgctctgggactcgctgccggctatcgccgtcgttggaggacagagctctggtaaatcatctgtgttggagagcgtggttgggaaggatttcctaccgaggggttcaggcattgtaacccggcggccgctggtgctgcagctccacagaattgatggtgacagggaatatgcagagttcatgcatcttccgagaaagagatttacagattttgctgctgtgagaaaggagatagctgatgaaactgaccgagaaacaggccgttcaaagcaaatatcaactgtccctatccatttaagcatattttctccccatgttgtgaatcttactcttattgatcttcctgggcttactaaagtagcagttgatggccaaccggagagtattgtacatgacattgaaaacatggttcgctcatatattgaaaagaagtgcacggttgttgattcaggtgaaaggacctttggtgtgctcacaaaaattgatctgatggataagggtaccgatgctgttgatatactggaaggaagatcttaccgtctccaaacaccatgggttggtgttgttaatcgatcccaacaagacatcaacaagaatgtggacatgattgctgctaggcgtagagagcgagagtattttgcatctacaccagaatataagcacatggcttctaggatgggatctgaatatttaggaaagatgctttcaaagcatttggaacaagtgatcaaatcaaggattccggggatccaatctcttataacaaagacaattgcagagctggaaactgaacttaatcgtcttggaaaacccattgctaatgatgctggggggaagctgtacacgatcatggaaatatgccgtatgtttgatggtatttacaaagagcatctggatggagtgcgccctggcggagagaaagtttaccatgtcttcgacaatcaatttcctgtagctattaaacgattgcagtttgataaacaactctctatggaaaatgtgaggaagcttataacagaggctgatggataccagcctcacttgatagctccagaacaaggatatagacgccttatagaatcttgtcttattagtatcagaggtcctgctgaggcggctgttgacgcggtccatgcaattctcaaggaccttgtccgcaaggctatcaatgaaacacatgaactgaagcagtttcccacccttcgtgtggaagtaggcaatgcagcttttgagtcattggatagaatgagggatgaaagcaagaaaaatacattaaagctagttgacatggaatgcagctacttgacagtagatttcttcaggaagcttcctcaggatgttgagaagggtggaaatccaagccactctatttttgatagatataatgactcttatcttagacgaattggacaaactgttctgtcatatgttaatatggtgtgttcgaccttgaggaactccatcccaaaatctattgtttattgtcaagtgcgagaggccaagcgctcgctgctcgatcacttcttcactgaactgggagcaagagagatgaagcagctttccaaacttcttgacgaagacccagcagtcatggaacgcagaactaaccttgcaaagaggctcgagctgtaccggagtgcccaatccgaaattgatgccgttgcatggtccaaatagtcctgatggccaagatatctgttcttaccccttgtctggcgattctctctcctattctggggcatatatagctgattttttgtgttgtaggtcaggtcattttatatatcaccggagctgtacggtgtcatgttccttgtgcttgaggatctaggggggcacttgtatctcgaacaagttcgtacatcgcgctttcgttccatctatgtgcagctgcatgaaaaccatgtttttctgtcacgcaaaaagtttgtcctattaaaaccctagtcctgggggtttcaaccaaaacacactaatgctgtgcagtaatcataagaaatgcggcgggaacctctgataactccagaaaacgactgttctgcaggatgtatattagattagcatctaaacattagcttcttagtcgtagtagtatacgtaaattcacccaaagcaataggcgtgatacattactgtgcgctgtattcgattcgatgatcgactatattttgtacagagttatgatcaaagctaaaaatgaatacac

SEQ ID NO: 14579 - DNA, 3181 bp, Zea Mays
gtttaggcgaagctataatcataatccaggatgttggcctttctccaagagcaactactcattctttggttagagttgcaaatgttgactggattaagataacagcagaagagcaaatcagtcttatggaaggaagcacaaaagatttccaaatattagctggcacccaagatggacaaatatttggtgattctcagttcaaatatatggacattgagttgcatcttgacgatgagattctggagcttattggtccaagcgaatcaatggatggacccgaattttcaattaaagctgcaaaaatcggcattacatctctatatgtcagtactaaacaaagctctggacacagagttttaagtcaggttgtcaaggtggaagtgtatggaccattgcaaatacatcctgagtatatttacctcactccaggcgcctcttttgtgctttctgttaaaggtggtccaaaaactggagtttccattgaatactcaagtctgaacatgggaattgtagaagttcaaaataccactgggaaactatctgcaaaatctgtggggaactctactgtacgtgctgctgttttagcaaatggaggtatcttagtctgtgaagcttttggaagagttgaagtggatatcccagtggctatgacattgaatactcaaagtgaacgtctttgtattggctgtagcatgccagtttatccatctctgcctaagggagatctattttccttctatgaaacttgccaaagttacagttggatgatagcagatgagaaggttgtgacattccaatcagctaaatcctggcgatacagacttgaccaaggactatattcagatggaaaaaagagtccatggttttccaatggcagcagcaaattttttatcagtcatatgcttggaaggtctgctggcaaaaccaaaatttccatttcagttgtttgtgatttcttgctacctggcacctctggatctgttgtatcatacaatgcctccaagatcattcttgtggttccagatcctccccttgcacttgcgctaccgatgacttggttattcccacccttctataccactatgagccttttgcctagatcagcaaattcccttggggaaccaaactcacttgacctggagagctccgttgggtattctctgctaaggggcaatggtaggataattgatggaagtaaaattcagactggagaaagcaatacagttgattgtattcaagcaaaagatcactcagctgggagaacggaaatagcagcatgtctacgagttgctcaggttgcacaagtgcgggtagctgctgcagaatcatcaatccagattgtctatctatctgtaaacgataaagttgaattggatataaaatatgctgatgaattaggttatattttcaacgaagctcatggagtagtccctgtaaagattgagacaaattatccagatgttgtttcggttctcatgccaagagattttaatggtacatatgacacacgtgaacgttttgttcttcaggcgagaagtcatggaacagctcttgtaaggctccacacaaacaatgtccctaacaaagtggatttcataatggtatccgtaggagcacaaatatatcctagggatgtgatccttcattctggccagcacctgaacttcactgttatcggagacagtatggacatgtgtggacatggtcactggttaagtagcaatgggaagatcgtccacatcaatcgggtaactggtgaagcacaagcacgtagtgaaggtgtagcggaagtaatcttcaaaggttcaaattttaagctgcaaacaactatcactgttctcaaggtgaaccagatagttgttgatgctcctgcggagacactgactaatgcagctggcctgccggatggatacatgttttctgtgagatttagtgattcaattgagcacagtattggatcctctgcgagcccaattaatgtcccctttgaatgcaaggttgacccttcttttgttgggtttgttgagccatggactgagcatgccacaaagaaatcctactgcctgtttcatccatattcacctgcacaactgttgcccgtgaagttggaccctaatgaaggaactttacacattttagttcgtgcaaatctaaaggaagacccaaaggtgaccggatctgcacatgctctttttgtcaaagggttttacataaaagaacctgggaaattaaatctgactccaagttgcaatcatagtgtcattactatcgatggaaatactgatattgagttgttctggaatgctaaagatttactcagagtcagtcgtgttgacacaaatgagaacaatggtgttcttagtcgagttgtttaccgggttgaagcgctaaaaaggctatcgttctctgacaaggttactatcgttcttcctgccactggtcaaactgaagaagttgaagtcagctacgatacaggagaggaggcagagtcaccatcatcatggggcctaaccacaactgctgttatgctcacatgcatcattgtgacaatagtcactgttgcacttttcattaagttgctgcagagacctatcagacaggcaccatcagggagcatgacagcatccacaccagcacgagcaccagcagccgatcccgcagccatggctgatcctgcatccccggctaatggaggcgattcaacccgcagaacacctactgagcatgcgtggcagcgtgtagtgtggactggttggtctgttgtaacgttcctgatttaggtccgcagttggtttagaaccacagttgtagttcttgcacgagtatgcccttgctgtgagaatgctgtaaaatttgtggttctagcagcacgtgcggtgaggggtggacatctattttggtagaagcctgttgtttgccattttgccaacaggtataggacatctgttttgttagaagcatgttgtttgacatttcgccatagatataggacatcaattttgttagaaccctgtcgttaattcttggcatgtaattttaggtctgtacattggagtacgggacaaccaaacccttggtttagacaactgttttagctcaattgctgcagatacttgagttttgttggcctgatttagtttatttattctacaagcagtagtgagtggtcacagtcctagtt

SEQ ID NO: 14580 - DNA, 763 bp, Zea Mays
gtttgatggtgtgttttggatgcaatgcgtacaaaatatcaacaagaagctggaggagctccggaaaatggtggttcacagatgcaggaaaatgacgacagacgagaagaggaagctgggtgcaggtatctgtcacttgtctccagatgatcttagcaaggcgctagagattgtcgcacaagacaatcctagcttccagactaaagcagaagaagtggatcttgatatggatgcccagagcgagacaactctatggaggctgaaattctttgtgagggaagcgctggaacgacaggccaacgttgcctctgggaagatggacgaaaacgccaagagaaagagggagatatgcaatgctctggccaaaaccacctcgagacggatcaagaagcagccctagccatcttccatatctttcactcgcgtcctctgattgtttagaagttctttttttgatactagccaccagctttgtgaaacgttttcctgcattttttttgtgatgtgtatatagtagtatagtgaactgtccagtccagtaacaagtgatttcgtgtgtaaccatgagctggtcgcattcgcgtcccctctgatccaacaacaaacattgtctcacaatgtgattgattgtagaagcaagcttttgtcacagggcgatgttgctcacttgtggaatcagatgatgcatacatttcgtaactgttcattcattctccaccttggcttgaaaattaaggtgagaaggcctgcggatttacatgtt

SEQ ID NO: 14581 - DNA, 5982 bp, Zea Mays
aactcgacaccaatcccccaatcacaaaccctaggccgacaggcgcaacgacgcgacggtgcaacaagcggacaacggcgaccgcgcggccaccgcttagtgtgcgaactctgcagcgcgccagcggaagcagaggaggcgtgcagcatctggcgtcccggcctcccggggtcgagttcgagcgccgcgcgcacacgtccgccagatggtgtgtagtagcggtggttgggaatatctaatcacccaaatcctggtctgacactgttccactgatagaatcagtatgtccgacgctgagccacctcctgcaatggaggaggccacgctgacaacgccggatgttgtgctaggcgagggatacaaagatatcgagggtcagaaggatggccgaacttgttatggtgaaggtggcgatgttatagtggctgatgagttcgcgggtattgttgaagaccccaaccaacccgatgtttttaaggctaaagagccagaggagggtgttgatgtaggggggcaaactaatgtcattagtgctgctgtgcatgttctcacagaggtggatgctgctgtgtcatcctccacactggtggatgatcccatggaggttggcatgcaaaccaaagaggttagtgctgctgcggatgatctcatagaggtgggtgctgccctggtaccatctgcacaggatcacacagcagtggctgcttgcctggttaatgatgactgcaatatagttatcactggtggtgtgcataggtcggatgaccaaactgttcaggagtttgggggtgactcccttgacgctgatgaggttgctcccttggtaaatgatgtacaagatgacagtgcaaggattgatatggatgttgcagctaatgatcatgtgcatgctcaggatcaggaaagctcacagttggatgtggctacagctctgttaaatgaggtggaaacagagattgccgaagctggagaccatgttgtacaggactgcacaaatatggatatgcagatccaaactggagatgacaaacatgttggcactattgcggacactgccacagatgaggagggcaagcacatgggtgaagataccatgggcagagatggtagtgagaaacatgatggggcagtcggtgttgatgtgtctgatgagagggtagaaatgggtaggggtggactgtctggagatgataacgagcaaaaggaagttgcaacagctgatgaagatcgtgtggaagaggaagacatgcaggtggatgccgtaagcattactggagacatggttgaggaaggcagaattgctgttgaatacattgcaggcgaagctgtaaatggcaaggatggtattgatgtccctgaagaaaagactcctcagatagacaaggctggtaatgatatccctgaagaagagggtctccaaatggggggagctggcttgattggcaataaaaatgggccgaaagaggctgtgatagctgattaccatggagtggaagaaaataccatactgatggaggcagctaccacgactaacaatgatgatgatgatgacaacaaaattgttggtgaagatgttgcagaagctgtcaatgacataactggtgatggtgtccctgaacaagaggctgcacatatggatgacgatgatgacgatgagccacctcctttagtggcaaagaaaggtggagggcgtcgtaagaggggccgtccatcttccaaggtccaggctgtggtgaaaccatctgtaaaggggaaagatgaagaggaggtttgcttcatttgctttgatggtggtgatcttgtgatttgtgatcgtaggggctgccctaaagcttaccatccttcttgtgttaatcgggatgacgacttcttcaagtcaaagggtcggtggaactgtgggtggcacatttgtagcaactgtcagaaacctgcccgccatatgtgctacacctgcaccttttcattatgcaaggcatgcatgaaagatgcaaagtttagctgtgtcagagaaaacaagggcttttgtgctacgtgcatgaacactgtgatgttgatagagaacagagaggaggctgcagacccaatggaggtggattttgatgacaaaagcagctggtggtatttgttcaaggactattggttaaatttgaagacaaacttgtcattgacagttgaggaaatatcagcagccaagtctcaaaagagtggagaattacctgatactaatgacgaaattaattcagagagttcatcagggcgtcatctagaaaacaatacatcgaaaaagaggggcaggaaccgatctaaacaagctgccatcgagcagggctctgaaggaaaagagaccactgggaaatctgccaaactaggtctgtcaggcattcgtgatgctcagacttcttcagggaaaaaggttagaaaattatccaggcgttctttgagcagccagcattcaccaaaagattctgaaagtgttgggacatcaacatcctcagctgacgaggtcagctgggcttctaaggagctcataaactttgtagctcatgcgagaaatggtgataaatctgtgatcaatcagtatgacgtccaaccccttttacttgactatatcaaacgcaacaatctgcgcgatcctcgtcggaaaagccagataatttgtgattctttgctccaaagtctcttcgggaaagaccgtgttgggcattttgagatgcttaagcttcttgaatcacattttcccacgagtgaggtttcaccaattgatgctgatgaaaatcatggtggtgtagtagaccctgatcctagtcaggatgctgatggtaacagtgaagcttcagttgttatgagttcagaaaaaagaagaaaatcacgtaagtatgacctgaaacatcagcctaatatcgatgactatgcggcaatagataaccataacattggcttgatgtacttacgtcgcaacctaatggaagaattgattgatgacgttgacacttttgatgagaaagttgttggatcgtttgtgagaataagaattcctggtacagggcaaagacaggacatttatagacttgtacaaattgttggcactggaagatctgcagaaaaatataaatctgggaaaaggactactgatataacgctagtgatactaaacttagacaagcgggaggcagtaactattgacataatctcaaaccaggagttcactgaagaggagtgcaaacgcttgcgtcagagcataaagtatggattcattccaaggctgacagtgggagaggttcaggagaaggcaaaggttctccaaactctgaaagtcaatgattggattgaaagcgaaaagatgcgacttgggcatcttcgtgaccgtgcaagtgatatgggactattcacgcttagggaatgtgtagagaagctgaaattgctaagcactcctgaggagcgtgctcgtaggctcaatgaagaacctgaaatacatgctgaccctgcaatggatccatattatgaatctccggaagaacaggagcaggagattgaaagaagtagcttcaataagtccagaagttctttcttgaggaaagatggtagtcttgtgtctccaggtaaaggagatggtagaaatgctgcacagcgagatccaaaaactaactgggaatctaatcgaaacacaagggctgaatcgagttctcatatggaatcacccctttcacggaggtccacatattcttctcaaggagaaagtgttggttatacaaataagccagagggcttgaacattgatgcacaaaccgttagactggaaggcaccacgcgcagtgctccacaagggtcacctggtgcctcatctggaagtctagctactaacataggttcaggggcaaaaactgcatctcaatcagccattaacgagtctgagaagatctggctgtacatggatccttctaataaaatccaaggtcctttctcaatcatacagctgcggaaatggaacagcaatgggtacttccctcctagtttgaaaatatggaaagctagtgagaagcaggatgattccattctattgactgatgctttggcagggaagtttgagaaagaccttcctccatgggaaccaccacatgttagtttgtctcaaattaacaaaacccctcttgagcaaagcacaatagctgatgaacaaactccaaaatcagtaattgcaaagtctttctcaagcagtgatcaaagacatgattatagttcaacgaaccttggaacaaccatgatccattctggctcacaaggttattatggaatgcaaaattcccatgcagcatacacaagccagcaatctcttactgggagttggaatgccacgtcaagtcagtttggggttgcaataagtcctttgacacctacccagcctgccatgcaaagcctttcaggacaaaatattgtggctgcagaaaatatgggtcatttaactactggaatggctcctgcaactgcaaatgcagaaatggttaattcagatttgacttcccagaaccaaatgttgtcttctttaccgcaaacggatgacagattagctgatggaattgaatccaaatcaggagaagatgtttcacatggaagagtgaggtcttcggctgaagctatcggaccacaggatgcacagcttggaccagtgcaactaaacgctcagcaacttgaaaacacaagaaaccatatgtcatcaattgatctctccaagtcaatgatgccatcacagatgatgtcagcaccatctgctgcatcagtacagccttcattgacaaccactgctcgcagtgataatcaaagcagtgggtgggctgtacctgcacaaatggcgaacacacctggccagtctcagataactggaaatctaacctggggaaatacacctcagggtgacgcaagcttaggttggggaatggtgggacagagcaatatgaatatgccttgggtagcatcagctcaaggtgcttcaggctacaacatgggtgtagccatgccgacgcagccaaatgcagttccaaacatgggctggttaccaaatccaggaaacaccagcatgaacatgatctgggctgcaactcaaggccaggggactccaaatgcggctcctatgatgggaggtcagatgcaaggagtcccaatggccccttggggtggtgttgcagcaggaagtgcaaattcttatcctgcctggggaaaccaacaagctggaaacatgaaccaaaatgttggctggagtgctcctgtgcagggaaatccaggtcaggcaaataacaacatgaactggaacgcaccaaatggtaatcctaattggaataatcaacagagagagaatgggggcaggcactctggacaccgcggtgcttttagtggtggtgactcaggcggaaggtcatggaagtcacgctctggtggcgatggggggtcaaggggacatagcagattctcccattcaacaaacacagagggatatccatccaggactgatcggcattacgataggcagaattcaggcaacgagaggcgatatgagaatcacaatgagagaaatggtcgacagtttgataggcagccttcggataatgaaaggaaccatgataggcctgatggcagacatggtggcagggatgacgataggcaggctgataggtccgagtcaagagagctgcgttagaactggtttctgtttcttacattcgtttccttgtatgtgcagtagcaaactagcatagtagcttccgtgcatgttttgaactttatgctctgtagcgatctgcatacatgtgcagatcaccgtgtataacatttgtagtttaatgctgtgtgcatcctagttccgaatttgtaatttacttgaataaatcgtcttgtctgatttctgatgtaaagcaggggctacacgcccaggttcttggactagggttgttggagcatcaatggaagacaagggagagccagtggtggttg

SEQ ID NO: 14582 - DNA, 1323 bp, Zea Mays
gctcccagtacccgagtatcgaccgagccagataatatcgtaacatcgtctgtccgccaccggttacctctttctccaggtagcgcaccatcggaacggcgaggagcagacgggaacggggatgggaagcgctggggcgctgctctggcacacgccgcagcagctgcacggccgtggcatcctcttccgccagagccggcctctcctgcgccagcgcaacctgcctctaatatcgctagctgccccggcgctcgagcccgagcgccgccgccggcagtgcctccgctgcgctgccgtcgacggggacggcgccctccgggagtctgggccactgccacagaaggagtctccgtccagcggcatcggtgccgcactcgaggacccgcctccaggacctcctgtggagaatggttcctttggaggcccctcacaggaagaacagagtgctctatatacttttctttatccaagcaaagacttacttccagatgataaggagatgagtatatttgatcatctagaggagcttcgtgacaggattttcatctcagttttggctgttggggctgcgatattaggctgttttgctttttcaaaagatttggttatttttcttgaggcaccagtgactgctcagggtgttcggtttttgcagctctcgcctggggaatttttctttacaacattaaaggttattgtggccttttacttggaagtcctatcattttgtatgagatcattgcatttgttatcccagatggggcagtggaatcgttgtggtcaatagaccagtactttgaattcatacttgtgctgatgtttagcacagggttgtcctttcaggtccctgttatccagcttttgctgggacaacttggattggtttctagtgaccaaatgctttcgatctggagatatgttgttgttggtgctgttgttgctgctgctgtgcttacaccttcgacggacccgttgacacaaatgctcctggctggtcccttgcttggtttatacttgggtggtgcatggatggtcaagataactgggcgctaactgctttgtgcaaggtgatggtgctccggatagcaagagtcccagtgtaacctagtcttgtaaaaatgaattcactctgcttgcttgtaaaaatgaattcactctgcgtgctcattagatgatactagttagttatccgacactatggtttctatatatgatatatgttttctttatacaacaaaaaacaacataagctgcactggttagtgacaagtactcctagtagttgcacgttatatgcgtgcgcagggagtaagacgacacaag

SEQ ID NO: 14583 - DNA, 1160 bp, Zea Mays
atcagtccccactctgactctctccagtctggggctctgggcccaaatacaaaagggtttgtgggaaagccgctcgaatccgtaaccctaaccccacacccactcataaaccctccgcctcctcgcctccctcccttccatccaatcctcggaacgagcgcgcgggcgaggaggacccccgacggaggatggcggcggcggctagggttttccgcgggtccctcttcctgatgtccccggcggcgggcgccaaggcgtcggcagccaagaaggcgggcgcggcggcggcggcggcggcggtggccaagaagaccgaggcggccactacgaagccgagactgccgaccgggatcacgaagccgatgccggtctccgatgagttccgcaggttcgccggcggcgcgcccgaggtcgcacgctccgaggccatcaagctcatctgggcccacatcaaggcccacggcctccaggaaatggaagtaacagagcataatttaaagacacagcttgaaaatgctctgaaggagctagaggctgctcaacataaagcatcaacagcaacctctggaacagctgaaaatgctctactggaagctaagtcagtgactgaccttaaatctaaagatttggaggagaagaaaagggagcttgaactattggataacaaggtgcaaacattagagaaagagtggtctgtggttgaagaagaatctttaaagaaacccactcctgcacaaagggagaaggtcctggagaggcaactgcatagcctcatcgagcagttgacagctaagcaagctcaagctgaaattctggccactgatgtgcattccaaagaaaaggagctggaacggctgaaccatctgcatagaaacctctacggcggtgccaacgaaactggcgcaccccggagccgcctcagcagaggcctcttgagcggccctgaagattactattacgaccctaaagcgggccggaaaccgtaccaggctggcgctagaacagaaggccagaaccggctgatgatccttaggtccgcaattgtactgtatgttctgctgctccatgtcatcgttttcataaagatatcagtctgaaagcagttgagctagcgcttcataagttcatatagggaaacagatacttgcttttggtccaaa

SEQ ID NO: 14584 - DNA, 1572 bp, Zea Mays
gggcaaagttgttagctgcgtcctccttccccgagatgagctgctctgggtggaagagctgctcatctcggggaaggaggacgcagctaacaactttgcccgtggccactacacggttgggaaggagattgtcgatctatgcctggaccgtgtgcgcaagcttgcagacaactgcactgggctgcagggattcttggtgttcaatgctgttggtggtggtactggctctggacttggttcactgctgttggagcgcctttcagttgattatggcaagaagtctaagcttggtttcaccatttatccttccccacaggtgtcaacagctgttgtagagccatacaacagtgtcctctcgacccactccttgctcgagcacactgatgttgcagtcctcctggacaacgaggctatctatgacatatgcaggaggtcccttgacatcgaaaggccaacctataccaacttgaacaggctgatctcacagatcatatcatcacttaccacctccctgaggtttgatggggctatcaatgtggatgttactgagttccagaccaaccttgttccatacccacgtattcatttcatgctttcctcatatgcccctgtaatatctgctgagaaggcctaccatgagcagctctctgtgcctgaaatcaccaatgctgtatttgagccctcaagcatgatggccaagtgtgacccaaggcacggaaagtacatggcttgctgcttgatgtaccgcggtgatgttgttcctaaggatgtcaacgctgcagttgcaaccatcaagaccaagagaactgtccagtttgtggactggtgccccactggattcaagtgtggcatcaactatcagccaccctctgttgtccctggaggtgacctggcaaaggtccagcgtgccgtgtgcatgatcagcaacaacaccgccgttgccgaggtgttctcacgcatcgaccacaagtttgaccttatgtacgccaagcgtgcattcgttcactggtatgtcggtgagggtatggaagagggtgagttctcagaagcccgtgaggacttggctgctcttgagaaggactatgaggaagtcggtgcagagggtgccgatgatgagggtgacgagggagacgactattgagtagctggctaataagtagttctctggtggttaatggttgggttattttgagtatatactctatggttccactccattggatactgctgctgtgtgtttccattttgtactatgtagtaaattgttcgtagccccctattggccatgattgttcatatcatccttctttggtttgcaacgctattcgtccaatttcggtgtatatgctataatgctattatgttgcaagtgtgctgtgctcaaccattgggttttatttatatttagaaacagaaggcattattactctgcgctgcagcttgtttctggatcatgggaacattgagatttgagaagttttgatagcagtctatcactgtgagggcctaaggaggcccacggaggggctgcggtagcagcagccatgggtcctccaaggaagaatagataag

SEQ ID NO: 14585 - DNA, 572 bp, Zea Mays
cgctgaacaagacacacagcctgagcaaagctctgagagggacgcaccggctgagcagggtggacagaagagaccgcggaccgacgaagcggctggagaaggagaaggcacagcatacctgcagagcaagctgatcgagatcctagaccggaacagccggttggtggccgcacagttggaggcgcagaaccagaactgcgagctcgacagggagcaaaggaacgaccaggccaacagcctagttctcgtgctcggcaggctggccgacgcccttggcaggatcgccgacaagctatagaacattcagtcacctaggtgtatatgtgttgacggaaataattacagcaggaagatgacatttgtaagtgcatgtacagattggtgtagggctactggcattcgattcttttttgggccggttctggaaattctgtattgtggggggtggtgttatgtaggaaggggtcaggtttgtagcactcaaatgatattcagttgtgtggctgctgtagattctgaggctgtgttattgttaattgttatacagggacgcgagtaattattctcagcaa

SEQ ID NO: 14586 - DNA, 1056 bp, Zea Mays
ggatagactaaagttggaatccaactgaaactaagtcaaggtttttggaaggggtggagaagagatggatttcttacagcaacagggaattaaagttgaagttatcccaggaattacttctgcttcgggtattgcagcagagctaggcattccgttaacccatagaggtgttgctaccagtgtcagatttttaactggccactccagaaatggtgggacagatccactatatgtagctggaaatgcggctgatccagacactactttggttgtgtatatgggtttgtcaacacttccatcacttgctccaaagttaatgaagcacggcctgccaccagatacccctgctgttgcagtagagcgcgggactacaccccaacaacgaacggtgttcgcctcgttgaaggatcttgtggatgaagtcaagtcagccgatctagtttctccaactctaataattattgggaaagtggtatccttgtcacccttctgggttgagtcatctgaacatgatgcactgaaagttcagagctcgtatgcaaatgaggccagatgacaacagattttcttggtttttagtgactggacaatacttgagaaatgcaagatcccagatatgggagcacaggttcgacctggtgtacacagaaacatctcaggaagcatggatcctgaatggcggatggtagcttaagcttataacagacttggggcagaagcgcacttggactgatcatgcttgattctttggcctaatctacatgagattcacaatttttcgatttagttgagttcgacaatagttgtgtgcttctttgttactagtagccatgtacgtgcggcgcacgcgtgtttacgattctatgccctagcatagtaaggctattccaacgctgccacgttatgattttatgataatgggagtttcgtagcaccatgataatgagaaatagtgctacgaagctcttattatatgacaagtgccataaatcgtagcacttatgattttatgataatggggagcttcgtagagctctttctaacgtgccacgtcat

SEQ ID NO: 14587 - DNA, 716 bp, Zea Mays
tgggacagtgagaacgactagcgaggggagaccgagagagcagaggcgctcagcacggagcgaggcgccgcgccgtttccttttctgctccactgcaaccggagtccggagcatagcaacctcgctgggctcccatatagcgggcccgcggagccgggatatactccagggaagtcgagcaaggagagcgtggattgtggactacaggggtaaagatcgagtgagcatcgcttcaccatgcgcccttctctctgctgcgcacctctttttcttctgctactattacatttggcatttgctagacctctctttcctctaccgagtaagacaaagaatgaagagaagaagcccatacagacgtttcggccatataacattgctcatcgtggatcaaatggggaaattcccgaggaaacagctgctgcatacatgagagctattgaagaaggggcggattttatagagtctgacatccttgctagcaaagatggggccttgatttgttttcatgatgtaacacttgatgatacaactgatgttgccaagcgtaaggaatttgccaatcgaagaagaacctatgaagtggagtggtttaatgttactggatggtttgtagtggacttcacactggaggaacttaaaacacttagagtgaagcagagatactcgtttagagatcaacaatacaatgaacacatttgcatgaactcgcatgg

SEQ ID NO: 14588 - DNA, 1262 bp, Zea Mays
ggcttagccgtgaatgtaagtaacctgatccacaaagtgtgggccaatacatgcgggtctagcataactggggctcaatgggccggcgcccacttctagccttctggaactctcccttccggttccttcatctccgcctccacggctccacctccaccgctgctccacacgggcacacctttgcctcgcccaaccgctgccttgctcgcgttcgccattccccagaccttgagagctaccgtctggtccgatcggacggatcccttcgcgcgccccagagatttcaggtgctgtaacagaagatgcaagggggaagaggtgggaggcagggcttattcggtttcggggacccttctggtggttccggtggctttggacaaccagggagccttatgcctggtttttttggtggcgcaaatccctttgacgaccctttcttcacaaacccctttggtagcatgatgcagactagtttctcagcccctttcagcggcatgatgcaacctagcttcatgaaccccttcggcagcatggtgcaacctagcttgcttggaccaagtatgtttgcgccccatggcaatctcaatggaggcatgtttggaagccagacacatctcggtcaaggtatcagcaatggcagtggtttcattcagcaggcccctgaaccaagcaggcctaaagggccaattatcaaggagttatcttcagatgatgaggatgatgtagatgatgatgaagaaggcgagaagaagaatggtaactttaggaagcatcaaagggaaagcaaagagccatatgtggaggacccagatgatgaagaagataataaaagacctaagcatggacaatttgggagggagttcagcagagttaacacatcacgtccacagcctcagacatttatgtttcagagttcaactgttacatatggtggtccaaatggagcatgttatacatcttcaacaactaggaggactggtgcagatggatttacgctggaagaaaataaagaggctgacacaactactggtaaagccactcacaggatttcacgtggcattggcattaagggtcactcgttaacaagaaatcttaattctgatgggcgtgtgaacacccttcaaactttacacaacttgaatgaagatgagcttggtggatttgaggaatcatggcaaagaaataccagggagaatatgcctggctgggatcctagaatgaacatgcttggcaatgagaagagaaggatggtatagaggcag

SEQ ID NO: 14589 - DNA, 2249 bp, Zea Mays
gcctctgatggtgtgaaggcgtgggacctattaaaggaaaaatctttcaacgtagaccttgttttaactgaagttgaactgcctttgatgtctgggttcctcttgttatccacaatcatggagcatgatgcgtccaagaacatccctgttataatgatgtcttcgcatgactcagtaagcatggttttcaaatgcatgctaaagggtgcagcagatttccttgttaaaccgataagaaagaatgaattaaggaacttgtggcagcacgtttggagaaaacaactggcaaacggtgggcctaatgttcagcacatacaacgagaagagaatcttgcagaaagaatccaacagaagactggcgtgacaaaatctgataatttggacagagatgtgccctgtaaaaatagagaatgcagtgaacaagaaagtgatgctcaaagttcttgcacaaggtcagagctggaggctgaaagtaagcaaacagacaacattttggagtataagcaatcaactcaaaggcacttgtctattcctagccacaagaatgttgagctaaatggacagaccaaaatacaaagagctgagggtaataacttgattccagcaagagaagacgatttatcgccaaagaaaagaacgtgtttgaatgagaataattctgagagagcttcaagagatatggagctagtccacattatggaaaatcagcagaagtataacacacagtgggaggtggatactatgagaacaacatctaggggaaatgatgagaagggctccatcccagcacatcagttggagctttctcttagaagaactgactacggaaaattagagaaccacgagaaaaatgatagaagaacactgaaccattcaacttcctctgcgttttccttgtataattgcagggctgtgccaaccttaggaaatgctggtgatggtcaattatgcagcacctcagaaacactagtggatgttgaaaataaaaatggagattcagcagatccctctcaagacatgactgaaacaaatcgtcctcctattagagttgttcctgtccctgtccaaggtctcacatttgatgggcagccattctggaatggtacaccagtggcatccctattctactcacagtcaactcctcccatttggaatagcaaaacatcaatgtggcaagaatcaaccccacaagcaacttcactgccacaaaaatctccacagaatgaaccaaatgaaatgggggctaaaccagttataaatgcaggggaacaatttgccatgggtcctcccagtgccagtgggaagcagctgcatgttgaaattcttaatgatgatccacggcatatttctcctatgactggtgaaagtggaatcagtaccgtgctagacagcaccagaaatactctgagcagtagtggctgtgatagcatttccaaccagatcactgcccctactgaatcatccaatgtatataaggatgttcctgaaaccccaagcgccgaagggtcacggcatctgagccagcgtgaggctgcactgaacaagttccggctaaagaggaaggataggtgctttgagaagaaggtaagcaactaagtgcgcatttttatttcgatccgatttttatgccacctactaggacctgtgattcacgcttttacaatcatttgcaggttcgataccagagccggaaattactcgcagagcagcgtccacgggtcaagggccagtttgttcgtcaagatcatagcatccaaggaagctagggtccagttactgagctggaactctattctattatctaaaaaaagtcactgcaagtgactccactgcggtctgcgggtatcctgatgtcagattttgccgaagagttggaagcagtcacactgagttacagtttgctctgtatatttgctgaagtttgtaatatatgtatgtataggctaacgctgttctttcctaggttaggcacaggacctggcacgtttgaaggtttgtcagtaggcgttagaaaatacaggcatactttgtttcaggtcaagatgagatgtgaccttcagtagcgcatgtgtgctttaagtcttgtattacgtaattaagttgtttgatgtttcgggttagatgtacgctccgtggatgaaatgtaaaggatgtccaccaaaacatgcttgtttccgtgcagcttgttgcaatgaacatcgttggcctggtttctgtcaatgctctcatgccgtgtgtactactgtgaa

SEQ ID NO: 14590 - DNA, 2048 bp, Zea Mays
cggggacctttttggaaggagcgtgtctttgcaaggagtcgaattagctcctggtgttgatcctgaagctctggaagttgctaaggattgtctggagtccatttttagtgttaactcaacagccactggtgacgcaatacaaccaggactgttgtttgagctatttgcttctctcgaagcaaatgaaagagaccaggcaagagctgctttgctgtcacaatctgtttcaaacaagccatctcaaactgcgggtacatcaaatgtcgaagaagactcaaacaaatgcacaacatcaaatagcgacagccaggtggaggatacatttgaactaggagatgaactatttgcaaaattttatgctgcacttgatgaaatcaatttctttaagacatcacctgctggagctgaagatcctggtctactttcaaaagcaacacaatactttgatgatgcattactggcgatgcagaagttgggaaagaaaagggcaagcttagtagacattgcagagtcctttaaatcaagagggaatgaattcatgagatcaaaccaacaccttaaagcggtagagctgtacacctgtgccattgcattgaaccaacaaaatgccatttactattgcaacagggctgctgcatatacccttcttaatatgaacaacaaagctattgaggactgcctgaagtcaattgaaattgaccctcactacagcaaagcatatagccgactcggatctgcttattttgctatggggaattatcacgatgctctgtacaagggatacttgaaagccgccgagcttgatcccagtaatgaaaatgtcaggcagaatattgaggtcacaaaaaagaaactggctgaacaacgagtcccaccagaagagcagaacacacatgcaggccaagctcaaggaccacatccaatatttacaagtggtggtgttcctttcaatctgtttccaccaggtagttctccagttcaagaattcttcgctggctggtcgtccgatgttggtgcaccaccaccaggacattcgataagtataaatttgaatgatatttttggccaagcaaatgtcaatgctagcggtcaaggatcaagtcaaacagggaattcaaataaccatactccatctgcttctttctcaactggtgctgctgttcctcctccctttgccttctcgggctcaggaaatgaaggaacgcaggcacgccaagcttctaatggacttgaaggggaacatggtgaaccaggcatacacagggatgatgacgtccatataaatttggctggacccgagcaggctgcggaggctttgagagctgtgatgcagatgcttgggccacagatgggtcaacatgagggtgcacctagaggaccaggttaagcgtgggaggtaggaaaatgtgttacgtggcgtattgtggtctgcaggagtcttatacgggacattattttgtcttctccatcctgacgaagaatggagattctcgtgcgccttattattatagcagcttatctgtgtgctacaacaattccaccgtaatggttaccggcgttcaacttatctgccctgttcatattggcgtaggtgtgtcattagctgtgctggggcctgggtcttgttttgttgagacttgtctcgtaatggctgtcggtccatcatgtgatcttaaattaaagcctttttgcccccctcccctgcttttccgctgcttgtcggttcccagttgatacttggaaaatatttgcaaggttggtgaaaaaaaactgtcactggaatgaagttcatcatcgttattggctggctggcttgctggataaatcataaatgttggaattggtaaatcatatcctcttggactggagggaagttattattacgttactaagctgggtatatctaagatgtttggttcacatgtttataatgtgatgtttataatgtgatgggtaactgataacggtaaatcatgtttgtttaaatccaacgtaatgagataccatgctaagaaatgatgttggtttattcaaatttgttaccgctg

SEQ ID NO: 14591 - DNA, 1101 bp, Zea Mays
ctagcttgtcgatctctcctgtgaaacacggaaagggaaggctgaaaaaacacgacgctttttctccatggtttggtgaaagatgcatttagttcatcaggaccagaaacagggaaaggcaagacaaagttatcaggcaagcgtgtcaagcatggttaccatctggtgaagggcaaatctaatcatccaatggaggattatctagtggcagagtaccggcaagttggtgaacatgatttgggattgtttgctatattcgatggtcacctgggccacactgttccagactttttgagctcccatcttttcaataacatcttgagtgagccagaattcttgagtgatccagaaactgctatccgaaacgcataccaacttacggatcagaagatattggaaaacgcagcagagttgggaagaggtggctccacagctgttactgccatcttaataggaagtgacaagttcgtgaaactagttgttgcaaatgttggggattcacgggcagttattagcaagaacggtgtagcgaagcagctttcagttgaccatgaaccaaacatggagcgacaaacgatcgagcagaagggtggctttgtatcaaacctaccgggtgatgtgccacgtgttgatgggcagctggcagttgcaagggcatttggagaccggagcttgaagaagcacctcagctctgatccatatgtggtcgagcaaactatcgatgaaaatactgagtttttaattctagcaagtgatggcttgtggaaggtgatgtccaaccaggaggctgtcgacgagatcaaggattgcaaggacgcgcaggcagctgccaagcacctgacggagcaggccgtgaatcggaagagcaaagacgacatttcagttatcgtagtcaagttcatgtgctagcacatcgtcaggttaaatggtctcccgattgtataccgtgttaaattatcttttaagtcttgtgctcgctggtgtcggacattttgtttaccttctttggttttgggaccccacaaagagggtcaaggcttgtaacatattgttgtttgtttaaggctccaaataaagcatggtaccaccatagtaatttca

SEQ ID NO: 14592 - DNA, 735 bp, Zea Mays
actactatcaaacactgtctttatgtttgctgaggttttcttcgaaggcaatgtttaccaccgcaattaggcaagcaaatcagaatcgtctgcacaggattgatgagataagtcgtgaaacatgggatctcaaaaagtccttcgatgggaaagcggtattactgcaaggagtcccacgaaatgccctcgcagatgacatagagcgttttttgtgtggcacgaactttgaacctccaccgtttgaaacctttctaagagctggtgtcccagagcccataagaatgatgctggttaagttccacacaaagaccgatgcgatgaatgccttcatcaccaaaaacaggagtttctgtctgaacagtcaagttagcatgcgtgttcttcagtaactgagtagccagttgaatctcgtgatgtttgccccggctttgtcaaacaaaaagccttttaagtccgatctgaggtctatccattatccacaaatgttgccgcattgtgtgtttctgcaggttatattggactggcagcctgctttaggttttcattcctactagtttgtggtttcagctgtactgcaccgcttttatttcatgagtactctgaaaaatgtaccaccattccgctttacaatgaaataattaacggcacaaacgctaggggttcgaatctgctactgctaccgtgcccattgttaaaagagtgttaaaacagaagcaagcgccaccgatggatccc

SEQ ID NO: 14593 - DNA, 2546 bp, Zea Mays
gattcccgcgccctcgtctcttatcccaccggcaccaccagggcagggccgatggttgacgccatcgacgccatgccctcgcgctccacctccgccccgagagcagcgcgcaccgcccggagatgtcgtacacgttccccacgcagcccatcgtggcgccggcgaagaagaaggacgcccgcaaggacgccgccgacgccgcagagaggcactgcagccctctgccgtcgagggagcacgggagggcggccgtcgccgtcgacggcgacaggggcagccagtacgcgctcaagtgggccgccgacaacatcctctcccgcgcccgccccttcttcctcgtccacgtccgccgcaagcccaccttcctccagggccccggcggtaagcagttcgccatatcacacgtgcaggacgacatcccggccgatcttcacgcccagatggaccttcaggcgaaagatctgatgatccccttccagtgtttctgcagcaggagagggttgcaatgcagggaaattatcctggacggaacagacgtgtcgaaggcgatcgtcgatttcgtcgccaccaacaaggtcgacaagttagtgctgggctcagcatccaggaacgcctttacaaggacgaggatgaagccgaactgagcctctttaggattgaacgtaagcagcagcagcagcaggatggcgatactgatacgcttccgtggaactaccacgcggagggattatcggtgatgaccatttactagctatagtactacacagtgttaaagaaaatgtttgtgttcgaatccgaactgaatcgatctgaagcggtccaaaacgatggccagaacagaaacatgttcggattcgacgtgaaaaacgttcgtgactggaatgctttgaacgtcaggagcagagggagatgggcaggaccccagaaagctctcacaggaacagaccggaggcggcggcggcggcagaagcagaagcagaagcagaagcgtgttctcagtcagcaatcggcccgaagcataagccttcgagcctggacactctacctcatcagcgtggagaggagttcgcagactacgactcgcaggacatcatccatccgatcttgaggcgctggccgccgatttgctcgcctagggacgacagcaggggcgggtcgtcgtcggctactccggaagaggctcgcaagctcgacctgaagctcagggccctgccgaggccgatcgagaccaagaggatgctggagtgcctgcctaccaggctcgagtgcaggatattcaccgcggacgatatcgcgaacgcgaccaaccatttcgccgatgagctcaagatcggggaaggagggtatgggccggtctacaaggccacgcttgacgacactctcgtggccgtcaagatcctctactctaatgtgacgcagggactgaagcagtttcgacaggaggttgagctgctgaacaacatccgtcacccgaacatggtgcgcctggtgggggcgtgcccggtgtacggctgcctggtgtacgagtacatgccgaacgggagcctggaggaccggctcttctgccgcggcggcacggcgccgctgccgtggcggctgcggttcagggtggccgtggagatcgcgagcgggctgctgtacctgcacaagatgaggcccgaggcgttcgtgcaccgcgacctcaagccgggcaacatcctgctggacgccgccttcgcggccaagatcggcgacgtcgggctggcgcgcatcatcccgcgcgccgtggacgtggacggcgccgccacgcagtaccgggagacggcggccgccggcaccttctgctacatcgacccggagtaccagaagacggggctgctgtgcaccaagtccgacgtgtacgcgctcggcgtcatcctcctccagatggtcaccgcccgggagcccatggggctggcgtacgccgtctcggacgcgctggaggagggcacgttccccgacctcctggacggcaacgtggccggctggccggtgcccgaggcgcaggcgttcgccgagctcgcgctcaagtgctgcgagatgcggcgcagggaccggccggacctggaaaccgtcgtcatgcccgagctggtccgcctgcaccgcgtcgtctcgccgtccgagtatccctcgtcttcttcctcgctccctcattccatggatcaagctcatcaccgttcagcgagcaacaaggatttgcggttggataatgacctggttgacattctgagcgagggaagactgaagggaggagcatcatttgccatgtaacatgcatgagacgagggccacaatgtctacatataactgcttcccactggaatatgttgctgttctatacatcttctgtaaacatttataccaccagcttagcctggaagctttttatgcatgcctggccattatgtttgacgcttagattaaccatcaacctgtaaaccaagaacaagttttttcgtgtgtgtgtgtgaatcaggggaggggttgcaccctgctactgtctctcatgtttgtcagttcatcaggaa

SEQ ID NO: 14594 - DNA, 1609 bp, Zea Mays
tcgcccccgccaggcgccagcctcccgtatttgatgtttcacaaacgcgtgagcggctcgccctcctctccagtccctcctccctccggtccgcacaggggagcagccggcagcagctagctaccacagtaccagcagcaataagctaatcagctacgatggcggactacgtgtatggccccgggcggacccacctgttcgtgccgggccccgtgaacatcccggaccccgtgatccgcgccatgaaccggcagaacgaggactaccgctcgccggcggtgccggcgctgaccaaggtcctgctggaggacgttaagaagatcttcaagaccacgacgggcacgcccttcatgatcccgacgacggggacgggcgcgtgggagagcgcgctgaccaacacgctgtccccgggcgacagggtcgtgtccttcctcatcgggcagttcagcctgctgtggatcgaccagcagcggcgcctgggcttcgacgtggacgcggtggagagcgagtggggccagggcgccgacctggccgcgctggagcgcaggctccgcgaggacgcgccgcggcacgccatcaaggccgtggccatcgtgcacaacgagacggccacgggcgtcaccaacgacctggccgccgtgcgcgcgctgctggacaagcacgcgcacccggcgctgctgctggtggacggcgtgtcgtccatctgcgcgctggacttccgcatggacgagtggggcgtggacgtggcgctcacgggctcgcagaaggcgctgtcgatgccgacggggatgggcatcgtgtgcgccagccccagggcgctggaggccagcaagacggccaggtccgtgcgcgtcttcttcgactggaaggactacctcaggttctacgacatgggcacgtactggccctacacgccctccatccagctcctctacggcctccgcaccgcgctcgacctcatcttcgaggaagggctggacaacgtcgtgaggaggcacaaccgccttgggacagccaccaggctcgccgtcgaggcgtgggggctcagcaactgctgccagaaggaggagtggttcagcgacaccgtcaccgccgccgtcgtgccgcccaacatcgacagcgccgaggtcgtcaggcacgcgtggaagcggtacaacctcagtctcggcctcggcctcaacaaggtcgccgggaaggtcttcaggatcggccatctcggcaacctcaacgagctgcaacttctgggatgtctgagcggtgtggagatggtgctcaaggatgtggggtacccagtgaaactaggtagcggcgtggcagccgcggcggcgtacctgtcaaactccacgccgctcatcccatctaggatctgagaacaatgtaaggggaggatatcgcaaacaaggccagcgacaacgagtgggcagacgaacgaacaaagcgttgctacatagtactctctcagaatgtaaagttaaatttcacacccagctgttgctacatagtagtatagttttatgaattacaggtttgattaaacttcaaattaatctacatgtatagccctgcccagatttaactatattgggaccgtattacttaccgatcaaaa

SEQ ID NO: 14595 - DNA, 964 bp, Zea Mays
gccgatccaaaatccgaccgttgccaagagcgctcccctaccctttttcccctcctcgcagtcgcagcagcagcgcacaccagaaaagcttttctgcctcctctccaccttgcttcccgcaactaccacgcacgccgaatacttggcaagaagaaaccctttctcgtcccgttgaactggcgccgtcgactccaccggggcacgctgtcgcgggttgctctccggtcctcgttctccttgctgctgaatccgctagtggagatcgacctgatttctcctgtcctgtcaattggattttagcccggctttcaaggtagagaaagaagctgtctggtccatcatggccttcccaactccagcttctgtttttgttgacgagaaccaacagataaatagaggtaagagggctgctggatcaaggaccaaagggctgaagccgtcggagaatcctgggaatctagagaggagagctcttcaggatttgtccaactttgccaaaggcacaggtttgaagggcacttccaccctgaaagagaggtcccagcgcaaggcttttagtaatgtgaccaacactattaaaggcactgctttgaaggacaggcccatcacgaaagagaaatctacccagaaacagaggtcacagaacccagtgaaaatattatctgatgaagatatcaaactgtgtcatgagtgggctaaggatggggtggaagggtttcactcaacacaaaatgattctcagaaggttgataaggatctgctagccaaacgtgtcaagaagaaagtggcgtcagtaaactcagccttgcgtggttggtcagatacggtatttgattctctgatgtttccagctagggaggttttatatgaaccaaaagtgctggagctggaacctgagattctccgggacatcagttgggatctccctagttcagtagttcggatatttcatttctgattgcac

SEQ ID NO: 14596 - DNA, 1147 bp, Zea Mays
caactctctcgcaggcttctctcccctctgcgcccttcccgcagcaccctgctcgcagcgctctctccacaggactgctccgcgcgcgccgcccccatcgccggcaaggcggcggtgctgctgcatattctcccggtcccccctccggagccaccctccccttctccgggaccttgagtaactttggagtaccagtgatgcaaagggacactagctctagcgatgtttctgcttctcatgtagggcgtgtaagacgtcgcaaacatccatctgaggctaccacagatgggaatagagctaatggacaaccgttgcttgtcaatgatcagaacaagtataaatcaatgcttatccgtacatattctacagtatggatgattggaggctttgcctttattatttatgtgggtcatctatatatctgggctatggtggttgtgattcaaatatacatggcaagagaacttttcaacctactcagaaaatccagtgaagagaaacaacttcctgggttcaggctactgaattggcacttctttttcacggcaatgctgtacacttatgggcgctttcttagtcggcagcttgtgaatacagtaacttcagatcacttgctttataaggtcgttagtggcctaataaagtatcagatgtttatctgttattttctttatattgcaggttttgtatggtttattttgactctcaagaaaaagacatataagtaccagttcaaacagtatgcctggacgcacatgatacttctaacggtttttgcacagtctgctttcactgtggcaaacatatttgaagggatattctggtttcttttgcctgcttcacttattgtgatcaacgatatatttgcttatttatttgggttctttcttgggagaacaccattaatcaagttgtccccaaagaaaacatgggaaggttttattggtgcatccgtgacaactatcatctctgcatttctgttagcaaatgtaatgggccgtttccaatggttgacatgcccaagaaaggatctgtcaactgggtggctttattgtgatcctggtccaatgtttaagccagagcattactcattgggagagtcggtgccacattgggtagatactttgacaaatataacagatatcgt

SEQ ID NO: 14597 - DNA, 1920 bp, Zea Mays
ctactcactaccggaattgaagcagtcttgtacctttggttggtggcattggcgcgctgcaccaaactctgtgcgcacagaatcaatgcgaccgtaccctcgtcgtcgccgccattgctgcatggtccatatgagatggagagctccaggtccagctagctagctagctagctagtatataaggacaagataccacaccggtagcccgccgcacagagtggtaagcatggcgagcaccacagacaaccgcctcgacctcggcctcctcctcctcctcctcgtggccgccgccaccgtcgtcctcgccgtggccgcggccccggcgcatacaccgggaggcaatactgctacccctccgccgccgttccggacggtgtacgcgttcggcgactcgttcacggacacggggaacacgcggtcgacgacggggccctactcgttcggctacgtgtccagcccgccctacggcgccaccttcttccaccgctccaccaaccgctactccgacggccgcctggttgtcgacttcctggccgaggcgctggcgctgccgtcctacctcccgccctacctcgccgtgtccgtctccaacgccaacgccacggcggccggagccggcgtcaacttcgcggtggccggcgccacggccatcgagcacgacttcttcgcgcggaacaacctcagcatcgacgtcacgccgcagtccatcatgacgcagctgggctggttcgacgcgcacctgctccggtcctcctcctcctcctccgcccgcgacaccatccctcccaagctcgtccgcaccatggccgtccagagggtcaccgccttcgtcgagggcctgctggagcgaggcgccaagtacgtgatcgtgcaggggctgccgctgacggggtgcttgccgctggccatgacgctggcgcgcgccgacgaccgcgacgccgtgggctgcgccgcctccgtcaaccgccagagctacgcgcacaaccgccgcctcctggcggccctccgcgcgctgcgccgccgccacccggccgccgtcctcgcgtacgccgactactacgccgcgcacctcgccgtgatgcggagccccgcgcgccacggcttcgccgagcccttccgcacctgctgcggctccggcggcggcgcctacaacttcgacctcttcgccacctgcggctcgccgcaggtcaccacggcctgcgcgcgccccgccgagtacgtcaactgggacggcgtccacatgacggaggccatgtacaaggtcgtcgccggcatgttcttcagtggcgacggctactgccgcccagcgttcaaggacctgctggccatgaaagcccgccaggggaagccgtgattttgagacaatcagaatgcacgttccaattacaataagtagagctgcatgcgtgacgaatccatgtcatcttcatcgtgaacccttaaccatttatcaggcatttataattggatccacatacgtatgatgatgatgagcacaaaggatttaacttctaatgatgacaacacatgaattgtactagaaagaaacgcaacaattccagactccaagaacaacagcacgactcgtttccaggctctaagttctatcgacttccaccgattttttgtctccagaaacagatacccatgcatggcaagactgcaggaccagcaggtgaaaacaattgaatcatagccaactcctgacaaggataaacataatgatgataccgcgaccagctgtagatcttagcagaagcccagattcgggaccaagaaaatgatgtgtgcctagccctgtaacccatctggctggcttctccgacgatatcatttgtcaatttgcccaccttaatatacctcgtatatacaactcaatcctgtacaatgttctcacgaccacctagaaatttgagagag

SEQ ID NO: 14598 - DNA, 2164 bp, Zea Mays
ctttgttctgtggttttgcacttgggacttggcttcggattttggacagtgtgacgttcgtgtgcgctaaggtcatcattgaatggctgcaacgatgggttcaatatctgccaatggttcttaccaaacaaataggcccagtgcactaaagcaggcacctcacatgcaattccaacaatgttgcaacggtggacttaggttcttaagcaagcattcccaatccacgcgaagtaagatacaggtggctaaaagaagagctacagataatggaattcatccaaagactacgggacatcgggcacctattgtatgttctgctgggatgactattgtatttgttgcaactgaagtgcacccatggtgcaaaactggtggcctcggtgatgttgtaggaggactgcccccagctttggctgctatgggacaccgtgtcatgacaatagctcctcgttatgatcaatacaaggatgcatgggatacaagtgtccttgttgaggtaaatattggtgacacggtagaaactgttcgcttcttccactgctacaaaagaggagttgatcgtgtttttgttgatcatcctatgtttcttgaaaaggtatggggcaagactggagcaaaattgtatggtcctactactggaactgactatcgagataaccagttgaggttctgccttttgtgccttgctgctttggaggctccaagagttctcaatttcaacaattctgaatatttctctggaccatatggggaagatgttgtcttcgtagccaatgattggcacactgctattttgccatgttatttgaagagcatgtataagccaaatggaatttataaaaatgctaaggttgctttctgcatacataatattgcctatcaagggagaaagcttaactggatgaaggcagggatcattgagagtgatctggttctaacagtcagtccacattatgtcaaggaactcacatctggcccagataagggtgttgagttggatggtgtccttcgcacaaagcctctagaaattggaatcgttaatggcatggatgtttatgaatgggatccttcaacagataagtacatcagcgtgaaatatgatgcaacaacggtaactgaagcaagggctctcaataaagagagtttgcaagcagaagtcggattgcctgtggactcgagcatccctgttatagttttcgtcgggcgtctcgaagaacagaaagggtccgacatactcattgcagccattccagagttcgtgggcgagaatgtccagataatcgttcttggcacgggaaagaagaagatggaggaggaactaacgcagctggaagtgaaatatccaaacaacgctagaggcatagcgaaattcaatgttccattggcacacatgatgtttgccggggctgacttcattatcgtcccaagcaggtttgagccatgtggtctcattcagctgcaagggatgagatatggagtgattcctatctgttcatccactggaggacttgtcgacacggttgaggagggcgtcaccggattccacatgggttctttcaatgtcgagtgtgaaactgtagacccagccgacgtgacagcagtggcgtcaaccgtcacgcgagccctgaagcagtacgacaccccggcattccatgagatggttcagaactgcatggcgaaagacctgtcctggaaggggcctgcgaagaagtgggaggaggtgcttctgggccttggagtcgaggggagtcgagctggcatcgacgacgcagaggagatcgccccacttgccaaggaaaacgtagccactccgtgagggcttggtggtgcctcgactcggaaacacgcgttggtgataggaagcgtcttctaggatcctcctgggcggccttgtggctggtggagtgaggtgtccagtcagacacggtttcgcctctactactagtctactactactacctcattgtaatataatccttggcattctaaaaaatgccatgcctgctctaattcttctgttcttgcgcaacatacacttcccgcttccgttcggtcgacaacggttatgtaaatatagcgaatgctagcgggcagctcgaatcatcccaagtggtagggtcacgatggagttgtttgaaatggctcgttcttgtgcatagttcgc

SEQ ID NO: 14599 - DNA, 1635 bp, Zea Mays
atggcgtcggaggtggaggacgaggcggcgacgccgctgctcgccaacggtgcagccgacgtccgccggaggagggaccaggcgaaggcaattctgtccacgcaggccgtcaggatcgccaccaaggccgagcagcatgagcgcttcatctttaaggtcacacacttgctgggtgttcttggatttgggggattttgctatctcttgggtgccagtaagctactgcagcattgatatatttggaccacaggatgtgccatatgtgtactgcctgttctatgtcatatttgttccgctccgctggatttactaccgctacaagaaatggcattactaccttctggacttctgctactatgccaacacctttctccttgtaatgattctcttctacccagaggatgaaaaactttttatggtttgcttctcgtttgcagagggtccgcttgcttgggcattaattgtgtggcgttgcagcttggttttcagttcatttgacaaacttgttagtgtcctgatacatctcttacctgggattgttctattcactatccggtggtggaatccacaaacatttgctgccatgcacccagaaggaagagatgctagagtcacatggccatatgtggaggacaaatcatatctgtggacatggcttttttttgttccgctagctgcttacaccctgtggcaacttatgtatttcctcatagttaatgtcctgcgtcgacagaggttgttaagggaccctgaagtcatgacatcctacagggagctctcgaagaaagcacagaaagcgaacaacatctggtggaggctgagcggactgctgggtgaccggaaccggcaggtcatgtacatactgctccaggcgctgttcacagtggcaacaatggcactgaccgtacctatattcctgtcctaccggatgcacgtggtgttcctgatactcaaggtgtgcgcgtcgacatggaacggtggcagcttcatcttggaggtgatgcctcggcaagtagtgcagaagcagctgaagaaactggacatgaagcccatggaacaggggagctcgacacaaggtgcgccaggtggtgatggtggcacattgggtaaccaccaccagcacacatccgaggagcatatccaggagtgaggaaattgaagctggatgtaagattagattttgatgttcactgacacaacctttgttgtcatcgagtgcgctttgtgttggagtttttctttagttcttcccagtttgtgagttgtgacatctagtcatctataggtttataggctggacgatatggggtgagagattgtgcgtgcccatcttttgtcgggcttgggcaaagatatgtcgagatgtttactttctctgtagaatttcgtgaagctgttgcattgttcgtttgaagatggcgacgatgttcagatgatgcttcatgttgaaggacatatctttatttgcttcattgtacccagattttatttgcttcatgttgaaggacagactatgatgatgcgtgctgaggtgatttgcttattttatttgctgcgtgcaagaaaaggttcctgggagatgccctgtaaatgcagtgggtgaccacctgtgttgactgggaccaagtcagaagg

SEQ ID NO: 14600 - DNA, 2289 bp, Zea Mays
ctcatcctctcagggtctctttaagtggagggttgcttaccttgactgatataggcaattgagtatgctgctactttaatttgcccgtggaaattcatcagatggattgtctcaaccttaggacatctttccgtgttctgctctcgatacagttgctgctatcatcgttcagtcccttgattgtagcgaacttatcttcggagaagcaagcccttcttgactttgtctctgcagtctatcatggaaacaagctcaactgggataaacatacctcagtttgttcatggcatggcgtaaaatgctcagaagatcagtcacaagtttttgaattgagggtaccggctgctggtcttatcggagtaatttctccaaacactcttggcaagctttattctcttcaagtactgagcctgcggtctaatcgattgaccggaagtcttccagctgatgtggcctcccttccgtctttacgttccatatacctacagcacaatgaactttcaggagggttgccttcttccttcagtcctaacctcagtgtaatagatttctcctacaattccttcacaggagaagtacctgcaagtttacaaaacctcactcagttaaccgttcttaatttgcaagataactctttctctggatccatccctgacctcaagcttcacagtctgaaactattaaatctgagcaacaatgaactgaaaggctcaattcctcgatctctccagaaatttccaaagggttcattttcaaggaatcctggactgtgtgggctacctctagctgaatgctcacatccttcaccagcacgctcacctgaatcatctccatcgcctcaatctccacctttgacacatcatgataagaaactaggcacgggtttcatagttgcagttgctgttggtgggtttgcattgctgacgctaatcgtggttgtgtgcttttcaaagaggaaaggcaaggacgagattgatgtggaatccaaaggaaagggtactgccaccaggagcgagaagccgaagcaagaattcagtagcggcggccaaattgctgagaagaataagttggtgttcttggagggttgcacctatagctttgacctggaggatctactgagggcttctgcagaagtccttggcaagggtagttatggaactgcttacaaagctgtactcgaagatggtactgtcgtggtagtgaagagattaaaagatgttgtggcagggaaaagagagtttgagcagcagatggagctcatcgagaggttgggcaaacatgcaaacctactcccactacgcgcctactactattccaaagacgagaagctcatcgtctatgattatattgacactggaagtgtttcggccatgttgcatggtatccggggcgttaccgcgaagacaccgttagattggaactccagaatgaagatcatccttggaacagcatatggaattgcacatatacattcagaagggggcgcgaagctcacccatggcaatgtcaagtcaaccaacgtactcgtagaccaagatcacaatccttccgtctcggactatggcctcagcgctctgacgagtgtgccggtcaacgcatctcgcgtcgtggtcggctaccgtgctccagagatagtcgagaaccgcaagatcacccagaagtccgacgtctacagcttcggcgtcctcctcatggagatgctcacagggaaggccccgctccagacgcaggggaacgacgacgtcgtcgacctgccgagatgggtgcactcggtggtccgggaggagtggacggccgaggtgtttgacgtggagctgatgaagcaccagaacatcgaggaggagctggtacagatgctgcagatagccatggtgtgcactgccaagtcgccagaccggcgcccgacgatggaggaggtgatcaggatgattgaggggctccgccagtccacctcggagagccgcgcgtcttctgatgagaaatccaaggagtcgaaccctccatcggtgtaaatcctgcgcagctcccttcgtccgcttgatcggttgttgttgccagttgcacctcatttgatttgttagctaatttatttatgattgagtttcttgtaaaccgtggttagcatctgctgcatttagcctcagatagaaagaactgagctttcttattgatagtctgaaactctgtttcatggcgagcgtagaattcttccgctggaaaattgaaattgttagcctgctcgattgcaaatcctttttatacagttgcatctatcagaccatttgacaa

SEQ ID NO: 14601 - DNA, 1454 bp, Zea Mays
ctaatggtttgtcaaggtgtgcgcgcaaatgattgcaaggcatcaagtcctttgcaagtaaaatatgctgatggggagttggagaggcttgaacataagcttttcattggaatgcttccgaaaaatgttacagacactgagttgactgatttgttttccaaatatgggaatgtcacggatttgcaaattttgagaggttcacaacaaacaaacaaagctggctgtgccttcattaaatatcaaacaaaagatcaagcattggcagctattgaagctctaaacgggaagcacaaaatagagggttctagcgtgccattggttgtcaaatgggctgatacagaaaaggaaaggcaggctcggaaagcacaaaaagctcagtcacagctatctcatatacccaatgcaagtccaatgcagcagcactcttcagtatttggtgctttacagatgggatatatgcctcaatacaatggatttggttatcagccaccagggacatacggacttatgcagtaccctctatctcctatgcaaaatcaaggccccttccagaatatggttcaacctcttaaccaagggaactcgataagaggagtcaatcctgaagtgtctcccagttcagttcaaaggtcatttaatgcaatgcagctaggcagcccttatcctgctatgcctggtatgcagtatcctggatcatatcccggtggtcccatgggcaaccgtcatttgggaaattctcacaatccgattaaagctccaaattcgaatgccaattccactgtttcttctagtcccagcagcaatgctggtgggcaggttgaaggtcctcctggagccaacctatttatttatcatatcccacaagaatacggtgaccaggagctttccagcgccttccagagtttcggaagagtagtaagcgctaaggtgttcgtagataaagcaacgggcgtgagcaaatgcttcggttttgtgagctacgactctcctgcctccgcgcaggcagccatcaacaggatgaacggctaccagttaggcggtaaaaagctcaaggtacaactgaagagagaaaacaacaccaagcacagtagtaaaccgttttgacagacaaggcagcagccgtccggtacccggtacatattaattgaccatcaacacattgcagcagcagcctcagggcctggggagggaagagacccgtgtacccctctttgttcacttcaacattcttggagattcgtcagtcagctcagctcgtgtaattcattgcagcagacataggccgtagcagcagtttgtaccatgatcagatcacttgtacacatgattcattcaattgttactgacagccggctttcatcctagaataattcgctgtgacaaccttatcatttgctgacgaatgaagtcaggtagacttgttcatctatggaatgatggcaactttcgagcga

SEQ ID NO: 14602 - DNA, 3204 bp, Zea Mays
ggacaaggccggattgcattatccgctcgctgtgcctgccctgcttcttccgccattctttccgtctctgctctactttcttggtcgcctgtccggaggctcctccccgcggcccctgagcaaactgtaccatagccgcgtgattgattggttcacgggagggacagggagcggcgtcaagctggttttgaagcggtgcttgcttcggcagatggttgttctcccgcacctgtcctaccgccgttgatcgcgagagtctcgtacgtagtcttcgggggcaagcatccatggcggagtcatcgtcaaggcaagcggccgagatggtggagaagtggatggcgttcccgtctggctccgacgccggcagcggcttcgcgttcccggcgccacgctcagtgtcgggcgcgggcaaggagatagtggagctggcgtcgccctccacagccacggccacggccacggccacgaccacggccagtgccggcaacaggcaggcctcgttccagcgcggccgcgacagtggcgtgggcagcaccaggtcgtccatggacggcgcgcgcgcgtcgggggactcgtcgatgccgcgggtgtcgcaggagctcaaggacgcgctgtccagcctgcagcagaccttcgtggtctccgacgccacccgcccggactgccccatcatctacgccagcgccggcttctacaccatgaccggctacacccccaaggaagtcaccggccgcaactgccgcttcctgcagggccccgacacggacatgaacgaggttgccaagatccgggacgccgttaaaaccggccgcagtttctgcggccgcttgctcaactaccgcaaggacggcacgcccttctggaacatgctcaccgtcacccccatccgcgacgacaacggcaaggtcatcaagttcatcgggatgcaagtcgaggtgagcaagtacacggaggggctcagcgaaaagcgcatgcggccaaacgagatgccagtgtccctcatccactacgacgaccggcagaaggagacggcaatgtcatcgatcacggaggtggtgcagacggtgaagcacccgcgcgctcgctccgagggtgaacaggagcccgtggagcctgcaccgcccgtcatggcgtcgccgttggtggcccctggcacgccgtcgggcggtgccagcctcaagtccccgctctgggacgtgaagaaggaggactcacggctgagccggaagtcgagccgccgctcttccctcatggggttcaagatggggaagaggagctcgataggaagcaaggatgcccttccagcggaggtggaggccccggcgccggcgccggcgccaccggagtcaacgacggagaagcagcgcaagaacagctgggagcaagaggggagggagagggacatcaggcaggggatcgatctagccacgacactagagcgtatcgagaagaacttcgtcatcacggatcccaggctccccgacaaccccatcatcttcgcgtcggatagcttcttggagctgacggagtacacgcgggaagagatcctcgggaggaattgcagatttcttcaagggccagagaccgacatgtccacagttgataagatccgggaagctatccgggaacagaaagaaatcactgtccagctaatcaactacaccaagagcgggaagaagttttggaacttgttccacctacagccaatgcgagaccagaaaggagagcttcaatacttcattggagttcaattggatggaagcgaccatgttgaaccccttaggaatcgtctctctgagaacactgaactacaaagtgctaaattggtcaaagctacggcagagaatgtggatgaagcagtcagagagcttcctgatcccaacctgagaccagaggatctatgggacatttactcacgatatgtttccccaaagcctcataaacgttacaactcttcttggattgcgatggaaaagattataaaatctggtgtgaagattggcttgaagcacttcaagcctataaaacctttgggttatggtgacactggcagtgtacatttggtggagttgcaaggaagcggtgaattatttgcaatgaaggcaatggacaaatcagtgatgttgaaccgcaacaaggttcatcgagcttgtatggaaagagaaatatactcactattggatcatccttttctcccaacattatatacttcattccagacaccaacacatgtttgtctcataacagacttttgtcctggaggagaattatttgcactactcgatatgcaaccaatgaaacttttcagagaagaatctgcaaggttttatgctgcagaggttgtaattggcctggagtatctccattgccttggaataatataccgtgacctaaagccagaaaacattttgctccaagaggatggccacatcgttctgactgattttgacctctcttttttgacttcctcaaaacctcatgtgataaagcattctacatcaaggcgaagaagatctaaggagtatctgcccccaagttttgtttcagatcctgccactccatcaaattcttttgttggaactgaagagtacatagctccagaggtcatcactggtgtaccacatacaagtgccattgattggtgggctcttggaattctcttgtatgaaatgttgtatggacgtacaccttttcgaggaaagaacaggaaaaggacatttcataatatcctgcacaaagaccttacatttccaagtagcattccggttagtcctgcggctaagcaattaatccatggattgctacagagagatccctcttctcgacttggttcaagtgctgctgcaaacgatatcaagcaacatcccttttttgaagatatacactggccactcatccgttgcatggagcccccagagcttgatgttccactgaaactaactcggaaggaacctgaacaaaaagtgaagcctgaggaggatatatactcatgttcagattattgagacattttaagggcaggttgtacgatcccccctcccgaccccgtgcatgactttcagcctgaagagattttatattaccgagtggaaataacgttgctgagcatgtacatagtaataaaagaggtttataggcatgcaagatttccagcctgaattgcacaagaggtcgttgtctttttgacctaggcttatcattcat

SEQ ID NO: 14603 - DNA, 2109 bp, Zea Mays
gcctgattaagaagaatacgagcccaactgcctgattgatttagaatccaaccaagtagtatacactggagatggatcagtcgacttttctggaaatcctgttgtcaaggaaagaacgggtagatggaaggcatgtccattcatattaggtaatgaatgctgtgaacgactggcctactatggcatctccacaaaccttgttacttacttgacaaaaaaactgcatgctggcaatgcctctgctgctagcagtgtgactacatggtcgggaacttgctacctaactccacttattggagcaatcctggctgatgcatactgggggaggtactggacaatcgcaacattttccacagtatacttcatcgggatgacactgctgactctttcagcatcagttcctatgctcatgcctccatcttgtgaaggatccttttgcccagcagcaagcccttttcagtatactgtcttttttcttggtctttatctgattgccctgggtactggtggaattaagccgtgtgtctcatcctttggagcggatcaatttgatgatacagatccagctgagcgaatccagaagggctctttcttcaattggttttatttttcaataaacattggtgctctcatatcaagcagctttctggtttgggtgcaagacaatgtaggatggggactggggtttggcattccgactgtattcatggggctggcaatcataagcttcttctctggtacatcactttataggttccaaaaaccaggaggtagtccaattacacgagtatgtcaggtgattgttgcctctttgcgcaagtggaatgtgcctgtcccagaggatagctctctcttgtatgagctacctaatggggtatcaacaattgaggggagtcggcaaatagagcacacagatgaactcagatgtttagataaggctgctacagttaccgaagttgatgtgaaaacggctgacttcaacaacccatggcggatatgcactgtcacccaggtggaagaactgaagatactagtaaggatgttccctgtctgggcaacaacaatagtgttttctgctgtatatgctcagatgtcaacaatgtttgtggaacaagggatggtgcttgacccatccttgggctctttcaagatccctccagcttcactatctactttcgacaccctaagtgtcatcatatgtgtcccgatgtatgattacatcgtggttccgatagccaggagattcactggcaacgagaggggctttacagagttgcagaggatgggtattggcctggtaatttccatcatggctatgtcagtcgccgcagtcctcgaaatcaagcggctagcagttgccagggaagcacacctggtggatcagaatgtcccggtcccactgagcatattctggcaaatccctcagtatttcctgattggtctagcggagattttcacattcattggggcgctcgagttcttctatgaccagtcaccagacgccatgaggagcctctgcagcgcgcttaatcttctcactactgcgtttgggaactatctcagcacgttcattttgacaatggttgcgtactttactacgaggggaggtaaccctgggtggattcctgacaacttgaacgaaggccatcttgattacttcttcttgctcatcgctggcatcagttttctgaacctgattgtttatgtcctctgtgctggcaaatacaagagcaagaaggcagcttgagttgtgaaggccaggggctggatggcgtgctgcgcgccatgttatggtggacacttcagttcaaaatctgtatatatgtttcccgcattaaccaccctagctgaagcaaccatctgcaattgttgcaaagtttatattcttcattgtgctggactaagttgattatacattcgtgcttctactttgtgtatgtatatatctgacctaaagttgctgaacatagacaatttcacttgcctctggtatccagggttttgattgttttttaacctagatatgtgaggtcacgttttaacttttgtatgtagagtaagcatcaatgtgctggttgaacaccaggagggcttggggcgtacttatgg

SEQ ID NO: 14604 - DNA, 672 bp, Zea Mays
tgctgtaagaaaggagaagttcttatcatttttttagaagatattttttcaagtattcacattatggatgcaagtcgaactttggcaatgatttatagggataaatcagagttcagtgaagagcgaaaaatttcaaaattttatcgagccttagtgactggcatacttgatgatgatgaggttgttgttacgcaacctatagggttagttcattatcctggagttgcagagggactttatgcagcatgttcctcaggaaagccagcaatgagcaaagtatgtgttcttgagagacttgcacaccaaaatcacacactggtccaggttgaaattcattcaggacgacctcaccaaataaggatacaccttgcatacattgggcacccacttgtagatgaccctctctatggtattggtgggcaccccaattttgttgagccagaatctactggcacagatagttcttttgcatctgatgggggttatgagagacctttgcaacctgttcctggagactgtgggtatcacctgcatgcacattggctggttctttgccacccaacaaccaataaggacgaaagacttctgacgcccctgagcttgagtttccgttggagcggatttcaggcttgattttttttttaaaaaaaattcccatattcgagtttcccc

SEQ ID NO: 14605 - DNA, 307 bp, Zea Mays
gttttaggttagctagaaggaaagcggagatgcttcagtctccaaaatttcatgtgtcgagaacaaggcttatcatctacaatttgcctaagactatgaccattaatgacgtaaagaagctttgcagagaagcagtcatttctcgtgctacaaaacaaaatcctgtcatccggaaggtgaatatcctgaagaatgaaaagaaaggcatacagaagcattcacgcggtgtagcctttgttgattttcaagaacatgaacacgctcttgttgctctaagggttctaaacaacaatcctgttccatcttc

SEQ ID NO: 14606 - DNA, 970 bp, Zea Mays
ttttaggatgggattcgtttgctcgatggaaatgatggttacatgatgttgtccacagcgagaagcggatatacctcgtcttcgagtacctggatctggacctcaagaagttcatggactcttgcccggagtttgctaagaatcccactttgattaagtcatacctctaccagatactccgtggcgttgcgtactgccattctcatagagttcttcaccgagatttgaaacctcagaacttgttgatagatcggcgtaataatgcactgaagcttgcagactttggtttagccagggcatttggaattcctgtccgtacatttactcatgaggtagtgacattatggtacagagctccagaaatccttcttggagcgagacagtattccacaccagttgacgtatggtctgtgtggctgtatctttgcggaaatggtgaaccaaaagccactattccctggtgattctgagatcgacgaactgttcaagatattcagggtgctaggtacaccgaatgaacaaggttggcctggagtcagttgtttgcctgacttcaagactgctttccccaggtggcaagctcaggacctggcaacaatagtcccaaatctagaacctgctggcttggaccttctctctaaaatgcttaggtatgagccaagcaaaagaatcacagctaggcaagcacttgagcacgagtacttcaaggaccttgagatggtacagtgacctgctaaatgtgcttcgcgttgctttggcatttgtaattgtctgagctgagtcgctcattcctttttatgggcgtctgtactctctcattctctctgcatttttgtcgttcagctggatattttgaatctggtgtgttttgagatgtattaaggaatatcaaatagattaccgccttggtctctatttactgaaagtaaatatcctccatgtttatttcccccgaagcatccatggttcc

SEQ ID NO: 14607 - DNA, 1265 bp, Zea Mays
cttttttggctttccggtcttttggtggtgtactggtggctggctggctcctgaatcgtcgctgtctctctctctctctcgctttcggcagctcagctgcactccacagtctgcctccactccactctccaccttttgctgtcgccttcctccccttgccttccctgtgtcctcccctccctcgcgccgcaaaaaacgccggagggaggaagagagagagagagagagagagagagagagagagagggccaggctgagcttactggcggcgagctggagaagaaggaaggagcatggccatgccggcggcgctgcttctcttcctcctagtcctctccgccttcgaggccggggagcttccacgctgctcggctgctgctgcaggtaaaccggcagtcctcgtccatgatgacttgagtccggttcaagacaccagccccatcgcaacagtcccctccacgaacccgtcgcccgccatcatcaccgtgccttccacgaatcccaccatcaccatcccttccttgaaccctctgcccacacccatcacagccccctcaacaaacatcccttctccttccaccatgctgccgccggttccggtcatatatccgctgccaacgccgtcaacatcctccccaccagctgtgccggtcaccaatcctgctgtcaccacgccttccacgtcccctccgtcgacaccaacaccattcaacaacccaccattgttgaacccaacgccgacccctgctcctacagtcacggccccagctgcttcaggccgggaggtctggtgcgtggccaaggctgctggctcaagtgaagccgcgcttcagaacgcgttggactacgcgtgcggcattggaggagtagattgttcggcgattcagccgtcagggagctgctactatccgaataccatccaagcccatgcatcctacgcgttcaacacttattaccagagaaaccctgtttcttccagctgcgactttggggggacggcaatgctcgtcactgctaatccaagctctgggagctgtgtctttgcatcatcattgccatcgtcgtcaagctctactgttggatatgatcccgcgtccacggctactccatcgtcaccgtcgtctggttccgactcgggagcacccgtgctgaatgccagtggggcaggttcttctgaatcatcagattttggctttgacatcccaggagctgtcaatttgggcagcggttggagcagcctaacaggtgaactgagaaaataaatc

SEQ ID NO: 14608 - DNA, 579 bp, Zea Mays
gaaagcatagcgcatggtgtccattccaagaacacgagtaagatggataccagcacgaaatccttccatgcatgatacaaccctaggcttactgtcaccttcctccatggtcacagaaaatgttgcaagcaaaggccatcctacagcttcaagcattggtctaacaagctcaacctgctgcgcaacatgaaaaacacctttcttctgtccctggttcttgaaaagtgcctgggtctgtttgatgatcttttcactctctgcctttgtatcactagctgacttcagtcttggaagggctaaattgagaatattgacaagacggcctctttcttctgtttcaggtctcttggtggattttgaagtatcatgagaatcgtctttcatctttatctcttccttgacaatggaatcataaatttcttccaagagctcatttgggacacattcttctgcatcacttgcagtgttcatacgaacaaaatctgattttgacatcttaggccacaccattggattatgtgcatcagtattcaacattataacagcataagcaagaacataagcagtatctgcattttt

SEQ ID NO: 14609 - DNA, 2619 bp, Zea Mays
gtcaccctccacacgcatgactctcccacctcattcgcttgacctcccttccacttaaaccacgccaaaaaccagctcgcgattcctcccactggcctgaatctgacccgcatcgcccgccatccccaccgccgcgcctcttccgggcagccatggacgaggccttcgcgcgcgcggtggaggacggcctcaagctcaccaagcgcctcgtcctgcccagcgggggcgggatgccgccgccgccgcgcccgcacctggcgatggaccgcgacgaccccgccgcggcgctgcagcagctcatgccggcggcgcccatggcgtacgccgtcgtcgtcgacccggccgccgtcgacagccccgacgtgcccagctaccagccccacgtctacggccgcctcgacccgcccgcgctcatcccgctccagatgcgggaggtcgagctccgcgtcgactgcgccgccggctgcgccaccgccgaggtcgccctgcgcgcgcgctggtggctgcactgcatcacgcgcagccgcgcgtgccactgccgcatcgtcgtgcccatggctcaccagggttcaattctaggcgctgaggttactgttgggaaaagatcatacaatactcatgtaattgatacagaggataactgttcagtgaagattgcaatgcccgagagtgggggtcttttaaaacaggaatttttttccttgacaataccacaggttggaggtggagaagatatatttgccacaatcagatggtcacaaaaattgctatacgacaacggacaattttctgtcgaagtaccatttcgtttcccgcagtttgtgaaccctttgccaaaggttttcatgaaaaaggagaaaatacagttgattgtgaatagtggtgtgactaaggagattttattgcagggaacaagccatcccttgaaggaaaaaagtagacaaggtgagaagttgtctttcctgcatgaagcagttgttgagaattggtcaaccaaagattttaccttcgcatatactgtttattctggtgatttgtctggtggagttcttgtgcagccctcaaccttgcgtgactatgatgacagagatatgttctgtctttttcttttacctggaaataacgagaacagaaaggtcttcagaaaggctgttgtttatatcattgatacaagtggaagcatgcaaggaaagcctcttgagagtgttaagaatgccctgtccactactctctctgatcttattccaggagattacttcaacataataacatttaatgatgagcttcactcattctcatcgcatttggagcaagtaaatgaaaaaacaattggaaacgctattgaatggatgaacttaaactttgtcgctcagggtggcactaacatcatgcatcctttgagtgaggcaatgactttgctgtcaacttctcacgatgcgcttccacaaatctattttgttactgatgggtcagttgatgatgaacggaatatctgccatacattgaaaactcaacttattaaaagtggatctaagtctcctcggatttctacttttgggctaggttcatattgcaaccactatttcttgaggatgttggcatcaattggtaagggtcactatgctgctgcatttgatacaggatcaattgagggtcgaatgcttcaatggttccagaaagcttcaagcacaatagtgtcaaatgtttccattgatgccataaagcatattcaagattttgaagtggattctgtatatattccagacatttcagcaaaatatccattgtgtgtttctggaaggtacaatggcaagcttccggagacacttatcgccaagggtcacttggctgacatgagtgaaatatctattgaattgaaagtccaacatataaaggatatacctcttgataaagtattggcaaagcaacagatggatcttctcacagcaaaagcatggcttatggagaacaaggagcttgagcgaaaggttgtgaaattaagcatacaaaatagccttccttctgagtacacacgcatggtactacttcaaaccagtctggacaaaatagatccagcacaacaggcgaagaataaaccaacgaaacaaagcagtagcccagatgagctgccagcgatgccgctaggtggcctagcggtcggatttggcgacgtagcggcaacaacagagaacctgacaacaggattcggagacatgaaagcagccgagaagtttgtgatgttggagaaggccgctggctgctgcagccgcatggcggactgctgctgctgcatgtgcttcatcaaggcgtgcagcaagatgaacgaccagtgcgccatcgtcatggcgcaggcctgcgccgccatcgcgtgcctgggatgcttcgagtgctgctcagagctgtgctgcggcgggtccaactgagtgaggccacagcaaccgagcaagttggtgagaatgtgttgttgtatagtgatgtaaatgctcccagtaatgtatagaatttggcatcacgtacgtgtttatctaacttggcttgatcagtaagagcgtcacgtgtgttaatcactgtattaagggacagaacagaagcgcacacgttccgttagctttgtgcaaa

SEQ ID NO: 14610 - DNA, 1349 bp, Zea Mays
gttcgcttgagcttaagctagaaagtagcagccagccgtggaaagacttgagaggagaagacaaatgccttaccatatgcatataaacctggagcttttggaagccacacacttgatctgtgcgatgctgattgaagtccccaatatggctgccagcacctatgacaagcggagacctatgagcaaaacattccgaaggcttcttgaagtgagtgaaaggcagacatttgttgggccgcccgagaatgtgagggaccatgtaatggctgccacaagagccctcaacaagggtgatcaccaaaaggctttcagtgtcataaattcgttggagatttggaagcttttgaggaacagagagcatgtccttgagatgttgaagcttaagatcaaggaggaagctcttagaacctatctcttttcatactcgtcttcgtacgagtccttaagccttaaccagctcactaccatgtttgatctcagcgagcagcatgcccacagcattgttagcaagatgatgatgcatgaagagcttcatgctagctgggaccagccaacaaagtgcatcgtattccatagtgtggaccaaactaggcttcaggggctactcttccagatggcagataagctctcggtcctggtggagatcaatgagagggcatacgaggcaagaactggtggtgctctcgagggggtaccgcccaggcgcaggggcgagggtcaggataatatgggaaagtggcaggataactttgtctcgtcacaggggcggcagggtggtggcaacaggtttggatactccagcagaggtgcagtatctggtcaaagtggtggtggacaccagagggacaggggcaatcagggttaccgcgggggctatggtggcgtttcaaggtttcaggatgcaaggggtcgcaaccagtctaatccatcaggcagaggtggtgatggtggtgcacgcatggtgaacctgaacagggttggtagagtttagaagtgataattttcagctcaagtaatcctgaaattctcctaaaagccaagttctgaatcactgcattttacatagtttcctgttctgggctgagtcatctacctgtttcctacatttcgttgtagccttttaaattaaggggctaagaaattgaactaagagtttggtactgttttgtgggagtgtgacgatgtattcgctccaatatttgatatctatccgtgacacttgctataaactgtacttttctttgtgttatgtggtgttcattgggttatgaaaaagaaaaaggcatgtcgaagagagaagatcgttattctattcgcgttcggtaaggtaagattgtgtgagcctatct

SEQ ID NO: 14611 - DNA, 1578 bp, Zea Mays
tctcctccgaaacataaggttcctggagatgttcttttagttcaaaggggaaagtgcaaattcacaaagaaagcaaagtttgctgaagctgctggtgcttctgctatagtaatcataaaccatgtccacgaattgtacaagatggtctgcgaaaagaatgaaaccgaccttgacataaatatacctgcagttctcctaccaaaagatgcaggttctgctttacatacacttcttacaaatggtaacacagtacttggtgcttcctactggtcagcatggagtgctagagaagcagttattgaacaagagaagctcctcaaggatggccatgaagacctactgaatgttgaggccagaggttctagtggcatggtagatatcaatgtggcatcagcgataatgtttgtggtggttgcgtcatgcttcttaataatgctttacaaactgatgtcttactggtttgtggagctactggtggtaatcttctgcattggcggtgtagagggtctacaaacatgcttggtggctctgttatcaagatggtttaaacctgctgcagaatcttttgtgaaagtaccgttccttggagccgtttcgcatcttactctggcagtttgcccattttgcgttgcatttgctgttgtgtgggctgtttttcgccagctcccctttgcttggattgggcaagacattctgggtattgcattgatagttacagtcatccaaattgtgagagtacctaacctcaaggtgggttcggttcttctcggctgtgccttcctgtatgatatcttctgggtgtttatctccaagagatggtttcatgagagcgtgatgattgtggttgcgcgtggcgacaagaccgacgaggatggtgtgcccatgctgctaaaaatcccgcgaatgtttgatccatggggtggatacagcatcattggctttggtgatatccttcttcctggtcttttagttgctttctcgctaagatacgatttttctgcaaagaagggcttacggtctggttactttttgtgggcaatggtggcctatggctctggacttctaatcacatatgttgcgctgaacctgatggatgggcatggacaacctgcccttttgtacatcgtgcccttcactcttggcaccttgatcgcgcttggatggaagagaggggagctgcagaacctgtgggcgaggggagagccagagagagtgtgcacgcatatgcatatgccgctgctgccgacgaccccaaactaaccacagggtcagtagaaaatcagcaagggttcctagcttctgcaaaatattgtatttgcctgctggtaatatgcaaaccaaatcatgccagtttaaaaggaggcactgcttcttggagacagcaaagtctgattgtgagctaactgctgcccaatgtgcagccatgcatgtatgtaacagcacaacaataaattgagcctgtcgaacagaaatgtatgagccgtgcatagcagcagcataaaaatactctccattcttttttaatttttttatttgtcgttttttgaaacaataggcgacaaatattcaagaacggag

SEQ ID NO: 14612 - DNA, 100 bp, Zea Mays
tgattgcgtgcaatggctgctagaagcctttctttttctttgtctgctggaagggatctccggaattctagcatcttagcaccttcgggtgattcctgtg

SEQ ID NO: 14613 - DNA, 2121 bp, Zea Mays
tatcaatttatgctgttgtttcttccacttattgcagttcctgttatgtgctatatcagtgaaccctggataaatttggcggcggcggctgctgctgctagtggaaagcctcagaaggcatctgctgctgacgatgatgacatggatcccactcaatactacgagaataggctcaagactcttgattcactcaaggccgcaggtgtaaacccctatccacataagtttccggttggcatctctgtagtggaatacattgagaagtacaagaccttgaacaatggggagaagcttacagatgcgacagaatgtttagctgggaggatcatgaacaagagaacatcatcatctaagctattcttttatgatctttatggtggcggcatgaaggttcaagtgatggctgatgccaggacctcagagttggatgaagcagaattctctaagtaccactcgagtgtgaagcgaggtgatattgttggcatatgtggttatccaggaaaaagcaaccgtggggagcttagcctgttcccgaagaaatttgtcgtgctctctccatgtcttcatatgatgcctcgacagaaaggtgaaggaagttcggtgcctgtatcgtggactccaggaatgggtaggaatatcgaaaattatgttttgagggatcaggaaactcggtatcgtcagagatatcttgatataatggtaaaccatgaagtgaggcatatcttcaagacacgatctaaagttgtctcatttatccggaagtttcttgatgaccgcgaatttttggaggtggagactccgatgatgaacatgattgctggtggagcagctgcaaggccttttattacacaccacaatgaattaaacatgaggctttttatgcgcattgctcctgaattatatctgaaggaattggttgttggtggattggaccgtgtttatgaaattggaaaacaattcaggaatgaaggaattgatttaacacacaatcctgaattcacaacttgtgagttttatatggcttatgccgattataatgatttgatggagcttactgaaaccatgttgtcagggatggttaaggagctgacaggtggctataagataaaatatcatgcaaatggagttacgaactcaccaatagaaattgatttcacacctcccttcagaaggattgatatgattaaagatttggaggctatggccaatctcaatataccaaaagatctagcaagtgatgaagcgaatcgttacttgatagaagcatgtgctaagtatgatgtgaaatgtccacctccccaaacgacatcacggttgcttgacaagttgggcatttcttggaggagacatgtgtgaatccaacatttatcatcaatcatccagagataatgagtccattggcaaagtggcataggtctcgacctggattgactgagaggtttgagctatttgttaacaaacatgaggtgtgcaatgcatacacagagttaaacgatcctgttgtgcagagacaacggtttgaggagcaactaaaggatcgtcaatctggtgatgatgaagctatggccttggacgaaacattctgtgctgcccttgagtatggtctaccaccaacaggtggttggggcttgggaattgatcgcctcacgatgttgcttacagattctcagaacattaaggaagttcttctatttccggctatgaagcctcaagagtagctatccgcatagccaaaagcaacaaaatggcctcagccaaaggccacaaaagggttattaaccagaaactgtaacgtcacagaaagttcagtttaacttcgaatggagttttttggaggttgcaaatactctgggtctgggtctatccaatgtgtacgctcaagcctcaaaggcccaccctaaattgttgaaaaagcatgtgcaaaatgccttgtcatcatgatcgtggtcactttaaggtagcaattatattggctaagtcgctatttgaatgtgcaaaatgatccaaaaagtgttgtaacaacggcacgtgctgcctgaactttagcccaaaggccattccatatcagaagagaacatattgaacaataatctttttttttcttaagtccgaaggccattc

SEQ ID NO: 14614 - DNA, 1403 bp, Zea Mays
gctttttgaatgaaggaacgaacgcctctaattccatatccagaaccgagagagcttcctgccccagcacgctcaaaagacaagagcaagcacggaacacccatccccgactgtagtttgcccggcaagcaaacatctccggcagccatggcgtccactgtaacagccgccaatagcagccatggaagcgccctgcgtacccgtaccgcctccccaaggccggtcgcgggctggagctgcagacgcacgctttccacgcctgcacaccaccaccacgcgcggccgtcacccagagctcgggttgtcgccgtccgagccgccggcactcagcgggcgacctggttgcccggactggacccgcccccatacctcgacggcacactaccaggtgacttcggcttcgaccctctgggcctcggcgaggagcccgaagccttgaagtgggaacagcgacctccccgtgtggttcgaagcaggcgcggcgaaattcgacttcgcgaacaccacggcgctcttcttcgtccagctcttcttgatggggttcgctgaaaccaagaggtacatggacttcaaaaatccaggatcgcaagcagaggaagggacattcatagggttagaggctgcactcgcaggtcaacagccaggctaccccgggggtccactgttcaatccactaggactcgcaaaggatatagagaatgctcatgacgagaagctcaaagaaatcaagaacgggaggttggcaatggtagccatgcttggcttcatggtgcaagcatccgtaactcatgccggccccatcgacaatctcttgacacacctttcggacccgttcaacaaaaatatcattcacacattctcctcttcctaagtactcgtcccaatgcccggatgctatggcacaaaaaggtcacaatgtttttgaacacaacagaacaacatgattattgatttacgtccttctccccaccgaataggggaaggaaggttagggaagcgttcaatcaattcaatgagatagtgtaatctatagcaaactcagatacgctatgatgtgagatgaagcgtacttcgtgcaatcaataagttccatttattcatatggacaacaaagttcctctctgatcattttgaaacaacaattcatattaatgaaatatatcaaagatttgtgtcgttatacttatggaagctccgtccggagaagatgctacaagtgctaggttaccaatggtcgatccctgtagcgctggcactatttacctatttataggactatgtcaatgtaaatttttatatggagttataagaatatacatcctattatacaagtagctctatgtaagcgaagatgtttaattatgtcttttatggtagagacattccatatatgtcttttcttc

SEQ ID NO: 14615 - DNA, 1466 bp, Zea Mays
gtaagactgtacactgtgaagcaatggagaattagctgcatgggcataactttaggcttgaaatccatgctctggaacttgatccaggatatagagcccttggacctaagtgtcatccagaaagatgttgctcctgaaacagtagatgcaatgaagaggactatttctggcatgttgggtcttcttccatctgatcagttccgtgtcattgtagaagccctttggaatcccttcttcaagttattggtatcttcaattatgactgggtatactctgcgaaatgctgaatacaggctttcttttgaaagaaatctagaactgcctgaagaaggtgtagaatgcctaaaaagtgatgtcactgaagataatcatcataacatcaatttgggaagacctgtcactatttttagattatccgaagaagacatgcctcaggaccctggaaaaaccgatgaagcatcatcttatgaaaatatgggagaagagcttggtgacttaacaccacaggcagaggagtatattattcagatgcaatctcatttgaatgccatgaaaaaggagttacatgatctcaggagaaagaattctgccttacagatgcagcagtttgttggggaggaaaaaaacgacttgctggactatttgaggtcattaacaccagagaaggttgctgaactatcagaatcgacgtctcccggtgtgcaagaaactattcattctgtggttcatggtttgcttgctactctttcccccaaggtacattcaaaggcccctccaccgctagataacatttctggtggtgttctaaaccttgggggcgaggatgatgatcgtgcagaacttgtggagaatgcttccctcccatttcagcccctaatatctgttccccgtgattatcttgcacgtttgctgttctggtgcatgctgctgggtcactacattcggggtctggagtaccggttagagcttgctcggcttctgcgaatatccagcgtgggttctttctctggtggagatgatcatgttgtttgagggtaccacgtctactgatattcctcaccgggaagaatggaaaggaaagccctggtcaagaaatgggccatatggcagagctgcagaggtgtccgttacactgctgagctatatagttgtagttcctgtatattcagaaaacagtcactcggttgtaaagctagtgttacatatgcacgtgaaccattttctttttcttcctttgatgttgtgccgtataaaaagaatttggtggttcgttggtgtttatctcgtggtagcataataggcatccttgtattctagttgtatgtttctggtggttgtgactgctgtccagtgtccatttagcttttttgtctattcttgattcgagtaaagcttaacttctcattttggaggtcgcaagctcatactttcattgaattatgggtccttttgattgggctttggat

SEQ ID NO: 14616 - DNA, 407 bp, Zea Mays
aaaaaacgtgcttcagctgggctttcggggttacatcaatatttctcttcctccacttcccatcctgttcgtgactcgtgatttcgccgccggaaagccgagggagagggagcgagatggggttcgtcggcgacacgatggagtcaatccgctccatgcagatccgccaattgctcacgcagatcatcagcctcggtatgattgttacctctgcattaatcatatggaaggggttgatagttttcacagggagcgagtcaccagttgtagtggttctctctggtagcatggaacctggatttaaaaggggtgatatcctgtttttgcatatgagcaaagatcctattcgcacaggagaaatagttgttttcaatatcgatttatctattttcagtaatgctcatttg

SEQ ID NO: 14617 - DNA, 985 bp, Zea Mays
tatcacctttgttgttaattgacagtctatatgcttctgttagagctatagagacaaaaaatcctgtagatgatcagcagtggctcacttactgggtgttgtactcgtttatcactttgtttgagctaacttttgctccaattatcgagtggcttccattttggtcgtatgcaaagctgttctttaactgctggttggtcttgccttggttcaatggtgctgcctatgtttacgaccattttgtgcggccaatgtttgtgaaccgccaaatagtgaacatatggtacattccaagaaatgagaagctaggtaaatctgatgatgttctgtcagctgcagagagatatattgaacaaaacggaccagaagcatttgagaagctcatcagcaagtctacgaagtcttcgaagtcaaggaacacaaagcggttgaacttggaggatggagaggctgaaaatcgagctaaagccgagagagaatcgtggggcgaaaatcccttctacgacaaaaactacagatactaaaccagttcaaaatccactcagcagtttgaagatgaccttgctcacgagcctcatgcaagctatagttgcgtcggactgaagacgacattcccatatttctgactctgaatattgtaccttgttacatccactgctactacataatgatgagttctagagcaattgtggactgtgtaaatggaggtagatgctagcgttaatcgtttatgtgctttttggatggtgtccttatcacccgttttactacatctttagcaaggagcgagccttgattttcagtttggctttcgtatttttgtaattgaatgctacttttagataactgaaatatgagggagttcgagcttctatgaagaaacttaacatgtgctaatgcatagagtgccaacaccgttatcatcgtcacaatttttgtacagggctcttctacaatgacttagagcaaggtggatctttgcagc

SEQ ID NO: 14618 - DNA, 702 bp, Zea Mays
gccgaggcccccagccaaacgcaagacgcgtcccacgactacacgagatgccctagcacgcagcgcccgccgcccccaactgactgaacggggcgtggggctcccacgcttcccgcccacgcgccgcccacgtttccttattctccaagccacggaaaccttctcgaacctcccctttccccattctaccccttctccaccactcgcccttagcccttttcaggggcagttccgtacttgcgcgagctccacgcgcccacgcctggttctagtggtctacagaacaaccggggtccctccctgcgaattcgccgcaagtccaaaggcaaagggcaaagcagaagttgcggttggcctcgtcctcctcttctccgtcgcggctcagatctctgcgtgcgtcgatggcgtcgttctcggaggctccccccgggaacccgaaagccggcgagaagatctttaagaccaagtgcgcgcagtgccacacggtcgacaagggcgccggccacaagcaaggtccaaacttgaacggtctttttgggagacagtcgggtaccactgcaggctactcctactctgcgggaaacaaaaacaaggctgtagtctgggaagaagacactttgtatgagtacctgcttaaccctaaaaagaggcatcgaaaaggatgaaagggggtaaggtgatgggctctaatggtattccaat

SEQ ID NO: 14619 - DNA, 4099 bp, Zea Mays
gttgctgttcccctgcgaggcccgcgtctccccttcgtctcaacacccaccgcctcctcgccggagccagtaagcttccggcgaagaaatccggcgggcacatcacaagggggccgagcagggggacctaggcgagcgccggaatgggggccagcgcccgggggctcgccgtcgtcgtggctctagggttagataggtgtccgtagcttttttcttcgctcgccctcccccacgcggccagggtgtgcagccccggcgtcgcattgggtcccgggacgaccgtaaggccgcgtgatccacccgtgctcgagctcggacagggtcccggttgcgtggcatgggggcatctcttccgcctgctcccgctgcctgcgagtttggcaccgtttttgagctctgaagaggaggaggtggtggcagcaggcaccgatctggatgccatttcaagtcatggatccgaggcaccacctctcccagttcaccaatacaaccgtagctgcgtcctccttctctgaggagcagcttcgccttcccacagagaggctggtgggtttttggaagcaggagtcgttgcatcacattgggagcaagtcagttgcatcttctccaattgaaaagccccaacccattggtacaaaaacaatgggtcgggtagatccacaaccatacaagccgagaggccagaagtctgcatttagccttgaacacaaaacttttggtcaagagaggcatgttaacatgccaccatctctgtggagagctgatcaagacccttatgttcaatctgattcatctttatttcccgatggaaggagtactaatccatatgaggcctacaacgagaatgggcttttctcaagctccctgtcagaaatttttgacagaaaattgggactgagatcaaatgatgtgcttctacatcaaccacttgaaaaggttgaaccaactcatgtagatgatgagccctttgagttaacagaggaaatcgaggctcaaataataggaaacatacttcctgatgatgatgatctactatcaggtgttgatgttgggtacacagcccatgctagcaatggtgatgatgttgatgatgatatattttacactggaggtgggatggaactggagaccgttgaaaataaaaaaagtacagaacctaacagtggagctaatgatggtcttgggtcgctaaatggcacaatgaatggtcaacatccatatggggaacacccttcaagaactcttttcgtccagaacattaatagcaatgttgaggattctgaattaaaggtcctatttgagcattatggagaaatcagcaacctttacactgcctgcaaacatcgcggttttgtaatgatatcttactatgacataaggtcatcatggaatgccatgagggcacttcaaaacaagccactaagacatagaaaacttgacatacattactccattccgaaggataatccttcggggaaggatattaaccaggggatgcttgttgtatttaatgttgacccgtctgtaacaaacaatgatatccataagatatttagtgactatggtgaaataaaagagattcgtgatgcaccgcaaaagggccatcacaaagttatagaattttacgatgtcagagcagctgaaggtgcagttcgtgctttaaacaggagtgatcttgctggcaagaaaataaatttggggactgttggtctgagtggtgttagacgattaacacagcacatgtccaaagagtcggggcaagaagaatttggtgtatgcaaactgggcagtctaagcacaaatagccctccattgccttcattgggttcatcttatatggtagccatgacatcttctggccgtgaaaatgggagtattcatggtttgcattctggactgctcacatcaatgagcccgttcagagaggcttcttttccgggcctatcatctaccataccacagagcctgtcctctcccattggaattgcatctgctacaactcatagtaatcaggctccccttggtgagctcagccactcacttagtcggatgaatgggcatatgaattatggttttcaaggcttgggtgctcttcatccccattctcttcctgaagttcacgatggagcaaataatggcaccccgtacaatctaaacaccatggtaccaattggtgtgaatagcaactcaagaacagccgaagcagttgactgcagacatcttcataaagtgggttctagcaacctcaatggacattcatttgatcgtgtcggtgaaggagctatgggattttcaagaagtggaagtggtcctgtccatggtcaccagctaatgtggaataattcaaataacttacaacgtcatcccaattcccctgtgctgtggcaaaatccaggatcatttgtaaataatgtaccgtctcgctccccagcacaaatgcatggagttccaagagcaccatcacacatgattgagaatgtccttccaatgcatcatcatcatgtgggctctgcgccagcaatcaatccatcactttgggacaggcggcatggctatgcaggggaattgacagaagcatcaagttttcatcttggcagtgttgggagcttgggatttcctggtagccctcagcttcatggcctggagctaaataacatattttctcacactggtgggaatcgcatggatccaaccgtgtcttcggctcagatcagcgcaccatctcctcaacagagaggtcctatgttccatggaaggaatcctatggttccccttccatcatttgattcacctggtgagcggataagaagcatgagaaatgactcaggtgctaaccagtctgataataaacggcagtacgagcttgatgttgaccgcataatgcgaggggtagactcacgaactacactgatgataaagaatatcccaaataagtatacctccaagatgctcttggctgctattgatgaaagtcataagggcacttatgactttatttacttgccaattgattttaagaataaatgtaatgttggctatgctttcatcaacatgaccaatgctcagcatatcattccattttatcagacttttaatggtaaaaagtgggagaagtttaacagtgagaaggtggcatcacttgcttatgctagaatccaagggaaaacagctctgattgctcatttccagaactctagtttgatgaatgaggacaaacgttgccgccccatactcttccactcagatggtcctaatgcaggagatcaggaacctttccctatgggtacaaacatccgagccaggtctgggagatcccggacttcctctggtgaagaaaatcaccatgatatccagacagtcttgaccaacggtgacacttcttccaatggagctgacacttcaggtcccaccaaggacactgagtagctgaactgcagcttgctgcgttgctgaccacaaaggcccaaactataactttttgcaaacccattttcagttctttcccccctttcccattttggttctgttttgtaaagtctcccgatctgtatttattgacttccacgatgcgggtcaccgaagacttaggttgctgcaaaattttgtccctgacgggaagctatatgcaagagggtggtactggctatgtgcttgttaacctgaaggccgagaaaggtgaaaagcgcagggagagcctccagattttggtcgctgtaagaattaaccccatgttgtacagcaggtcccagtaacttgtagtgatgggagagtggagtcattttcatcagtttttagtggtggttgtgtggagaggaagagtcttgcctgcgttttcttttggaaccttctcttgtgcctttacatttttttagtcgagggttcctcttaaattgtgtgcagagggggctcaattttgttaaccggaacaaggcgcatgtgcgtcttggatcaaccccggtcttgtcttcaggcactgttaccttatttatcaaacatatgtacacctccatctatatatagtatgagttttgatgcctatctattttgtggctgtcgtctcacaaggttatttatctatatatagtgtgagtaattcttg

SEQ ID NO: 14620 - DNA, 1768 bp, Zea Mays
cttcctttatgatctccaccctctagaagaatcaaaaggtgaagaggctactgaagaatcaaaaagtgaagaggctactgagggtgaaaagcagaaaaagaagaaaaccataactgagaagtactgggactgggaattggctaatgaaacgaagcccatatggatgaggaatccaaaggaagttgagaaaactgagtacaatgaattctacaagaagacatttaatgagtttctggatccgcttgcttacactcacttcaccactgagggagaggtggaatttcggagtgttctctatgtcccagggatggcgcctcttagtaatgaggagataatgaatccaaagaccaaaaacatccgattgtatgtcaaaagagtgttcatatcagatgattttgatggcgagctgtttcccagatacttgagctttgtgaaaggtgtagttgactcaaatgatctccctctcaatgtttctcgtgagatccttcaagaaagtagaattaattatgcgtaagagacttgttaggaagacatttgacatgattcaagagattgccgagaaggatggcaaagaggactacaacaaattctgggagagctttggcaagttcatgaagcttggttgcatcgaggacacaggaaaccacaagcgtcttgcaccattgctgagattctactcttccaaaaacgagacagatttaataagtctggaccagtatgtagaaaacatgcctgaaaaccagaaggcgatctattatatcgctactgatagtctccagagcgcgaagactgctcctttcttggaaaagctggttcagaaagatattgaggttctttacctcattgagccaattgatgaggttgccattcagaatttacagacatacaaagagaagaagtttgtagatattagcaaagaggatttggaattgggtgatgaagatgaggacaaggagaaagaaagcaagcaggagtatactcttctatgcgactggataaagcagcagcttggcgataaagtcgccaaggtccagatctcgaagcgactcagctcttctccatgtgttcttgtttctggtaaatttggctggtcagccaacatggaaaggctcatgaaggcacagacccttggtgacacatcaagcctggagttcatgagaggtagacgaatttttgagatcaaccctgaccatcctatcatcaaggacctgaacgctgcttgcaaaaacgagcctgaaagtactgaagccaagagggcggcagagttgctatacgaggctgcgctgatctccagtgggtatactcctgacagtccagcggagctgggaggcaagatctacgagatgatgaccatggccctcggcgggagatgggggaggttggagacagaggaggctgaagtcatcgccagcatcgacgacgcggactcgtctgaaggtgccacgaccacgacagaggtagtcgagccctctgaggtcaggacagagagcgacccgtggaaggattagatagttctgtatgcaaggattatgccctggtgtggtgtatgagcactggatgtaacgaaagtacgaaccagagccaggatagaggaatgcagcgtttgataagaacactggtgttaaaagtgtagatctctggtttgggttgtgctgataaatttttgtaggctataaccatccaatgaaaaatgccctctgcgctttcgtgcattctttctagctccggtctttgcaaattcgttcgtaattataagtcatacttcggc

SEQ ID NO: 14621 - DNA, 2370 bp, Zea Mays
cttcctcgaggggctgccctttgcgcgaaggggcacccactcgtgacacccacggtggccgatttgttgctctgcgtccggttcttggaaggctccccccatggatgatggggcctcttctggggcttgacccgtggaggtctggcccaggctgtcaacgtccatccatatataggatcgggtggcagctgctgcaaggggcctcgtggatcaactatccatgcctgagcgcctccacggattctatacaacgtgctggattcgcaagcccaacacctatccaagcccagtcatggccaattgctatgcaaaatcaagatgtagtagctattgcaaagactggatcaggcaaaactcttgggtatctacttcctgggtttatgcatatcaagcgcctgcagaacagcactaggaatggcccaacagtgctagttttggccccaacaagggaacttgcaacacagattctggatgaagctgtgaaatttggaagatcttcaagaatttcttgcacgtgcttatatggtggtgctcctaaaggtcctcagttgagagatttagatagaggggttgatgttgttgttgcaacacctggaaggttaaatgacatcttggagatgcgaaaggtgacaattggaagtgttgattcacttgttgctaatagttctattactcagcatgtagagatcataacaccctcagaaaaacaacggcgcctggagcagatattacgatcccaggattcaggttcaaagatattaatattttgtaccaccaagaggatgtgtgaccaacttgcaaggacactcaccaggcagtttggagcttcggccattcatggtgacaagtcccaaagtgaaagggagaaggttctgaatcagtttcgatctgggcggtctcccattttagtggcaactgatgttgctgcgcgaggtttggacatcaaagatatcagggtagtgatcaactatgacttccccactggtgttgaagactacgttcacaggattggcaggacaggaagggctggtgccactggtgttgcatatacatttttttgtgatcaggattcaaaatatgctgctgacctaatcaaaattctggaaggggcaaaccaacgagtgccccgtgatttagaggatatggcttctcgtggcggtggacgaggtaggaagaggaaccattgggcatcccgccctgacaggggtggttcacgttctgaactggattcaaggtacagcagcagagatggactagcatcttctgggaaatcagagagtggtcgcggcagtcgtggaagggatgataatggtagccgtggcaggtacgaccctggtgaaaccgatgggcgatctcgtaggtctactagaggccgcagtagaagccgtagcaaaagtgacagtagaagccgtagcccaagtcccaagaagtcacgtcgtcatgaaggtagacgtagcaggactaagagcaggagcaggagcaggagccgtagaaatcatggcgctagccacagcaagagtcgcagccctgtcgctagccgtaggtatgaaaagactgcttcaggatctgctcggcctaactcggggcatgcagagcacaaaagccctccaagatctcactctagggatgaccatgtgaaccactctgaccacaaggatgaccacaaggatgaccacatggaagatgggaagatggaaagggttgatcttgatcgctcgcccagcccacacgatgacaagtctgctccatatagtcctgtgtacaatggcaaagccagtggctcaatgagccccaacggtcagccagaggcaggtgccaaatttgttgaaccttctgggaaacctgagcctgcatctccagtgcgctgcagcaaaggcagagatgatgatgaggaaggtatcatagacgaggatggagagattggtgaggatgatccgcgtgcaaatgcagctgtgcagaatggtaataactgacggagagtggcctgcatcttctgtgacaaccaagacttatctgttatgcaaaatgcagtcattcccatctgcaagtcctgaatacggaaatgcatttgtgtgccattaaatatctcgtagaacatgtgatactgatgcctctgccatcgatgaaccaaaactgttgatgcatgtcatgtcatgttgttaaacttaatgacattgttgtgttctggtgttttacagccagttctgtaagtgatttatgataaaatatattgtcaggtctggaagtggtagtttatgataactagcaaagttatgttgctacggtttctatttataaagtatagaatataaaatacaaagacatgtgttctgttggttaggtgaatgcgaatatgggtttatagcaaaa

SEQ ID NO: 14622 - DNA, 200 bp, Zea Mays
ccaagtctcacacatatgataaatcatggtacagaaacgaatgtcacatctttactatataataggagttctgtacaaaataaaataaataattacatcatatgagacaatgatccagcaacccaaagttgactgggagacgacgacctcacgaactcgtcacatcatcctccatgcccctcatcctgcggtacctgttc

SEQ ID NO: 14623 - DNA, 557 bp, Zea Mays
catcagaaggttcttgcccactggcaagcacgcagttgcattaagcaaaaagatgtcacaagatcaaagcttctgtaatatcagtacaacgtgcttgccagtgggcaagaaccttctgatgtggtgccaaactcgtcactactggaggacaaatataatgacctgttgtagttttaagttccgatagttctggagtggattggtgtgtgtgtgtatccctgcaagctttctcctacaggctggagttctagttctgatacagcgtttgtgttacccttttgaactgagtggtgaaaccaatgttcactggagaggaatgtagttttcaactgagttgttgaaccttcgcgaattggagggtcaatggtctgtggagattggagaggaacgtggctttcgctgtggcgatcgtattttgtaattgtcgaatctacagtattttggtctttagcaatgatatatggaatggagatgcacgtagtttttttatgacgcgaaaagggagggaaaaaactggtaaatttcaaatggccatatatctattattatgagtttaa

SEQ ID NO: 14624 - DNA, 465 bp, Zea Mays
aactcgcagatggaaggcttcgatacatcgaactgcaaccgcgcgacgtggggtagaatataatctggtgcgctccccccggcccccgcgaacaacttcctgcttgcacgcaagccactccgaggccaagtctagggtttgggaatctgtaggaggggagaggggagcgcgctcagggtcagggaggcgaagatgatcgaggtggtgctgaacgaccgcctggggaagaaggtgcgggtgaagtgcaacgaggacgacaccatcggcgacctcaagaagctggtggcggcgcagacggggacgcgccccgagaagatccgcatccagaagtggtacaacatctacaaggaccacatcacgctcaaggactacgagatccacgacgggatggggctcgagctctactacaactaggcgccctgaccccaaccgtgccctgatttcccccacaagcttcttatcttg

SEQ ID NO: 14625 - DNA, 1466 bp, Zea Mays
cttaaatgaatacagacactgtttaacatgcggatatccaggagctatcgctcctgatgtcttggactctgatttccttgggcttcaaactttgcgccatttgatgcgtatgacccgaacatgggattcaacaatgtcaatgattcctaaaggtggtgatacaatttggggaaatctggattggtctccagaagatggcattgaatgtaaagctaagaagcacaaagccaatgatactggggtttctaaggatagcaatgggggaaatatcgaggttcaacctgaacctattaactatggaaggctggtatcttttggtaaagatgtagcagaagcaccttcttcagagattgagcagatagaatttcgtgatgctgttaaaggtaataatatcgcccattcaaatacgtcatgccgggagatctggacagagtatcacgaattaggatggggtggaataaaggcagtcgcagactacaaagtttacactgctagttctgttgtagaccttcttcattttgttgctccaaggatgatgcagcgtggaaatgttcacttttcatatggaattgctgataacttggatgatccaaaataccaacattacaaatattggtcaaaccccttggaaacgaagttaccgaatgctcctgacatggaaatattttccatgtacggagtaggcattcctactgaaagggcatatgtctataagttggccccacaggcagaatgttatatacctttccgaattgacacctcggctgaaggcggggaggaaaatagctgcttgaaagggggtgtttacttagccgatggtgatgaaactgttccagttcttagtgcgggctacatgtgtgcaaaaggatggcgtggcaaaactcgtttcaaccctgccggcagcaagacttacgtgagagaatacagccattcaccaccctctactctcctggaaggcaggggcacccagagcggtgcacatgttgatataatggggaactttgctctaattgaggacgtcatcagaatagctgctggggcaaccggtgaggaaattggtggcgatcaggtttattcagatatattcaagtggtcagagaaaatcaaattgaaattgtaacctatgggaagttaaagaagtgccgacccgtttattgcgttccaaagtgtcctgcctgagtgcaactctggattttgcttaaatattgtaatttttcacgcttcattcgtccctttgtcaaatttacatttgacaggacgccaatgcgatacgatgttgtaccgctattttcagcattgtatattaaactgtacaggtgtaagttgcatttgccagctgaaattgtgtagtcgttttctttacggtttaataacaagtgacggagcagtacaccaagcagaaaaagatccacttctaaaccagttttcattgttttagagaaggtttggacaaaatatgccacttt

SEQ ID NO: 14626 - DNA, 899 bp, Zea Mays
gaccgggaccaggcacaccacgcacgcagagccctagaggcattcccaagttcgagcaatcgagccccagaggaacgactcctgccggacgccgccacaccatctgaaactgacggcggcgggcggccgctgcttcctctcccttctccgttcagatccggctactggcgtccctcctccgccatcttccctacccccgacgtggcgacgagctgtgagccgtgagctgttccaacattcctgaggtcatctccgtcatcaccaacgatggccgcaacatcgtgggtacgctcaggggattcgatcaggccaccaacattatactcgacgagtcccatgagagggtctattctagaaaggagggagtccaacaacttgttcttggtctgtacattatcaggggtgacaacataagcgttgtgggcgaggttgatgaagagctggattcaagattggatatgtcgaagctaagggcgcacccactgaagcctgttattcactgaggtccgagtatgtctttgggtaatatgtggactggatggatgggtcactgttgaatgcaggatgtagcatcatcatggtgaggggactgagtaatatggacatgtatcttgcgtattgtgcaatgaatgtgttggctgttgggtcgcttgcctacgcattctgtaagattgcagttaccattaggaactgaactcaactcgactgaattaatatcatttggctctactcgtagatacagtatgcttgatttgactcgaaatttgaagaatgaaagaaataggactcggaaacagtgaaagtagcatagtaaattatttggatccacgcaaattaattccttggtagtaagttggctactttgttctaagaatatattataaggatatacttctctg

SEQ ID NO: 14627 - DNA, 579 bp, Zea Mays
aatctatctattctaccccacctgacctgacccgccgtgcctcaaccggttccgcgcggccaacgcgtcttccggtctgccccgtcggcgataatccgccgcctagcaaagcggccgagccgagccgatggcgctggcgctggccgggctcccccacgccgcttcccgcctcgtgcctcgtgtccgccagcctcccttccgcgctctctgcgccgcagctgcggccggcgatgcctcgaagcggatgctggtactgtacaccaagccggggtgctgcctctgcgatggactcaaggagaagctccacgccgcgtccatgcttgctggcacgccctactcactcgcgtctctcgagctccaggagagggacatcacgacgaatccggagtgggagcggctctaccagtacgagattccagtgttggccaaggtgctccccgacgggaccgaggaagtacttcccagattatcgccacgtctaagtgttgagctcgtacaaaagaaaatttattttgcgtttgatcagtagggagaccgttctgggggaaacgcgaatgttgttgctggcactgcaatact

SEQ ID NO: 14628 - DNA, 1548 bp, Zea Mays
cttaaaacaatttaacaattgggcaagagtggaaatttggagacagcagaacggcaccataactgctcctaatctaagcaccatgagtgccctctatcagtgtaggcttttttttcctcagcctttgtctccttccctcccccaaactttattccaaagcttttgcacttcttgtcaagcaaaccaagcaaaaacaatttgcaagttgccaagacatctcctgcactccttgcttatataaaaacccaaggggacgcaggagggacaaagggcccccctttcacagtttccctcccccaaaactactttcccacaaacccagaccagagcagcttgcgtctatcgtttcttttcttgcttgagagcttggaatagcggggggtggaggaagcggaagaggagcttcgttttgtgttctagagggagtcatgttccatggcggcaggcctctgtccctccgggggtctctcaaggcgcttgaagctgatatccaccatgccaacaccctggcgcatgctatacacagggcgtatgggggtgcctgcgtgcagatgaggctgtcctacagctccatggctccaatctttctcaaccttatccaatggatggactgcagctgctccctgtcatacacgctccctagctaccttggcctgctcgaggttctcgtctacaaggtttatgtcgatgaagatgcctccatatccaccatagaaaggagggcgagcctgaaggaattctacactatcatataccctttcttgcaacaactggaggacaacttgatggacaaggactgcaaggacaaagggtggtctgctgctgccgccgccggcggcggcggcggtcggaagcttgttgccgaagatgacagggaggatgagtgtggcatttgcctggagacctgcaccaagatggtccttccgaattgcaaccatgccatgtgcatcaactgttaccgagactggtacacaaggtcccagtcatgcccgttctgccgcgggagcctgaagagggtccggtccagagacctgtgggtgctcaccggcgacgacgacgtgatcgacacggtgacgctggagaaggagaacgtgaagcacttcctcagcttcatcgacagcctgcccctgatcgtccccgacaacatgctgctggtctactacgactacctagtctagcaaggctcctccccccaccccccactctgaagctctggaagaggaagggggtctgggaagaagacgcggcgtacaagcgacaagggttacccgcagccgaccatcctctgcggatcgagttggcaaagcgaagccgttgccgaccaacagacgatactctcgtgggcatgccacgccgttgcgctggctttattgcatggtggcgttgctcgctgtaatggttgtaaataaagaaggaaaatgtctcgggttttatatataatatactagcttgacatttctcgtctggcgaattgccggactgttcagaatgaagaaatcagggggcctctacttctctgctctatatatatcgtcttcaattctcgtg

SEQ ID NO: 14629 - DNA, 882 bp, Zea Mays
attgtgctctctgtgcatcccagatgctgggtgtggcgatcaatttcgtgcgcaaggatgacatccgtatactgagagatatagagcagtactacagcacacaaattgacgagatgccaatgaatgttgctgatcttatttgagcagcaagaggatcgggaggggagcttcttgtgttggcttgaggcccttggcgcgagtgtggctgtggactggagcagatgggctttgtagttgggtgtggagcagagattatttccgtttttgccatggcatgaactgtatatattttagctcgctccagctcatgtaacactttgttgctgcgtttgtgcttgggatacgaagacctgtgttgatggcttcgttagtgtgacactgatttggcgtcggatttttgtttgtcatctgtcattcctgtgctgatctgaattgctgtttgtttattattattattattacaattactatcaattattatggttgactggtattacaattactatcaattattatggttttgactggttgcagagccgagaattgtgattctgtgcttattacatgaacctatgcttttcgtagcaggatttattattactaggggcgccctatccagcattgggaaagcatgaacaagtaattatacatgctatatttaaattagttaattagttagaggatgattgaatcttcaacaaaacagtttaatctggagaggaagaaagcaaatatcaaacaacacacacacgcttatgcttgataggaaacacattatgattgaatgaatgcaggttcttgatttcaaatacttatgctcggcagtagaaatccatacttatgctcggcattagaaatcctcggcacacgctgggtcgaacc

SEQ ID NO: 14630 - DNA, 1117 bp, Zea Mays
agggggaaaaaaggtgcagttggcgtgatggctgtcaggctgctgcgtctgctcgagcctcgagcggaggcaccactaccgcactagcactggagcaggtcctcgccgtccacaggcgccagttcgtctcccggataagacgataattcgagccgaaaaatatcaccacacagacacacaggtacgcaaggcacagcccaagaccaccgcaccgcacctgcacaccgccagggatggcggcaaccgcgcacctcaccggtgtcctcggcgtgtcgtcgccgcctctcgctccgtcccactgcagctgcagcggcgccaagaagcagagctgctcgctgcgtcaggggcggcagcagaggaggcgcctccgcgtcgcccgcgccgtcgaggtggacgcgccttccgccggcgcgccggagccggaggaggcggaggagccgtccgtcgacttcgcgttcgtcagcgataaggttcttctcaactgctcagggggcggcgtgtgcgggacctgcatcgtcgaggtggttgaaggcaaggaaatgctgtccccgaaaactgatgtggaaaaggagttgctcaaaaggaaacccaaaacgtggagattggcgtgccaggcaacggtgggcaacgcagattcgactggacagatgatcattcaacagttgccggagtggaagatacacgagtgggacaagtaggggttactgctttactggtcttgaagagtgctctcgtggccatactatagattacatgcagtggaaatgggaaaaaaaggaataagaagcagctgatcagtggaagagctggtgcagattgattgatgaagcttttcatactccaaacaaacaaacaaaaacctgggcatgttttttcaccatttgtagcaaccgaaaggagcatggatcaattagccccgttctgtaaaccgttcccttatacacaaaaaaaaacaaaggcgacttgttcatgatcatcgaaagacgtgattttttttttgttcgaaaaaacaagactgttagcgttgctatggcctatgtgtggctattggcgcgggaagatgatgttgcagcttccgataggcctttctgggctcagcccaacaggtactactcag

SEQ ID NO: 14631 - DNA, 81 bp, Zea Mays
ttaaattaaaatatttgagttggtattaatcattaacaattatttataaaatgtgtatgttagaactataaattagattaa

SEQ ID NO: 14632 - DNA, 706 bp, Zea Mays
tcttcctcagatgttctccttcctgcgcgacgccggcgacgcgccgctggagaaacaccccaagctcaaggcccacgccgtcaccgtcttcgttatggcatgcgagtcggcgacgcagctgaggagcaccggcgacgtgaaggtgagggaggccaccctgaagcggctgggcgcgacgcacgccagggcgggcgtcgccgacgcgcatttcgaggtcgtcaagacggcgctgctggacaccatcagggacgcggtcccggacatgtggacgccggagatgaaggcggcgtgggaggaggcctacgaccagctggccgccgtcatcaaggaggagatgaagaacgccgccgccgccgaggagcagacgaagaacgccgccaccgccgcggaggagacgacgaacgccgccgccgccgaggaggagacgacgaacgccgccgcggctgttgatgcttcctagctcctagcctagcctcctgctacgctcctctgctagcgaccgtggcacgcgcaccgctgcgttaatgggtgtttttggactgctgctggcctgatacctaactacggagctgtcgctaatgctgctgcatttttgtttgtcgaccgcatcatttttgtgatgatgaataaaatattcagaaaaggcccgtcatgcgagtgaaatttgactgaacgtcgtgagaatttaaggccgaaacagtgacat

SEQ ID NO: 14633 - DNA, 445 bp, Zea Mays
ccccacctcactagctcgctccagacacaatctcatcgtcatttcatgcatccccaaaaaattccaaaaatcgagtgaagatgaagttaacagcgcgatattccccaagcgctcgacaaattacttggataggaaaatcactaccgatctcgcggattcgagtcagccgttgaaacggtacgtgaattaaccacgtgatgcggagaaccaaagctgagtcgaccacaagatgctggaaagcatgagcttctccgcaagataatgttgatgaattaacccgaagatggatgaacgaagcaagtatcggaataaaggctgatcgccaagtggtcgtcgtctaacaaacttaacgtagtgtttattccaggcaagccccggtgcatgcaaccccttccttgtgattttaaattatttttacacagtttaagtctagcgaaatgtgcat

SEQ ID NO: 14634 - DNA, 1152 bp, Zea Mays
tttgcattcgttgccgtgcgtctcggtaattctggattccttccagcactgttgcctgaccaggtccgaaagctaaagcagctcagcgtgctaactctggcagagtcaactaagatactaccatatgatcagctcatgcaagagttagacgtttcaaatgtaagagaactcgaagatttcctaatcaatgagtgcatgtattcgggtatcgttagaggcaaactggatcagctgagaaggtgctttgaggtacaatttgcagctggaagagatcttacacctgatcagctaaagaacatgatagagactttgtctgattggttggggacatcagatagactgttgcatcaaattcaggagaaaatcaagtgggctgacacaatgagtgaggtgaacaagaagcaccagaaagaatttgaagacagagtggaagaggccaaaaaatcaatcaagcaggcagacattgacttacgggggcatgacgagtttctctctgaatctggaggaataatggattttgaagaggaccgcgtccgaccaaaaaggaggaggcaaccaccggcgtagtttcaattagcccttaccaatctctcccagaatgggacctgctgataccttgattgagacattttgacgccggagttgagtaaactttgtacatctgtcgtgtgatgcctccactgtagcgagtctgtttattttgccttctggtcttggtggggacgtacaaggccaaacctaggcgttatgttgcatttatttggtagtaaatggcccatggaagaaataacgttgttatgattatggcactgggttattctcaagtgtactgaacgataacagaagcacctctgttaaatgatgattgactcgaggcttgctgacttgctgctctagaggagttagcatagctgctcaggtatacaaactgccatcatttactctgcatgcaaaagagaaccaacttttgctgaatgacaattgtgcaagacatagatcacgaaaaagaaaacgatgaacgcataagcatgttgaaatggatttcagattatttgcgttttctttcccacagttttatcttcgtcacgagaagagaaggcaaatctgaattctgcgcgaaacgttggtaatgtacttgttggaaaaaagaaa

SEQ ID NO: 14635 - DNA, 1894 bp, Zea Mays
cattcctgtgcaaccatacagaccaacatgtcactgcagccacaagagatgtgcattctaatcttcattggtaacaatggggagacatacttcaacactgccgcacttgtctcgtgtgttcaaaacttccccaagagccgtggaccaattgttggcatcctcaaaggattcgctggattaagtggtgcaattctaacgcagatttatgcaattgtacactctcctgatgatgctgcactgattttcatggttgcagttggcccaacaatggttgttatagctttaatgttcattgtaagacctgttggaggccacagacaagtgcgaccttctgatggcacaagtttcacatttgtatacagtgtctgcttgctgttagcctcttatcttatgggcgtcatgttattggaagaccttgttgacttaagccagtcagtgactgtcgtgttgaccgtgattctaatcatgtttctattagttccaatagtcattccagttctactcagcttcttttcggatgatgacgagactttgtatgcactattgttgccatcacctcggaaagaagaagcaagtgcatcaacatcttctgaggagcaacatgaggttatactcagcgaggtggaggatgaaaagccaaaggatgttgatttacttccagcctcagagaggcaaagaaggatagcagaattgcagacaaggttatttcaggcagctgctgttggtgctgtcagggttaagaggaggaaaggtccacggagaggagaggatttcacactgatgcaagcgctcatcaaggctgatttctggcttctatttttctcccttctgctgggctctggatctggtctcactgtgattgataatcttgggcaaatgagccagtcattgggttacgaggaaacccacatatttgtgtcaatgattagcatctggaactttcttggacgtattggtggagggtatttctcagagattattgtcaaagattacgcatatccaagggcgatcgcattagcgatagctcaagtcctgatggcgatcgggcacttcaacttcgcgatggcttggcccgggacaatgtacatcggcacgctgctcgtcggagtaggctacggcgcgcactgggccatcgtgccagccgcagcctcggagctgttcggggtgaagaacttcggagcgctgtacaacttcctcacggtcgcgaacccagcaggctccctggtcttctcgggggtcatcgcgagtggcatctacgacagtgaagcagcgaagcaggctcagcagcgccacaactccacgtcgctggcgatgagtggcagagtggctggcatggtctctggagccgctccgtcgttgaagtgcgagggcgccgtctgcttcttcctctcatcgctgatcatgtccgggttctgcatcatcgcttttggcttgagcttgatcctggtctaccgcacaaagatcgtgtacacaagtctatacgggaaaccgcgtacttgaaggatcaaccctaaagggacacagggttatcaaagcatacttcaatttttaatttattagtctggtaccccatgcctgtacaggtacagtgtcggtcttcccgttgttgtgcacaggttctcaagcagcatttcaacttttcaagtatgtggctgcaaatgggagcttcagtatagcgaagcatgtgagagtagaaagtccgtctgtggctggactgggacgctgtccttggctcaagttttgctgtatttggttgtgaaaaatttgtgtacacatgtaataagctagagacgtttcgacgcatgtcagagtggagaacatattcttttatgatttgttgaaacttgcgtatttgtatctatcacaaagaaaacagtccaacttgtcaaccggc

SEQ ID NO: 14636 - DNA, 2285 bp, Zea Mays
cggggttctccccaattttgctccatgcggtgcggcgttcgatttgttcagtccgccatgattaagcaaatcctcggccggcttcccaagaagccgaccaaggccggcgagaaggagctggccggcgcgggcccgtcgctgcccagcccgacgtccgacgcgagaaccaccaccgatctgaccgcgtctagcaggcttgtcagccccagcaactacgcctccgcggcaacaaatccaggccagagctacgcgcccagggccgccgggctcggcgccggcgccagcaacgggttcgcgggctcggcggccgggtacgaggcgctgccgagcttcagggacgtgccggcgtccgagaagccgggcctgctcctcgggaagctggccatgtgctgcgtggtgttcgacttcgcggacccgaccaaggacgtgcgggagaaggaggtcaagaggcagacgctgctcgagctggtggactacatcacctccgccaccagcaagttcccggagcccgtcgtgcaggaggtcgtcaggatggtgtctgtgaatctgttcagggtgcccacccctgccccgagagagaacaaggcgctcgagtcgttcgacatggaggaggaggagcccgtcatggaccccgcgtggtcgcacttgcagatcgtgtatgagctgttcttgaggtttattcagtctccggagacggacgcgaagctggccaagagatacattgaccacggcttcattatcaggcttctcgacctcttcgactcagaggatcctagggagagagagtacctgaagacgatccttcacaggatatacggcaagttcatggtgcatcgccccttcatcaggaaggcaatcaacaatatcttctaccggtttatattcgagacggagaagcataatggtatcgcagagctgttagagattctggggagtataattaatggctttgctttgccgctcaaggaagagcacaaattgtttctagtccgagcgctgattccactccacaaaccaaaatgtgttgccatgtaccatcagcaactgtcgtactgcgtcactcagtttgttgagaaagattgcaagcttgctgatactgtcataagggggttactcaagtattggcccatcacaaatagctcaaaggaggtgatgtttttgggtgagttagaggaggtgctggaagctacacagccagcagagtttcagaggtgtatggtgccacttttccgtcagattgcccgctgtttaagcagttctcactttcaggtggcagagagggctctctttctatggaacaacgaccatatcgagggtttgatcaaacagaacaacaaggttatactgcccataatcttcccagcgttagaacgaaacacgaaaggccactggaaccaggcggttcaaagcttgagtctaaatgtccggaaaatattcatggaccatgatcccgcgctgtttgaggagtgtcacaagaagtttgaggaagaggaagcccaagaagctggcgtaaggtcaagacgggaggctagatggaggcgcctagaagaaatcgcctcgtcaaagtctcctcagtgaagtagcgcgtcctcctgaggctgtagttcttcatcagtagagttcttctagctatcttgtcttggggacttgcatattagcagctcttttggacaggatcaagtaaatgctgatgatgtagttgctggatgtcttcttgccgcctgttacttgtgaccgaacgttctacaggccgacatgtaaatacgaggcacatgatgggctgtgaagcttcaacagagcctcggcgggttctctttgccgtgtgatccactgatgacagtgtcggtttcatcatcataggacaaaggaaaggaggtaaaatggtctttttccgggtcaatgtcttgatccaaggactgttaggagcacttgaaagacgaggaaggaggcaggtagcacttgctcttgctgatggtgattttgctgaaatgtaatactatgctttatgtatgatgcatggtaacttgaagccatgtctggtgataatatgtaatcctggtgtacatgtcttttccttcctttgatgtatacagaaatttggaatgaagccctgattgaaggctgttttctacaagtttgaccccactcatgtgggctgtctttttttaaaatcaggtgtttagggtcaccggagggaggggctcctgaataggtgcaagatcagggatgcgtacgccaagtttggtgtcatgaaccgaatgtaatgttgagcttgcatcatggtg

SEQ ID NO: 14637 - DNA, 167 bp, Zea Mays
tcagactcgaccttgaccacaggtgcgacggcgcagcttccagcaaggatctactgcagacgcaacgggaagctggctctatgtgcggtcgccgccgctgccatctccgatcgaaaccccttaccttttcgtcacctgcaaaaagtcagcaatttgttgttgttagc

SEQ ID NO: 14638 - DNA, 1527 bp, Zea Mays
aaacaaatagggacaatgtttgttgttgctgtggctgattttcttatgggtgcaaattgttcagcagataaatcatgatggagaggtcaatcgagctcgctatatgccccaaaattcatttgtaattgctactaagacagttagcgcagaagtatatgttttcgactatagcaagcacccatctaagcctccactagatggtgcatgcaaccctgatttacggctgaagggacataattctgaaggatatggcttatcatggagtatttttaaagagggacatttgttaagtgggtctgacgatgctcaaatttgcttgtgggacattaaagcaaatagtagaaacaaaagtcttgacgccttgcagatttttaagcatcatgatggtgttgttgaagatgttgcttggcacttgaggcatgagtacttatttgggtcagttggtgacgattatcatcttttgatttgggacctgcggtctccagcccctactaaacctgttcagtcagtggtggcgcaccagggtgaggtgaactgcctggcttttcacccgttcaacgaatgggttgttgcaactggttctactgacaagactgtcaaattatttgatcttaggaagattgatacttctctgcacacctttgactgtcacaaagaggaagtttttcaagttggatggagtccaaagaatgaaactatacttgcatcctgttgtctgggcagaaggctcatggtctgggatctaagcaggatcggccaagaacaaacaccagaggatgctgaagatggtcctccagagctcatgttcatccacggaggccataccagcaagatctctgatttctcctggaacccctgcgaggactgggtggttgctagcgtcgctgaagacaacatcctccagatatggcagatggctgagaacatctaccatgacgaagatgatctgccaattagcgatgagccggcaaaaacttcttgaagcaacacagcacaaaaggaatcttaacttctatcgactgttgggtgttcctagatcggaaccctgctcgccggagaatcttcatcgagtgagagttggctgtaggttgcttccgtggtcgtaactttatgcttgacgggttcgtcgtttcttcgaccgtctgtatgtgtattcggcgaacctttagcaatatacatatcccgattgactagatctgtacgtcgcagttgtgttttgtagtattgttttgcagccagtaggatcatgttcgtgatgtgatttgtaacgggaacaaaataatattcactccagcgtaggccaagcgatagtcacagctcaggtcgaccgatacgcaagcaggtggtgcgtctagggctgggcactttaaacccgaacccgaagacaaacctgaatttgcagtctattcgggtgtaggttctcgggttcggtccatattctttgctagttcgggtaccggattcggtttcggttcctaagccatgcaacccgaaaatacctaataacctgaattaattcattgtcac

SEQ ID NO: 14639 - DNA, 289 bp, Zea Mays
gtctaaaggatcgataggccacgctttcacggttcgtattcgtactggaaatcagaatcaaacgagcttttaccctttttttccacacgagatttctgttctcgttgagctcatcttaggacacctgcgttatcttttaacagatgtgccgccccagccaaactccccacctgacaatgtcttccgcccggatcggcccggcgaggccgggccttggagccaaaaggaggggcggtgccccgcttccgacccacggaataagtaaaataacgttaaaagtagtggtatt

SEQ ID NO: 14640 - DNA, 1466 bp, Zea Mays
gtttgattatttggatattcacacccagcaagatactcttggattgtcagggcacctacatacatcataaggagatcagagctgcacaaggagtcaaaatatctgctcagggtctcgaacatgcaattgcagggacagccctttacgtgttaggacctgatgatgatttagacaaactgaatgaagctgttatggaagagatgacacgggttaggagccggattgacaggagtggtgaaggtgtctatgtacaggcatctacccttgggtctttggaagctctcactgagttcttgaagagccctgctgtgaatattcccttctgtgatttcagtatagggccagtgcataagaaggatgttatgaaggctagtgtcatgcttgagagaaagaaagaatatgcaactatcttggcctttgatgtcaaagtgatgcctgatgcccgcgatctcgcagaagagtccggtgtgaggatctttgtggcagatataatataccatctgtttgatcaatttacagcatacattaagaacctcaaggaagagaagaagaaagaaagcgctgaagaagctgtgttcccttgtgttcttaagattatgccaaactgtgtcttcaacaagaaggacccaatcgttttgggtgttgatgtccttgaaggaatagccaaggtgggaactcctctctgcatacccagtaaagaatttattgatattgggaagattgcctcagttgaaatcaaccacaagcaagttgatatggctacaaaaggccaaaaggttgctattaagattattgcgaacaattctgatgagcagcagaggagcttcggcagacactttgatatggaagatgagcttgtcagccggatatcaagaagatctattgatattttgaaacagaactacagggaggatttgacaactgaagactggaaacttgttgtaaagttgaaatcaatattgaagatacaatgaaaagccccctcccctaacacacctgcccatgaatttgggagttgtggttctgtggcgccacacctatctctagttctctacaccggagttccccagggagggttaccaattttgatacggtttgatttttgtaatttgctcggaaggcgcttcattttacaaccacattccgtaataacataatattttgtgtttgtttctgtacttttcatgaactctgaagcctctcaccaacgaattgtgtaatactacatgctatggaaaatctgtgctgtttacgacatggggaggccttgccttggctagtttgggaactcagatcctctctaggattgaagggaacgagggggaagggaaattagtttgtttccctgtattttccttagtctcgagagtatgcatttgagttctcaaactagccctaaaagttgtggctttacatcttgacaagaagagattaatagcttgacaagaagagattatagatccacc

SEQ ID NO: 14641 - DNA, 1226 bp, Zea Mays
gtttcttcgcccaacagatattttccagtgccgctctgaacagtgtgatgtggccgcgcgagccgcgaggagccagctagccatggtcgtcccagtcccgccgccgcctctcctcgcttcccacgtggccgtccgggccgcggcctccgccatatcccacggccgccgggtcctccttaacggcgaccacccgccgcaggtcgcggccctcgggcgcggcgactgggtcaagctcatctgcggcgccagctttgaggatgcagctgatgtcaggaatctctcccttgtctacactcttgctggagtggattgcattgattgtgcagcagatgcatctgtggtgggagcagtgaatgaaggtattgaagtagcagcatcaattgtaccaacagttcaaaggccttggctgatgattagtgttaatgatgattgcagagatcttcatttccgtaaagctgagtttgatcctgatgattgcccactggattgctcaaagccatgtgagaaagtttgcccagctgatgcaatatcactaaagcattccatggttgatggagagcgcacactatctgatcccttacgtggtaaatatgagggtggtgtaattactgagcggtgctatggatgtggtcggtgcttgccagtttgcccgtatgacagaataagagctgtgtcctatgttcgagaccctactatgactgctgaattattgaaaagagatgatgttgatgcaatagagatacataccactggaaaaggaactgatatgttcaataccctctgggacaacttgagtgggtccatcaataatgtgaagctggttgcagttagtcttcctgatataggtgaatcaactgttgacctcatgaacacaatatacacaataatggagccccattttaaagggtataatctttggcagttagatggccgacctatgagtggtgacattggccgaggtgcaacaagggagacagtttcttttgccgctcatgtggcttcaatgtcagaaagacctcctgggttctatcagttggctggtggcaccaactcatacactgttgattacttaaagaaagctggtcttttccaatcatcaaattggaattcagggaccgcaacctctgaaatggccagttctcaccaagctttaataggagggattgcttatggtggctatgctcgcaaggctggtcattagctgcaccaaagctagtaacttcccc

SEQ ID NO: 14642 - DNA, 1326 bp, Zea Mays
gatcgcaacgaatattggtagcggctcccccagctctggaccttctcaaacccttccccgtgggccgtggccgccgtctgcctgtttccagacgccttcggtgagtacagggaaggaagtcgccatggctgacgacgaacaggcggagaagaaggaggaggtccccgagcttgctccttttgacccaaccaagaaaaagaagaagaagaaggtggtaatacaagagccatcagatgaggtggataacttggcagagaagacagagagcttgactgtaaccgagtctagtgagccaagctttgcgggcatgaaaaagaagaagaagaaacatgtggaacttgattcttctcttaccgagaccggagatgttgatgacacaggagacgatcaagttagagaggatgaagaaggagaagggattgtgctcgctggtgccgctgccaccagatacccttgggaaggaactgacagagattataagtatgaagagctgcttggcagagtattcaacattttgcgtgagaacaacccggatcttgctggtgatagaagaagaactgttatgaggccccctcaagtcctcagggaaggaacaaagaagacagtttttgtgaacttcatggacttgtgcaaaacaatgcataggcaaccagaacatgtgatgatgttcttgcttgctgagatgggaacaagtggatccctggatgggcaacaaaggttggttatcaaaggaagatttgcaccaaaaaatttcgaagcgatacttaggagatatatcaatgaatatgtcatatgcaatggttgcaagagtccggataccattctttctaaagagaacaggttgttcttcctccgatgcgagcagtgtggttcatcgaggtctgttgctcccatcaaggctggattcgttgcccaagtgggccgtcgtaaggctggatcttaagctacctactacttgcctgaaatcgcttcccgatgaagacaatgcaaactagtttgctggtccacaaaaatcattgttgcactttcccttgtgcctacacagttcactggatttctgctgttcgctatacttggattggtgctgtgaatttatttcgtgtgatgagaggatttgtgtttgcggctcacttgtgtttactacgtttgttttgctcgtgattttgctgtggaaggcactgtcgggagcttcccgagttaggacgagtaacaagaaaacgtgttgcttccattcagataaaaagcaaggctgcagcattctgaactgttcctcagcttcttttccctgcacttatttgggtataaaaagctaagaagatgtgattt

SEQ ID NO: 14643 - DNA, 1465 bp, Zea Mays
caaatcgacgcccgacgccgcatgatccgtgcacctcgactgctcgccgcgcacgcgccatcgccaatccgccaccgcctatccctagccccgatctctactatctaccgccgccttccttggtcgccgcgcgcggccttcctcgccgcccaagccccaatctcgacgacgcgcctcgcgtcgtcgtcccgcctcgtccctcttctcgccctgccgatggatccggccgctcccgagcctgtccccgcacccgccaccgacaccgatgccgagaccaatggttacgaggatgcctctgaattcgaggacgcggaggctgggggcgagggcgctggggccgggaccgagaccgggaccgggaccgggtccgggtccggaacgatgccggcgggcggtgtagcggagatgaaggagctgcccgaggagcttgccaagggggtggtgtgcctcgaatgcgagacatcggccgaagcggcggtgtcgggtgttggcgggacctgccgcgtctacgtcgtcggcaccgctcatgtgtcgcaggaatcatgtgatcaagtgaaggccatcatcaactacctcaaacctcaggctgttttcttggagctctgtatgagcagggttgcaattttgacaccacaaaaccttcaggttcctactatgaatgaaatgattgacatgtggaagaaaaataagatgaacacttttggaattatctacagctggtttcttgcaaaggttgctagccaacttgaggtgttacctggagctgagttccgggtggcatttgaggaagcaatgagctacggtggcaaagttatcctaggagaccgccctgtccagatcactttgaggaggacctgggggaaaatgtcactatggcacagggcaaaatttctgtactacatcattttccagtctgtatttttaccaagcccagaggaactgaataagatgttaaaggacatggatgatgttgacatgctaacacttgttattcaagagatgagcaaggcatttcctagtttgatggacacacttctacatgagcgagatatgtatatgtcttcaacgttgttgaagtcggccagggaatattcttcagtggttgcagttgtgggaaaggggcatgtttctggaataaagaaaaattggcaacagccaattcaggtaaactgcttattagaattacctgatgctaaccaaggtccttcaaagctgaagattttggcatccattggagcattaaccggagtaataatagcatccggaatatatgtatggggtagaaagtaacagacgtgagtgcaatgtgttcaatgagcctttaaatctcgaaaaaaagtatttagtttatttacctataatctgtttcatttgttctaaatataaatagatgtaatttctgaaattgaaattaaacaaatgaaaggacaggtgcagcagataaatgaaacatttagttaaaaaa

SEQ ID NO: 14644 - DNA, 2251 bp, Zea Mays
ctagcctgcgccacatcccacatctgtgagacacgagccgccgccagaagaccaccgcgcgccccggcccttcttccacgcctccgtcttccgcgcctggccacggcccaccgccgtccgcccttcgacgcctgacgcgccccggcaccgcccaggcaaggcggccgccggtagctacggacagcccaccgcgtccgcggcaccgcccaccggcagcagctaccggcaaccgcgcccgcggctctgtacccagggagtagcctatcatggggaagaggccgaggacaactctgcggcgcacgccagcacggggccttccaaagtccaagcgggccgacgagctgccatcgatgcctgattctgacaacgacgaaattgatgcatttcacaagcagcgggacatgatccctttcgacgccaatgatgtaagggagtcggaggatgatgatgtggagcagcccgtgtttgacctcaagggtgtttctgatagcgaaagtgatgacagcaaaggagaattgtccggtgacatggctgaagctgattatgaaggatgggacaaagggtatatttcgaaattaaaaagagcacagagggctgtcaaacaaattgctggaggtgatgatagcatggatgagcaggaggatgaaacacaagaaaatgtttggggcagaggtaaaaatgcatactatgctcctggtgaacaatctggtgatgatgaggtggattacgaggaggcacaaaggatacaaaaaaataaggaaaaaaggctgtctatgaaggattttggattagaagatggtgaaagtgatgaagagggtaatgcaacaaaggtatccaaccatgaatccaaaatgaaagaagactttgctgtcttatcaggcgatgagaaaatggatgtgctatacagttctgcccctgaactcgttagcttgttgtctgagttgaaggatgcccatgaagaacttagggccataggacagctaacaagtgaggtcacgtcttgtctaggcaaagataaaatgcaaccttttgaagtgaagaaagcttgtttgcttgctcattgtcaagctattaccttctatctccttatgaaatctgaggggttgtccgtacaggatcatcctgtaatttctcgcttgatagagaccaagaatatggtagagaagataaagcaaatcactttgaatccagtgagccaaaaagggtgcgctgatgaccatagtatgcattgtggcaccatccaaacagataagatagtctcattggacaaacaggagggcaaatttagcaatgtactagcactggataaagtgaaacaaggtgctgaagtctctgaatcaagaaagagtgagccttgtaataacgattatcatgaagttaatgaacagaagaacaaggatgaacgaatgggcttgcatagccttgaaatgttgaaggtaagagcaaaccttgaggaaaggttaaagaaaaaagggctctataatttgacacgctcgaagccagagaagtcgtcaaaaaccaggacaactagtgataaaagtggcctgcagacattggatgattttgatgatgaagtgctgaagaataaccaaatgatgaagcctagcaagcttgttgcagcagctgctaaatcaaataaaagcatgtttgtttctggtgatgatgaccttccgaagagagataatatcggagaaagacggagaaaacatgagcttcgcgtcctatcaagagtaggggctaactcagcagaggatcatgagctgccagatggtgacgcttctgaagaggaggaccaccatgagttgccagaaggtggtgatgaatctgaagacgacatccatcgggatgtcaaaagaaagaggactgaaaagctatcaaccaagaatgctctgtactcgccaactccgggcgttgaacatctggaggaagaaacagaaggcgatggcaagaggacgatttcgtatcagatcttgaagaacagggggttgactcgttccaggaataagaagaagaagaacccgcggaagaactacagggataagcacaagaacaagcttgtcaagcggaaaggccaagtgcgtgatatcaagaagcagtctggtccgtatggaggtgaaacgtctggcatcaacccgaatgtcagccgcagtgttcggttcaagagttgagttgatgcaagtagtatatttagggaacaacatgatggttctacgttgacagcaaacaaaaaaagtggtgcctgatgcggact

SEQ ID NO: 14645 - DNA, 1996 bp, Zea Mays
aggggcggtgtcagtaaagcatccaaaattatcaatcttagtgaggacatctttgcaggattcaattccacattgcgcgaaggcaatgttactcaccatgaatacatgcaagttggcaaaggaagggatgtaggtctcaatcaaatatctctgtttgaggcaaagatagcaaatggcaatggcgaacaaacgctgagccgtgacatctaccggctaggtcatcgctttgatttcttcaggatgctgtcttgttactacacaacaattggtttctacttcagtacaatgattacagtatggactgtatatgttttcctctacggccggctatatcttgtacttagtggactcgatgaagcactggctactggaaagaggtttgtgcacaatacacctctccaggttgctcttgcgtcagagtcttttgtgcaacttggatttttgatggcgctgcccatgatgatggaaatcggtttggagagaggattcagaactgcattgagtgattttatactgatgcagcttcagttggcctctgttttcttcacattctcgttgggaacaaaaactcactactacggaaggacgttactccatggaggagcggaatacagagccactggacgtgggtttgtggtgttccatgccaaatttgctgagaactatcgactttattcccgtagccattttgtcaagggccttgagctgatgattctactagttgtgtatgaaatatttggtcagtcatatagaggggctataacttacatcttcatcaccgtatccatgtggttcatggtgggcacttggctctttgcaccattcctgttcaatccttctggatttgagtggcagaagattgtggatgactggactgattggcacaagtggatcagcaatcgtggaggtattggtgtggcaccagagaaaagctgggagtcatggtgggaaaaagagcaggagccccttcgttactctgggaagcgtggtactattgttgaaatactgcttgcattgcgtttctttatctatcaatatggactcgtgtatcatctgaatataacgaagaagataaccaaggataaccagagtgtgctggtttattgcttctcatgggttgtaattttcgttgttttactcgttatgaagaccgtatcagtggggaggaggaggttcagtgcagagttccagctagtgttccggctgatcaagggtctcatatttataacttttacagccatcgtggtaatcctaatagcaatccctggcatgacggttctggacatctttgtttgcatccttgccttcatgcccactggatggggtttgctcctgattgcccaagctatcaggcctgtgattcaaaagatcgggctgtgggggtcgatcaaggctcttgcccggggctacgagatcctaatggggcttctcctgttcacgcccattgctttccttgcctggttcccgttcgtgtccgagttccagaccaggatgctgttcaaccaggccttcagcagaggtctgcagatctcccgtatcctgggaggacacaagaaagaccgagggacgcggagcaaggagtagtagggctgctgattgaaggtccgtctatcgggagttatgtcgtcctggagcggtctatcaggttcagagaatattagggtccgtatgtatgtatgtgtgtgtcgcacctagcaccagtagtatgtatgtatgtatgcgtatgtaggttcagagaatattagggtccctatgtatatgtatgtatcaggattgctatggtcttttggattggaagatctgagatttgctggtgcaatggccagtatctgacatccaaatgttgaaactataattaggctctgctaatagttagctaacttacagctaacaattagtttattagctggcttacgactaagtagtcagattaaagttgggatgtcggtcgccccctttaggtttagttaggctcgttccaatgggtggcgagagc

SEQ ID NO: 14646 - DNA, 911 bp, Zea Mays
cttgatcacatttaatatacatttgacttcaggctgcaggagtgtggaaccttgctcaaattgcaaaagtaaagatcatgaaaagagctggtagcctctgggaggaacttcacattcatcacagcattcggtccatcgtgtgtctgaatttgcctagtttttctggaggtttgaatccttggggcacacctggcacgaggagagcagaagatagggagttcactgcaccttttgtcgacgatggacttcttgaggttgttggcttccgtgacgcctggcacgggctggtcctgctggcccctaatggacacggcactcgcattgcccaggcccataggatccgctttgaattccacaaaggcgcagcagagcacacgttcatgagggttgacggagagccctggaagcagccccttcccaaggacgatgacacggttgtggtggaaatctctcaccttgggcaggtcaccatgctagcaaatgagccgtgcaggtccaagagcgtcaacgaccagtcgtcactgtcgccggcgcacgacagtcatggtgattacaatgatatcgctgaggaggacgaagacgagtgggaggacggcaggaggaagtttggggcggcagatacatttaagattcctgacgagattgacattgctcatttcagttgagctttgactagtgcatcgtcgtgtgcgttctgatcatacgagtatggtttggtttataaccatctcctttcttttgatttcatatatttgcgatatgattgttgcagccatgtgtaagtgaatcctaggtaaccaagtgctgcgttgctatatatgaccaatgtatgtatagattcagtggaacggtaaaaacacgcgaactctacggttttctccttaaaaataaaaaagaaaataaaataaaaa

SEQ ID NO: 14647 - DNA, 876 bp, Zea Mays
acgcttcccatgtcacttgggccacccagaccccagtaaaaaccctagttcccttctccatccgcaccctcgcttccttttccttctctatccgcgagcctcgtaccggcgcagccatggcggaggagcccgccgttgtcgtggcctcctccagctacgaggttgacctcgggaacctcatggcgtacgatccgtcgcatcacgtcgccaccgcctccagggaggagctgagacaggagtgcctgcggaagggtacagagctggcgcaggcggtggccgacgtcctcttcgcgctgccgcccaacgaggaccgcgacggccccattatccacctcccgccgcccaccttcagactcccgcgggagaagcatctacccaagcccaagccaccgaccaagtgggagctgtttgcaaaggcgaaaggaattaccaagcgcaaaaagaacaagcgtgagtgggatgagcaaactcaatcctggaagcggactcatggctatgaccgtgttaatgatgacaaagacattccaatcattgaagccaaattgactgacgagcctggtgttgatccatttgcgcaaagaagggatgagaagaagaagagggttgaaaagcaagaaaaaaacagactggataacttaaagaaagctgcaaaggttggcgctttgccaagtcatatacagcttgctgcgaaggcgttgcccatcacaggaacaaaagctgaccttccaaaaaaatctagaaaagaggatcttgagagtgttgtcggcatggcttcatcagcaacagcaagtggtgggaagtttgatgagaagttgcctggcgagaaacctccaaagcaccctggcaaacacagaaagttgccgaagggaagggaat

SEQ ID NO: 14648 - DNA, 1408 bp, Zea Mays
aaccaaatttgtggggtctaaatttgtttagatcaagtcgtgcctatatcttaatagctatcggaccacaggatgcacagcttggaccagtgcaactaaacgctcagcaacttgaaaacacaagaaaccatatgtcatcaattgatctctccaagtcaatgatgccatcacagatgatgtcagcaccatctgctgcatcagtacagccttcattgacaaccactgctcgcagtgataatcaaagcagtgggtgggctgtacctgcacaaatggcgaacacacctggccagtctcagataactggaaatctaacctggggaaatacacctcagggtgacgcaagcttaggttggggaatggtgggacagagcaatatgaatatgccttgggtagcatcagctcaaggtgcttcaggctacaacatgggtgtagccatgccgacgcagccaaatgcagttccaaacatgggctggttaccaaatccaggaaacaccagcatgaacatgatctgggctgcaactcaaggccaggggactccaaatgcggctcctatgatgggaggtcagatgcaaggagtcccaatggccccttggggtggtgttgcagcaggaagtgcaaattcttatcctgcctggggaaaccaacaagctggaaacatgaaccaaaatgttggctggagtgctcctgtgcagggaaatccaggtcaggcaaataacaacatgaactggaacgcaccaaatggtaatcctaattggaataatcaacagagagagaatgggggcaggcactctggacaccgcggtgcttttagtggtggtgactcaggcggaaggtcatggaagtcacgctctggtggcgatggggggtcaaggggacatagcagattctcccattcaacaaacacagagggatatccatccaggactgatcggcattacgataggcagaattcaggcaacgagaggcgatatgagaatcacaatgagagaaatggtcgacagtttgataggcagccttcggataatgaaaggaaccatgataggcctgatggcagacatggtggcagggatgacgataggcaggctgataggtccgagtcaagagagctgcgttagaactggtttctgtttcttacattcgtttccttgtatgtgcagtagcaaactagcatagtagcttccgtgcatgttttgaactttatgctctgtagcgatctgcatacatgtgcagatcaccgtgtataacatttgtagtttaatgctgtgtgcatcctagttccgaatttgtaatttacttgaataaatcgtcttgtctgatttctgatgtaaagcaggggctacacgcccaggttcttggactagggttgttggagcatcaatggaagacaagggagagccagtggtggttg

SEQ ID NO: 14649 - DNA, 836 bp, Zea Mays
actagttcacactgcagctctcattttcctcaaatataccggaaagcagtctgaagtatttgctgttgcattcgcggtcctggcagctggtgctataattctgaccttgaatgttctgcttctgggggggcacatcatcttcttccaaagcctgagtcttcttggctattgcctatttccattggatgttggtgctctagtttgcatgctgaaggacaatgtcatacttaagattgtcgtggtgacaatcacattggcttggagctcctgggctgcgtatccattcatgagcgctgctgttaacccaaggagaaaagctctggccctatatcctgtcttcctcatgtatatctcagttggtttcctcataattgccattgattaacggggttgagctttgtagtaacatctgaagagttgagagtttccttggatggttgaaccaccagaatacatacaagtttgagtagacaatgcttctatccttgtaccctcgtggagtctttgtgaattgcctcgtaggaattttggtttttacatgatcttgaggcataaggttgtaaaattagtcgaaaatctgtatctgttgtaaagggcatggactttggaccactgaaatggctgtcaagctttcgtatactgcaatgtatgctgttcaaaagtcaactattcaaatattcgattattccttgaatactctttcgaaggtgcatcatgtgttagtacttaataagccgactaggattatctggacggctggagcttagtgatcaaatctttggatgaggctgtgagacacgctccttgagttctgctgcattggcaaaagaggaaaa

SEQ ID NO: 14650 - DNA, 810 bp, Zea Mays
gtcgagtcgagtcgcaccacttttacgaaccactccgcgagtagccgagcaccccagcgctcaccgacctttctccaaaccgtcgtcgcgcccgccccgtgccgcccgccatggcgccgccggagccggagatgttcgacgtcgtcatattcggggcctcgggcttcaccggcaagtacgtcatccgcgaggccctcaagttcctcaacgcctcctcatccgcctccccgctccgctccctcgcggtcgccggccgcagcagggaccgcatcgcagccgcgctccgctgggccgcggccccggccccgccgcccgaggacgtgcccatcctcgtcgccgacacctccgacccggcctccctcgcggcgctcgcctctcgcgcccgcgtcgtgctctcctgcgcggggcccttccgcctccacggccacgccgtggcggcggcctgcgcggccgcgggcgccgactgcctcgacatctccggggagcccgagttcatggagcgcgtcgagtccgagctccacgagcccgccgccaggagcggctccctcatcatctccgcctgcgggttcgactctgtccccgccgagctcggcttcctgttccactccaggcagtgggagcccccgtccgcgccggccaccgtagaggcgtacgtgagcctgcagtcgaccaagaggatcgtcgggaacatcggcacctacgagtcagctgtgctcggagtggccaacgctggccagctgcaggcgctgcgccggtccagacccaggcgaccccggcccaattcctgtggtgccatcagaacagcctccg

SEQ ID NO: 14651 - DNA, 774 bp, Zea Mays
ccgctttcattcttcttctcttttctcgttccccccgttggggttttgagctccgacgaaccctaataatcgccggggaccggcgaccgatcgcccgccggcatgcaccattagcagcggatgaagcaggcagcggcggccgcggccgcggcgcagcaggcactgctcctgcagcagcagtcgcagccgcccttgttccccgtgcaccacccgcaccccggcctcctcgccgcaccacagatagagcccatagtcagtggaaacctgcctcctgggtttgattcaagtacatgccgcagcgtgtatgtttgcaatatccatcttcaagtgacggacgcagtactgcaggaagtcttccaaagcattggtccagtagaagggtgcaagctcatcagaaaagaaaagtcatcctttggtttcattgactaccatgatcgcagatatgctgcactagcaattttatctctcaatggcagacaactgtatggtcagccgattaaagtcaattgggcatatacaagtactccgagggagggcacatcaggtcattttaatatttttgttggggatctttgcccggaagtcactgatgctactttgtttgcatttttctctggttactctacttgctcagatgctagtgttatgtgggaccagaaaacaggacgatccagaggatttggttttgtttctttcaggaaccagcagtcatcctttggtttcattgactaccatgatcgcagatatgctgcactagcaattttatctctcaat

SEQ ID NO: 14652 - DNA, 859 bp, Zea Mays
agaagggtattgaagtggacttatgcctatggattttacctgccagagcatgagcatgccaaaagacagttctttgaatatctgcaaggtgaggcagaatcaggattggagcggctacatcaatgtgcagagaaagaacttcaaatataccttgatgcagaatctccctcgaaagacttcaatgatttccgtacaaagttggctggattaactaggtccttccactagccatggtacatgcagcaaaagcgcaacttcgaagagcctcggtggtaaaagtaagagtggcaagaaccgagcatcaagcaccagttccaagtcgggtggctcaagccgaggtgtggatgatagtaacatatggacgtgcgatcagtgcacatatgcaaaccccaaatctgccagagcctgccaggcttgtgatcaccagcatcgatagcgctgtcagtccttgctagagatttgaaccccatttgttgagaatcttctggtgctcccccgtgtaatacacaaacatacatgaaattgaatgctagctgatctctgggggtaattgcactaggaatgctgtaggttttcgtgtatctcggattgtttgtcgactgacatcgcctgagaagcctcaactcatcatccagttcgatttgtgtatataagtgtatcatctgtaacaatgttctttagatgagctaggaggcgtctgctgccaaaggaactgaactgttgtactgctgttgtaatataataatgcatttgtcaaatttaaagaaagttagccatcctgctacaagagaactcttgatacttgtgattgtggtagttgtaccaatttcctgccctttagcgtctacagataggacaa

SEQ ID NO: 14653 - DNA, 208 bp, Zea Mays
ggagaagaacaggtggttcaagaggagccacacatcgaggagttcgattcgatctaggtggcatctcccagttgactttttgacgccaaggatggtatttagatattgttatatttatcttttattttgtaaaacttccgctatgtaataaatactctgattattgtgacatttatctttatacactctattattatatatgttgtct

SEQ ID NO: 14654 - DNA, 1072 bp, Zea Mays
ttttataataaaaaagttaaaccaaacgtctaaacctatgcatagagtgagtaaaggaaagcaacgactccgcgtccgcctgacctgacgtccgcctgatgaccgattatcttccttctccgtccgagtaaaggaaagcaacgactccgcgtcccgcttccctttccccgcacggcggagttcacaatccccaccggccggcgtagcggatattgcgagttacgacggggaaggagaggaagatccgtcgatccgcgcagattcgtttcgatcgtggtttggtgacttggtaagaggggaggggagaagcggcgatgtcgggcgtgttcggcagggtgttcgggaagtccaaggagcagagccaggcgaccgcgctggcctcgctcgacaagctcaacgagacacttgaaatgttggaaaagaaggaaaacttgctagtgaaaaaggccaatcttgaggtcgagaaggctaagaattttaccaaagccaagaataaaagagctgcaatacagtgcttgaagaggaaaagactatacgagcaacagattgagcagcttggaaatttccagcttaggatacatgatcagatgattatgctggaagcagcaaaagctacaacagagaccgtggatgcattgagaactggagcatcagcaatgaaagctatgcataagtcaacaaatattgatgatgttgataaaaccatggatgaaattaatgacaatatggagaacatgagacaaattcaggatctgttgtcagcgcctatgggagcagcagctgattttgatgaggatgaactagaagctgaacttgcggatcttgagggggaggagttggaggcagagctgcttgcacctaccacaacagctccgtccacagctccagtgcgtgtgcgtgtacctactgctcagcagtccactaggccatctggtcagagtagcaaagctgaagacgacgagctggcagcactacaggcagaaatggctatgtaaatatagctcacaaggagatcaagatgtcaaatccccatgaaataaattattttacagaatactaaaatctgcaatag

SEQ ID NO: 14655 - DNA, 112 bp, Zea Mays
tcttcgaggagaccactcaccattttgcgttttcgatcgtcggtgagttgtgcctatgcgcctgatctgtttttaatgtgttgtttgttaaggggctacggaccaatttttc

SEQ ID NO: 14656 - DNA, 1289 bp, Zea Mays
tttcaaccactgagaagtttcatcattgttatgcaatccttgttcgatgggatttgcaactggtgggaagactttcttcttgtggggtggctgtatgatgatgcatgctgatgattttaggcaagaccggtacggcattgtcagtggattaagagatggcggttactcagatgatatgacactcgctgcaatagcaggacagcacaaaaggctcatattttcaccacctgttgctgtgtttccacacccccttgccagtgatcttagcttctccagatactggaattacctcaggaaacaaacttttgttctcgagtcatatgtatcgaatgtaaactggatgatgaaccgtgcattatttacaagccattgctatctgtcatgggggtttgtctggccatacattatggctttggtccatgttttagctgctcttcgggcaccgtacagcaaagttgtaaaggaagcatccgattcatcttggggtttgttcctggtgggcctcttgttcacatgcactctgatcgagctcgtttcaatgtggaatttgactaaggtggaaattcaactgtgcaatatgctgtctcctgaaggaccgaaagtatctcttgattcatacaactgggggctcgtgttcatcgctgtgttggtagacaacttcctctatccagtatccgcaatccggtcgcatttctcccaatcaatcaactggtctggcatccggtactacttgagggacgggaaaataagcaagatcgagagagagaacagttcgaagtacactgatcttggagggaagcatctatacggcaagaggacataccctcctaacaaatcgttgctcggttacctgtcaagaactctagtgcaatggcatcagccaaagaaatatgacgtataggaaggtcgaccgggggagattcagccctcgattgtgtggggggcttcttgttgtacacctcttttggtttcaactttctttcatgcctctctctctctctctctcctctctgattgtttagtggttattaggttcattcatattaaattttgtggtgttcaatcggcgccaccactttgaaagggttgcattgcacctcatagttctttgtaacactagagatatgtaacgatttggctgaagaagtgaaatgttccatgttggtgagacggtctctttggttcatttgctgattcatcgactctttaagagttgacatctactcactattgtatcataggatcacatgccttgatatagcaagattctgctctttcttttttttggg

SEQ ID NO: 14657 - DNA, 1725 bp, Zea Mays
attctccccaaattgccatccaaaatattttccccagaagaggattgcgaggttatagaatcagagaaacactcccatgttttttaccaagccgaaacggatatttggatggttctggttgtggaaaaaaacaaggaaaatgaattgacttggcgttgtggtgcactacaagggattcttaaagaggctcattctctctttgcaatgtttcatggaccaatccgaactttgcttcacaaacaacccagtgcagagcttgctcgtggtcacctccgcacatttcttacagattatttgagcgattttaatgttggaaagaagttacaatttccaacctaccgtgacagcctaaaggagaggggaacagtccaaatgcttacggtatcacgagaagtggcacttgacgttcagtcactcgccacagtacttggatcatgtcttggaaatgttacctgccaatcacttgtactatttgaagacctcttggtgtcaacgacactgcccccggatgatactttaaacctatatacatatgctgttctgaggttaactccgcgtgctttatattccaatgcaagttcttggtcctatttgcggaaaggaacttctgttagtgctggccaaacatcaagttcatcaaatggaacaactgcaggagaaaggcctctcctacgtgagaaattgtcaaagggaaaggatggctttgttgctgctgatttcacagctacagaagctcgttgtgctgtaccctcgactccaatactttggttccagcaggcagatgagtgcatgcacctatgcatttatcagcacaaaagtctcactatcttactgctggttcctgcttcctcagtgataaatggagaagagggcattactcatgtgaagaaggcgatgcttgaaaatgcatcacagaagattgtcactgttgagcagaaattgacacgaggatggggaggagaaaatgcgtatcatgttagtggatatcgttatttgcttgttgatccggagagaagagtatcaagagcctccccacctgggaaagtcaccaccctagcaaaggattctctacttgccctcaacatgctaagacaagaagtagatctagagaagtcaagatacaagagaggcgacccttgtcatgataaggatttcgaagtatgtatcagaacaaaaaacaatgcgtgggttattgctaaaatcagtcaaggaagggagctttacatggctctagagaagggtggtgaaacgcttctatatgcatccacagctgtagagaaattcagcaacaggtactgtgagggagcattctctacagattagaagcaccagagggagatcttagcttttccatacattacctattatgtacatcctgtttttttcccagctgtatcgttgccccctattgttgagagactcggaccactctttgcgaagggaataaggagttcgtatcagttgtacagctgctctgctgtcgtgtgctatctgcaaaagaatagcctagtctgggaataacgcagagcgggatagagtttgtttgttcacttatgcccttccttaacgcagagcattgtgcgtgttttcattttgctgtaacagccggcgatttacctgcagactgggaaagtaacttagcgtttaatttggtattctgcattttgatggtctcatatcatatggttcgagttgacgggttcgttctgcctccggagaggagag

SEQ ID NO: 14658 - DNA, 1845 bp, Zea Mays
aaagtccactaactgaaaaactgaaacagcccaggcgagacgcgagagtttatctagctgtctggttccctttgcccaatctctctcctccgtccctccgccggttcgcccccttcgcccttcccgacgcgccgcccgaaaccctagctccaccgatctatctctctccagcccaggcagggggaggagatggcggcggcgccagcggcgggagggcagggaggcgggggtatggacgccgcgctcctcgacgacatcatacgccgcctgctcgaggtgcggaccgcgcgccccgggaagcaggtgcagctctccgagtcggagatccgccagctctgcaccgtctcccgcgagatcttcctcaaccaacccaaccttctcgagctcgaggcgcccatcaagatctgcggtgattatgttgatcgaggcaaacaaagtttggagactatatgccttcttcttgcttacaaaatcaagtaccctgagaacttttttcttctgaggggcaatcatgaatgcgcctcaataaacagaatatatggattctatgatgaatgcaagcgtcgatttaatgtgcggctatggaaggtcttcacagaatgttttaacactctacctgtggctgctcttatcgatgataaaatattatgtatgcacggtggactctctcctgatctagcacacttggatgagataaagaacttgcagcgtccaactgatgtaccagatcaaggtctactgtgtgacttgctttggtcagatccaggaaaagatgctcaagggtggggcatgaatgatagaggggtctcatatacctttggtgctgacaaggtttcagaattcttgcaaaagcatgatcttgatcttatctgtcgtgctcaccaggttgtcgaggatgggtatgaattttttgctgacagacagcttgtcaccatattctcggcccccaattattgtggtgaatttgataatgctggtgcaatgatgagtgtcgatgaaactttgatgtgctcattccaaattctgaaacctgctgagagaaaaaacaaatttatggggtccaacaaaatgtgatagtgaaagccattttgcttccagcagctctagcctgttaaggttctcctgtggatgcatcgagacaacagcatgctggcgccaagtttgagggcagcattgggctactatcagagaaaccaaataatcccatacctaactgttcatctggaagttactcatcatgacaagtgcctgaaatttttcctctttcctgttaccttgtgtcagaacattatgtagctgtagatatattgattatggaaggatgaagttgccaaattgacctgaggagattcctttctccagccaggaaaaattctgaacatcaaggagtttctgtttgcaagtttcactatttaaaagcagttatgttgcttgtgcggaggtaagtactggaccgaggtactattatcagtttcatggatatggactgttgtgatagtttcgatagaggtgtcaaacatcaattagggtgaagtggtgagcaacatttcaaggaggtgctgatgcttgctgacaacctatgaaaaggcgtttctgtagctgactacttggtttgtccgtcagacaattctagacgtgaattttgatctgttggctagattagctgccaagtaggtatttcgtatctctagatttatgggattcacattcactcattcttgttgctattcacttgcctttgttatgttgctacatgggtgccaaacgcggtctgcaaagcagtcgtttcggtttgtttggtaatgcattttgcgcacaaccctctgggcatggttttgttttgcc

SEQ ID NO: 14659 - DNA, 1729 bp, Zea Mays
ccagcaccctcctccgctcaagacccaagtctgctagaacccgggcgcgctccaaattccccggtcacctacctcctctgccctctcactctcagatccgcgtcctcggctcctcctcctcctcctcctcctcccttccttcgttccttccagatctccctcccagtcgagagtcgagatccaccgcctccgcgccccctcaccggtgcagcgcgaggaagcggggggccagaggccagccatgggcaaggaaggggccagcgacggcggcatgtcggagtcggtgatccgcaaggtcctggtctcgtacatatgctcaaggcgctcatgcccgtcgccgtctactccatcggggtcctcttcaagaaggagaccttcaagtcctccgccatgctcaacatgctctccatctcgttcggcgtcgccatcgccgcctacggagaggcccgcttcgacgcccgcggcgtcgccctgcagctcgccgccgtcgccttcgaggccacgcgcctcgtcctcatccagatcctcctcacctccaagggcatctccctcaaccccatcacctcgctctactacgtcgcgccctgctgcctcgctttcctcgtcgtgccctgggtcttcgtcgagctgcccaggctgcgcgccgtcggcatcttccagccggacctcttcgtcttcggcaccaactccctctgcgccttcgcgctcaacctcgccgtcttcctgctcgtcggcaagacgtcggctctcaccatgaacgtcgccggcgtcgtcaaggactggctgctcatcgccttctcctggtccgtcatccgcgacaccgtcacccccatcaacctcttcggctacgggatcgccttcctcggggtgggatactacaaccacgtcaagctgcaggcgctcaaggccaaggaggcgcagaagaaggcggcgcaggccgacgaggaggccgggtcgctgctgcaggagcgcgactcgcacggcgaccgcaagactgacaaccaggcctagcgagtgtgccggatctcatgatccaattcgctcggttctgaacccagtgtactccaaatatgtgatccaacccttacacgtttgatgcaaaatttgttcatttcttgtctttgacttgatctggtggtaccaaggaaataagcacgggaaagatgcaagctttgtgtcgaacatgtgaaaaaaaatatatatgtatgagcaattttttgtcttttttttggggccagttgtagctgttactaccattaaacagtaagcaaaactgtttgcattttatctgtattgctgtgattggtcgattgtcttgctaatacataaaaaattggacccactgggtcaaaaagaagtgcaatttcgaccgagtactgattatcagaatccagtggacattgcgcaggagacctggacacctggtgcaaacaccatctgaaagttggtgacttgattgatacatggttgatttccacggagctgacctcggtatgggtttgatgctttgatgcctaaccccattggttgttcttgtggggagtcggaggaatttgttgtgtagggagcctcaggacgttgatctgcctgctggaccagaagaaacttggatctcacaatgccacttttctgttttggagccaatggtgttgttttgctattatttttccattttttttgtccctttggagcgcatgtactgtgttcactcagtgaagggaactccaca

SEQ ID NO: 14660 - DNA, 5833 bp, Zea Mays
tgaagctgtgtgtttttttaaagcccatttagctaaggaaagacacacggacaaagttcaagactcagagccacaaactcctatgtcaatcgtgaaaatgggcaagaaccgagttaatgtggaggacgaggagacactttcaagcgttgctcaatgtattgagcaactacgacagagttcttcatcctcacaggagaaagagagctctttgaagcagttattagatcttgttcaaactcgtgatactgcattcggagctgttgggtcacattcacaggctgttccgatacttgtatctctccttaggtctggaccatctggagttaagatgctggctgccactgttcttgggtctctttgcaaggaagaggagttaagggtgaaagtcttacttggtggttgcatacctccattgcttgctcttctcagatcgaagtcagctgaaagccaaactgcagctgccaaaaccatatatgcagtttcacagggtgggataagggatcatgttggatcaaagattttctctacggaaaatgttgttcctgtactgtgggagcaacttaaaattagtctcaagaatgagagtttggtggatggccttctaactggagcactgaagaatttatcaaagaatacagaggggttttggtcagcaactgtgcaatgtggtggagttgatatacttataaagctggttagttctggacaaacaaatactcttgcaaacacttgctatcttcttgggtctttgatgatggaagactcttctgtttgttctaaagttttatctggagaaacaacaaagcagctcttaaagttacttggtcctggcaatgagacttctattagagctgaggctgctggggctctcaagttcctttctgcacagagtaaagaggccagacgtcagatagctaattctaacggtattccttctcttataaatgctactattgctccatcaaaagagttcatgcaaggtgaatctgctcaagcattgcaagagaatgcaatgtgtgcattagcaaatatatctggtggtctttcctacgtaatctcaagccttggtgagagtctcgagtcatgttcttcacctgcacagattgcagatactcttggtgcattggcctcagccttgatgatatatgacacaaatgcggaatctatcagtgcttctaatcctgttgacattgagaagacacttttgaagcagtttaagcctaaggttccttttcttgtgcaggagcgcataattgaagctttggctagcttgtatggtaacccggttctctgcaagacactagcagattctgatgcaaaacgcttacttgttggtttaataaccatggcagctactgaggtacaagatgacctcacgaaatcactttttgctctctgcaagaaggattgtgatctatggcaagctctgcaaggccgtgaaggtgtccagctattgatttctttacttggtctttcatcagaacagcagcaggagtgtgctgttgctctacttgcgcttctttcaaaggagaatgatgagagcaaatgggctatcactgctgctggtggcatacctccacttgtgcaaattttggaaactggatcttccaaagctaaagaagattcagcaaccatccttggcaatttatgcaatcacagtgaagacataagagcatgtgttcaaagtgctgatgctgttcctgctttactatggcttctgaaaaatggaagtgataatggcaaggagatagcttctaaaacactgaatcatctcatccacaaatcagatactggaactatcagtcagttatctgctcttttaactagtgatcagcctgagtcaaaagtttatgttctggatgctttgaaaagcttgctttctgttgcaccacttaatgatattctacatgagggaagtgcagcgaatgatgcggttgagacaatgattaaaattctaagctcacccaaggaagagactcaggctacatcagcaactgctcttgctggtctatttcattgccgcaaggacctgcgagaaactcatattgcagtgaagacactttggtcagtcatgaagctgcttgatatgcagtctaacaaaatactaacgggggcctcatgttgccttgctgccgtttttctttcgatcaaggaaaataaagaggttgctgcaattggccgggatgccttaaacccacttgtctcacttgcaaattcttcagttatagaagtggcagaacaagcgactagagctttggcaaatcttttccttgatcaggaattgtccctccaggtgccttttgaagaaattctcttccgtgtaacacgtgtactaagagagggaactattgatggaagaactcatgcagccgcagcaatagctcgtcttttacagtgccgaactattaatcagccactttcagatactgttaaccgctctgggtctgtccttgctctagctgggctcttggaagctgcaaatggtgaagctgctgcaacatcagaagttcttgatgcactggtgctgttgtcgcgatcaaaggcgtcaagtgggcacaccaaggctccctgggcaattcttgcagaaaacccccacacaatacttccccttgtttcatgtattgctgatgctgctgcctccttacaagataaagctatagaagttgtgtcaaggctctgttccgacctacatgatgttgtcggtggtctggtttctgaaactccaggttgcatgtcatccatcacacggcgcatcattggctccaacattcttaaagttaaagttggtggttgtgctcttctcgtctgtgctgcaaaagagtattgtcagaagcaaatagaggttctgaatgatgcaagtctgtatattcaactaattcattctttaattggtatgatccatatggcaaacacgcaagctgaaaatgtcagcagtgaaagcatatcagatattagaatttccagacactccaaagaaaacaacagtgatggtgaaactctgtgctgtactgctgtcatctcaggcaacatgattccactatggctacttgctatcttttctcgtcatgacagcaaaacaagagcagaactcctggaaatgggagcagttgaaatgctcatcgagaagatttcacaaaatgcattccaatatgtgggtgaagaagataacacctcatgggtctgttccttgcttctcactttgctattccaagaaagagagacaattcgatcaaactcagcattgcattccattcctgtgctctcaaacttgttaaggtcagatgagccagcatacaggtactttgcggcacaagctttgtcaagtctggtctgcaatggtagcagaggaactcttctggctgttgcgaattctggggcagccattggacttatatctttgcttggatgtgctgatgttgatatagctgatcttttggaattatcagaggaattcatgttggtgcctaaccctgatcaaattgcattagagaggctattcagagttgatgatatcagggttggtgcaacttctagaaaatctattcctcttcttgttgatctacttaaacccattcctgaaagacctggtgctcctttcttggccttgggtcttctgacccagttagccgttgattgccccccaaacatgctgctaatggctgaagctggaatcctagaagcacttaccaaatacttatctcttagtccacaagatgcaacagaagaagctacaactgaattgctgggcattcttttcagtagtccagaaataaggcaccatgaatcagcacttggtgttgttaaccaacttgtggcagtccttcgtctaggaggaaggaattcacgttatagtgccgcgaaggcattagagagtttattttgtgctgaccatgtgaggaacagtgagtcaactaggcaggctatccaaccgcttgtggagattctgagtactggcatggagagggagcagcatgcagctatatcagcccttgttaggcttctttctgacaatccttcaagagcacttgcggttgcggatgttgagatgaatgctgtggatgttatgtgccggattctttcttctgattgttcagtggagttgaaaggaaatgctgcggaactatgctgtgttctatttaccaacacaaggatccgttccacaatggcagcagctcgttgtgtggaacccctggttggtttactggttagtgaagctaaccctgcccagctttctgtggttcgtgcattggataggcttctagatgatgagcaactagcagaattagtggcagcaaatggagctgtcattcctcttgtggggcttttgtatggcaaaaactacatgcttcatgaggcagttgctagagctttggtgaaacttggaaaggacagaccagcttgcaaattggaaatggtcaaggctggtgtaattgagagcattcttgatattctccatgacgctccagattttctttgcattgcattggcagaaatgcttcggattttgacaaacaatgctaccatagcaaaaggtccatcctcagccaaagtagtacaacctcttttctctttgctttccaaggcggacatgggtcctgaagggcagtatagcacattgcaggttcttgtgaatattttggagcatcctgaatgccgtgctgattataacttgacacctcgccaaactattgagccagtgataaccttactgaattcatctccaccagctgtacagcaattagctgcagaactcctatcacatcttcttctagaagaccacctccaaaaggacacagtaacagagcaggcgattactcctcttattcaagttctttcttcaggtttgccaaatttacagcagagagctataaaagctctagctaaccttgcaatagcttggccaaatacgattgccaaggagggtggtgtttttgagttgtctaaagtgttgttgcaatctgacccgcctttgccgcatgttgtgtgggaatctgcagcatctgtattgtctagcattctacagtacagtactgagtttttccttgaggtacctgttgcagtactagtgcaattgctcaggtcaggaactgaaagcactgttgtcggtgctttgaatgcccttcttgtattggagagtgatgactcaacaagtgcagaagcaatggctgaaagtggtgctgtggaagcattgcttgatctcctgaggagtcatcagtgtgaggaaactgctgccagactaattgaggcattgctgaacaatgtaagaataagggaggcaaaggctgctaaaaatgctattgcaccattgtccatgtaccttctggatccacagacacaatctcaacagggaagattgcttgctgctcttgctcttggtgatcttttccaaaacgaaggtcttgctcgttctactgatgctgttgcagcatgccgcgctctagtcaatcttcttgaagatcaaccaactgaagagatgaaagtggtagcaatatgtgccttgcagaatctagtcatgtacagccgagcaaataagagagcagttgcagaatccggtggtgtccaggtcctgctggatcttatcagttcaagcaatcctgacacttctgttcaggcagcaatgtttgtcaaacttctattcaataatcacactatccaggaatatgcgaccagtgaaacagtcagagttataactggtaaacaatatccctttcttgttctgtcatattcatttgcatagcaaattcatatttgtcaatgcctgtcatagttcttaaggcggtaaggcgaggcacggcgagtgacccctgcctggacgcctaggcggacacctagg

SEQ ID NO: 14661 - DNA, 273 bp, Zea Mays
  misc_feature (272)..(273): n is a, c, g, or t
catttgcaggccactttctgcccggttgaagtccccgtcttcgtcatcttctagcagcagtgactgcgggagtcttggccggccggcggcgagactcctcccctttctcctatttctctgcacacatagtcacatacatacgtatatgcttgttctccgccgcctccgcttcccgctgccacgccctcttctcgtctcctcctccttagcccctctctcaccctcgacctctagttcctcctgttggtcgtcgacaggcgaaggtagaaggnn

SEQ ID NO: 14662 - DNA, 907 bp, Zea Mays
  misc_feature (906)..(907): n is a, c, g, or t
ttcacgattaactcacaacgaaggcaacgactaggctcggaattaatccccacccgttttcccttccaaactccaaagacacgattgtagttggattaattcccaccccacaaccccccaccacaagaacttgttcgatcgaattcttcttcaactacccgccgcgggaacccaaggaaggaggcaaagcaaaggcttctcgcagtgttcctagtggtcgccgatgaggcggccgggaggagcgtccccttcgtcttcctagagagggttagggaagacttcatgcagcggtatgggtccagtatcgatgaggaggggcagcacccgctcgctgatgatgctgatgaggatgactttctgttcgaagaccggttcagcattgcctacaaccttgaccgtgaattcggcccgaggttgaaggaccatatgcagtattgtgttaatcatccagaggaaattaacaagctctccaaggtgaaagcccacctatcggatgtcaaagggatcatgatggacaacattgagaagatattggatcgcggggagaagattgagcttttggtgggtaagacagagaccctacagtcacaggcggacagcttccacaggcatggcagagagttgaggcgaaagatgtggcttcagaacctgaggtttaagctgatggtgggtggcggcattgcggctctgatccttatcatttggctgatggtctgcaggggattcaaatgttagagcacaccaagttgctcgccttttttttttcttttcaggcgtttgatatgcacagactttcaaccaaattgtgttttcagtgtcacggtatcgcaatgtagtggacttcaatccccgcagtctttcccatgttccattacttccatatgataatggtaaaaggtaggaagnn

SEQ ID NO: 14663 - DNA, 3138 bp, Zea Mays
aagaaaacttacaagggcgcggcaacagagcgagaggcgcgcgcgcagtcccctctacttcccgccgctggccgtttcccttccccccaatccaaaccctagagagagagagagagagtgtgtagtgtgtgtgtgtgagagagagggggattggaggcgaaggcagcgggctagcgctagcggaggaggagagatccgctgaggtggaacgcccgatcggcggagccccatccaccaccactccacaagatgcggggcgggacgctgcagatcaactggcacgaccagcagccggtgctcagcctcgacttccaccccgtctcccgccgcctcgccacagccggagcggaccacgacgtcaagatctgggaggtagcgtcggacggcaagctccccaccgccaccttcaagaccggcctggtccccaacaccaccgcccacagctccgcggtcaacgtcctccggttctccccttcaggggagtatctcgcctccggtgctgatggtggcggcatcaccctctggaaactgcatcccgctgacgacggcgaggcatggaaaattcacaagacgttactattccatcacaaggatgttcttgaccttcagtggtcgcatgacagcacatttcttgtttctgcatcagtcgacaacacttgcataatttgggaagctagtaaaggcacagtgcaacaaaagctagagggacatctgcattatgttcagggtgtggcatgggatcctttgggccagtatattgcttcactgagttctgacagaacctgtaaaatatatgcaaaaaagcctcagggcaaatccaagaacgcggagaggttgaactttgtttgccagcatacactagtgaaggtagaataccagaatcatgatgaatctaagccaccaaccaaatctcatttgtttcatgatgagacactaccatctttcttccgaaggttggcatggtcacctgatggatcttttctagtattgccagcaggcctttctaaacactcctccgaggtgattaatacagcttatgtaatgtccaggcgtgacctctcaaggccttcgatacaactccctggggcaagtaaagctatagtggcagtacgcttctgccctgtactattcaaaccacgtggttctaactcagatggtttcttcaagcttccttatagagttgtctttgctgtggctactttgaactctctgtatgtctatgatacagaaagtgttcctccaattctagtccatgctggtctacactatgctgccattaccgatattgcatggtcttctgatgctaagtacctggcagtgtcatcacgagatggctactgtactataatagagtttgagaatgaggaactgggacagcctcacatactccccggatcaaaggaagttgctaatgggaatctgacacctgagaccaagaagcctgtatgtgctgatagcatgaaggttgataatagtgccaacaagcttaagatggaagccagtcctgttgctgtaggagttagagcaccactgctgccaactgagaacatcaagagaacaggagagcttgccgaaggaaatgtaacctgtgaaaacaaggagccggtaacaatagacagtatggaagtagatgccgatgataccaaaggcaaggaggcaaccatacccgtggcagctgaagtgacaccgccaccagcggtaccggcagcgaagaacagcgcatctagtaagcctgctaagaggcgaattactcctatcgcaatcgactaggtagtagacgcagcagttagggttttgatgtgttatgtagtgatggcaagtactggatactatgtttaggctaccctgtaaagtcgtttgtgctgcggtgctcatcttctgctctagtcctcctgctcttgacacaattggggagaatgtgaacagaagggctgtgtgtatgtatgagcacactttgttatggcgcaacatgcaagccactaaccgacatcttaagaagtggagttcattactgaggagtgaggaagttgtttcacacgagctgctcatatacaaatgctggcatacaaattacacattgaaatcaatcagatggggacatgacgcccttatttcatttacatgaaagaacatagaatcttatcaaaataccgaaaacgaatgggagggtagtatgtatatgtgtgtgtgtatgggtatggtattggcctcaagttgaagggccttgggtgcagtaggcatcatcatgcatctcaggactttgttatgcgcgccttggatttgtcatactcttcctggctctcgccggcctcttcaaacctgatgtcctcatcctccgaaaggacctcaaccctttcgccatgtggcccaggcacgatcatctcgtcgacgtgcttgtgcttggtgacgttgatgacctccgtcttcctctcctctccgctctggtgtttcttgtgccaggtccaaggggcggtgctcgaggactcgccgatggcgtcctgcttcctgaccgcctcctggaacctgacgtcctcgtccaccgtcagcctgacggcgctcgcgcccccggccggcccgggcacggtctgcttgtggacgtggacgtggtcgctgaagttgagcacctcggccttggcctcctcctcctctgccttcctccccctcctcttcttcttcttgtgccagcagaggagcgcggcagccaggcatgccagcagcagcaggccgcccagggagacgaacaccacgatgatgacgatgtggtgcggggggctaggtggaggcggcacgggcgccggcggaggcggcatgggcaggtgaggcggtggtggcgcttgaggccgaggagttggtggtggtggtgggcggatgggtggtgacggtggtggtggaggagcgcggcgtggtgccggtggtgggggagcacggcgcggaggaggcggttgtggtagggtgggcggtggtggagcgcgtcgcggtggcgggaagggctgctgtggtggtcttggaaggtaagggttcggagggaggtaggggaagccaagtcctggaggggtagggttgaacgccatcgctgctgctggatgatctcggaggagagctgtgtggtgctgtagtgaggtgaggcgagtgagctgt

SEQ ID NO: 14664 - DNA, 2283 bp, Zea Mays
ctctttttcgcctataaaaacaaacaaacaaataaagattttaaactcgatcagcgttaaatagggagagagagagagagaaaaaggaaaaaaaaaacgcggcgcagaagccagaagaaccagcgagccaactcccaacctctcgcccgatctcgatctcgatctcacgggcgccgccgccgccagcgacgatggatccagagatgctgcggctggcgcaggagcagatgcgccgcatgtccccggacgacatcgcccggatgcagcagcagctgatgtctaaccctaacctaatgaggatggcgtctgagagtatgaagaacatgaagcctgaggacttaaggcgagctgcagagcaactgaatcaaacaagaccggaggatatgcgtgatatgaccgagaaaatcgccaacactactccggaggagtttgctgctatgaaggcgcaagcagatgctcaaatgtcctatgcgatgtctggtgctaagatgttaaagaagcagggaaacggacttcataaccagggaaagtattcagatgctgctagtaaatataagcttgctaaggataacttaaaaagcataccatcgtctacggcgcatactctgcagttgcaatgtacacttaatttaatggcttgttacttgaagacaggccagtttgatgaatgcataagtgaaggtacagaggttctaagttatgattcaaacaatgtcaaagcatattatcggaggggtcaggcatataaaggactcgggaagttggaggcggctgttgctgatttgagtaaagcccatgaaatttgcccagaggacgaaactattgctgaggttctaagagatgctgaagaaaaacttgcacgggaagggggaggagtgagcacgcggaaaggtgttgttattgaagaagttgttgaagatggcgcttcacagccatcaagcagtgaaagaaattcttctgggtatactgtttcacaaccacctgaaggagcaggaaatattgggctgtcagggtctttagaaaggccaagggatgatcctacttctatcaggtcatcccaaaattatgtgtccaagagcgatcctgaaggcttatcaaacttcggaattgaaggaatgtcgcctgaacttgtcaaaactgccactgatatgattggctcaatgaaaccagaggagcttcagaaaatgttcgaagttgcttcttcattgaatagcactagctccgctggtccaaatctgggacccaatatgccagaaatgtctcctgatatgcttaagatggcatctgacatgattgctagtatgcctcctgatgacgtacagaaaatgatgagttttgcttctcagatgggtgggcctggtggtgcccccaggagttcagagaatattaactttggaccttcagtgagagctacaacgagtaattctgcccgtggatcatcatctcaacctgttttggagaaccctgatgaactatcagatgaccaaaggatgagccagtcatcctctagtcttccaccttctacagctgatatgcaagaaaccatgaggaattctatgaaagaccctgcaatgcggcagatgcttacatccatgatgaagaacatgagccccgagatgatggcaaatatgagcgagcagtttggaatgaaactgtcaaaggaggatgccgcaaaagctcaacaagccatgtcgtcattatctccagaggatttggatagaatgatgagatggatggagcgagcacagaaagcggtagaagtcgcgaagaagacaaagaactggctcttgggccggcaaggcttgatccttgctattgtcatgctgatcctagctttcatccttcatcagtttgggtttatcggcagatgatggggggtgacttgggtggctgcatcagcatggaaatagattgttagatggcgatgcagagttccctcttgctaacaactgcttaaaagcgctttgggggaaggccggattacgagaattctttgtatccgtatcttttgaaagtgtaactctgtccataaagctacatcctatttttaccagcaaaggtagtagaaaggaatcgagccgaaactgttgtgataacaagccgacatgtaatatgataatatccttgtggtgctttcagttttaagtagcagttttgtttaataaagcatatgcaaaaggtgaagtggaacaaagtacatgcgcatacaaagactaactggaagataggcatcttcaattctttaacatgtgtttagtttgggaactatatgctttgctgaga

SEQ ID NO: 14665 - DNA, 1256 bp, Zea Mays
ttcagatctcactgttcactaatttgagtgccttgacaaatcaccatttagatactttcttggggaactatatggtggcaattcactgggaagcacaattgcagtgggcaatgagaagaagcggcagcgggtgtacaacactatgtttcatgtcccatggagatgtgaacggggaaattcagagtcgtgttcgcctcaattcctgcacccatctttgcagctctatattgttcaacaaaagatttgggaactgggatagctgaagatgcctctactgaagatgatgatttcagtggcgacctaccaccagagtttgaaaatatcatgatattcaatggtgttgaaaccgagagtgacattgctcctccagtgctcgaggaaaacaaggatgctgttgtatctgcaacaaaaactgcaaagtccctggatgggtttgccttaaaaacagggcaggaggaggagggtccggaagaggttgatgctactgaaaaagcaatggaagtggttgataatgttgtgaagtccctggatgaagaggtagaatcaaaggagatgcagaagcagcaaccgcatgattataatagcatgagcctaggggtggtaacgggtcatttaatttagcctagcaaatttacggatcgaatcaagttagggccggatcataaaataatacaattttgaactaataaaattaagggctttgttggttcgtgaagcaagtattagggccatgatccattaccactcctacatgagcctcaggaatcttaaagccacacacaagaaatatctcattgctgcaaaggaagaggaggtcaccgaagggaagaggcttcctctcgaggaggtggaagagaacgcatgcatcagccactgaacagaacaagcaggcgatttttttgtgtggatggcgtctgccacaaaaggattgaatcgaggagtgtgctctggttgtgaagtgataactaggctaccacatgttcattttcaaaagttttcgtgtgtgatcgtgatcaggggtgaaactgtggtttcagccaacaaacttgcagttcctattgcttctccccacttttttcctttatatatattttgtatcggttacagaacatggtttatccagtggtatgctgatgaaagatgctaagtttcgcttaatataatgtatatgaaggtcctgggtacctcaaattttgtccacattgaaccagtacgaatgacatcttccttgaaagttatagaaatgcttcaaagtt

SEQ ID NO: 14666 - DNA, 243 bp, Zea Mays
tgcttcgcctcctcgtgatcagccccatctgggtcatgtgggcggaagatctcaacacctgtcagatgttcaacgacaagcccaaaccagaatttatcaatgttctcacaagtattgagtcacatttgatgctggtacgtgaattaactatgtgatgcggagaaccagaactaagttgacctcaagatggtgcaaggagtggtcttcttcgttcaacaatgttgtcagtcggaccaaccagaa

SEQ ID NO: 14667 - DNA, 564 bp, Zea Mays
gttttgcttacattcttaatactcgatgcattgatgctagacagatacgagcagcacacgttgaaatgctcgtcttgcaaaggagcatataatgctttccagaatctgcagaaggtattcatgggagcgacagtagtttgctgtgctgccgctggtattcctccagatgttcagctcaggctattgatcggtgcggctgctttggtcagtgccgctatagcatacgcattccatgagctccagaagaattttgtattcgtggattacgtgcatgctgacattgattgaaagattcgtgaggatctgttgtgtcgacatcactcgctcgcgagtcgtgtctgtagtctagggctctaggcgtctaggtagggaaagtaactttttgccgggtataggtcatattgctcacatatgtattttgtatagtgtatgcactcaactgtagccgatgcagtgcgaaaatatagtttttatgttattatctattggattaaaattgtctccagatccttttagcatgtaaaatgccatttttcaaatggaagttctcaattgcgcctatag

SEQ ID NO: 14668 - DNA, 2252 bp, Zea Mays
cagacggtgcacccaagtaacccaacatttttctctgcagattgacttggatacaattgaagttagcaatctgaatagacagtttttgtttcggcagagtcatgttggtcagtcaaaagctaaagttgctcgggatgctgtattgaaatttaggccaaatatcaatataaacccataccatgcaaacgtgaaggattctcatttcaatgttgatttcttcaagcaatttaatgttgttctgaatggtcttgataacttggatgctagacgccatgttaatcgcctttgccttgctgctgatgttcctttggttgaaagtggtactactggttttttgggacaggttactgttcatgtcaagggtaaaacagagtgctatgagtgtcaaccaaagcctgtccctaaatcatatcctgtctgcacaattacaaacacaccatcaaagtttgttcattgcattgtttgggcgaaagatctgctttttgcaaaattatttggtgataaaaaacaggataatgatcttaatgtgcactccaaagatgataccagttcaaaaacagatgtttttgaaaggagtgtagatgaagatcttgagcaatacacccagagaatatatgaccacgtatttggttacaacattgaagttgcattggataataaggaaacttggaagaatcggagaaagccaaaccctatttacattagagatgcattgcctgaagacgctgttcaacaaaatggtcgctctcaggatcacgtgaatgaggagcaggatccttctgctatggtatccttaggccttagaaatacacaagagatatggagtcttgctgacaattcaagagtgttcttggaggctttaaaattattttttgacaaaagagagaaggaaatagggagccttatttttgacaaggacgaccagttggctgttgagtttgttaccgctgcagcaaatatcagagcttcctcttttggaataccactgcatagtctttttgaagctaaaggtgttgctggaaatatagttcatgctgtggcaactaccaatgctataattgctggtctaatcgtcatcgaggcaattaaagtgctcaagggtgattatcaagattatagaatgacatattgccttgagcatccagcaaggaagatgctcttgatgcctgtcgagccttttgaacctagtaaatcatgttatgtctgctctgagaccccacttgttctggaggttaataccaagacaacaaagctccgggaagtcattgaaaaggttataaaaggtcttggctgaacttccagctccagttctaaatggtacaatggttacagtcgaggatttgcatcaggaactaaaatgcagtatcaacatcaaacacagggatgagttcgatgaagaaaaggagcctgacagaatggttcttgttgggtggtctggcccagttgataagcaaaccactagtaatggtgagactaaatcagttccatcttcatccaatacagaagatgtggatggtactgccgaggacatatcagcaacttctggaatgaagcgtaagctgaacgaaatattagagacaaaggagaattttgatgctctcgaaaatctttcgggtgttgattccagcagcgctcaagttgttgaagatgacaatgacgatggccttcttatgtttgatgaggacccaaggcaaagtaagaagaagagattgcagtagcatcctgctgcggcgataacagctcttgactcccggcatcgtggctaacacattgttcgatcgtaacatctttgataacttatttatgcggttatgtaccaggttgatgttgaaacattagtaacaatgcccagggcaccttttggcctcagatagtcagataccctgtagggttgtaatttgtaggatttaggaacaagagcaactaatgctcagctgacagcctgctgcgagatagaatttgtatctcaagagccaaggtcctgttttggttatgttttttgttcagttgaggggtgaccgggtgaaccaagctctgtcttgttaggtgccaatcacagggtctggaaatatgtactcatcctgtattcttgctaaggttatggatcagatggtgtatatatctgtgcaaaacactaatttatagttttgcactaatctacactgtagattatattgtttaccgagtgaagtttgaagtaaacggctggaaatagcttaacgttaagcaatatgcgaaacaaggattgggtt

SEQ ID NO: 14669 - DNA, 948 bp, Zea Mays
cagaaaaccacgtctggttactgcttgctgaaattgttaatcaggggaaattagtttctgatgaaattatcatcaatcttttgtccaaaaggcttaagaaaggagaagaccagggagaatcaggatttattcttgatggttttccccgtacagtaaaacaagcggaaattcttgatggcgttacagacattgatatggtggttaatctgaaactaagagaagatgttatagtagagaagtgccttggcagaaggatttgcggccaatgtggaaagaacttcaatttggcctgcattgatgttaagggtgaaaatggactcccaccaatctacatggcaccactgttgcccccaaacaactgcatgtcgaagcttattacccgagctgatgataccgaagaggtggtcagaaatcggcttcagatatataatgacatgagtcaacctgtggaaggtttctaccgagagcaggggaagctcttggaatttgacttgcctggtgggatccctgaatcttggccaaagctgctccaggttctaaacctcgaggaccaagaggagttgaggttggctgcagcgtagccgcgtaggtctctgggagaccgacctacatactgggaaaaagaccataccacattttttttgaataatggagaagaggaaacttactccatagtttagtgcgttatgcagaagtaatggttttcttgtaaaaatcgatttgttggtttccaccggcgttttgatgatgagccggtactatgtaacttacgatagctgtaagcactaagcagcccattcttgcttgggacacagtttggagcgcatgaagacatgctgtagtgtttttttttttaattcataacaaacttgtagtacacatttgtgttcatgataaaacactgaagtagtatgatactacagaacaacacagacctgatgaatgcct

SEQ ID NO: 14670 - DNA, 2169 bp, Zea Mays
cacgaaccaaaggccttgatagacttcgtaggtgcggacaggttttcgctctaccccgacacaaacccgacccgttacgccgcaccactcttcttcctctgctccgcctcttcacccagcgtcttccgattgctgacggatccctcttcgccgcggccgccgccgcggaccgaccgtgggagagaaggcgaggcgggagcgatggaggccgccgactacggcaagcttttcgtcggcggcatctcatgggagacgagcgaggaccgcctccgcgagtacttcggccgctttggcgaggtcaccgaggccgtcatcatgcgggatcgcagcacggggcgtgcccgcgggtttgggttcgtggtcttcgccgacgccgcggtcgccgagcgcgtcactatggacaaacacactatcgacggacgaatggtggaagcaaagaaggctgttcccagggacgaccacagtattgtgagcaagagcaacggcagcagcacagggtcacctggaccaggacgcaccaggaagatctttgttggaggcctgccctcgagcgtcacagaggctgacttcagaaggtatttcgagcagtttggcatcatcaccgatgtggtcgtgatgtacgaccacaacacacagaggccgaggggctttgggttcatcacttacgattcagaagacgccgtggacaaagccttgcacaagagcttccatgagctcaatggtaaaatggttgaggtcaagagggcagttccaaaggagcagtctcctggacccgtcgtacgttcacctgtgggagtggggcagaactatgctacgaacagggttcatagcttcctcaatggcttcaaccagggttacaatccaaaccccataggaggttacggcatgagggtggatggaaggtatggcttgctttcaggtgcacggaatgggttctcttcttttggcccagggtatgggatgggcatgaatgttgaaggtgggatgagcggaacatttggtgcaagctctggtttcatcagcaactccaatggtaggcaaatgggttcgtacttcaatgcaagttcgaacagactgggtagccctattgggtaccttggtcttaatgatgttccgggatcaatgttgagttccatgtctaggaatgtttggggtaatggaagtctaaactacccgagtaatcctacaaacatgagtgcttttgcttcacctggaaatgggagccaagtcagtcttactggtgacaattggggaggtcttccttctgctcatgggatgggcaacatttcaagccttgggtcagggaaccttgctcgtggagctggagataataacttcggtttgccttctggcagctatggaaggagcaactcaactggtacaattggcgagcctttttctgcagcaggcaatacatatgatgtaaacaatccagatacatatgggggcagctctatttatggtggcacagcctggaggttcacatcatctgaggttgacatgccttttggtcatgatattggaaattttgatccgacaatcaaatgagacatgtcggcaagtcacatgtgcaactatcctgttaacaacaatcagccaagcagaggtaccacttcctagggtgagtattactatatccacatatgacttggtgtagatgaaacacccattcagtcaggcatccgggtgcgcggccgtgaatcggtgattgtcagattaatatacaggttagttttgtctagctaaccagcgggtgtggtttgcgaacaccaacatgctagagatggagctgctagaggagaagcggatacagaaacactttgtggaggtttttttttggggtcatgttttagttttgattcttacgcgtgcgtggtgaggccttttggtttttgaatgagatgtaattattgcggcacatatttagaagccatgttccaactggggattacattttcgttttgtaatcccaaaaactgttttgttgaccaaagtttgactttatatttttaaattctaaactgaaatacaaaaaataaaaatccggaccggaccgaaaacggtaaattttaccgccacttgaagtttaaccctggttccaacatgagctggaaatatctctgtatacggatgcacatgtataccaaccaaaggggtgttgtattatac

SEQ ID NO: 14671 - DNA, 1229 bp, Zea Mays
gcaaccctagtctgcgttgtcttctcaaaccttaacgtaattcgtaggagcatcattatttatagaatacgatctactttatagctgatgacaatgtctgcttctactgctgcaattcgtactgcgaatacaaatggaaaccatgcagtaagttcggattcacattctagccaagatgctaggcagcgaacagctggtattacaaaaagaaaagcattgccttcgattcttcaaaaaattcctagcaatgatctgagtcatactatccgaggagaatcagttcttcaaaagtcaaattattcttctgaaggaagaaaagatgtggttgcttcagcaactgctgaacgccaaaacaaaaacactacaaatgtggttgcttcagcagctgctgtacgccaaaagaaaagccctactaaacaagaaaacgccaactgggtaactgccttaagtgtgctggtgaagctgtgtcttcttatttcagctactgcttggatggggcaggtgttctggagatggcaaagtggtgaattatcatttacaacactggatatggagaacaggctatccagggtggaagggttcaagaagacagccaagatgcttcagctacagttggatgttttggataaaaagctagaaaatgagattgacaaagcaaaaggggtcattgctaagcaatttgaggataagggtaataagatagagaaaaagatgaagattttggaagacaaaactgacaagttggacaagtcactggctgagcttagtgacatgggatttctttctaaaaatgagtttgaggagattttgagccagttgaagaaaaagaagggattcggtggtacagatgatgaaataagcttggatgatataaggctatatgccaaagatgtggttgagatggagatagcaaggcattccgcagatggccttggtatggtggattatgcattgggatctggtggtgctaaagtggtaagtcactcagagcctttcatgaatggcaagaactatttacctggtcgcagcaatgtgcacacaacagcccaaaagatgctggagccaagttttgggcagccaggagagtgttttgcagtgaaaggaagtagtgggtttgtgaaggtgaagctaagaacagcaataattcctgaagccgtcactctagaacatgttgacaaggcacttatcaactggaaaggaactcatgtgaatcctgaatttgttattag

SEQ ID NO: 14672 - DNA, 2817 bp, Zea Mays
tcctcctctctttcttacgccctccggattcgttgcctcgctcgcgtcgccccttcccaccccgggcctgcgtggttcaaggaattggaggcaacctaatcggcggtcaggaatgcttcaagagttcgtcgacaacgtcatcgccgtcacaaaggaatctgtgaagacatttacatatgagtcactgaacaacattgcaaggttcataaatggaatgtcagcactcctattgacactattacctggaaaaggcaacattttagaagggataaatggctgggaacttaagccagcactccgtgggccgcgtcttcctcgttggatggaaagagtttgtctgccctccgtctccattgtcccaaagttcacggttatcacatgcaagcagctttggtagacatgatcgtcgactcaggagacatatcagatatgcagtttcttggatactatggccattgagattctttgtttctttaatattcattttgttcaatgccattaaatttcggatggtaagatcaactgctaaaggtgctgaaactcctcacctctcaagaactggtcttgccaagaaatcatttcatataagggaccagtttctccaacgcacaactgataggaggcgtggagtttttgaggatctgcatctggcaattgagattttcatcgaatcagtctttgacatcgttcacaaagcagcacattatattctttctccttcagaagtgtggcagaacctgttttgctggattcaaggaagtggtcatgatactagttctgtcgttgatgtattgactgctaatgttggcagtgataatcctgttccaacagagaggaagactgtgtatcgtcattctctgaacacagattcccggacatgtgaagatgttattactgagcttgggtatccttttgaggctataaaggttgttacttcagatgggtatgtcgtgttactggagagaattccaaggcgtgattcgcagaaggttgttttgttgcaacatggaatattggactcatctatgggctgggtgtcaaatggtgttgttggctcaccagcatttgcagcttatgatcaaggttatgatgttttccttggaaatcttcgtggcttggtctcaagggagcatatagataaaagtatttcctcctacaaatactggaaatattctgttaatgagcatgggactaaagatatgccagcaattattgaggaaattcacaagatcaaaatatcggaacttggcaaaagtcagcctcaatcagcagaggggacaggagatcaaaatgataagttaaaaagtttggaagtacaggcttcacaggaagacagtatagaagaccaaccctacaagctttgtgctgtatgtcacagcctgggtggtgcagttatgctgatgtatgtggttacttcaaggatcacacaaaagccccacagattgtctagactggtcctgctatctcctgcaggttttcatgaggattccaatgtggtattcagtatggtagagaagctcatcttgtttgttggtccagtgcttgcaccacttattcctggactttacataccaactcggttctttaggatgcttctgaacaaattagcaagggatttccacaattatccagctttgggtggacttgtccagacccttatgggctatgtcgttggcggtgacagttcaaattgggtaggagtgctcggtttgccccactacaacatggatgacatgcctggtgtgtcatttcatgttgcgcttcaccttgcccagataaagagggcaaagaagttccaaatgtatgactacggtagctctgcagcaaatattgaagcgtacggaacaccggaaccattggacttgggagctcattatggtctcattgacattcctgtggacttagtcgctgggcagagggacagagttatctcaccatccatggtaaagaagcactacaagctgatgcggaagtcaggggtggaggtttcatacaatgagtttgagtatgctcatttggatttcacattctcgcatagggaggagcttttgtcctatgttatgtcccgcctacttttagtgactgatccaggtaaaggccgtatcaagcagaccaccgtgcgactcaggaggcagaagaaagttcagtcagagattgaggagagcattgagtgcagagccaaggaggaatctgatgaactagctggacatttggagtgatgtggagcctgcaggttaagagtgtgttgtaagtttgtgaataggatactcgtgtcgtctctcatatgttatacaccatgtggaagatcaggggagaataggtctctgtttctagtatcatgttcatggggatcgctttttttaacccctgtaagtaacagtagaggtatatgcatcgactccgttgagcattaggtgtcctgctcttttaagtatcgagaacgaggagaatggtcaggaaccggatgtttacctggcaaatatccagtgttcttgcgacttcttttgtagaatgtcacagccattcaaaggatgtgatgtcaggcgtgcaagcgatggacagtatgttttctgcatatgttatggacagtatgtttcaactaaaacgtttttggtttggaaccaattgttactgttgcatgagtgttattgagcatggataattagcatagaaatgtaattctagtttcactggaatggaagaaagcttgttcactagaacgtaaaattggatctggacgctcctgaagaccggatcttgtaaaattagggtctgtgatccgttcttttgttttctccagcccccatgaacactgcg

SEQ ID NO: 14673 - DNA, 2180 bp, Zea Mays
tcatacatccgctatgtggttcagtgtgcagaaataatagtttgctgaaaaattcaggcattcacaacgttacgctcttctcaagcttgacttggcacgtgagcagagatttcagatatcaaacctcacaaggcatatgggtggattttgaatagtcctcttgattaagaagcgcctcaactgcattgacgacaccttccttgataaagaagccaaggtatacaatacgaagcttttgcatgagaatctcgattatctttagtagtgagatcaacacatgatgatcctttgtaaataataaatcagccaagaagctacccttttttgtttccttgggcacatcttgaagtatttctggtttactgaaataacaaatattgttagcaattgaagcacatccatagcaaatgtacgaattggcaccagagttcaccgctgcacaatttgtacagtaagctcacttccatatttcataacacaaacattgttatgagttgttagtttgtaatgctgctaaggtacatagagaattgacataagaaccttgcttcaagagaattgacacaagaaccttgcttcattcgtaattattttttctgtcgctagtatgatctgggtgtcttcaacgtcccttactactgaaggaatcaactggtttgacaacctggacggccgtgggggcttgtacatcctccatgtcctcagcgtccatcttggtggtggtgagtggcacttgcaccagtggcctccatcccctaaattctgtgcaggagcgcctggctctggctgcagcgccgtggcagggcgaggcacgtgtggcggctaccgaggtgcttaggcgtgatgtctaggtggtggcaaggatgagcaggagggccttagcgccgtcaaagcaggggtctccgcctcgggggcgatcacgatgcgtgggagagggagccgcagcgcgcggatctgggtcgcggggcgcgcgccccagcagcgcggccatagcgcgccctgcgcgatctgcagcgacgccgccgtgatgggcaagtcgaaggcggaccgcagcccgtccgggaacccgagcctcgacgacaggcccgcggcgaggacgtcgcggaggttgggcgggaacgcgaaccccatctcggcctcgcgggcgccagctccagctccgtcaggcccgggagcacggccaccccggaggcccggaggtggcgcaacaagcatgtagacgctgagctgaggcctgcacggcatggcgagccccgacgccacccccatacttctcgggcgcgtcgtcgcggtgcctcagcggcgccgatgaggtggacaatgaggaggcgctgcagtgggtcatgatggagcgactaccgtccttcgagcgcctgcgcacgggcctcgtgcggccggcggacgcttccgacggcggcaacgccagcgaccgcggccggaggcgccggcacacgcacgaggaggtggacgtgcgcgcgatggggctcgcgcagcgccaggcttttgtggagcgcgtgttacgggtcaccgatgaggacaacgagcgcttcctcaggaagctccgcccgcgcatcgaccgcgccaacatccagatccccacggtggaggtgaggttccggggcgtcaacgtgcaggcggagtgccacgtcggcacccgcgctctgcccacgctggcgaacgtctcgctggacgtggccgaatcgttgctgggacgcgtcggggtcaagctcggcaagaggaagacgctccacatcctcaaggacggctccggcgtcgtgcgcccgtccaggatgacgctgcttctcggcccaccgtcgtccggcaagacgacgctcctgctggccctggtcggcaagctggaccccactcttgaggtcagcagggaggtgacctacaacggctatgggctggacgagttcgtgccggaagaaggcggcatacatctgccgacacgtccacgaagaaggtcggcggagacggagacggcgagacggcgcggaggcgggtggtggcagtggcgggctgttggcggtggatcagcctcgtgggcgacgccaccgaaggctgagcggggtggtgcctgcacggcgatgggtggcggcggggtggttgccaaaggcagggacggctgcgacgggggagggggcgggggcggagcacggtcggatcgctctggatga

SEQ ID NO: 14674 - DNA, 517 bp, Zea Mays
ctctgaagtcttaacatctcaaatatatgttcacaatttattttgtttcagtttgataagaactgtttggtcattcagtggtctggagataatcctaatagccttgcaggtttaactctgaatacccctggtgatcttgccattagccttggtactagtgatacagtattcgggataacaacagaagctaaaccaagccttgaaggacatgttttccccaatcctgttgagcctaatggttatatggtcatgctatgctacaaaaatggctccttgaccagagaagatgtacgaaatcgctgtgcagacaaatcatgggacgtttttaacagctatctggagaaaacgccccctctaaatggtgggaagataggattctactacaaagaccatgagatcctccctccacttccagtgggtttccatcggtacactgtcgaaaacctcaacgacgtctcatcagacgctctgttggagcgtgaagtggaagaacttgacccaccgtccgaggtttgcg

SEQ ID NO: 14675 - DNA, 282 bp, Zea Mays
agcagtactcgaaccaccattttgcatgccaacaatagaactggaagtattctccacattgtgcggcaggggagcaccagaaagaacagagtttgatgacccatcatgtgtgctggaagcaattataccaacagcagatgacgactgattagcaggtgcagtagaaggttcaaaggcagcagatctgacaagagcactagtagctattcctgattcttgatcaggttgttgatttgatgccttctctgccaattcacgtgcaacctgagagagagaaaaatc

SEQ ID NO: 14676 - DNA, 726 bp, Zea Mays
aagcaatgctactcttctgcatgtcagcatgtggatgcatcaccatggaagagctggccgcagtcacccgttccctcggtctcgacccgagcgatcaggagctcaatgatatgatgagcgaggtcgatacggacggcaatgggatcatcgatttccaggagttcttaagcctcattgcccggaagatgaaggatggcgacggcgacgaagagctcaaggaagcctttgaggtcctggacaaagaccagaacggcttcatctccccggttgagctgaggacggtgatgaccagtctcggggagaagatgaccgacgaggaggttgaacagatgatcagggaagcagacaccgacggtgacggtcaggtgaactacgatgagttcgttctcatgatgaagaacgctgagcggaaaatatctgggtgaagggcgcgatgtggtgtggaactagtagtcgtcttggttggattcttctgtcagaaatctactactgtaaattgcaattgtatgcttagtactatgatcgtgttattcgaagtgttggaggttggaaaagtgatctcacgctcattaacgggtggccaacggccttatgtatacgatgaatatttagataggtggcttttattttgttacgataaatagcaggaggaagatccattgacgacctctactaggtttaccgacagcgaactaccatgaaaattacagttagtctccagacccc

SEQ ID NO: 14677 - DNA, 1517 bp, Zea Mays
gccgcttctcccttttcgttcccagaggacgacctgggcaccgtctcgatggggactgtgtacacctccttcacgctcttctccgtggcctcgtcgcccgtggtcacgcgtataggccccaagcgcgcgctcgtcgtcggcaccagcggatacgtgctcttcatcctcgccaacctcgtcccgtcatggtacacaatggtcccagcttcactctaccttggttttactgcatcgatcatttgggttgggcagggtacataccttacatcagctgccctcagtcacgcaagagaaaataatttgcccgagggtccaactttagggagcttcaatggggagttttggggaatgtttgctagcacacaggtgattggaaatttgatctcgcttgctctgctgagaaatggaaaggatggtggaagtatcacagggaaaaatcttctgtttgctgtgtttcttggttgtatgattgtgggcattgtattaatgtgtttactttcgaaaagagatgagaaaaaagataatactccaacgcattcctcatttggagctatgttgaagtacatcattgcgccacttaaggacaaaagaatgcttctcaccattcctcttatagcatattcaggtttacaacaggcatttgtatgggcggtattcacaaagagtattgtaacacccgttcttggcatcagcggcgttggtggagccatggcaatttatggtgcagcagatgtagtttgttctttggttgctggacgattgacctccggacttcgctcagcagcatttatagtgtcggttggagctattcttcaggccatagtcctgttctggctgcttcttttttacagtccaatggatggactgcttggcgcagcgataccattattcataggtgccttgtggggtgttggtgacggtgtcttgaatacacagttaagtgcattacttgggcttctgttcgaagatgtcaaggaggctgcctttgcacagctgaaggtgtggcagtcgggcgccatcgcagtcatcttcttcctgagcccaagcatcacgctgcaagccatgcttctcctgatggccgcggctctcgtcatctcctttggctcattcctgttccttacccttgttgttgagaagtcatcgcccgtcagagcctgaagtgcgaaaccatttcccgatgtccagaccggcgccagcgtgacttggtcagtgttaccagtggcctgggcagcgccatcgttgtatcccaatttcaccggaaacgcagcatccgtcgagtgcgatttgtggcacagtggtaccatttcaggcagccagtatctgaaccgaagctgtagcagctagcagttcgtgcaacggggaaaccgtcaatttgggcacgcttcttgctttgccagtagtggtcctttctccttttgcaatgtctgcactgcagcaatgttgttggaaaaaaaggatgttgtaagaaatgttgtttcatttgtaccacgtcctatcagagtggtcttttttttttt

SEQ ID NO: 14678 - DNA, 83 bp, Zea Mays
ctagagtgagagagaagagtaacacatgaatttgggtgatctttagaaagaaattttatacccccaaattcagggtgttatag

SEQ ID NO: 14679 - DNA, 1936 bp, Zea Mays
attgacacagaacaccaatatccttctgaaggaaaaaggtgatggctgagtggagcaattctgttcgtccaattcagtggagatgccactggttagagttgcgtatgagggagctttcatctcaaatatcgaagtatgacaaggagcttgctctaatcaagaaacagaatgaattacaacaggcagcaagcaaagcaaatggtactatgtcagaatcgatgcagattcataaaggccatggaaacagtatcatgaagaggagaaagaggaagaggcatgaggacagtgtggatgcgtccttgtacatcaacaagcaccagatattgtcatactaccatgataaacaaaataagggagttcaaaccggtgatctcttagttgatgacgattgtggcacagttgatggtagtatcagtggtggacttgatactactacattgcttgattccgaggattatgatatgatttgtgagcaacacgctttacaggatattctcctgacaattgatgggcttcagtctcgagtccatctgctgcaagatcgtctcagcaaagctcattctgaaggagaaaatttggcattttctggggccgatactgatgtcagagtggctgggaagagacagcgtactcaaaagcactcattctctaatacaaagtctcgacatactaaaccacagaaaaggaagaatctaaatatcttgctgaaggatgatgatgatggacaagctcttgcaggcggacctgctttggctgatggggaaactgatgtgcatatgataggtgctagtaggagtactgaagaaagaagtggagagtgcaatcactcgagggacaaagccatcacagtggacctactgttgggtactggcaattccataacaaatagtgatattggggatttatacaatgtaaacactgatgatgtcctcatagccaatcaagcagccgttgaagcttgtcagcagtttcatgaggcaaagcatctgccttctggaagtccttccaaagacaagatcatttctgctccagcagaaatgaagaataattctccaccagtggaggtgaagaacacttgcggtccagtaaaaattgagagcttgtgttctccagttgaaggagaaaacacttctgatccagcattggagcaagaatcgttccttgaaaagtcaccctcgaggcagcctgtatccccggggaacaagcaggagctgaaacctaagaaaagacggaagaagaaaggctctttatttactaagaagcagcggaaggtggactccagaacacctgatgcaaaggaaaaaactgagggcacgccctctgatgtagcagaggaaactgagagcccactctctggtgcaacaggaccaggaaccatgaggtcttgctgtgctggaaagaagcgcaaatctggaaatgaacctgcagatgcaaataaaactgggaagccatcctcagcagtgaagaagcagaaaactgaaaacccgactgcagctgcaaatgcgacaaagaagcgggccacggagaagaagctagagagcgcgagtgcctcccagaagctgcaggttgagaaagctgtgcttgtcgctgtaaatagcaggaggagccaaagggtccgtaagcccaaagtttttgctgactgaagaagcaggtagaaagtcttaggctctctattgtgtatgtatcttgtagccccgtcatcaaaatcggtggccatagcaacataggaagtgcctggatcgcctcataagttagtgtacatatatcagctatgtctcacccaaattgtagatttgttagtttgttgttcttaacccttctcttctgggctgccagattaacaatgtcatgctgtgttagcgttatatcaaaaagaagaaaaaaaaaggagaaaaatatgccatgcaactgcaacttggcccgtcgcatctttgtg

SEQ ID NO: 14680 - DNA, 1181 bp, Zea Mays
gcgaactgatcacacacgtgtgcagcacgctgtcgctggcctagcggccctagcaagagtcaaagacgggcatcggcagcaacagcaccacactctcaagtcccaactcccaacattacgagacgcctcgccggccgcgccgcgcccaactcctctgatcctcttccttgtccccaccctcttctccgatggcgacgctgcagctcaaccacatcgcgcgggagacctccgacgtggcccgactcgccgccttctacgaggccgtgctggggttcgagcgcatcccttcgcccacctactcgggcttccaggtcgcatggctccgcctcccgagctcccccgacgtcgcgctccacctcatcgagcgggaccccgccgcggcacccgtcgcggtggggcctggcgccgagggcgcgccgccgtcgcagctgccccggcgccaccacctcgccttctccgtcgctgactacgacgggttcgtgaccgggctgaaggcgcgcggcaccgatgtgttcgaaaagtcgcagccggatgggcgcacgcgccaggtcttcttcttcgaccctgacggcaatggcctagaggttactagcgctggtgcagggaatgagaagtgaacagagaccatgatttgcagtctacttctattttatcgtgcaatacctcagcaaaccctgcctacatgatgcgatcgaaaccggagacgttcctgggtcaagcttcgttccgtaaaataaataaatccgaagcacttcaaagctctacatactcgcccttgcttgtttgagacaagggcttgcgttcttgctgcatctcatccgagatgattgtaatccgaacaatgtgtagttaataaaaatgtcgctttgccctgaaaatgttttacgctgtaacatcgctctgtacgtgattggatttcctacatgacaactggctaatggagtctaaataatttccttgtcattcactcactcattcacgtttcactattagtttcagaactgaagcatcattaaccactgagaaagtggagacaatcagcagtatgctaccacacgtcgcgaaatgctcgatttggataccagaaatttggcagagaggcatatcacacagcatctattctcgagaaaagctctgtcactagtgctactagtcaacaatggtgtacaagtctcagggac

SEQ ID NO: 14681 - DNA, 2319 bp, Zea Mays
cccaagtttcgcgatattgagtggattctgcgccctagccctgaagatgtcattaaaaggtttgaggagcgaagccatgctgtggatagcaggggggctgcagagtacctgcgggcacttattctcactaacactatagcagattaccttccagatgaacaatctgggaggtctgcaagcctgccagccctgttgcaagagttgaaacaacgtgtatctgggaatgaggacaaacctttcatgaaccctgggatatcagaaaagcaacctttacatgttgtaatggttgaccccaaatctacaggtagatcaacacgttttgctcaagaaatcttctcaacgatcttgtttacaattgctgttggcgtaatgtgggtgatgggtgctgctgcacttcaaaaatatattgggagcttaggtggaattggggcatctggtgctggttctagctcatcatattctccaaaagagatgaataaggatatgatgccagagaagaatgtcaagacatttaaagatgtcaaaggttgtgatgatgcaaaaaaggaacttgaggaagtagttgagtatctcaagaacccttcaaagttcactcgccttggtggaaagctacctaagggcatacttttgactggtgctccaggaactgggaagacactactagcaaaggccattgctggagaagctggcgtaccattcttttaccgagcaggttctgaatttgaggaaatgtttgttggtgttggtgctcggagagtgaggtcattgtttcaagctgcaaagaagaaggcaccatgcattgttttcattgatgaaatagatgctgtgggatcaactaggaaacagtgggaagggcacacaaagaagacattgcatcaacttcttgttgagatggatgggtttgaacaaaatgagggaataattgtgatggctgcaacaaacttgccagacattcttgatcctgcactcacaagacctggtagatttgataggcatattgttgtcccaagtccagatgtgcggggtcgccaagagattctggagctctatttgcaagataagccagtggcaaatgatgtagatatcaatgcaattgcccgaagtacaccaggctttaatggggctgacctagccaaccttgtaaacattgcagcgataaaggctgcggttgaaggtgcggataaattgaatgctgttcagttggagtttgccaaagatcgtattatcatgggaaccgagaggagatcaatgttcatatctgatgaatcgagaaagcttactgcctaccatgaaagtggacatgctattgttgcactcaacacccagggtgctcaccccatacacaaggcaactatccttcctcgtgggtctgcccttggaatggtcacacaactcccctcacaggatgagacctctattagcaagaaacaactccttgcacgtcttgatgtttgcatgggtgggagggttgctgaagagctgatctttggggaagacaatgttacaactggggcaagaaatgaccttcacactgcaacggagcttgcccagtacatggtatcgaactgtgggatgagtgatgctatcggtcctgtgcatgtgaaagaacgaccaagcatagagatgcaatcaaggatagatgctgaggtggtgaagctcctaagagaggcttatgggcgggtcaagcgattgcttaggaagcatgagaagcaattacatgctctagcaaatgcgctgctggagcgtgaaacgcttactgcagatgagatcaacaaagtagttcacccttaccaagaagagccccatctttccttccaagacgaggagtttgccctcgcttaaagattcttttgttgcatcaagatatcggtcaccacccgtgaattgtaaatccgtgtacagtaagtggcgcctagatgagccatggaagttccttcagatgccctcttctgtaaaacagcgcgaaacacctatggtaaattagaagattggtgttgcgaaagctgatgcctgcttattgacaattctttggatggaaggcttcccgggaaggctctgggtttgcaaaaccctctcatacttttggtttagttaggatagatgtaggtttaacactgcatgttctgattgctaggtttctggctagggcaacatgttgatcatgttcttttcacttttttattgacattttctgtaaggaaatcgtacatgtaacgattgttttatttgtcaaacaagcactgtttgtttttgtcaaacagtatacggttaatgtattcgtgttgctaacgtcgacttgatggtcctgtgacaggactc

SEQ ID NO: 14682 - DNA, 532 bp, Zea Mays
aagttatcaaatctggaattgactcatgttaccaaagaaagatgaggatggcgaggatgcttcatcccagatccccttggacgatgcttcacccccagactacaactccattgaggtcatccagtgtctgatcgagcatcataatgccatcttcactgatgcaaatgaaaccgtgtggagatgatcaaggtctcttctagatctctctggtgttagctcgtgctacgtattagttccaggtaggaaggtggattaccgtccgttattgttaggtataagcattttggctggaacatttttggagtaggtttgtatatatgccgctagtgttaattctccccgggactaagatctggtcatgttatagcaatataagtcttgggtggatgtaaaccagatggacacaggacacgattgtgctgcatttgctgaattcggcttatacactgatgttaatctagggaactgttgccctgtacgttcacggttagctggtagcgtttgtcgtcaaaacaaatcagtgtagatatcg

SEQ ID NO: 14683 - DNA, 876 bp, Zea Mays
gatggaagaggagaatggtggcatcggaaactgaacaccgggagctgcagaagatgaagggaagactggctggagggaatggtcacagaatatcttgtcgcaacatttgctgattactttggtgatgttaaaatgtatattgaagaaagatcatttcgaagatttgtggaggcttgcatagaggaaacaattgtggtctatgttgaccatctcctttctcagaaaaactacataaaagaagaaacgatagagaggatgaggttagatgaagaggtgcttatggatttcttcagggaacacatcaacgtgacaaaagttgaaagcagagtgcggattctggcagatatgagggagctagcttcagctgagagtttggatagctttactctcatttacactaatatactggaacatcaacctgattgcccgcctgaggttgtcgagaagcttgtggcaatgcgggaaggcattccaaaaaaggaagcgaaggaggttgtacaagaatgcaaagagatatacgagaactcgcttgtggatggcaaccctcagaagtccggttttgtgtttggcaaattgaagtgcttgacagcaaagaaaggcatatggaggaagcttgggcagtaagtgtggacttgagcagagtggacagaagtaccacctaggcaaagactgtacgtttcacttctctatgatcattcttttgttcttttgtcgatgctactgttgggtttcacgtttagactatcagtgtgtactcagcttgaggagcaaaaatgtatattccactttgcttagctacagaggattttggtgtaagaatatgtaatttattcaataaaatggttgctatttgcaataagttggcccaagtcatcg

SEQ ID NO: 14684 - DNA, 1065 bp, Zea Mays
aagaccaattgagacaccacacaaatagtgaaatttctcacaccttgaagatgctctggtagtctggtactgtacagtcgcagcggcgaaaggggaatcgcgcgaaatggagctctcatcggcggggaggtggactgacctccccgaggacatcgccctagccgtcgcctcccgcctccaggaggctgatgtgtgcgcgctcggcggctgctcgcgcacctggcgcagagcctgcgacgccgactgcatctgggagcgcctctttcgctgccgctggccagctgccgtggcggaggcgtcggcgtcgtcgtcccgtatgcagggctggaaagctctctacatcagccaacacagaagaatggctgctgcaatatctaatgtggttgaatttgtgggaggcagcttaaataatgggtcacttgaatccgaatactatctgaaagctattgctgatttggccatgatacttgatataggatttctcgatgtccagtttttcttgttttcaaggaaccatagtgcgataataaacctaattggactgcactactcgatcgcatctttgcatgtgctgctgaagtcagtaaagcactccaagctcaccgtgtatcagaaaggatggtttgtgtgaacttgctcaagcttggtaggtggttctatggtttccggttgcctgatgagtacgagtcccgcaaaatctcgctaggtgagctcaccacggctgagggagcagagattcttgccattcttaaccgtggagctgtccacgaggtgtttcgtctccgcatcggtttggtgaacgtagataagtgatctggagtacaaaaaaagtacacacacaatatgtacttggcttgttttgcccattgtaaatatgtgtagtctttctgtgttgtaagtcatctgctgctctctgggttcttctttgttgtaagtgcaactgtggggatggatcgaagtatggacccatttaaacttttgtggcatcatagtcttctataaacaaataataaaggcttgccatgtgtaattagtgctacacattttcaccgtttctgtgataat

SEQ ID NO: 14685 - DNA, 133 bp, Zea Mays
gccataaagtgtcaccatggatgaattcaagtgggatccaaaccctaagagtgcaagaaaccctaattggaaccttggaaagccctaaacctaaaccctagggggctaagtgcaaaattagtgcacttttgga

SEQ ID NO: 14686 - DNA, 223 bp, Zea Mays
gcacttgagaataagaatatgaaaagaagaaagccaatccaagcgacaagaactcaaatgaacacaaaaatctctctcacaagccactaagtgtttggagtggatttgggactcggagagaatttgatcttttgtattgtgtcttgtagtgaatgctagagctcttgtattgaatgtgatgttcagaaaacttggatgcttgaagttgtggtggttggggggt

SEQ ID NO: 14687 - DNA, 1467 bp, Zea Mays
ataactgttgatgaaaagcattggtgatttcaggaaaacacattgttcctcgcttggtaaggatgcactctaatgagatggaggatattcaagaagcatatgctggccaaattgttgctgtttttggtgttgattgtgcatcaggcgatacatttacggatggaacagtgaaatatactatgacttcaatgaatgtccctgaacctgtgatgtccttggcagtttcacctatatctaaagactctggaggacagttttcaaaagctctgaatcgcttccaaaaggaggatcctactttccgtgtgggtttggatgctgagagtggccagacaattatttccgggatgggtgagctgcatctggatatatacgttgaacgtattaagagagagtacaaggtggatgcaaaggtaggaaaacctcgtgttaacttcagggaaacaattacccagcgtgctgaatttgattatttgcacaaaaagcaatctggcggtcaaggtcagtatggacgagtttgtgggtacattgagcctctaccttcaggttctgatggtaaattcgaatttgataacatgattattggacaagcaattccttcaaactttataccagcaatagagaagggttttaaggaagcttgcaattcaggctcgttgattggtcatcctgttgaaaatttaagaattgtattgactgatggggcttcacatcaggtggattccagtgaacttgcttttaagctagctgctatctatgcttttcgacagtgctacacttctgccaaacctgtaatattagaacctgtgatgaaggtggaactcaaatttccaactgagtttcagggcacagtaactggtgatatgaacaagagaaaagggatcattgttggaaatgagcaggaaggtgacgacaccattgtagtttgccatgttccgctaaacaatatgtttggatatgcaacagctattcgatcagcgactcaggggaaaggtgaatttacgatggagtacctggagcataatgttgtatcgcaggatgtgcagatgcaactagtgacctcgtaccaggcggccaagggcacagagtgattcttctttttacagaagaacaaattttgtttgcgaacttttagggcttgttcggttagctctcaatccatacacgtcacaaatagtaggcgataattcaaactgtggtttcttagtgaaaatacaactatgccgcaataattagcattcccacagtagaattgtacaaaacattatctagcaaatgcctgaagtttagtttgtaatgtcttggtaatgagaacatcttgtgcaatttctcctcaaaaagaaatatctaatgctacactgtgaaggcatggatgttttggttactggtaatatttctccttttcgtttttgggtttctgttcaaactgtttgtttttatattagacaaatggtggtaaagttaagctag

SEQ ID NO: 14688 - DNA, 2924 bp, Zea Mays
gggaccgggccacgccatggataaaggagcagccggtggctaaatttttggttggccccgcgggcgcacgtcgtttccgctcgcccccctgcgatgccgggaccggccgtggaggcagcggccaggagcggcggcgaccaccacggcggctgctgcgggaaggcggccggcaagtgggagaagacgtacctggatgtcctgggcatctgctgcaccgccgaggtggcgctcgtcgagcggctcctgacgcccatccaaggcgtgagggcggtcaccgtcgtcgtcccgtcccggaccgtcatcgtcgaccacgacaccgccgccgtctcccagttccacattggttctgaacaaggcgggcctcgaggcctccgtccgagcctatggcagcagcgccggcgccggcgggcggtggcccagcccgttcaccgtcgcctgcggcgccctgctcgccctgtccctgctcgcgccgctgctccccccgctgcggtggctggcggtggcggcggcctgcgtgggctcccagcccatgctgctccgggcgttcgccgcggcgggcaagctgacgctggacatcaacatcctgatgctcatcgcggtcgccggctccgtggcgctcgggagcttcacggaggccggcgccatcgtgttcctcttcaccgtcgccgagtggctggagacgctggcgtgcagcaaggccagcgccgggatgctgtccctcatgtccacggtgcccaagaccgtcgtgctggccgagacggggcaggtcgtcggcatgggcgacgtcgcggtcggcaccgtcgtcgcggtcagggccggcgacgtggtccccgtggacggcgtggtcgtcggcgggcacagcgaggtcgacgagagcagcctcaccggcgagtccttccccgtgccgaagcagccgcagtcggaggtctgggccggcaccatcaacttagacggctacatctccgtgaggacgacggccctcgccgagaactcgacggtggcgaagatggagaggctggtggaggaggcccagaacagccggtctcggacgcagcggctcatcgactcgtgcgccaagcactacacccctgccgtggtcgtcctcgcggcgggggtggtcctcgtgcccgccctgctgggagctcgcgacctggagctggagcattggttccggctgtccctggtgctgctggtgagcgcgtgcccgtgcgcgctggtgctgtccacgcccgtcgccaccttctgcgcgctcctgcgggcggccaggatggggctcctcgtcaagggaggcaacgtcctcgagtcgctgggcgaagtcagggtcgccgcgttcgacaagaccggcaccatcaccagaggggagttcagcatcaaggacttccatgtggttggggacaaggttgaaatgaaccagctactctactgggtatctagcatcgagagcaaatcaagccatccaatggccgctgcacttgtcgagtacgctcagtccaaatctgtacagccgaagccggagaacgtgaccgagacctgcatctatcatggcgagggcatctacggggtgatggatgggaaacagatctacattggaaacgaaaggatcatagcaaggtcctcgtgtcgtcatcatcaacatgctggccaccaagaaacagacggtctcaaaggcgtgtccatcggccacgtgatctgcgacggcgatctggtggggaagttctcgctgtccgacacctgcaggacaggggcggccgaggcgatcctgcagctgaggtcgatggggatcaagtcggtgatgctgaccggggacagcgcggcggcggccaagcacgcgcaggagcagctcgggggcgtcctggaggagctccacgcggggctcctgccggaggacaaggtccggctcgtccggggcctgcaggcgcggcacggggcgacgctgatggtgggcgacggcatgaacgacgccccggcgctggccgcggcggacgtgggcgtgtccatgggcctgtccgggtcggccgcggccatcgagacgagccacgccgcgctcatgtccggcgacatcctcagggtgcccaaggccgtccggctcgggcgccgcgcccggcgcaccatcgccgtgaacgtggcctcctccgtcggcgccaaggccgccgtgctggcgctcgccgtcgcgtggcgccccgtgctgtgggtggccgtgctcgccgacgtcggcacgtgcctgctcgtcgtcctccacagcatgctgctgctcagggacggcgccgcccgccgcccgaggtgctgcgctagcgctacggcgtgcaagagcaagcaggcgtccaagccgtgctgcgcgacggtgaagccggtggcgacgacgaggcacaggcacgggcacgggcacgggcacgggcacgcaggcgcggggaagcccgggacgctaggaggcgacaagcagggtaaggactgccatggttgctgccagaaggagagcaagccgcccgaggacgccgtcgtgatcgccattccgggacgggccgtggagcaccggaaggaggccttccctcacgagaacgcgggagccggggggtgctgcgctgcagcgcacggtgccgaagacgaggtatgcattgtcatcagcgccaggtcgccctgctgcagcaccgcgaggagtcggtctggttctcccaaggacgcattgtgctgccacggctccggtggtaaagacggcggcgccatctcagccctcgtgtgctgacctcacctaccagcactaccattcgtggaatacggtcgtcttgtatataaaaaaattactcatatcctatgccgtagacaggaagttgtttctattacgagtactaatattcttgtaatctatgttcccctgagatcattagaaaaaaaattatatataatactctattaaaaatctaatgtgg

SEQ ID NO: 14689 - DNA, 1394 bp, Zea Mays
cctgcatgcctccactgagactgagaccgacaaaagttgagcaggatgactatgaagttgtcaggaaggtcgggagaggaaaatacagtgaagtatttgaaggtattaatgttaacaataatgagaaatgcatcatcaagatcctcaagcctgtgaagaaaaagaagatcaaaagagaaattaaaattcttcagaatctttgtggaggccctaacattgtgaagctgctcgatattgttagagatcagcattcgaaaacgcccagcttgatctttgaatatgttaacaacacagatttcaaagtgctgtacccaacattaacagattatgacattcggtattacatctacgagttactcaaggcattagattactgccattcacaaggtattatgcaccgagatgtgaagccccacaatgttatgatagatcatgagcttcggaaactccggctgatagactggggtcttgctgaattctatcatcctggcaaggaatataatgtccgtgttgcatccaggtacttcaaggggcctgagcttcttgttgacttgcaagattatgattactctttggacatgtggagtctgggctgcatgtttgctgggatgatttttcgtaaggaaccatttttctacgggcatgacaaccatgatcaacttgttaagatagccaaggtacttgggacagatgggctgaatgtttatttgaacaagtacagaattgagcttgaccctcagcttgaagccctcgttggaaggcatagcaggaaaccctggttaaagtttatgaacgcagataaccagcacctagtgtctcctgaggccatagatttccttgacaagcttttgcgttatgatcatcaggagaggcttactgcacttgaagctatgacgcacccgtacttccaacaagtgagagccgctgagaacagcaggacgcgagcgtgacaggcaaagagcgaagaccatctgctcttttatcagtcagtcaggttgtatgagatgagtagccgttgggtcacttggcagaaaataaacaatagcggtagagcctgtactgtacgtaacgtaacctcctcgaggagttgtgaggtttgggacgtgattgcgaacatggtatattaatgattgttcatgtaaggtgctgtttggttcaagaaatgtaacacaaatggtaatggtaatggtttacgctcgattactggcggtaacaaatttgaataggctgatatcaatttttagtgtgttatttgattacggttggactaaaacaaacatgatctaacgttatcagttacccattacgttataaatatgtgaaccaaacggcacctaagatatttgtcataaaatgtttgtccgtttgctcctgggggctactttccctttgtg

SEQ ID NO: 14690 - DNA, 1288 bp, Zea Mays
tgttaatttgctatttgttctgtttgcctatatggtggtgatacgcgatgatgcgatgtacaagtcgtcagtcacatgggatgtatgttttttggcctgctgctataaatctcgtgcccaaataagaacctttgtttgctgcaaactacccaagcccaagccaccgaccaagtgggagctgtttgcaaaggcgaaaggaattaccaagcgcaagaagaacaagcgtgagtgggacgagcaaactcaatcctggaagcggacttatggctatgaccgtgtaaatgatgataaagacgttccgattcttgaagccaaactgactgacgagcctggtgttgatccctttgcacagagaagggatgagaagaagaagagggttgaaaagcaagaaaaaagcagattagagaatttaaagaaagctgcaaagtcatatacagcttgctgcgaaggccttgcccatcacaggaactaaagctgaccttccaaaaaaatctagaaaagaggatcttgagagtgttgttggcatggcttcgtcagcaacagcaagcggtgggaagtttgacgagaagttgcctggcgagaaacctccaaagcaccctggcaaacatagaaagttcctcccagttgctgaggggaagggaatgggcagcctggagaaacagcagaatgacaaaatcctgagctctctacttgccagaaactctgatgaaccgcttgatgtcagcaaggcaattacaatgtacaaggtgaaaaaggaaaagcagagaaggaaagagaaaaatatgccatcaaaatctgataagcttaagccccagaagaaaccccacaagaaatcatcgaagaaaagggcttaggtccacgtctttcagttgaccacagttttgaaagctgaagcaaggaggcctgtcacatattggattgtatttgtgagctttgaatctctgggagaaatattgttattccgtctaatggttatgatacaaaaacctgaatgctttgccatggtatgcgcccatcttgtacttttcaaattatgtttgggatgtggtttgtagcttggtaagagtccctccctttggttctgaaacctgttcaaaggagctgtcctggaaacagtaccaatgaagctactgtctagtgtcgatggtactgatttgttgttggcctctgagtttactctacgatgtggtgtgagattatacattttaaatctttcctccgataccttgtcaagctgtcatcgtttttgcagtggtacgtacaaagttgtgatcaaattgattcgttt

SEQ ID NO: 14691 - DNA, 929 bp, Zea Mays
gccgtctccgccgcccgaactccgcagaggctctcaggaccagcaaacgtgaaatggcggtcgccacgcggggagttgagagagagattggttccctgcaaatggaggagaaaaagctggttgcagagataaagaagactgccaagactggaaatgaggctgcaaccaaaatattagctcggcaacttgtcaggctgaggcaacaaatcctcaatttgcaaggcacacgggcacagattcgtggagtagctactcacacacaggcaatgtatgctggcacttcaatctctgctggaatgaaaggtgcaagcaaagctatgtcagcaatgaacaagcaaatggaaccggcgaaacagataaaggtcatgaaagaattccagaaacaatcaacacagttggacatgacgcttgagatgatgtctgatgctattgatgaaacacttgacaaagatgaggcggaggaggaaacagaagagcttacaaaccaggtccttgacgagattggcgtcgatgtggcttctcagctctcttcggctcctaaagggcgcatcggagctactaacaagaaagtcgataatggtcaagcacgtcctgcaaggaacgtggcggctcctgctctagaaccctcctctgctgaagttgaggatctggagaggcgactggcatctctgcgccgtacctgagtctgagctgttgaagaaagaacttgtttgtaatactagcagttattcatctatatatgtaaagttggtttatatgtgtagggaaaacagcgagctgcacatgatacggttgaacctacttaatgttttatttaatttggaagttgactgcacagtgaccctagtcgctagtcccataagccgacggaactaggcgaagccagggcttagggtcacgaagggtttagggtcacgaaggattttaat

SEQ ID NO: 14692 - DNA, 639 bp, Zea Mays
ctcgatcttagaacgagaaacttaaaggaaaaaaagaagtcatgatgaagagtacagatttataagagcgcgcaggagctaacgtggttgagtgtgcatgcctcattgggcttcccaagtttaaggatttctataagctcaacgggaaaccggtttacatcctggtggagtcccgcaaataggacgcagtaaaatggtcagacaaaaaaagctttctagcttcccgtccaaagaagctcacagcttcactcatttgcacgcgcaagcaaggtggtatgggggcaccgagaaactccgcagtaatctgtgttgaggccacggccagatgatgctatgtactcctatcttcatggagagggtgatggactgggtgaaacgtagtcactgtacttttgtagcacgtcatgtctagtgtttcttagtagccatggctgaagagagtttgtagcttattcccggcttcctgcagccaggaacatcagtgttagccagagaagctaggaaaaaggatcttatgttgctgctcagttttctaccagaatcgtcttcctttttttcccctttgcagaatcaactctttggtaaactttactaagctcgttttgcctaaacggccgttcaatcatgaagaaagagcaa

SEQ ID NO: 14693 - DNA, 399 bp, Zea Mays
agactcgagtactagactagagtctcaactcttgagcagggaaaacgagagatccttggagtcagcaatggagtctaccgcgctaatgaccgcgagactaccactgctgacctctggctcccgttccaaacccctcccctttgcttccttcaccagggcggcttgccgtctcgcctccgcccccttctccggcagcggcagcgtcgtcctgctgtcgcgccggagccgcgactatgctggcgttggttccttggtctccgccgcggcggatcctggggatacggcggacgccggatccgagtccatcctgctcagcgtccaggggatgatgtgcgacgggtgcgccgcgagcgtgaagcggatcctggagagccaaaacggactgtacactaagcgaag

SEQ ID NO: 14694 - DNA, 133 bp, Zea Mays
aaaagccttttgcccagtcaaaagcacaagcaaaataacaccaaaactgtaaatatcagctttgatgtcatttgctccaggatcactaagctcaggggcagcatagcctttagcactgatgatagcttctgaa

SEQ ID NO: 14695 - DNA, 1219 bp, Zea Mays
gtgaaatatagatagcacacagatacagttgtataataactgatgcggcctaatgtgttaaatttattatgtatggtttctcccagtcccagttgacgaatgggggatacagcagtggatgccacgtatccaaaatcatgcaaattgcaactagtggcctcctcgtcctcgacactgacgcacacatgatcccaaatcaacttcacgcagtatcccagtataacagctagtacgaagtactattcctacacgggcttccccgcgggtcccaccattaagcatccaagctcggcgttgcggaggcccagcgcggcgcggaacacgccgccgacggcgtcagacaggcggtccagccgcggcgcgagctcctcggtgcgcctcccaacctcctgcgccgcggcgcgcacggccccctcgttgtcggtcccggagtccagcgccgacgcgagcctccggacggcctcgtcgacggcgcgcacctcgccggcgccgagcgccgcgagctggccggacagcgcgttgaacggctccgcccaggggaggtcgccgccgctgccggagacccaggggaaggtggcaggtcctccggcgaggacggtagccgcggccgccgccgcgagcgaggagacggcgtccacggcggcgaggacgcgcgcggcggccgtgagctgcccgcggggctgctcgaacgggagccaagggagcggcggaggggccggggggtcgcggtccgcgagcgccgcgcgcgcgcgcgcgagcgcgggccccgcctcggcgagcgtgagcgcgaggaggtcggccacccgcacgagcgccgcgagcggggaggccggcagcggcagcaggccccggaggcgcgcggccagcgccgtgccgaaccggtgcgcctcccccttctgctgctggcgtcggctgggcttggaatggtggtggtggaagggcagcagcgagctgtacttgtcggcgaggaacatctgggctgggatgctgggggctcgcggcggcgtctggtgtgctaggaggagagagagagagggtgcgggaggatatagagggcgggcggcgatgcggttgcgtcgggggtgtgaaaaggggcgggcaggacggcgtgcgcgacgcgacgcggggaggcttctgtccccggcgggcaaggctgcgtttccgggaagcggaaggggatgtgacgggaggcgctgcgtgggcccgctgtgtaagacgc

SEQ ID NO: 14696 - DNA, 146 bp, Zea Mays
ctaaaggtctcatgctcaactcaaattgtttcaaagaggaggacttgaggtgttacataaagagaagagaaggagggtctcatcttcaggaaatacatcagccatgggtaacaatgatttaagtggagcacaaacatcgaagtaaa

SEQ ID NO: 14697 - DNA, 2154 bp, Zea Mays
attcttttacttgcttcggttgatgctcttgtactaagtgatgccctgtacagcctgcgtcagagcttgaaagatgctaacaatgtcttgcagagttgggatcccactcttgttaatccatgtacatggttccatgttacgtgtaacaacgataacagtgttatcagagttgaccttggaaatgcacaattatctggcgttctagtgccacaacttggccagctgaaaaatctccaatatttggagctttacagcaacaacataagtgggacaataccccctgaactggggaacctgactaacctggtcagtttggatctgtatatgaacaacttctctggcaatatccctgacagcctggggaatctagtgaagctgcgtttcctacgtcttaacaacaatagcttggttggtccgattcccgtatccttgaccaatatctccactctccaagtactggatctctcgaacaacaacctctcaggacaagtcccatcgactggctccttttcactcttcacccctataagttttgccaacaatccaaatctttgtggccctggtacttcgaagccctgccctggggctcctcccttttccccacctcctccattcaatcctccatctcccccaactcaatctactggtgcttctagcactggagcaatagctggaggtgttgctgctggtgcagcattggtgtttgctgttcctgcaattgcatttgcaatgtggcgccgtcgtaaacctgaagagcatttcttcgatgttcctgccgaggaggatccagaagtccatcttggtcagctcaaaaagttttcattgcgggagcttcaagttgcaactgataatttcagtaacaagaacattttaggaagaggcggttttggaaaagtgtacaaaggaaggcttgctgatggctcattggtagcagtgaaaagactaaaagaggagcgtacacctggtggtgagcttcagttccaaacagaggttgagatgattagcatggcggtgcacaagaaccttctccgacttcgtggtttctgcatgacacctactgaaaggttgttagtctacccatacatggctaacgggagtgtggcatcacgtttacgagagcggcagccatctgagccacctcttagctgggaaccaagaagacggattgcactgggatctgcaagaggactttcttacttgcatgatcactgcgatcccaaaatcatccatcgggatgtcaaagctgcaaatattcttttggatgaggacttcgaggcagttgtgggtgatttcgggcttgccaagcttatggactacaaggatacccatgtcacaacagctgttcgtggaacaattgggcacattgctcccgagtacctatctaccggcaagtcttctgagaagactgatgtttttggctatgggatcatgcttctggagcttattactggccagagggcatttgatctagctcgtcttgcaaatgatgacgatgttatgcttcttgactgggtgaaaggactgttgaaggagaagaaggtggagatgctggtggacccagatctgcagaaagcctacgaggaggtcgaggtggagagccttattcaggtggcactcctctgcacgcagggctcccccctggaccgtccaaagatgtcggaggtggtgaggatgctcgaaggtgacgggctggcagagcgttgggacgaatggcagaaagtagaggtggtgaggcaggaggctgagtcggcaccgctccgcaatgactggatcgtcgattccacgtacaaccttcgtgccgtggagctgtccggcccaaggtagccactccacgactccgatgaaagaaaacactgaattggccaagattcagtctaattgctgcttgtgtatatgaaaggtagcttttggaattgttagcgacaatttgaaaggatcgatcttttttttttggattcctcgctagctcagatgttggttacgctgaggttgtgttaaggtgaaaattcgtatatctaagggtgaatttctaaagcattcttgcaatagtccagcagcgaatgtagcagctattgtactacgtggtatgcagaaccgtgttacgttttgccatagcttagttctggttcagctttctaagccacggtcaaaagt

SEQ ID NO: 14698 - DNA, 2308 bp, Zea Mays
aagcagacaagcgtcctgaggacctcatgctcagtttgttagtggggagaaagagaaggaccgatcagataaagaggtgtaactccatggtttaagttcttctgagagacatacaggactgttctagagatactgaggaacaattcaaagcttgaagcgttatatgctatggctgctcatagggcttttcaattctgtaaacagtataagaggacaactgaattccgtaggttgtgtgagataatcagaaatcatctcgccaatctgaacaaatatcgcgatcaaagggatcgtcctgatctgactgcacctgaaagtttacaactatatcttgatacacgtgttgagcagcttaaagttgctacagagctttgcctttggcaggaagccttccgatccgtggaagatatccatggtctgatgagcatggtgaagaaaatgccaaaaccttctatcttggtggtgtattatgcaaagctgaccgaaatcttctgggtatctgatagccacctttatcatgcgtatgcgtggctcaagcttttcaacctgcaaaagaactacaataaaaacttgtctcagaaggatctacaattaatagcatcttccgtcttacttgctgcactatctgtggcaccttatgacaaaaaatatggtgcatctcatcttgagacagagaatgagaaggagcgtaacatgaggatggccaaccttgttaacttctcgcttgattccaagcgtgaaaatagggaaatgccttcaagagcatctcttctatctgagttggcctccaaaggagtcctttcatgtgcttcccaagaagtgcgagatttgtacaaccttttggaacatgagtttctacctctggaccttgcatcaaaagtgcagccacttctttcgaagatttcaaagatgggagggaagctttcatcagcttcttctgttccagaggttaagttatctcagtatatttcagcattggagaagctgacagcattgagagtgttacaacaggcctcttgtattttccagtcgatgaagattgatatgctctcaagaatgattccgttctttgacttttttgttgtggagaagatttctgttgttgctgtgagacgcaattttgttgctataaaagttaaccatttatcaggagctgttcattttggtactgtggacatagaatctgatggcttaagtgatcaccttagtgttgttgcggattcattaaataaagcgaagattcatatttgtccaccagttaaaaagccatctaaactcggtgaaagttttattagtttggctggaatagtggagaatgagcataagaggcttcttgcaaggaagtccataattgaaaaacgcaaagaagagcttgagcgtcaaatattggagaaggaaaaagaagaagaaaaaaagagaatgagcagtcaaaagaaaaccgcagatgaggaaagggtgaggcttctcaatgaacagagacagagggagcaggaccggattcgtagagagatagaggaaaaaaataaagccgaagcaaaaaagttgctagaagacttgaagaaggcagggaaaaaacatgtcgttgttgaaggggagcttactaaggaggccataatggaattgacacgaaatgaacagttgaaggagcgccacgaaatggagaaaaaactgcagaagtttgcaaaaacaatggattatctggaaagagcaaaaaggcaggaagaggcaccactgattgagcaagctttccaaaaacgtcttcaggaagagaagatccttcacgagcaagagcagcttcgggagattgaactcagcaaacaacaccatgctggcgacttgcaagagaaaaacagactttctcgaatgttggaacacaagaatgctttgcaggagagaattgtccaacttcgtgaagctgagtttggtcgtctgaagaaagagagagacgaacggttcagtcagttgatatcatcgagaaagcgtgaaagggagagagtgaggaagttgatgtattatctgaaccgggaggaacagcggattgaaatgcttcgtgaggaagaggaagctagaaaacatgaagaggaagagaggaggaagagagaagaggctgaaaggaaagctaatcttgatgctattgctgaaaagcagcgattgagagagatagagttggaggagaaggcaaaggcgaatagggagaagctcttaaaggggtctgaggcagctgatggcagtcagatgttatgcggtattgtttgattgttccctatattgccaataaaaaggtttgcacattgacagttgaaatgaa

SEQ ID NO: 14699 - DNA, 399 bp, Zea Mays
agcgaactaagataggattgtgatgcaaattatcaggagatgacttcttaaccggtgttgcgtctgatggtgaagaggaagatgccttgattgacatggacatatgactgaccgtgttctgctagctacctgatgtgcgtataatatagaacatgtatgctcattcctggtagggaactttcaatatgacgcacttttaccgtttcctgtaaaaaccatggcacggtttagctttgtctgtatatgcggatttgagatttggtggcgggaaacttccaatcccctaggcttgaactgccacggtaattcggtactctgttgtttgctagacctgcaatgaataatgttgcgccaactgaattgttcaatttgatcaattgtgaattcacctctctggaa

SEQ ID NO: 14700 - DNA, 1533 bp, Zea Mays
gatgatgtcacgttgttgatgtcttccactcttcctccactagtctactcggcagatttcactgactctcaccggcggtctttgtgcctccaccggccgccgccatgccgtacctcgtccgcgagcggctctacttcggcggcatcaaagacgccattgccgccctcacggagtcttcctccacgccggacttcacccacgtcctctccgtggtcagctccgcctccatctccttcatcaccgattgccgcccgggcctcgagatccccaccgaggaggtcctccgcgtagtcgccggcgaggagggcgcggcaccgactgccgcggttcccccggggacgctgatgcgggtggtggagcgcgccgggcacgggctgcgggtcacgcgcatggccgtgccgctgcgggacaccgaggaggcggacctgctcgaccgcctcgagccctgccttgagttcatcgatgagggcaggaaggtcgggaatgtcctcgtccattgctttgctggggtgtcgaggagcgcttccatcattgttgcttatcttatgagagcagaacagaaatctcttgaagaagcattagaagctctgaaggagatttctgagtcggcgtgcccaaacgatggttttcttgaccagctgaaattatttgaagaaatgggcttcaaagttgatacttcaagtcctttgtacaagagattccgcttgaaattattaggccaatcctacatatctggggagaaaataagcagctatatgtttgaagatgaccctggcctttctctagagtctggctcttgtcaagattcttcaaaggttgagcaacgtaaaacagcttaccgctgcaggaaatgcaggagagttattgctgtagagggcaatgttataagtcatgttcctggtgagggtgaatcttgctttgattggaaccgaagaaagagtggtcatccatacaacaacaaagaacatggttgctcatctttgtttgtcgaacctctgaaatggatgactccagtagaagacggcgctttggagggaaagctatcatgcatccactgtggagctcggttgggatacttcaactggtcaggaatacagtgcaactgtggtagctgggttactcctgccttccaaattgttaagagcaaagttgatatcagcaccatctagacctgtgagcaaacgactggcaagtttgagggacgaggagcgcgacagcagtgacgcctgacggtttaatgttttgtgtaccatatgaacgctacgtatacaggtgaagcaatagcgtattttatgtttttccattgccgatcagaagctgtgtgtgacaaataccgtataaaatttcgcatttgctgatgtaacaagtagccgtgatgtcggccatctgtttagctggaacgggagcgaatgcagattgtgcagagaaatgaacacggttgtgtttctattctttctgtggattcaaatgtgcgcccaatatgaatactcgttcgtttctttttttcaacggtgcacatgcatcttaaggttc

SEQ ID NO: 14701 - DNA, 826 bp, Zea Mays
ggaccgggcagtggaaccgacggccgacgcgcgcgtcgtcctcacctcacgtgtgtcaccgccaccgccgctcacagccacacacaaccggacgacgacccgagcggattgctttgctattcttcgccgtctcaaaattaggagccggatccacgaagggaggagaaaagggctccttttttatgctgtcactgcggtcgcgggtgacgctttcccaggctctcccaccgtcgtagacgtcgccttcgccctccacacgcacacccatccgctcccctcgcgtcgccttctatcttcgagggagagccggagagccttcgccgctctctcactcgctctgttttgtacctcgctctgatctctccccccgcccgtcgctgattccctgcccgtttgtcgccattgccgccggtcgtgccgtgtcaaggacatggcgacctcgggaaagaaacacctgaattcagtgaccttgctgttcaaactaccgtattacacgcaatggggccagagcttgctgattgccgggtcggaaccagcactcgggtcgtggaatgtcaagcaaggagtatctctcagtccagtccatcaggacagtgagctaatctggtgtgggagcgtgtctgttgttgccggctttacctctgagtacaagtactatgtggtggatgacaagaagaatgtgttgagatgggaggctggggagaaaaggaaactagtcctgccggagggcgtgaaggaaggagacgtaattgaaatccgtgactggtggcaggcctagcgcagtggtgacaagtctttccaccaagctaatggtcctggtttctga

SEQ ID NO: 14702 - DNA, 1447 bp, Zea Mays
gctttatgcaatatagctgtgacttacttcgatgcgtgcagttgagttcattgaggtatatgctgtgatgtcattcctttcccttatcctccctaacaacgcgatatactttaattctattcgggagatctatgatgcttgggtcatctacaattttctctcactctgcttggcatgggtgggaggtcctggtgctgtggtggtaagtttgagtggccgaacactgaaaccatcatggattctgatgacttgctgttatccagctattcctctagatgggcgttttatacgaagatgcaaacaaggttgcttgcagtttgtgattctcaagcctattttggttgtcatcaccttcatactttacgcaaaaggaaaatacaaagatggaaacttcagtgtcaaccaatcctatctctacataactatcatatatacaatctcatactcaatggctttatatgcccttgcattgttctacgcggcttgcagagatctacttcggccatataatcctgtcccaaaattcatcatgatcaaatcagtggtgtttctcacatattggcagggcgtcctggttttccttgctgcaaaatctcgatttatcaagaatgctgataaggctgctgatctccagaactttgtgttgtgtgttgagatgctaatagcagccgttgggcacttatttgccttcccctacaaggaatatacaggtcccaatgcccgcccttcacgtggtttcagagaaagccttcttcatgctttgaaattcaatgatttctaccatgacaccgttcatcagtttgctcctacatacaatgaatatgtgctctacaatcacaatgagggagacagtgcacaaacaaagtatccctcggggagcaccgccacaagtgggcagggtgtagagttggctggcatcaccgtggcggcctcaaacagtccagtgtcgtcaagtgtatcatccaaccaggcagatcaggaagaaacaatgacaaccccaatcaaggacaaagttgatcctcctggagggctctacgacctcacagaattgcttgatattgatctgtctagctacccagccaagcttcctggaaccaccgatgtaagaaaacaatgatcaagcttgatgagatgggctattggtagggttgttgcgattgggttgggggaaaatcgtgattattatttttttactgttgaagagtgccatagttaacattgtaaaaatgtgtgtattatttgttctgatttttccccccgttgaagggggtttattcattgtcagcagttgctgccacacggcctccctcaccctgctctttattaaccgtgtaaaatgttgtgagcttaaggtgaaccttagtgtcaaggggagtctataccagtacaatattctgcgtttctggtggcgtattttttgtctctctatccaaggggcttgtttggc

SEQ ID NO: 14703 - DNA, 166 bp, Zea Mays
ggtaaaggtcagtgctcgtcatcgcctagacaagcctgctagtcatggtaaatattacaaattgactgaaatgcatcttgatgttgttggaatgttcctttaattatgactgaaatgtaacagtgagatctcatcactaaaaatttatgacttggttaataatgac

SEQ ID NO: 14704 - DNA, 287 bp, Zea Mays
aatcacccaagaaacaaaatgagaaaatgctacgtcaatcggctgaagatgaggccagtgacctcaagaatcaaatatcacactggaaaaagctggaggctacagctacagctgagataataaaactacagaaaatgctagatgctgaagctagccagaaagagaaacttgaagaagaaataggtgttttgagaagccagttattgcagatgagtatggaagccgatgagacaagaagtcttgataaaggagatgggccaggaaaaatatttcctgggtttagattc

SEQ ID NO: 14705 - DNA, 121 bp, Zea Mays
cccccccccccccccaaaaaaaaaaaaaaaaaaaaaaccccccccccccccccgaagaaaaactttttttttaaaaccccccaaattttttttttttttttaaaaaaaaaccttttttttt

SEQ ID NO: 14706 - DNA, 1310 bp, Zea Mays
atcagtagtagtggcattttgcccctgctgtgccatctctctctcgctctcgctcctctcctctttttctctcctgctcagccttgcttcccgtcccatcctttctttcccttgggcgcattcagcagcttcagcctggccggccggcctgctattaaaccactttgcttgcaagtccaagaaactgctagagaggaacaagcatggggaggggaaggattgagatcaagaggatcgagaacaacacgagccggcaggtcaccttctgcaagcgccgcaatgggctcctcaagaaggcgtacgagctctccgtcctctgcgacgccgaggtggcgctcgtcgtcttctccagccgcggacgcctctacgagtacgccaacaacagtgtgaaggctacgatcgagaggtacaagaaggcacacgccgttggctcttcctctggccccccactcttagagcacaatgcccagcaattctaccagcaagaatccgcaaaactgcgcaaccagatccaaatgctgcaaaacactaacaggcacttggttggtgactctgtgggaaacttgtcactcaaagagctgaagcagctggagagccgccttgagaaaggcatctctaagatcagggccaggaagagtgagctgttggctgccgagatcaattacatgggtcaaaaggagaacttgagcttccagatggacacatggaatcttcagacaaggtatggcattgctattgaggagggagagcaacagctgcagcaggtgactgtggcccagtctgtcgcagcagcagcggccaccgacgtggagctgaatccgttcttggagatggataccaaatgcttcttccctggcggccccttcgcgacactggacatgaagtgcttcttccccggcagcttgcagatgctggaggcacagcagcgccagatgcttgccaccgagctgaacctcggctaccaactggcgccgcctgacactgacgttgccaacaataaccctcagcagttctaaactggatccatgagaaagccaactgtgaccgatggaagctggctgttgcctctagatgatattggcttccataacctagcttattatggtgtgtattgttgccttttgtgtgtgattctccttactactgatggagaataaacctaatcgattgggcataatgatcaaatgctacagcacccgtgaggctgtgatcaggacatcatgtttgttttgaatagcactttttatctattacgaggactctaggcctcaatatatagaggtacaggagattacaaatatacacaaaac

SEQ ID NO: 14707 - DNA, 988 bp, Zea Mays
aggagggcaaaagagcatagtctggagctcaaggaagttttgaggactgtccctgaggttcaagaattagttgacaaagaagaatctaggaagcttttgagtgtcaaagagcaagatgggggaatcggagtgaggtcatatttgaaatcagctttcaccaagttaatgacagcgtgtgatgaagcagtttctgaagcaattacaaaccttaagagtcgcttaaaaagtgagagtaaggctagaagtttaacgaagaaggagcaacttgttctgtcattggagaagcagtacccaggagatgttggtgttctggcagcattcttccttaattttgttaagctcaatcctggtctaactcctaaatacagagatgtgcaaactctctgctcgatgttgacttataatcaggccttccctgaaattctgcaaggaatgcctgtacagccatacgtgactcgttacaccccatcaactgatgaattcgaagttgaccgctacttgctacctcctggaaaatcagtcaccatgtctccggtgcctggtccatccatattcatcgtcttgacaggagaaggagaaatccaggcaggtttcatgactggcagtgcaaaggcgaaggaaggtgacgttttctttgtgccggctaacaccaaggtcaagctctacacttcttgccccaggtccatgcaactgtatagggctggggttaacagcagtttcctgagttgatgggcaactggtttctagggttggcatctgtaggttaggtaccagctacacaaggattttcatgtttggcacttgtccaagaagtaagttaattatgtgggttctcatcgtgtataggaaatatggagaataagttcatcccttgtttattttataaatttgtatttcatttccaaatctgacgagctgctgggatcacaaggatatgtaattcgagttcaaagttaaatgtgcatcttgtgaacattagggctggaaa

SEQ ID NO: 14708 - DNA, 593 bp, Zea Mays
actttgatgatacctataagttggttgtggcattacctgcaaggttttcgcgggagcagtagtgggcctcgtgtttggtgctatctggtactggattgtcaataccatgcttgttaattacttcccaatgattgaggagagtgcaatcgggaggtggttgtacatcaaggatacatctcatattccagatgtgctcaaatttgagtatgataacgcaagggcagcacggaagaaagttgctactgattgatcttgttatgcttctggattgcattttgctgttgttaaggcgccttataagaattgtgcatgatatttccttcagttatgctacacacgggcacatctgcacatgtagcagcagcaacattcagagaagaaatgctcaccggagcttgtttgatttagctcttcctgggcatacgccactttgtttttccccgtatcagtcactagccagacattattttattaaaggttgttcgactataacttgataattgcttacatttgaaaaatgacgtgaacaatacatgagttcatctctgcagtctagtgtctatacataactgtttcgtgggctctgtgagcaa

SEQ ID NO: 14709 - DNA, 1503 bp, Zea Mays
caccaaattagtgaagcacagtatggtatccactccatctactcgattagttctgcaaagcagcagggaccagaaatctgttgctaaatccacaagctgctaaagccttcgaccaagctttgaagagtagcaaagccgattcagtgaagcgagacgagaccttggaggagggcgcggcgcggcgcatccccgcggaggttgcggagggagaagagcgcccggaagcgctccgcgatgggctgctccgtgttcagcagccgctcgcagaggaaccgctccatctccggggacgactcgaacgcggaggtggccgtcatctcacgcgggcgactccgtacggttcacacgctccggtcggcaaggtggtcactgggggcggcggcggcgaaggaaatcccgcctctcggaaagaaaaagaaaaggagaagacgagggacgagctcgcgtcgagtcgacgccgaccgtccgatcggaacgcgccacgtcacctctccaaacggacggacgacagcgaccagaggctcctcttgtcttgatgccggtgggtcccaatggctttacccagattctggcccacatggcagttacacgctacgtgtgtaatctcgcgtcggcgaagcgcgtagcattccttttcctcctcccctttgcggcttctcgcagcgctgcgaatcccaatccgcaccgatccgacgcgaatcgatcgagaggcagggggcagcactaatcgaatcgagactagcgccatgaacccgagaggccatcgtagcaacagaacttctctcttcgatggcattgaggagggtggaatccgagcaacatcctattcttctcatgagatagatgagcaagaaaatgatggagctattgatggactgcaggatcgtgtcagcattctcaagcgggcgatatccatgaagaggtggagactcataacagaatgctggaccgaatggggaacgatatggatacttcaaggggttttctgtctgggaccgtggacaaattcaagatggtatttgagaccaaatcaagccggaggatgggaaccctcgtcgcatcattcgtcgccctttttctgctggtttactacttgaccaggtagaagacatgacatgctggaaatggtcatctcatcatctgcgtgccgtgccgtatagatagataccttgaaaacccaccgtcctgagtgccaaagtatatgttgatgtgggtgtttcgtcaactctgcactgtacaacacgactacagcgtgcgtgctgggtcgatcctatgttctcttgttgcgggattcaagtttgttgtccgttccttccctttggcatgtcatgtgtatggtatttagtagcataacaacaacaaaaaaactgtataaagaagctttgattgagcactatgtgaggtcgacacgtgtcccgcagcatctggcaaaacgaatccagatgcaaggaatgataatgtgggtgcaccatgaacaagtggtatagttaaatactacgtacg

SEQ ID NO: 14710 - DNA, 1645 bp, Zea Mays
ctaaggagggagtactatttatcttgttctatactatcatgcatggtggttcaacgaatgctttcacatcttctgaacacacaaacttctattttgatgtgaacagtgatagcctgcacgatgctttagataggtttgcccaattttttatcaagccattgatgtccccagatgctacacttagggaaataaaagctgttgactctgaaaatcagaaaaacctcttgtcagatccttggcgaatgagtcagcttcagaagcatctttgtgcagagaatcatccttatcataagtttagcactggaaattggaacacacttgaagttaaagcaaaggagaaaggattggacacaaggcttgagcttattaaattttatgattcacactactcagctaacttgatgcaactcgttgtgtatggaaaagatagccttgataacctgcagaaccttgttgaaaataagttttgcgatattagagatgttgggaggaagccattttcatttcctggtcatccatgtacacctgaacatctccaggtccttgtcaaagcagttcccattaaacaagggcacactttgagaatcttatttccaatcactcccaatatccgttgttacaaagaaggcccttgcaagtacattagccatctgattggtcatgaaggagaaggatctcttttttacgtacttaagaagttgggatgggctatgagtttggaagctggtgaaggggattggagtcatgatttttcattcttctgcgttgttattcagctcacagatgtaggccaggaacacatggaggatactctcggactattgttcagatatataaagttgctgcagaactctggaactcctaagtggatatttgatgaggattccactaccgagacaagagcccccctatcaattatgttgtaaatatttcttctaacatgcagatttttccaccaaaagattggttgattgcgtcatctgtgccatcaaagttttcaccagatgctattcagaatgttttaaatgaactgactcctgagactgtaagaatattctgggaatcgaaaaagtttgaagggaaaacaaaattagcagagccatggtatggtacatcatattctgtcgaagttgtccctccatcaatcatacagaaatgggtagggaaagcccctgaggaagatctacacctgccaaagcgtaacatcttcattccaagtgatctttcactgagaagtgtagaggaaaaggtaagttttcctgccatgctgaggaagacacaattttcgagactctggtacaagcccgatacaatgtttttcacacccaaggcttatatcaagatggattttcactgtccactatctcaaagctcacctgagtcggcagttcttactgatgtattcacaaggttgcttatggattatttgaatgattatgcttatgacgcccaagttgctggcctctattatgttgttaagccaaatgacactggttttcaggtaactatggttggcttcaatgacaaaatgagaacccttttggagactgttattggaaaaattgcagaatttgaagttaaggctgaccgtttttctgtgataaagggttagggtttctgcttctatcagagaggcccatggcgg

SEQ ID NO: 14711 - DNA, 900 bp, Zea Mays
ttttttttaacaaactagctgagggccatctatcaagcacagcgtttgacaggtactgcatgattatgttcgccggaattgctgctgaggcacttgtttacggggaggcagaaggtggagaaaacgacgagaacttattcaggagtctgtgcattctactgaacccaccccctgctgttgcacagatggcgaaccgagctcgatggtccgtcatgcagtcttacaacctcctgaagtggcacaagaaagctcatagagccgcagtcaaggcgctggaagacgggcacagtctcagcgttgtgatcagaaggatagaagaagccatcgcttctgacagcaaataaatatgaccgttgatcctttacatgtgttcttgtcaaccaagctttgttggcagcttccacaggacgcggaagaaggagaactttcttaattcgcgcgaagggttagtgtgtgttggaacatgagtggcgcttttcaaagaaagaaaggcagaagatccttggagctggagggaatagcggagaccacgaccagggcgtctgatggacggactagatcgagtgatacatccgttggagattttaaggaagtcaaaaggccgttgtgaacttgtgattagtgtcgatgccagatatggcagatgtgcatagggagatatgactatatgatgtcttgatgagtatgcagacatgagctattttgcaatggatggataagtaccgttggtacttgaggtacttttattgtttattatttatttatttgcaatcagtttggtaattaagaaaggtcgggttgcctatttgagctgccgtccggcgtccgctagagatggatactgcatatccgaattatagaataaatttaatattatatatgtatatatatatatataat

SEQ ID NO: 14712 - DNA, 1304 bp, Zea Mays
cttaaaagcatccccacgccttccaagagtcccgactccggacccctaaaaccctagtcgggcttcatacgccgccaccgcgccgcttcctccctcgccatggccctctttgctgccgcacgccgcgccgcggcctcctccgtgcccgttctcctccgtgcctccgcctcctcggggtcccaccgcagcgccgtcctgctccggcccctcgctgccgccgtggcgccgccgaagccccgcgcgatgccgttctcctcggcgcccgcgacgagacccagctccgacgccgagctactcagcgtcatcgactccgagatcaagtacgccgaggactgcgatgaccacgacagggttgaggagattccagaaaatttccctttcaaaatcagcgacgagaaggggacgaatgcagttacccttaaaagaacatatcagggtgagcagattgaggttgtggttcacatgcccagccttgtcactggagatgagcctgatcatgaccgtgatggtgaggatgaggacacggcgggagatgacaatgacgaagatgaaggccagaagcctgaacagtcaagcattcctctcacagtcactatatccaagggtgacggtcctgttcttgaattcacctgcactgcctatcctgacgagtgaccttgatgagaacctgcagagggaattccacaggtacctggatctgcgtggcatttcacccaggaccacaaatttcttgcacctgtacatgatcaacaaggacagccgtgagtacctgctctggctgagaaagctgaaggatttcttcaagcagtaggtgtgaagacctgaagatcagctttatctctcttttgttcctgctagggccttctcggttattccaattccatgtggattgaagtgtattaaaatggattttgacttgttatggatttaaatcaacttaataccactcaatccacatggattattggtgaaacaaacaagccctagtcgaaattcttgttaagttggtagtttgtcagacccgaaatagagttttttgggtttcgaatggaaacactagacaaaataaaggatttagtatttttttctataaatttccaagatttatttaactgatgacaatttagggtgagaaagtgtggctatataaaagctttcatgaagttaatttgatatgttagctgtactcatgctgagcattattttttatatgtgaaaaacgatcattaaaatcctgcttaaagctgtttctagcagcccctattttaaacttcactgtataaaatgatctgtccgcattctat

SEQ ID NO: 14713 - DNA, 120 bp, Zea Mays
gcgacgaaatcatgtgtgctttagcagatatggtttcggctaacttcattcaatttacgcagagcaaatcctcgaagccaaaactatattggttcggtccatttgtttctcgcctcgatt

SEQ ID NO: 14714 - DNA, 572 bp, Zea Mays
cgcccgtattagctagacgccaatagtactgcgtcgaccaaaaatccattttttaaaacaaaactgaaaatgtcatttttattaaaatataacacaaaagactaataaattgtaaaaaagttggccgcagcgccgcccttcagacccttctcttcatcttcactctcctggtttattcctccgtgccgatctcgtcttctccggcgggaccatggcgccgtcctcctcccgattcgacgatccggcggcggtgaggcgccccccgcagcatgaacggaagccgccgtatatgttgcttctcccgctcgtctacgcccccgtcctccccctcatcaggatcgggctgcggcacaatcccgtagtgagggaccgtctcttctacggcgtcctcgccggcgcattcgcccacggcgcctacctcatatcggaactgtatgatgtggagagcaaatgatgggcatccctcgaaggatgaggggataagttttcaggatggaatggttgagcaaataaagtaattccagattgagaaatattttcagcgatggtattccatttagtgcttgtttggg

SEQ ID NO: 14715 - DNA, 95 bp, Zea Mays
atgaagacttggtcactgacctatacgtagaaatccaataaagatgaagggttgttaagaaattggctagtgcaggtcaagtgattgaactaggg

SEQ ID NO: 14716 - DNA, 972 bp, Zea Mays
tggctacctaggaagcaggaactagactatcaagacagcaactagaagttctagatgaagaagtgcgatcttaagcaccctccaggtgatgaaatctatagaagtggaactctttcgatgttcgaggttgatgggaagaagaacaaggtttatggacagaatctttgttatctggccaagctatttcttgatcacaagacattgtactatgatgttgatttattcttgttttatgttctctgcgaatgtgatgaccggggatgtcatatggtgggatatttctctaaggaaaaacactctgaagaatcttataatttggcttgcattctcactcttcccccataccaaagaaaaggatatgggaagttcctgattgctttctcatatgaactttccaagaaggaaggtaaagttgggacaccggagcgccctctttctgatcttggcctgctcagctatagaggttattggactagagtgcttctggaaattctaaagaaacataagggtaacatatctataaaggaactcagcgacatgacggcaataaaagccgatgacatcttgagcacgctgcagagcctggacctaatccagtatcgcaaagggcagcacgtcatctgcgcggacccgaaggtcctcgaccgccacctgaaggcggcgggtcggggaggcctggacgtggacgttagcaagctgatctggactccctacaaggagcaaggctaaaagcgcagctgctcccagccccagattagagtccctgtacataacgtttggtactaggatctcccctcagctctcacttcactcgtgtaccgtgaaaactgtacactgtaacaaccacattgctgtgtttgtgctgtctgccgcgatagtctccgaaatcgaaagaaacatcacccaactctttactcttggctcgcaactccccctttcacatcctacctttgatagccaaatcagggcttg

SEQ ID NO: 14717 - DNA, 3415 bp, Zea Mays
accgcaatgttggtggaggtagagtcgtagagactagagagtcacacacgctcgctgctgcctctccttcctctcctcggcaagtgagagaggtgtgaaccgacgaggaagagcacccatccccactgcgcatcctcgattcgattccgtccccttgcctcttgcctcttgggcgtctccgcggctagatggcgtctccccctcccttcgacctctgcggcgatctcgacgacgacgacatcgatgaacccgtcaccgccgtccccaaggatcgccatctccctgccgccgcccctacgccgaacggcctcaacgaccacctcctccgcttcacccgcagcctccagcgccccacccaaaaccctaaccctagccccaatccgccaccgcctccgcccccagccgccgccgaagaacaagtcgagaaggtcaagctcgccggccgccgccgcctatgcaagcttgccaccaccaccaccgccactcagcgagtggatgaagaggaggcggagtgggacaaccaggacgacggtgaaagcatactcgacatcctagacgacctcaccacacgatttgactctctatccgtccagaagcccagcaccgccgcgaggtccaggacacaacagctcacccctttgccgtgcgccatcaccgtggacgacgacctagatgaccatagcccagatgatgtggatgctcacgccggtgcctcctcaccccttcaaatttctagctctgatgaagctagggctcccaccagacgctccgaggtcaagatcgaaactgatttagtctcctcagcctgtacccattatgcctgtgatgacgtccgtggcaaggggaagaacaaagggaccaccaaggatgttgggaggctaaatagggtatcaaaggcctcatcctttgttgattcttattccgattctgattatgacgactgcgaggaggaccaaggaacaagaacagattatgctgttaagcagctaagaagcaagggattcacaaggagaccacccaacaccccaacattcaggaaccatggtgtcagcgacgatgagctgggtcaggagaaggagaaccttggagctgtggagaacaatgctgaggatgttggatgggagaagacagaggacttcaagatggatccaactggaactgctgcaacatccaagccatacaagctcccaggaaagatattcaagatgcttttcgcccaccagcgcgagggcctccgatggctctgggttctgcactgcaggggaacaggaggaatcctaggggatgacatgggtcttggcaagacgatgcaggttgctgcatttttggctggactgtttcattctcgtctagtcaagagggtgctcattgttgctccaaagacacttctggcccattggacaaaggagctttcaattgttggccttaaagaaaagatcagagactactctggccccagcacaaatattcgcaattatgaactccaatatgccttcaaggagggtggtatcctcataaccacctatgacattgtcaggaacaactacaagctcataagaggcaactcctacaacaacagcaatgatgatgatgatgaggaaggaactttgtggaattacgtaattcttgatgagggacatctaataaaaaataataagacacaaagggcccaaagtttgtacgaaataccttgtgcccatcgcattgtgatcagtggaacacctattcaaaataacttgaaggaaatgtggactctgttcaatttctgttgcccagatgtcttgggtgataaacagcagttcaaaataaggtatgaaacggctatccttcgaggaaatgacaaaaatgctaccgctcgagagaagcacgtaggctcaaatgtagcaaaggaactaagagagcgaatcaagccatactttttgcggcgcctgaaaagtgaagttgtctttgatactggtgcatcagaagaaaaaacattagccaagaagaatgagctaattgtctggctgaagttaacaccatgccagaggaaactatatgaagcttttctaaatagtgagctggttcatttagcattgcagccaaaggcatcaccgttggctgcaatcacaatattgaagaaaatatgtgatcatccactgctattaactaagaaaggtgctgagggtgtgttggaaggaatgggtgaaatgttgaatgatcaagacattggaatggtggaaaaaatggccatgaaccttgcagatatggctcatgatgataatgcactggaagttggtcaggatgtctcatgcaagctatcattcatcatgtccttgttgcggaaccttgttggagaggggcatcatgttttaatattttcacagactcgtaaaatgctaaaccttattcaggaagctataatattagagggctatgcgtttttgcgcattgatggcaccaccaaggtttctgaccgggaaaggattgtgaaggacttccaagagggttgtggagctccagtttttctgctaaccacacaagttggtgggcttggacttacactcaccaaggcaactcgtgtcattgtagttgatcctgcatggaaccctagtacagacaatcaaagtgttgatcgtgcttaccgaattggacagactaaaaatgtgattgtataccgcttgatgacatctgcgaccattgaagaaaagatatacaaattgcaggttttgaagggcgctctgttcaggacagctacggagcaaaaagagcaaacacgttacttcagcaagagtgagattcaagagctatttagtttgccacaacaaggatttgatgtttccctcacacataagcagttgcaagaagagcatggtcaacaagttgttctggatgagtccttgaggaagcatatacagtttctggagcaacaaggaatagccggtgtgagtcatcacagcctcctattctctaaaactgcaaccctgcccactctgagtgagaatgatgcactggacagcaaacctcggggcatgcccatgatgccccagcaatattacaagggatcctcatctgactatgtcgccaacggggcatcttttgcgctgaagccaaaggatgaaagtttcactgttcgaaactacattccaagtaacagaagcgcagagagtcctgaagagataaaggcaagaatcaaccggctttcacagaccctctccaacgctgtgctgttgtcgaagctaccagatggtggtgagaagataaggaggcagataaatgagctggacgagaagctgacttctgctgagaaggggctgaaggaggggggcactgaagtgatttccttggatgactgatccaagacatggagagtctgtgctcggcaaaagcggctgaatcaaaatcagaggagaagggcgagcagggcgttaaagat

SEQ ID NO: 14718 - DNA, 115 bp, Zea Mays
cttaccaccctgagaatctggccttgcgattctaatcttttcctttcctgggtagctgtcatgaagagttgggtgagatcaaccattggataacttgattttgaagcagataagg

SEQ ID NO: 14719 - DNA, 942 bp, Zea Mays
tacaactccacgagctctagcttttttagaaaaatcgaaactagagaccagttcatataattcatgaagctccttagaggctacttttagaaacactgtttctatatattctcatgaagctgtacgaaaatatccaccatgccactgttatacaacatacaacttctgaaaaatcaattgtactatataaattgggacttgaggcccgacagatctgatgctaaatttacccggttcttgttctccaaacggtaatgtcagggcctgatcatctactactctctatcatgggttagtttttgactttttgtcgacactggatttctcagacgacttgagcaagaacctcccgatgcggcaatcccaatgtgacggatgagctccacccggtgcggcaagcccagcctcgatcttgtctcgtctcgtctcgtgaggtctggccatggtcatccaatccaggaggagggaaacgacgaagacgagcagagggaggcgaagtcaggccataactggacaggcgagtcgcgcgcggcagatcaaaatcacatgagccgagtcgcgcgctaacggcgagatcaggatcagcgcgcggcgcagaaaggaccgcgccgcgggcgggcgggcacccaccaccaaaatgtcggcatcagctggtcctcggacgtgggcgtgttgcttggatcgctaggcccggagggtggggggcacccaccgaggcgagccgcccaccagccgcaggcggcacggcaggccctccttttatttttagagccgctggccgcctggccgccctagaccgacaggcggtacagccacgcacacccatccgacagggaaccggcacgcgccggtgggccgtggatcgcgtgatgccgcgccgctgctcacacacctgctgcgggaaaaaaaaaagaattgattcgggtagcaggcgtagaaaac

SEQ ID NO: 14720 - DNA, 855 bp, Zea Mays
agccaccttatccaccaacggcagcagagtgtggcctatgatagatcaagtgctccaaaggatttccaggtccgtggatggtaccaaggaccacatgatgattcagaaaaggattcaaatgtgatgtctactttaggagagttctcttatgaccttgacaagagcaatgctcagaccttccaactagagagaaccgctcaatcacgtgttgtcaacatggttcagcttgatatctcctcaaaccatgggaacttggaacttacatgcatctatcgcttcagggtgcatggcagaaagcccgtctcccccagcactggaggatgaagccctgagctgtgacatgcgtgccaaagcgcgacaacattcttgcagcatttctgcctataggagctttggttcagcggttagcggttagtcggagcatttcagccagcgccgctgcaccagtgttgataatgttgattctattctcgcacattgttgtgaacagctcggaaataccttgcgaggtttccttaagctgttcctagtttggcatcaagttcgcctgttttctctgctcctcctcccctcctgttaagactgcagcttagtattccgtttgaaattggtcgtctcatttcaccaggactcgctcttaaaaagaagactttgccattatatggcctactcagctagggaggaaaagaaggggaatgctggggccaactgccaagctagttatgcacttatatctaatctattgatttgaatatgagagcatgccaagctagttatgcacttatatctaatctattgatttgaatatgagagcacgcaagttcttcatctgttgtttgagccttttcagcttct

SEQ ID NO: 14721 - DNA, 181 bp, Zea Mays
tagtttacaggtcactgtatctttttcaccactgtgttggaaggaggttacattgcaaaaatgcaatgtgttcctggttcttgcctgcggtgggctatttggttgcaaccgtggcttggaggctactatctaggcaggttgaccccacctcaagtgttcctagatcaacaagcaaacaggt

SEQ ID NO: 14722 - DNA, 1228 bp, Zea Mays
gaagagccgaacatctttgtaggaatgcaataagagacatggttgtccgtggtgctccagcaatagccatagcagcggcactagcattagccgttgaagtttctgatttagattttattggtacgcctgaagaagcagcttcttttgtttcaaagaaattggaataccttgtatccagccgaccaactgcagtgaacctatctgatgctgcaacaaagctccaaactttggtatcaaaggcagctgaaactgcaaaagattccaagtctatctttcaggtctacattgaggccgcagagacgatgcttgttgatgatgtggcagataataaagctattggctcacatggagctgtatttcttcaaaggcagcttgcaaattcaaaaaagatatctgttctaacccattgtaatactggcagtcttgcaactgctggttatggaactgcccttggggttatacgcgctcttcattcggggggagttttagagaaggccttttgcaccgaaactcgtccatttaaccagggatccagacttacagctttcgagttagttcatgaaaaaatacctgcaacactgatagcagattctgctgctgctgcgttgatgaaacaagggcatgttcaggctgtcattgttggtgctgatcgaatagcagcaaatggtgacacagccaacaagattggcacatacaacctcgccatctccgcgaagcatcatagtgtccagttctatgtgtcagcgccggtaacttccattgatctctccctcccatctggggatgagatagtcatagaagaaagatcaccaaaggagttgctgaactctgaaggtggtctgggaaagcaagttgctgcatccggtatatcagtctggaacccagctttcgatgttactccagcaaatctgatcactgcaatcataacagaaaagggtgtgatcacaaaaactgatgctgatggatctttcgacatcaaaggattccttctgcccgcaaaataatactctagcgtggcttccattctgaatgacaaatgtctggatcgacactgttgtattctgttttctctattatacacaataataaagtcatgtcctcataggattttggggctaaaaaaaataaaataaaatggaaggattaaaattagtctctagaaattaaaccccccctaagcaagatgattgtcttgcttgctttcaaaataatacattatctctatatt

SEQ ID NO: 14723 - DNA, 2074 bp, Zea Mays
tgatctagtcccctgcataatctgagtctgagttaagaaggtacagccaaagaaggcgcctgctcccaagattgctaaacaagagtccagtgatgatgacaccagcgatgagacctctgaatctgatgaggaacctgcaaagaagcctgctgctaaacccttggctgcagttgcgaaaaatggttcgaagacagtcaagcaagagagcagcagcgatgaggacagttctgaagatgagtcggatgacgacagtgatgatgaacctgcaaagaaggctgctgctaaacccttgggtgccgttgctaaaaatggtttgaagaaaggcaagcaagaaagcagcagcgatgggagcagttctgatgatgagtcagacgatgatgttaaacctgctgccccactaaagaaaacatctgtggctgttgcacaaaagaaaaagggagattcttctgagagtgactctgatgatgactcagatgagtcaaaggctccagcagcaactatcaaaaaggaagattccagtgaaagtgagtcagagagtgattctgaggttgaggatgcaagtaaaactcagcctgctaagagagctgcttcaaaaatgaaagatgaatcaagtgatgactcagacactgatgaggatgaagaacctcctcaaaagaagcagaaggaagcactttcagctgcaaaaaaagaaagcagcagtgaggatgaagatgacagtagtgaggaaagttcggatgatgagccaacaaaagttgaagaaaagaaggctccaaaagtatcagaaaacagtggatcggaggatgaatcttctgaagacgagagtgataaagacagtgaagagcctgctaatactccaaagaaggctgctgtgcacgcctctgaaaagaaaactgctaccaaagaacctaagacgcctactggctcccaaagtgaatcaacggaggtgaatacactttttatgggaaatgtcccctggaaagctgaatttgatgatgtgaaagaattttttgaggacgttggtgaggttgttgatgttcgttttcctacacatgatgatggcaatcgtaaaggattttgctatgttgaatttgtttcagctgaagctgctgcaaaggcatataaagagaagcaatcaaaggagctgcatggtcgtgaagtaagacttgacttcgctaaaggaagaagtacacaaactcctcgcagcggcaatgatggatctttccagaaggctgctcggggtaacagcagctcaatatttatccggggctttgataaaaatctttcagaggatgagatccggagctctctcgaacaacattttagtgattgtggtgagatgacaagggtctctatcccgactgatcatgaatctggtgcaataaaaggaatggcttacatagacttcaaggatcaggactctgtgtctaaagcccttgagctcagtggctctgacattggtggtggctatgagctttatgttgatgaagccaaaccaagaggcgatggccagcgtggtggtggtagatctggtggccgttctggtgggagatttggtgaccgttctggtggccggcgtggtggtggtagatttggtgaaagatctgggggcagggatggtggcggcagattcggtggccgacgtggtggtagggatggcggccgaggacgtggtggccgtggctttggtaacaagcacagcgctggcactcccagtgcaggaaagaagactacttttggtgatgattgatgatgaacgcggaggatgcggcaaaaggatccaatgaaattgtgtttttttggtcttgttgtggtaccgtaactggaatttggtattttttgtctactatttactgtagtggtttctggattttccttgtgttgcctatgctgcaatacaccgttttgttgttgcgatacatctgtagtttggttttgttatccacctgtcgtttataagaagcggctgtactcaggctactatgccgaactgaaatgggaatggagcaaaacgaaatcttagttctgaagcgactaaaactattactagaggcaatgccatcgttttagttgcata

SEQ ID NO: 14724 - DNA, 989 bp, Zea Mays
gtttacgctgcaactatgtgaagctcggagaatatcactttcatgcagccgtgctgaaactgccgtcgatctgggtccagactcggaggacggcagcaagaggaggtcgctggccaccaccatgttctgtgtggcgaaacagggcgcggacgcgacggcgctgcaggcagggctcaactgggcgtgcgggcagggccgagcgaactgtgcgcccatccagcccggcgggccgtgctacaagcagaacgacctggaggcgctagcgtcctacgcctacaacgactactaccagaagaactttgctaccggcggctcctgcggcttcaacggcacagctacgaccaccaccagtgatcccagctcggggcagtgcgtcttcacaggaagctccatggcaggaggcggcacgccggctgcgagcgcccccagcggcctctccccgccgtcgtcgttcacgccgggcattgggagcccctccaacaccctgatccctctggacggcgccgagagcctggtgtccagcgtctggtcggcgatttgcgccccgctgctggcgttgccgctcttcttcctctgaccaccagcggcggcagatgagtggccggtgcttgctagtagagcgcttattatgtttttttgttcttgttcctgggtagatcgctctcgtgtggcggtgttgatgtacatgtcagagtcgtgttggatgcgctgggatgggagattacataagatgctacagagatctattcatacgtagaaagtggaccggactccaccgtgtttccgtgtgttctggtctcagatctgttcgtggcagaaaccagatgtaaatgtatcatgttcactactctctgtgcacagaccaagggaagctgcagtccactgaccacacacacaccacgctaggattcagactcagaggcttcgtctctgtccgatgccgtcgcgcccagcgtcggcgtggccctggacgctgctgccttctcccg

SEQ ID NO: 14725 - DNA, 2219 bp, Zea Mays
ctcaagtacctctcactttccaaattaggttgatgagaaggatgtgaacctggatgctgcgttcagtgtgcatgctgggatcgcacataccaggtgggccacgcacggtgtgcctgctccaaggaacagccacccccaatcgtctggtgccggtgatgagttcttggttgtccacaatggcattatcaccaactatgaggtcttgaaagagacactaactaggcacggcttcacctttgagtctgatacagacacagaagtcatccctaagctagcaaagttcgtttttgataaatctcatgatgaacaaggtgatgtgacgtttagccaagttgttatggaagtcatgaggcagcttgaaggagcctacgcacttatctttaaaagcccgcactatcccaatgaattgattgcatgcaaacgaggcagccaactgatacttggtgtcaacgaattgagtggtcaacagaatgggaaatcatttcatgatgtcaaaaccttgacaacaaatggaaagcccaaagaattattcttctccagtgatctatgtgctattgtagagcatacgaagaactacttagctcttgaagataatgaaattgttcatattaagcattgcaggatggtagtgtttcgatcctcaagtttgaccctcacaaagagaagccagcatctgtgcaacgagcattgtctgttcttgagatggaagttgagcaaataaagaaaggaagttatgatcacttcatgcaaaaagaaatccatgaacagccacattcgttgaaaacaacaatgaggggtagattgaaggatggtggggttgttctaggtggactgaaggaatatctcaagacaattaggcgctgtagaagggtggtatttattggttgtggaacaagttacaatgctgccttagctgcaagaccttttgtggaagaactgactggtattcctgtgactatggaggttgcaagtgacttgctggacagacaaggtcccatctacagagaagacactgcagtttttgttagtcaatctggggagacagcagataccctccttgctctagattatgcactagaaaatggagctctctgtgttggcataacaaatactgttggaagcacgctgtctagaaaaacacactgtggggttcatatcaatgctggttgtgagattggtgttgccagtacaaaggcttatacaagtcaaatagtagccatggcgatgatggcgttggctattgggtccgatcagatatctactcaagctaggagggacagtatcatcagtggactgaacaacctttcaagcaatgtcagcgaagttctcaagctagatgctggaatgaaggagcttgcctcttcgctgatcgactcagagtcgctcctcgtgttcggaaggggttacaactacgccaccgcgctggagggcgccctgaaggtcaaggaggtggcgctgatgcacagcgagggcatgctcgctggcgagatgaagcacgggccgctggccctcgtggacgagaacctccccatcattgtcattgcgacccgcgacgcgtgcttcagcaagcagcagtcggtgatccaacagctcctctcgcgcagggggcgcctgatagtgatgtgctctaggggagatgccgcggctgtgtgccctagcggtgggtcgtgcagagtcattgaagttccacaggttgcagactgtctccagccagtgatcaacataattccattacagttgctcgcgtaccatctgactgttctccggggattcgacgtggaccaaccaaggaatctggcgaagagcgtgaccacgcagtagggagaggtagatgagatgtttgtattgtagttaattgtccttgctcttgaggtggctagtacgtagcataaatattatggtgcgttaaacttgttgttttgtgaacgaaatgtacctctctttttttaattatggtatattggtgtcaatagcaactcggtatccctgggaattctcatgtcagaaacttcagtttcttcatgggagcgtgcacgatcaggaacttcagaaagccaccttttcagtatagtatctacataaacacgagcacaagtcaatccctctaattgatatatgcaagttttattaacagcataaattaaatggagggatggtctattagtgtatgttgctcgtaggatcgatcgaataaatgagctcagtgaaatcaatgacgt

SEQ ID NO: 14726 - DNA, 1667 bp, Zea Mays
tgcaaactaatgttgtccagtttcaacataataagatggtatcatttgtcaagtgcatgttgggacttgatgctgttgtttgggacattattgggtcgtcattgttggagaaagttgtgtacctacttacagaattggatgttaatataacatgggaagatattcttcaagatgaacacaacaaaggtatatttgacatggagcttgaggatttggctgaggatgaagataaccttggtcaagaaggaacaaaggtccattttggaggaaatatgtgtgccgagaaacttgatggtttaatggtggttgtgtgtgagcacctcaagtcacgtgtagaagaacctgagcgcctaattaaggaatttgtcactttgaaggctatatttaaatcacatgtgctgagggtgcacaaatccaaatttgcacagtttatcatgttttatgcttgttccctgcatcctgagattggcgatggctttgctaattttcttactgatatttttattgacaaggacaaaaacgaggatgcaattactaggctagtggactggtgtgattattattgtggccatcagctggacaatggggtgacagcaaatcctataaagcaccagctattttatgctagctgccaggctgtgatgtatgtcctatgctttcggttaagatctattatggactacccaaatcttaaacaacaactttttcgaatgcgaatccgggatatcttggtccacccattgcagccattaaaggtgtgcttgccttcaatagtgaatgagttcctgagacaggctacagctgcgagcctgttccatgcacctgcgatctcaatgcacgaagatgcagttgaatccgatctatcgaaggcatttggaggacttaataggcttgacatgttcttcccatttgacccgtatctacttaaagagtctgacagatatatacggccaaattttgagttctggtccttggtcaagacgacatacagtaacgacaacagcgatgaggacgacgaagagcttggcgacattgacgcacctggaatgaatgtgggcagcttggatgatcacttcgaaatagattttaacagtgacgatgacattgagtataagatgaataagatgtccataacgccgcaacgcactttctaccatccactggctacaaacagtgagtccaaccgcatgcctgcgaggatcagaccttcagtgagccccccatcatagcaaggttctgctcagctctttacttgactgatgatgacacaaaatcagatgctaggaagttgcacgtgccaagaagggaccaggggatgacgaccaaacatacaccggagtgtattctatttattattccagttgctagtagggtcaaaactttaatgcagagtgtatatgtgtttcagggcaacgcgtggaaaaccggtttgtgattgtatacttggtagtcagcccttaggaacaggtatgtgtttgtagcaagacttacgacgtgaaatgaggattctcttggggacattaatggtataacgtgcgaatgttagaacctaattttcaattatcaatgagtcaggtgcagcctaattttcaaggacctgttcgtagcatgtaatgtaacgcatctaggcaaaacaaccctctgttgcccagttcatgctgaagtct

SEQ ID NO: 14727 - DNA, 1945 bp, Zea Mays
gtggttgggttttattttgtaacatagtcctcagacattggttcgagctttgagggttgttgaaatgcaagagatcttagatcaacaagttgcagaagaagcagctgaggctgagggtgctggtgctatggcgacaataacaaaccaacgtagaactgcaaacagaaaaggtgcaggggcaacagttaccccaagaaagggcactcaagaaaaatcgaaggttcagggaaagggctacaaggacaaatgctatgagtctatcaggatggctgttgaggcccgcttcaacaagttgcttactgagcttgtttttgtggaggacttgatggaagctttggaggaagccaaagctattggagatgagcttggcgatatatatgattatgttgcaccatgctttcctcctaggtatgaaattttccagctcatggtaaacctgtatactgagagattcattcagatgcttcgacttctcagtgatagagcaaacgatattcaaaatataaatatcctgaaggtgactggttgggtcgtgcaatatcaagaaaacttgattggtcttggtgtggatgaatcacttgcccaagtttgttctgaaagtggtgcattggatcccctcatgaacatgtatgttgagcgtatgcaggcaacaaccaagaaatggtacagcaacattttggaggctgacaaaacacaaccaccaaagagtacagaggatggaaaactatatacacctgcagcagtggatctattcagaatattgaccgagcaagttcagatagttagagacaacagcacagacgtcatgctatatcgaattgcacttgcggttattcaggtcatgcttgattttcaagcagctgagaggcaaaggcttgaggagccagcttctgatgttggtctggaatctctatgtgcattgattaacaataatctgcgttgctatgaactttcatcagagctaagtagcagtacattggaggcgcttccacaaaactatgctgaacaggttaattttgaagacacctgcaaaggatttcttgaggttgccaaggaggccgtcctccaaactgttagtgttatttttgaagacccaggtgtgcaggatctactcgtgaagctttaccagaaagactggctggagggaatggtcacagaatatcttgtcgcaacatttgctgattactttggtgatgttaaaatgtatattgaagaaagatcatttcgaagatttgtggaggcttgcatagaggaaacaattgtggtctatgttgaccatctcctttctcagaaaaactacataaaagaagaaacgatagagaggatgaggttagatgaagaggtgcttatggatttcttcagggaacacatcaacgtgacaaaagttgaaagcagagtgcggattctggcagatatgagggagctagcttcagctgagagtttggatagctttactctcatttacactaatatactggaacatcaacctgattgcccgcctgaggttgtcgagaagcttgtggcaatgcgggaaggcattccaaaaaaggaagcgaaggaggttgtacaagaatgcaaagagatatacgagaactcgcttgtggatggcaaccctcagaagtccggttttgtgtttggcaaattgaagtgcttgacagcaaagaaaggcatatggaggaagcttgggcagtaagtgtggacttgagcagagtggacagaagtaccacctaggcaaagactgtacgtttcacttctctatgatcattcttttgttcttttgtcgatgctactgttgggtttcacgtttagactatcagtgtgtactcagcttgaggagcaaaaatgtatattccactttgcttagctacagaggattttggtgtaagaatatgtaatttattcaataaaatggttgctatttgcaataagttggcccaagtcatcg

SEQ ID NO: 14728 - DNA, 787 bp, Zea Mays
gcgttgttgttatttcatatatgttaacaatacgtatcttctttatgcagatttttgaagggtcaaaccatgtgaacgtcagtcatgttatccacgagctgtcatttggcccaaagtatccaggaattcataacccactggatgaaacttcaaggatacttcatgacacaagtggaaccttcaaatactatattaaggttgttccgactgagtacaaatatctgtcaaagaaagtattgccaacaaatcagttttctgtcactgagtattttcttcccatccgtccaactgacagggcctggccagcggtttacttcctgtatgatctgtcaccaattacagtcaccatcaaagaggaaagaaggaacttccttcattttgtaactcgtctatgtgcagttcttggtggcacatttgccatgacaggaatgcttgaccggtggatgtaccagcttatcaagacagtcaccaactcaaagaccagaagtgtactgcggtaattgcacaagtcatgatggatggaaaaccgttggtagtgtggtacccgtggctaatggagcccatagatctttgcccgaagctaactgatcaagccatgttgatttttgcatgttttattttcttcttacatggttaacttataatacgtcgttgttttttttttcatcaactatgttagattaacacagtccacggactacattgttaactatgttggtagtggaactgaaatgccaagccgatcttgatcaaccctatagtcccatcgtgccaaaactgttgatcg

SEQ ID NO: 14729 - DNA, 2123 bp, Zea Mays
gcggcgcgccgttccccgtcgtgcctcaggtcatttcagtgaacccgacacattggcggaaggacgaagagttcgcgcggcagatgatcgccggggcgaacccggtgtgcatcaagcgcgtcaccaagttcccgctggcgagcgagcttgaccgcggggtgttcggcgaccaggacagcaagataaccaaggaccatgtcgagaagaacatgggcggcatgacggtgcagcaggccgtagaggaggggaggctgtacgtcgtggaccaccacgactgggtgatgccatacctgaagcgcatcaacgagctccctgcgagcgaggagaaggcggaggtgtcgcagaggaaggtgtacgccgccagaacgctcctgttcctggacggcgaggactcgtcgatgctcagaccgctggcgatcgagctcagctcgccgcacccggagaaggagcagctcggcgcggtcagcacggtgtacactccaccggacagcggggacgacggcatcacggccgggaggttctcaacctgggaactggcaaaggtttacgcctctgccaacgacgcagccgagaacaacttcgtcactcactggctcaacacgcacgcatccatggagccgatcgtgatcgcggcgaaccggcagctgagcgtgctgcacccaatccacaggctcctcaagccgcacttccggaagacgctccacatcaacgccgtcgcacgccagatcatcgtcggctcgggtgaccagaggaaggacggcagcgtcttccgtggcatagacgaggtcacgtacttccccagcaagtacaacatggagatgtcctccaaggcgtacaaagcctggaacttcacggaccttgctcttcccaacgatctcatcaagagaggtctggcaaaaggagatccaaagaagccagagacggtggagctggcgataaaggactacccgtacgcggtggacgggctcgacatgtgggcggcgatcaagaagtgggtggctgactactgcgccatctactacgccgacgacggcgcggtggcgagggacagcgagctgcaggggtggtggagcgaggtcaggaacgtggggcacggcgacctggcggacgcgccgtggtggccggcgatggactgcgtcgccgacctcgtggagacctgcgccaccgtcgtctggctgagctcggcgtaccacgcgtccatcagcttcgggcagtacgactacctgggcttcgtcccgaacgggccctccatcaccacgcggccggtgccgggcccggacgccggggcggaggtcacggagtcggacttcctggcgagcgtcacgccggtcaccgaggcgctcggcttcatgtccatcgcctcggggccgatggggctcaagggcacggaggtgtacctggggcagcgcccggacacggagcagtggacgcgcgagcggagggcggccgaggcgctggcggagttccgggcgaggttggaggaggtcgcgggcaacatcgacaggcggaacgcggaccctgcgctgaagaaccggacggggcaggtggaggtgccctatacgctgctcaagccgacggcacagcccggactggtgctccgtggcatacccaacagcatcaccgtttgagcagcagagcgccgtcggcagctgtcagctgtgtacagtacagaataataaggtggtcgtgtttggcgctatctccaccacataaacgtgaaaatgtttttttttgaattatatggacatgcagggccgcagcccgtaagcctggccccagtttcggttttctgttttttttttttttgcctcgatctggtgatcagcaagccacgtcggtccgggtgatctcgctaccggagatagaatgtgtacacgaaacctaataggtttttactccattaggatacgaggttgagtcaattttcatacctatagatttgttaatgagcataaatttatacccgacgagttcatgagtataagtttattatgtgaaccgtgggtttttaaacccgaccaaacttagtgtatattgtcattttattttataaacggacaataaacttgttatctccttatttacttcctgttttttatcaaatataaatgtataagtagttg

SEQ ID NO: 14730 - DNA, 899 bp, Zea Mays
aagctggaaaggtttacggtataagcacagcagaagtgatggaactattggaacatttcctggctatgaatccagataacgatggacgtgtgaaagctgaagatttctgggctcattttggtctggattgcagtcctctgtgcaagaagatatttcactatttcgatttagacattaaggggttgattacgttccgtcagttcttggttgggtgcgcgcacctgaggaagcaaccactgttccagggttcctgcgagaccgcctttgagaagtgccggggtcctgaaacgtctgagatctccagggcacagctagctgatctcttgcggttaagcatggtgccaccttctgatgataagatgctggagctgttcaagacgttcgatgtagatggcgacgagaagatcagcagggacgacttcatggcgtgtcttgggaggttcccgttcctgatcgcgttctttgctgccctgatcaatggggaagtgtacatcgagatagtctgaatgaatgcctgaggcaaagcgatgccgcgtaaaaggctggagctgccagtgccaggcgtaggcaggggatccctccgtttatgcaatgtggatacccaccgggtgctcctccactttgagaccaaagcaactgtagtattgggtattgggttgcatcaagtggctgaccagtgtagtgcgtcgattttgtttagttgcttcgttcgaattattattggccatttaccgaatctgttgagatacgcgctggactagtagattgtcgatggaactcagaacgcaaatagaaagcatctgtaatctgaactaactgagaaaacatttttttttggctctctaacctgctgaagttgtgttttcttgctagctgtagcacttcggccagttgtccgc

SEQ ID NO: 14731 - DNA, 1239 bp, Zea Mays
ttataatctgtcgtgatctccttgcaacgaatcctaggctagaaaaacaaccaactatgattattcaggctacggtgcttctacaggaaaaccatcagagtacaacacctacaatgacatagaggctgtttatgattgcttgagaacggagtatgggatagaagaagaggatctaatcctgtatgggcaatccgttggaagtggaccaacgttgcatctagcctcacgtctcgagaagttaagaggggttgtcctccacagcggcatactctctggcatacgggttctgtatccagtgaaagtgacgctttggttcgacatcttcaagaacatcgacaaaataaagcaggtggactgccctgtgttagtcatacatggcacagccgacgacatcgtggacttggctcacggcaagcggctgtgggagctagccaaggacaagtatgagccgctgtggatcaaaggcggtgggcactgcaacctggagacgtacccggagtacatcaggcacatgcgcaagttcataagcgccatggagaagctggccaaggacagcagcaaggcggcccaggcgccgccgccgtcgagcatggccgccgaagaaagacacaccaagtgcttgagattcgggaagagatgaggtaccgtatcggccttctttagctgtgtacgcccagtcaagtcacgaaaacgctgatgcactgcgttgccttgctgccgctgctttcgtgtgcaagtccaagaagcgatagcacaggtcgtcagtgagccggccaggcggatggatggatggaggtttcctgttgagtttcatggactctctctttctctctctgcagatgccggcgacctggacctgggaaggaaacgcggtgcagcagcaaccctagttcgtgtatcatccgtgtgagattgagttcagacttcagagtagagagtagacagagtggagtgacagacagacctgtggctgctgtagtatgctgtacgtgctggagttcaggactagagagatgtctttgttttcctaggggcgccacggattagcctgttcgcagctgaattttttcttgttttttttttctgttttcgctatctgtattgtagtcactgtgcaaaaaaaatcgttttgattgattggctgcaaaaagtgaagtgcgctattgcgctgtgactagggccacgaaatgtccgttgctcgcttggttcttggatagctcaattcggataagttctttt

SEQ ID NO: 14732 - DNA, 1261 bp, Zea Mays
tctgggccacacacgctagagcctccatctgcatggatcctcgcaaggacacgatcacctacatcccgggcgtggcgtccatcgagccgagcgagctcatgtcgtaccttcaggatacggacaccacctccgtcgtccaccgcatcatcttcagggcgttcgacgaggcccgccgcgccgactacgtcctgtgcaacaccgtggaggagctggagccgtcgaccatcgccgcgctgcgcgccgacaggcccttctacgccgtgggccccatcttcccggcgggcttcgcgcgcagcgccgtggccacgtccatgtggcccgagtccgacgactgctcgcggtggctgggcgcgcagccgcccggctccgtgctctacatctccttcggaagctacgcgcacgtgaccaagcaggagctgcgcgagatcgcgggcggcgtgctggccagcggcgcccggttcctgtgggtcatgcgcccggacatcgtcagctccgacgacccgcgcccgctgcccgagggcttcgccgaggccgcggccgccgcgggccgcggcctcgtcgtccagtggtgctgccaggtggaggtgctctcccaccccgccgtcgccgccttcctcacgcactgcggctggaactccgtcctggagagcgtctgggcgggggtgcccatgctctgcttcccgctgctcacggaccagctcaccaaccgccgcctcgtcgtgcgggagtggggcgccggcgtctccatcggggaccgcggcgcggtgcacgccgacgaggtcagggcgcggattcaagggatcatggccggggaacacggcctcaagctcagggaccaggtcaggaagctgagggccacactcgaggctgccgtggcgcccggtggctcgtcgcggcgcaacttcgacgacttcgtcgacgagctcaagcgaaagctcaaggacgccagctgagctggccccagaatacagctgcgatgtaggccttgtatccttagcgacagcgtgtattgcgtcacataaacttgtcttgatcgaagcgtgtatgcagtgtacggtaggacaatattgttctgcaggcttgctcaagtgatatgttgtacctgtgttaccaatgtaaacatgaatcgtgtcacgaatttcaagttagcttgatcagtctatagttttacgaagggctcgtttggtaaagctccgagagtcgatgtatagtgattccgaatgattaaaagtgaaatttatctgacgaaaaatgtttggca

SEQ ID NO: 14733 - DNA, 1315 bp, Zea Mays
ttccgcggatgtttgctttagcagaattttatcctacaactctacaagagagggaatggatacatcaaccaaggaaggaggaggacaaatgataggttgaggcgtgcagacagagaggacagcgttaggcgaactgtttatgtctctgaacttgatcatactgtgacagaggagagacttgctgatatctttgctacctgtgggcatgttgttgattgcagaatttgtggtgatccccactcagttcttaggtttgcatttattgagttctctgatgaagagggtgcaagaactgcacttaacctcggaggcacaatttttggtttctaccctgttagagttttgccttcaaagacagctatcttacccgttaatccaaagtttcttcccaggacggacgatgagaaggaaatggtcatgcgaactgtctattgtacaaacatagataagatggttactcaattagatgtaaagaaattctttgaagaactttgcggtgaggtctctcggttgagacttctaggagacaatgtacattccacaaggattgcttttgttgagtttgttcatgctgagggtgccatcatggctctgaattgcagcgggatgattttgggaactctgcctgtcagggtgagtccttctaagactccggtgaagccacgtgtaaatcgaatgggatctaactgactctgcctaagctcaaccggaaggcatggccataagctgaaggcttccgcggtcctgtgcatcatgatgcatctgcttacattcttacaaacactctgtttgtacccttttgcaaacctgttggaagggaactggttaggtcaggcccttttgccttgcatttcagacatgatggaaccattgagaatgactattcggcaatcaaccatcaagtaacttctgtcaatgctcctactgttaacgccttagatgtttggctgccggtttggattcagctgcagctgcaaatctgtactgttgctacagcatttgctttcttatgtaaccagccggcagcagcagctgcttctgcacaagcaagaatccaaacatgattgcaacgccgagttccctgtcctcgtctacgaaggaaaaatcccaaatgacaatttatgtggaaattctcaattggctaccaccacttgtctgacattgtagtcgttaaagtctgtaattttgctatgcatttatacgtctttaggggtctgattctattattctaaaatcagtatttcacgtttacgattctaagattaggatgttaactaaatgccgatcttgacgaccttattttccaagtgaaaat

SEQ ID NO: 14734 - DNA, 721 bp, Zea Mays
caacggacggctctccgagcagccgcacgagaaaccgggtccagggggcagggcctggaggataacctcgccacgccagcacgccacgcggccaggcccagtgtgcgaggacgaggacgacgcgggcgcacgcagcagcaagctctgaccctgaaagctgaaaccgctccacgccctccccctccgcgcagagccagccaagccaaccagccagtcagaagaggaaccggggagcggcagctgcagcggccgagggcggagcacgcgaggttcaagattatccggtttaaagacatcagaagaggctgcggcatggatagataccaaagggtagagaagcctcggaatgacacgccaatcagccagaatgagatcagaatcactactcaggggaggatgaggaactatatcagctatgggatgtcgctgcttgaggaaaatggacatgatgagattagtatcaaggccatgggacgggccataaataagacagttatggttgttgaattgatcaagagaagggttggaggtcttcatcagaacactgctactgaatctgttgatatcacagacacatgggaacctttggaagaaggccttctcccactagagacaactcgccatgtgtcgatgatcactgtgacactgtcaaagaaccctctggatacatcatctccaggcttgcctgctcattattggttatgtttgatattgtacttag

SEQ ID NO: 14735 - DNA, 7763 bp, Zea Mays
atgaggaccggcggcggcggcgcggtctggggcgggggagagagcagcgccttgggaggtccctgctcttgcgcgtgggaatgcagagggggcgagctcggctggcttcagatcccgacgacgctcggccatgacgagggagcagaggagggcgcaggatgggatttgaaattctctaggttacgttggctgcaattagcccttcattactcaatgattggtgatctagagcagtcactgaatttactcgctgaggttaatcttgcggaagaaggtgtattgcaactgctattggcatctattcataggttatctagtaggactggaagtgataatgaagccacagtgtcatccaaaccatttaaggcactctatttttgggtcatggaactttacaggttaatggttttagctgttcgctttgcaacaagaatgataaaatgttacgggttacagaagcaaaccacagacaataattcagtaaagcttcatgaaatggctctccttttgatggcaataagaagtatccagagccgagtctctgcaaagaatcagaattctgtttggatgttatcttcaaatgatcattttcttaatgctgtgcctacactgcagcagggagatgataagagctcattgaaaatagggccatcgggtgggttagatactcatgacaggcaagagttggttcctgtgtgtgttcctgatagcaacagcatgttagctctaacaccagttgggtcatctcttagtgcttcaacttttcatgatattgatactaataaaaggactacccaagttggaagtcaaaattttcaaggaaatatcaaggagatgattaacagatgggaaatgaataactttgacttaaaaattgtagtcagagaagcactgcagtctggtcgcctacctttggcagttcttcagttgcagcttttgcgccagagggaattagtttccaatgattattctgaagatgctttctctgaagttcatgaaattggaaggtccattgtgtatgacctgttgatgaagggtgaaactggattggctgtagcaacactagaaaggctaggaaatgatgtagagtcggacctaagacaacttatgcaaggtactgtcaggaggtcactaaggctacaaattgctgacgagatgaagaagcgtgggtacataacaccagatgactggaagatgctagaaactataacactaattgagcgtctctaccctagcagcagcttctggaacacatacttttacagggagaatgtcattcgtgatgctgcaaaaattgttacactgccaggagacgataaacctgtattggctctaaatattcgcaaccaccccattattgaatgtggtgatgttgacggagcagtgcttggttcttgggtgaacattaatgattgcactaaggagttttctgggagcaacatttctgatggttattgggcctgtgctgctgtgtggtcggatgcttggggtccgagaactgtggaccgtatattgctggaccagccttatcatgtacatgctcatgtcccatgggaatctcagtttgaatattttgttgctcataatgatgtggggaaagtctgcgaactcctggacatgattcccaatagcatactttcagaagggattattagagtaaacgtgaacagtttacaagctcctgccaacactctttctgatttaacagtccctgattacaacatgtacatatgtgactcagaagagcttgaacctttctgtgtggagataccacatgttaaagtatttagatctttgtggaatcatgagtcaacattatatattcgaatggtaatgcagcaggaattggcaaagagacacatctttatgaaagagtattggcaaagtactactgaaattatacctttgcttgctcgtgctggcatacttataaaggttggtctaaaggaagaatgttctacaatattttctgcttcagagattccagatgatgcccatcaccagggccgtgaaggcgcactgcataagctaatcatacgtttctgtgtgcaatataacttgccatatctactggacctctatctggacacctgtaatttgactcctgataaggattgtatccgtttactcaaagaaaacacaggtgattgcaagtgggcacaatggttactcttctccaggatcaaaggttatgagtatgaggcatcattctctaatgcacgttggaatttgtcaaagaaaatggtcaataatagtaatcctacggctgttgagatagatgaaatgttgtatacagtagatgatatggcagaacgaattggtgaaatgtctgcattagctaccttgatgtatgcttcagcaccaattcagaaatccatatgtactggaagtgtgaacagaagtggttcgtcttcccagtgcacattggagaacctggctccttgtctccagcaatttccaacactatggaaaacccttttttcagcttgttttggccaagatgaatatgggtgtttaaactactctgctggtaatgcgtatggaaaaagatcaatttcagagtacttgagatggcgctatagcgttttttcctctgctggaggagacacttcgttgttgcaaatgcttccatgttgggtcccaaagtctgttagaagattaattcaactatttgaacagggcccttttggaatgcaacttctatcaactgccccatcatctgaagagttattcactcacggtgtctccaattatatatacaattctactggatataccgaagccaatgcactgtccttagaagcatcgatccaaaaaagtgttgaagaagaattatattcttcccttgaggagaaagatgtgagagtggaacaccatttgcaccgtggtcgagccttagctgctttcaggcatcttattgctaagagggcttcacagttgaaatcagctagtgcacgtcaagtgatatccgcacagtctaatgttcaagcagatgtacaattgatacttgctcctctaagtcaagttgaacgatcaattcttatatcggtggctccactagctattacaaactttgaggactcgactctagttgcttcctgtatattcttgttggaactttgtggcctgtgtgccaacatgcttcgtttagatattgctgcactacgacgcatctcttcctactacaagtcagttcaagaaaataaacatgttgatctatctccaccaaggggcccagagctccatgtgcagtcccatggagctggtatagctcctgctctagctcgagcgctagctgaagattatgtccagtctgatcatctgcatgttttggagcagactcaaacctcgatggctcccaagcgggaacagacacaatatcctcttatttctattctgcaacaccttgaaaaagcaagtttgccatcattggaggaaggtaaaacttgtgggttttggcttttgactggtgttggtgatgcatctctttaccggtcgcaacagaatgaagcaagtcaacactggaatttggttactgaattctgtcaggcacactatctcccactaagtacaaaatatcttgcattactggccaatgacaatgattgggttggttttttaacagaagctcagatagctggattttctattgaagctgttattgaagtggcagccaaagagatcagggattcaagactgagggcccacatactgactgttctaaaaaatatgatatcacttcgaaggaaatcatctggtaatgtaccttcaggaagcagtgatccatctttctcttctgttgatggcaataatcccatggaacttttctgcattcttggagtctgtgaaaagcaaaaaaaccctggggaggcactcctaattaaagcaaaacaaatgcagtggtctttgcttgccatgattgcctcatgctttccggatgtaactcctctcacatgcttaagtgtttggcttgagattacagccgcaagggagatgtcctcgatcaaggtggatgatgtttccttgaaaatagcaaagaatgttggatctgctgttgaagccacaaataaattgccaagcactagcagaaatgttgaatttcgttacaataggaagaatccaaagcgaagacggttcctggaagcgtcacatgaaaagttatgtttctcaatagatagcacatgtgggccagattctgctgcaacttccaatcctatcagtattgttgaccatcagggaataggaaagccaatctcaggagaaaccataatgtccgttgatattgatgaaaggcttgcatctttatcaaacatggtagcagtgctttgcgaacaacaactgtttctaccattacttagagcttttgaaatgtttttgccttcctgctcccttctttccttcattcgttctctccaggcattttctcaaatgcgtcttcccgaggcttctgcacgtttggcatccttttcagcaagaataaaagatgaagcctctcatactcaactaaactcttccaaagaagtgtcagtaatagcagaatgggtggccactacagctgtaaaagctgcagatgctgtcctttcaaactgttcatcaatttatgagaagaggtgtctactgcagcttctttcagcagtggattttgctgatggtggcacttcatcatcttactttagccgaagatattggaagattaatctgtctgaaccatctttgtgtaaagatactgatgtgtacaactggaatgatttgatggatgatgcttctcttttaacatcattagaaaaggacggtcaatgggagcaagctcgaacttgggcaagacatctggagtcaagtggcatagcttgggaatctactcttgatcatgtcactgaatcacaggcagaagccatggttgctgaatggaaggagtttctttgggatatcccacaagaacgtgcagccttgtggggtcactgtcaatctctctttatgagatattctttccctcctttaaaggctggattatttttccttaagcatgccgaagcagtaggaaaagagataccagcacaagagcttcatgaaatattattgctctctttacaatggctaagtggaactatgactaaatcctctccggtctatcctcttcatcttttgcgggaaattgagactagggtgtggctcctggctgttgagtcagagagtcaatccaaggttgatggtgaatttgccacttctgctgttgctcataacaaagctgttggaaacagtagcagtattatagaacatactgctgatatcatcacaaaaatagacagtaacatgagcttgccgcacatgaaaattacagaaaggaatagcacacgggacagtttatcataccaacatgtgcaactctttgagtctaacagtgaagcatcttcaacaacaataaataacacgcgagcaaagcgaaggatgaaaacaaattcaccacttaaacgaggtgtcaatgacaatattgaaagtagagctaatgagctggataacaattctaacactttacatagttcaaagattggtgaacaagctagaaatttgctctctgaagaggaatttgtaaagatggaagcatctttatctggttgggaacaaaatgttaggcctgtagatatggagaaggctgtgctctctttactggaatttgggcaaataactgctgctaagcaactccaacaaaagctgtctccatcatatattcctgaagaacttgtccttgttgatgttgctttaagaattgccaaaaacagcagtaatggagagatcaatttgtcatgctttgacacacaggctcttcggatacttcagtcactgagagtagcaaatagctgcgatatgattagcccatcacaggttatggagatactagctgcgaaatgtggtgagggtcgtgggcgagctcttattaggagaataataggagttgttcgaactgctagattattgggactcccattttccgaagcatttgagaaacaaccaattgaacttctacagttgctttccctgaaagctcaggattcttttgatgaagcgaaatttctagtggagacacacatcatgcctgcatctagcattgcaagaattctagctgattcgttcctaaaggggcttttggccgcacatcgtggaggctatttggattcccaaaaggaagagggtcctgcacctctattgtggagatcaagtgacttcttaaagtgggcaaaactatgtccatcagaatcagaaattggccatgctttgatgcgtttggtaatgactggacatgaagtaccacatgcttgtgaggttgaactcctaatattgtcgcaccacttctacatgtcatcttcttgtcttgatggagtggatgttctcgtcacatttgcagcaaatagagtggactcatatgttttagaggaggatttttcttgtttagctcgtttgatcactggagtgagcaatttccattccttgagcttcattctttcaatccttgtagagaatggccaattggagttgctgcttcaaaagtattctgccactgacacagccacagggacgcttgcatcggttcgaggatttaggatggctgttattacatcactgaaacagtttatcccgaatgatgacgacgctctctctatggtatacaagcactttgacatgaagcatgaagctgcttctctccttgaatcacgtgcagagcaatacatgaacagctggttatcacgatatgataaggaacggcgaaatgatgagcttctggacgctatgcatcatcttgtagagacagctgaggttctttcaactattgatgctggccaaagaacacatcgtgcttgtgcccgtgcttctcttctgtcacttcagatccgaataccagatcttttgtggattggtctttctgagaccaatgcccggcggatttttgtggaacaatctaggttccaggaagctcttattgttgctgaagcatacaacataaatcaacctatagaatgggccccagtcttttggaatcaaatgctaaaaccggatctaatcgagcaattcgtggctgagtttgtctcagtgctgcccctgcagccaccaatgcttctcgagcttgcaaggttttacagggcggaggttgcagccaggggggagcagtcacacttctctgtctggctttcacctggaggcttgcctgcagagtgggtgaaacatcttggtagatccttcaggagcctgctgcgtagaacaagggacatgaggctgaggctgcagttggcaactctggcgacaggcttcattgacgtccttgttatttgcaatagagttttggacaaagtcccggacaatgctggcccgctgatcctaaggaagggacatggtggagcataccttcctctcatgtagatatttcccttctctttttggtgcattggattcagaacttaattcttggcagttaggctatatattgaaaggcagatgaatcttgcaaatattatatgtatcagctttctttggttcagcatctttaaagtcaagcttggctgcagtcttggacatggattctcatcgatgatgccatgaaagacttttgtgattgtatgtgcagcattttgagcggaaaagctggcagaaatgggatttttgcagcttcatccggcaggtgttttcgcacccatgatatattgtatgttttgcatgtacgaagatccgccccgtatttgttttcctcttttttttttggaataaaatgaagt

SEQ ID NO: 14736 - DNA, 4252 bp, Zea Mays
cccgaaacgggtgaggagaaaacagagagcgagagaagttctcggagagagaaactaagcgagcgagataaaagaagcgaaacgcgggcagctgttgctgaggcgtggagacggaggcggcggcgcggccgaaccctagccgacggcggcgcgtttgaggcgggaccctctgcaggcgacgcctggcggccggattcgagctgccggcgtcggcagcttcagatcggcggtcgcgccgacggaatcggcggggatcccggcgggatgggcgcggcgaggcccgtgctctggtcgtgagtttgcttgttcctcgacgaggagaagttcaaagagacggtccacaagttggagcaggagtcgggcttctacttcaacatgaagcacttcgaggacctcgtgcagggcggcgagtgggacgaggtggagaagtacctcagcggcttcaccaaggtggaggacaaccgctactccatgaagatcttctttgagatccgcaagcaaaagtacctcgaggcccttgataggcatgacagagccaaggctgtggagattctcgtgaaggatcttaaggtattcgcctccttcaatgaggagctgttcaaggagataacgcagctgctgaccttggagaatttcaggcaaaatgagcagctgtccaagtatggggacacaaagtcagcccggaatatcatgcttttggagctcaaaaagctcattgaagcaaaccctctgttccgggacaagctgaatttcccaccattcaaagcttccagacttcgcacattgatcaatcaaagtctgaactggcaacatcagctttgcaagaaccccagaccaaaccctgacatcaagacactcttcactgatcactcttgtgctgctcctaccaatggagcaagagcacctccacctgccaatggtccacttggatccatccctaagtcagctggatttccaccaatgggtgctcatgctccatttcaacctgtggtgtcgccatctccaaacgcaattgcaggttggatgacaaatgccaacccctctttgcctcatgctgctgttgcacaagggccacctggtctcgttcaggctccaaacacagcggcatttctaaagcatcctagaacccctacaagtgcacctggtattgattaccaatctgcagattcagaacatctcatgaaaagaatgcgggttggacaaccagatgaggtatctttctctggtgcaagccatcctgccaatatgtacacacaagaagaccttcccaaacaagtttctcgtacccttaatcagggttctaatgttatgagcctggatttccaccccgttcaacaaaccattcttttagttggaacaaatgttggtgacattgcggtgtgggaagttggttcacgggaaaggatagctcacaagactttcaaagtttgggatattggttcctgtaccttgcctttgcaggcttcgctgatgaaagatgctgcagtatctgtcaatagatgtctgtggagccctgatggaactattctaggtgttgctttctcgaagcatattgttcagacatatacttttgtacctaatggagatttacggcagcaagcagagattgacgcacacatcggtggggttaatgatatagccttctctcaccctaataaaactctatctatcatcacatgtggtgatgataaactcatcaaggtgtgggatgctcaaacaggacagaagcagtacacatttgaaggacatgaagctcctgtgtattctgtatgccctcactacaaggagtccattcagtttatcttctctactgccattgatggaaaaatcaaggcatggttgtatgattgcttgggctcaagagttgactatgatgctcctggacattggtgtactaccatggcttacagtgctgatgggacaagattattctcttgtggtactagtaaagaaggtgattcacacttggttgagtggaatgaaactgaaggggcaattaagaggacatacaatggcttcaggaaacgttcactcggtgttgttcagtttgacacaactaggaatcgcttcttggctgctggagatgaatttcttgttaaattctgggatatggataacaataacatactaacaacaacagactgtgacggtggactgccagcaagccctcgtttgagattcaatagagaaggttcattacttgcagttaccacaagtgataatggaataaaaatacttgccaacactgatggacaacgcttgcttaggatgcttgagagtagagcatttgagggctctagaggacctcctcaacaaataaacaccaagcctccaattgtcgcccttggtcctgtttcaaatgtcagcagtcctatagcagtaaatgccgagcgacctgatcggatcttgcctgcagtgtcgacaagtggcttggcacctatggatgctagcagaactccagatgttaagccaagaataacagatgaatccgaaaaggtcaaaacctggaagttggctgacattgttgataatggacatcttcgagctctgcatttgacagacacagacactaatccaagcaaaattgtccgtttgttatatacaaataatggggttgcactcttggctcttggctccaatgctgttcataagttgtggaaatggcaacggagcgacagaaatcctagcggcaagtctactgcatctgttgcacctcacctgtggcaacctgcaaatgggattctgatgacaaatgacacgaatgatggcaacccagaagaagcaaccgcctgcattgcattgtccaaaaatgactcctatgttatgtctgcatctggtggcaaagtctcgttgttcaatatgatgacatttaaggtcatgactactttcatggcacctccacctgctgcaactttccttgcattccacccacaagataataatatcatcgccattggaatggaggactctaccatccaaatctacaatgtccgcattgatgatgtcaaaagtaagctcaagggacatcagaagaagattacggggctggccttttctcaatcaatgaatgtgctagtatcatcaggtgctgatgctcagctatgtgtgtggagtattgatggctgggaaaaaaagaaatcaagatatatccaacccccagcaaaccgacctggcactttggttggtgacacaagggtgcagtttcacaatgaccaaacacatcttttggtcgtccatgagagccagttgggaatctatgatgggaatcttgactgtttgcgcttgtggtctccaagagatgcactcccagctccgatatcgagtgcgatatactcgtgcgacggtctcttggtttacgctgggttctgcgatggtgctatcggagtcttcgaagcagaatctcttaggctgcgctgccggattgctccttccgcttacattccaccttcaatactagcctgtgctggacgggtctacccgttggtagtcgctgcgcaccccatggagcctaaccagatcgcgatcggcatgagcgacggcaaggtccatgtggtggagccattagacggggacccgaagtggggatcggcacctccacaggacaatggagcgcacccgcacccgcatccagcgatatcagcggcaccgtcgaccgccaccaaccaggcatctgatcagccaacaaggtgactctggcctgcagcactggaggagattcgttagcgcagagactggtaggacctgtaggagatagggagaaagggtaaacgattagatgacgagaggatgatgctatatttatcaagtccgcagcgcctctcttgtggtggcccgcgacacaggtggggtgattgacagtgacatcgctcgctctaagttaggttttggttcttccctggcccccggaaatcatcacctggcgccgccacattcgaatggagatggatctgctggcatcatcttgcttcctcttttgtaaagcttttcctgctgagtttagtggtaccttagattgtcgtccatttctgccctgttctccgggcagctatttgtagtgtaaaaatatggtggcgtgctggatggtgttatttatgcgtgcgtggcctgtcatgacgaattccaccatgtttggggctatttgatggatgtttactgatcatggctcgaattttttttttcttcgtgccatttgcaattgtagaccgtggacgcggtgtgagttgatgagatttgctggtgagctgtttctgga

SEQ ID NO: 14737 - DNA, 632 bp, Zea Mays
gccagatattaggatgcaaacttgggaggaaatgttgcttttgcttcttcccctcctaaactcgtcttcggtaaagaagttccttctccccttctccaaagataagtcaggaggttcttctggtgatgaagcagattgtcctatatgtcggtccagtcctagcattccatttattgctcttccatgtcaacacaggtattgctactattgcctacgcacacgttgttcggctacgacttcttacagatgcacacgttgtgacggggcggtggttgcaattcaaagactaggatcaggttagttttacgacctagttgggttaaagaattctcgcccgtttctacagagaatcagcacttcggtgtttcatacggttacaagtttggatacgcgtcattcactgtatgtacatgtaattgccccaagtgtggacagttcggatgccatgagcccataactgacttgttgtatatcgaatgaatagtccgtcacaaaactaacacggattcactatgcgttttcttttcgattcgtctatttcaaaaatcgtgtattgaaaaatgccaaaacaattattggaaagagcaactgattcactgattatgtattgaaaagagattaggtttttaagt

SEQ ID NO: 14738 - DNA, 1596 bp, Zea Mays
gtttaatcgataccgtccccacaagtgcagcaatttctcatccctcgtgtgccgtaaagccgatatccttcctatggcatgctccatctctggccccgtgctggttagctctgcatagggtccttgctgcgccccttctagggtttgcttgaaagtttggtgtggcctccgccctgctgccaccaccaccaggagagatgccacgaggctcgtcgagcaggggcgcaagagggggcgtcggaaggaatcagggaaggggtgctagaggaaaggattctggtggccacacaaccaaagatacccatggtaatcgtgctgaaggaaaacatggtaacaagcatggcaattctctgtctcctgaccttgtttgcaagagcaaaaggattcctaagaaaagaacacttgacgaagattctgatgatggagatggtgaaatacgctatctacaaaaactcaaaggggcaaaagttgcaccagatcctgtgaacactggtcataaagcttatgatttcgttgatgacgcactcaagaaaaaagagctaaccaagctttctaaaaataagagcatcccatatgaagtggacgaagacttcagaatgtctcggtctggcaggaatggtaggaagaagttaggggatgacaatgagtttatagaagatgaggaatctgagatggaggaaaagagtgggctaaagaaagctgattcacctcaagatgtgaagattgaaacccctggtcttacaacaagacagcgagcccttcaaagcaggggtgggaatggtgaaagctttattgaatttcccgatggattaccagcagcttcgtcaagaaagcaaaaggagaagctctcagatgtggagctacaagccaaaaaggcagaagctgcacagagacgtaagatgcaagttgagaaggcagagaaagaacaacaggctgaagcaatgaggaagatactgggtctagattctgagaagaaaaaggaagagaagaagctgaaagaacgggaaaacagggaaaaacaagcgaaattggaagaatgcaagaaaaactgcgtccggactgtcatgggcccaaccggaactgtgattacattccctgagagcatggggcttcctagcatatttaactccaagcctgtcagctatccacctccaagggagaagtgtgcaggcccgtcgtgcacaaacccgtacaagtaccgcgactccaagacgctgctccctctctgcagcctggcgtgctacaaggctgtccagggccgccctcctgaccagggaaccgacgctgcccaggggagtggaggtggccaggaaagcgctgggaagcaagcatgatgaatctagctacctgacgcgattgaaccgtgaccgtcagttggctggagaagtgtatgttaacatgtccagctcgctggtgtgtggtttcctttggcagtagtctaacaatcaacctgacaaaagatggggtgatcgcctgcccgtcgtgaaccaagccgggttttgttaatggcggttcgagtttaaacccatggtgtggtcggatcggtgtatgagactagtcgagaaatatgaagggggaaaaaaacttgtacagcaa

SEQ ID NO: 14739 - DNA, 2708 bp, Zea Mays
gcatattatgcggatcctcttggagatgaagctaggcgggggcagttcaggtttcagtgcaagatccacaaatgatgaattggcattaattccattagaaccctcaacatcatcattttctattgctggagggcctacattttcaaatggtttttcatctgggattggttctagtttttcgcaagataatagctttagtcctttattaagggatggagaagatggttacaatagtctcagcaatggaactaaagatgacactcacggattgagtggattacataacttgggtaatacatgcttcatgaatagtgccatacaatccttggttcatacacctccattggtacagtactttttggaggactatacttgtgaaataaacaaggaaaatccactaggcctccagggggaacttgcaatagcatttggagagctacttagaaaactttggtcgtctggtcgaacttctattgctccacgggcatttaaatcgaaactttctcgatttgccccccagttcagtggatataatcagcatgattctcaggagctacttgcgtttctgttggatggtctgcatgaagatctgaaccgtgtaaaagagaaaccatatattgaggcaaaagatgcagatggccgcccagatgatgaatttgctgaagaatgctggaattaccataaagctcgaaatgactccataattgttgataagtttcaaggtcaatacaagtccacattggtgtgcccagtttgtaacaaaatctctgttacctttgatccatttatgtatttgtcgctaccattgccatcaacagtttactcggatgattactgtaactgtattcagtggtacgggagatgttcttccaatgccttacactgtgactgtacagaaaaatggaaactgccgtgatcttactaaagcccttgctgatgtctgctgcttaaaaaattctgagacattgttgcttgcagaggtatacgaacgtcggatctaccgctacctaacaaatccaattgagggacttcatatcataaaagatgaagatatacttgttgcatacaggctccctgttggtcatgaaaaacttttgaggttggagattctgcattcgagggcagacagatttcttgtggagcctcagtttaatatcaataggaagctcattgggtgccccattgtgacttgtattccaaatgactctactgcaaaatctgatatttatgcggctgtatcttctgtcttggttccatttgtaagagcaaaagcacatagccctgatgtgtctgctgtcaagttaaatggcaatgggccaagtttggacggtattgtcctgaccgataatggcaccaccagtgaggagggtctctctacatcaagatcaagggaggacgataatgcagctgacaatgagcttttaccgtttcagctttcattgactgatgaaaaaggtagtacaagaaatgctatagacatggattctaatcgtgttctaggactagttattagggttttgatggattggggtgagaaagagcatgggatgtacaatattgatcacatggatgtacttcctgaagtcttcaagcctggttttatgtcaaagaagacccgtcaagaagcagtcaatttattttcatgcttggatgcttttctgaaggaggagcctctagggccagatgatatgtggtactgtcctgggtgcaaggaacacaggcaagctagcaagaaactggacttgtggaggttgcctgagatattggtagttcatttgaaaaggttctcgtacagccggtatatgaagaataagcttgatacatttgtgaactttccgatccatgacctcaatatgagcaagtatgtgaagcctacatcaagaggtgaccagcaccccgtgtatgaactctatgcagtgataaatcattatggcggtctcggtggtggacactactctgcatatgcgaagctagttgaagaggacaattggtatcattttgatgacagtcatgtttcctctgttaatgaggatgagatcaggcgatctgcagcatatgttcttttctaccgacgagttggaggttcaagtacagcggcaaacggtggtccagttgacattgaaatggttgattcgctagagacatagttccccagatcaaagcctgagtataacatgtggatcgagatatggagatcagaagagttatggaatttgcatgtctgctccggaatggaatatttgtgtatgaagcctttgacattttgaggcatggcagacaactgaggtcgaaatagcgtggtagcttggatctgcacatctatatgattgagggcctggtgtttaggattataatctgcccagattatataacctatcttattttgaactaagtgttagttcaaaataagttagattatataatatggacaaattatattcccaatcaaacaggctatgattggacttactgatacccatttgagtagaactgatcttgacaggtatccgagaaaacgatgaccttaattgaaaattttgctgatacgctgatgcagcacttagggtctactattgttattggtgtagccaagggattgcaactgggaaaaatggtgtaaaaacgctgcatatttttttttgcctaagctacagctgtgctacagcaaattttgattacggttgtttttttaaaatgcccaatcatca

SEQ ID NO: 14740 - DNA, 1107 bp, Zea Mays
ctatgtcatctgatgatctgatagtcagtgaatgcaccctgttttagtatcattgcctgacaccatttaccacaggttgatatattcagagatgctgcagttcttatgctgaattatgtcgatgaaattcgagcacaaggttttaagttggagtacctgaatatcggaggtggtttgggaatagattaccatcataccgatgcagtcttacctacacctatggatctcatcaacactgtgcgagaattagttctctctcaagatctcactcttattattgaacccggaagatccttgattgctaatacttgctgcttcgtcaatagagtaactggtgttaaatctaatggtacaaagaatttcattgttgttgatggcagcatggcagaactcatcagacctagtctgtatggagcataccagcatatcgaactggtctctccccccactcctggtgctgaagcagcgaccttcgatattgttggaccagtttgtgagtctgcagatttccttggaaaagatagggaacttccaacacctgatgagggagctggactggttgttcatgatgcaggtgcctactgcatgagcatggcttccacctacaacctgaagttgaggccaccggaatactgggtggaagcggacggttcgatcgttaagatcaggcatggagagaagcttgatgactacatgaagttctttgatggtcttcctgcttagatgtttattatctgcgactgctacggacgatgttttcttggggataattggattttctttgtcaagctcatttttgctttcttgtggttatgtaatgttactggatactggatagctagttggtgcatcctcaacttccttttcatttctgttagtttcgtcaccaagttcgtcctcaattgctatttggttgtaacccagctgtaggatgcctggctagcctgtaaccgcctgagcgtgatttggttgggaactgacggtttcacctggtgagacatgcctgcgaaccaaatctgtcccctgggctgccgtatgtgtgataccaaaatctgttgtagccttgtaggtttactattgctgcatatagtataatgatgtctttgt

SEQ ID NO: 14741 - DNA, 621 bp, Zea Mays
ttatcgttttgccatttgccaacccaactcccgattcccgaaggcccatttcgtcgtctctcgctccctcggtccttccttcacccatctcacccgcgacccgcccctttcccctaagccatctccttcctcctcacctcgccatggcgttcttctctcatcaccatctccagcagccacacgcgcagcagccagtgctcccttccttcaggaacgcgctaccggtgcctgtggatggccagatcccagcgcccctcaccttcttcaacccgccgcctgccttcccggagcaacccgcgcaggcacctctggtggatgcggtgggcttgacggcagctgcggggcttgggtggaggcagccgagggagcaggaactgcttggggaaaactcccagatgtcgtccattgattttctgcagacgggctcggcagtgtcgacggggttggcgctgtctctggaggaccggcgccacgtcggcggcggggctgggaactcctctggcgattcaccgctgctcctgctgcccatgctggacgatgacatctcacgcgaggtccagcggcttgacgctgatatggaccgctttattaaagctcagtaacacatcaaggaaactgaag

SEQ ID NO: 14742 - DNA, 1538 bp, Zea Mays
aaaccgccaagaatggaatggatagatctgcagcaacccctcccagaacctctgactttgcttcccatcgcttcgtttccaagaggagaatgtttctctcccttgcccagtcgcctgcctgcgccgtcgtctccttcccatggaggtcctcgtcccaactcatcccacgggtcccctcccgctgcaccctcgcatgccacgcagcggtgcccaaagtgcccctccccatcgcctcgccggcctccctcggggacgaccctagcaagtgggaccccgccgagtgcgacgctctcctccgcggcggggagcaggtcgcctccgtgctgcaggagatggtcacgctgatggaggacatggagatggatggtgcatttgagcaggttgctgtggagctggtggcacaaggagttattgggaagagggtggatgagatggagtcaggttttcttatggcacttgattacatgatacaacttgcacagaaggacacagatgatgagcgtaagtctattcttgaggtaattaagcagacagtgctagaccatctgacgaagaaatgtcctccacatgtccaggttgttgggctactttgccagactgaaaagaaagagagcagacatgaattgttgcgccgcgtagctgctggtggaggtgtttttaagaacgataaaggtcttaagtgccaaattcctggggcaaatcttaatgacattgcaaatcaggcagatgatctagtagagtcaatggaatctagggacaccattcctgatcgaaaacttcttgcaagattagttatagtaagagaagaagctcggaatatgatgggaggtggcctgttagatgagagaaatgatcgtggtttgactaccctccctgaggcagaggtaaactttttgagcaagctcgttgctcttaaacctgggaaggcattggaaaggatgataaagaatgttatgaatggcagaggggaaggtgctgataacgttgaacaaccaagtgctgattcacattctgaacaggagagtctaacaggagtattaggaaggggaagtgtatctggccacaagccacggccagtccgccctggaatgttccttgagactgtttccaaggtcctgggtggcgtatatgcaagtaacacatctggtattacagctcaacatctggaatgggtacatcagacaacactcaaaattcttcaggaaatggccttctagcattgttatcagggttcactgatatagtttgtaacataagaagtataatgctgcacatccgtagctattgaagagcctttttaagtggtcacatatctttttgttgagaagtggagtggaagaaacgataatgggttatctaaagccatagatcactcaggggaagaatgttgccacgttgtgcagtccagaagtaacttacaggcttggaattgatatgaccatgtggttgcccttgccaattgactaattttaagtactagactcagtaacatatttgaggcgtaatatcattattattgacattagtcttaaaaacaa

SEQ ID NO: 14743 - DNA, 1200 bp, Zea Mays
taagtgccgacaatccaagtttatggatacgcatgaagaagtactgtccttcccatgaagatgatggcactcctcggtgctgcagttgtgaacgaatggagccaagggagatcaagtacataacattagatgatgggaggaaactctgcttggaatgtctcaattctgcagtaatggattctccagaatgtcaacatctttacatggatattcaggaattttttgaaggtttgaacatgaaagtagaacagcaaattccattacttttggttgagaggcaggctcttaatgaagccttggaagccgagaaaaatgggcaccacctaccggaaaccagaggtctatgcctttctgaggagcaagttgttagaacgatcttaaaaagaccacagattggaccaggaaacagaatcttagatatgattataggaccatacaagctgtctcggcggtgtgaagtgactgcaatccttatattatatggtctgccaagattacaaactggttccattcttgcccatgagatgatgcatgcatatcttcgtctcaaaggattccgaaaccttagtattgaggttgaagaaggcatctgccaagttctatcccacctgtggttagagtcggaaatcatcgctggttctagtagcaacgttgcatccagttcagaagcatcatcatcttcgtcatcctcagctcctacctcttcaaagaagggtgcgaagaccgaattcgagaagaagcttggggcattcatcaagcaccagatcgaaacggattcttccgaggcatacggaggtggttttagagctggctatccggctgttgagcgctatggcttgaaaagaacccttgatcatatgaagttgacagggtctttcccatattaaagcaacagaagtaaaggagggggctttcttccagttgtgaggatacactccacattggaggttttggtttgggttatacataactgatatgcataccaaacgaggggaattgtctgtaaatcaggagaaccctctgctgcgcggaaacttattgcaaactgtctttttataggaaaacgatacatgcaagttttcagacagggaacttgagaggatcatatgtaatttttgggcacttgtttttgactcctttggttatcaaaaacaaggcaacataataagattgaaatttatcttcatctttaaattcatc

SEQ ID NO: 14744 - DNA, 2811 bp, Zea Mays
ccccccacccacatacactctggagtctggacttcacttcgtccccgtcgaacactccacgccgctctagcactctctgcgctctcccatcctcctcgctagccgtactcttcaccgccgaagcttctggttcctcatcgccgccgctacgcgtgagatcgacccgccgccgtcggtctttttccctgactggtaatctagtgttcattctcttaattcaaatggtttcctcccacggagcaagatgaggaaatattcaaactgctcttagccgtgtagcacgacaagtttgttgcagaggtggacagctgggatttcttggcactttgtcaagtccacgagtagaagtgtggtggaagattgtcttcgttcaagatgatgcagaggccactgctccgtccggaggagtactccttgaaggagacctcacctcaccttggtggtgcagctgctggtgacaagctcaccaccacctatgacctggttgagcagatgcagtacctttatgtaagagttgtaaaagcaaaggaacttccaaacatggacatcactgggagctgtgacccgtatgttgaggtgaagctaggaaattataaggggcaaactcagcatttcgagaagaagaacaacccagagtggaatcaggtctttgccttctcaaaggagcgtattcagtcatcagttgtggagattgtagtcaaggacaaggatcttgtcaaggatgacttcattggccgtgttatatttgatctgaatgaggtcccaaagagagtgccacctgatagcccgttggctccacagtggtatcggttggaagaccgaaatgggcacaaggtgaagggggagttgatgttggctgtttggatgggcactcaagctgatgaagcattccctgaagcatggcattctgacgcagcctcggtccctggtgatggccttgcaagcattagatcgaaagtgtatcttactccaaagctttggtatctccgtgtcaatgtcattgaagcccaggatcttataccaaatgacagggccaggttccctgaagtttatgtcaaagcaatgctaggcaatcaagtcctcagaaccagggcaccgagccggaccttgaatccaatgtggaatgaagacttgatgtttgtcgcagctgagccatttgaagaacacctaattttgagtgtagaggacagggtggccccaggaaaggatgaagtaattggaaggacaatgatttcactgcaccatgtaccccggaggctggatcacaggttgctaaccagccagtggtataaccttgagaagcatgtgattattgatggtgagcagaagaaagagaccaagttttcaagtcggattcacttgagaatatgcctcgaaggtggatatcatgtcttggatgagtcaacacattacagtagtgatttaaggccaactgcgaagcctctgtggaaacctagcataggcatgcttgagcttggtatcttgacagcacaaggcctgttgccaatgaagaccaaggatgggcgtggcacaactgatgcgtactgtgttgcaaagtatggacagaaatgggtgcgtactaggactataatcgacagcttcactcccaaatggaatgaacagtacacctgggaggtgtatgatccatgcactgtggtcacaattggtgtatttgacaactgccacctgaacggcggggaaaaggtcaatggtgccagggataccagaatcgggagggtccgcatccgtctctcgacgcttgaaactgatcgggtgtatacccactcataccctcttattgtcctgacacctggtggcgttaagaagatgggcgaggtgcagcttgctgtccgtttcacgtgttcgtcactgctcaacatgatgcatctgtacacacagcccttgctgcccaagatgcactacgtgcacccgctgtccgtgatgcaggtggacaacctcaggcgccaagccacgaacattgtctcgacaaggctgggccgcgcagagccaccgctgcgaaaggaaatcgtggagtacatgctcgacgtggactcgcacatgtggagcatgaggaagagcaaggcgaatttcttccgcatcatgagcgtcttgagccccttggtcgcggtgacaaagtggttcgatcagatctgccgctggaggaacccactgaccaccatactgatccatgtcctcttcatgatactggttctttacccagagctgatactgcccacagtcttcctctacctgttcctgataggggtgtggtactaccggtggcgtctgaggcagccgccacacatggacacccgcctctcccacgcggagactgcccaccccgacgagctggacgaggagtttgacaccttccccacttcccgcccgccagacgtcgtgcggatgcggtacgacaggctgcgcagcgtcgcggggaggatccagaccgtggtcggcgaccttgcgacgcagggcgagcggttgcagtcgctgctgagctggagggacccgagggccaccgccctgttcgttgtcttctgcttcgttgccgccatcgtgctgtacgtcacaccgttccgggtcgtggtcttcctcgcgggcctgtacatgctgaggcaccccaggttccgccacaagatgccgtccgtcccgctcaacttcttcaggcgtctgccggcgaggactgacagcatgctgtaggttgtgggcttgtggcagatgcctggctccattgctggttcagtggtttcacccgtcagttgcagctcacagatggtcactctcctaagaaccagcccaaacagactgaag

SEQ ID NO: 14745 - DNA, 676 bp, Zea Mays
ctccaccacttaggcacatttcgttgagatggatccttgggtcatctctgaggtcctcaaaccaaatctggagtgtactggatttattgacgtgtcacagatacatatgctccgcgttgaaaaattcttggccaatgccgaaaaatctcatggtaaatatccttcattcgattatatcagtgtaacaccaccatatctggaggtcaactatagcacactgctcgcccaacttgcaaggtcaccattggttggaaaagactgcttcatcctagttgagtacccgctgaaaacagacatggctgaatcatgcggaaaccttgtacagtcgtcgctcacttattaccaaatgctgcagatagctgacaggaggtttggtaggaccaacttgctgatatatgggccaacttggtcagagaaaaagaagaaaagatgatttctgaagggggggttcaggcaaggtttgcatgcagggtgtcatgataatcacggttgggaatggttaaggtttcaagatttgcacaggggatatttggcctagtgtaaggcataagaaggtggttgatcttggttcactgggcctatacctgaataacttgcacagcacagagagctcgcatttcgctttcctttgtggtcagagatccacatccgacaagagggggggggggggggggaa

SEQ ID NO: 14746 - DNA, 1049 bp, Zea Mays
ctggttcatctgctgtatggcctggtgcaccggacactgtccggtgcgccatttttcagcacactcaagtctagcaacatagaaagcacaatattgtaccaataatggcagccaaaatattttgcctcattatgctccttggtctttctgcaagtgctgctacggcgagcattttcccgcaatgctcacaagctcctatagcttcccttcttcccccaggatccaacaggcaatcgcagcaggcatcttacctttatcacccttgttcctccaacaatcatcagccctattacagcagttacctttggtgcatttattggcacaaaacatcagggcacaacaactacaacaactcgtgctagcaaaccttgctgcctactctcagcaacagcagttacctttggtgcatttgttggcacaaaacatcagggcacaacaactacaacaactcgtgctagcaaaccttgctgcctactctcagcaacaacagtttctgccattcaaccaactagctgcattgaactctgctgcttatttgcagcaacaacaactactaccattcagccagctagctgctgcctacccccggcaatttcttccattcaaccaactggcagcattgaactctcatgcttatgtacaacaacaacaactactaccattcagccagctagctgctgtgagccctgctgccttcttgacacagcaacatttgttgccgttctacctgcacactgcgcctaacgttggcaccctcttacaactgcaacaattgctgccattcgaccaacttgctttgacaaacccagcagtgttctaccaacaacccatcattggtggtgccctcttttagattgcttatgagttatagttcaataataaagttttttttgctgatatttgtggcttcccagaaataagaaagtacatttctagattcttatgtgcttctagtctccaaatgtggttgatagttattttgctctaagatcggcagtaatgaggtataaatacttgttgtcgtgtgctactcggttaattgagcatta

SEQ ID NO: 14747 - DNA, 1054 bp, Zea Mays
atcccaaggtcatttcggttaatctccacacgcatcgcggacacggagacttgccttccttttggtgcggaaaaagaaagagaggagaagcgaaggaggttctcagttggagcggctccctctccccgcgcgcgccaccgcctccgatccgagcagccgcctacagtcaacccattcaacctcaaatgttccttgtgaggtatcatgacagaacagcaggaaggtgttagcaagagctcttcctcaagtattagcagcagcactcaggagagtgaggaggaactgaccatcggtacccttataaccgaagcaacaaacacaacaaacagtgccaagagtcttggaaagcgcctttcacacttagattcgatcccgcacactccacgtgttaatgggaaaattccagattttaataatgcgacaattgatcatgaatcattattagaaaggcacttatggcttagctgaatatcaaatagaaggagatgggaattgccagtttcgagctctggcagaccagatattccgcaatcctgactatcacaaacatgtgaggaaggcggtagtgaagcagctgaaggagttcaggaaacactatgaaggttatgtgccaatggaatataaggtttacttgaagaaaatgaaaaggtctggggaatggggtgatcatgtgaccttacaggcagctgcagacaggtttgctgctaaaatatgtctgttgacatcgtttagagacacatgcctagttgagatagtccccagagatgccactccaacaagagagctttggctaagtttctggtgtgaagtacactacaattcattgtatgcagttgaagatcttccaacacggaaaactaagaagaagcattggctgttctagctcgccaggctttggtgatttcttggtatgctattggtcttctctttgtagtccagcagcatctgtaagcctgcttagttatgcctttgtttgttgtaagttgtaacttgacctggaatcaaattcatttaagatcatgcaaaatacagtgagctcttgcttcaaaaacaa

SEQ ID NO: 14748 - DNA, 1251 bp, Zea Mays
cgttttttattttagaaaaaaatatgatgattattctaatctaacttgccactaactcttatcttttctttttttgcttacaataggagatttgctcgtgctgcacaagcgtgtgatgaggatcctgctttgcatctggagttccttgccaattacatcgctgagctatcactactggagtacagtctactctcttaccctccatcactaatagctgcatcggctattttcttggcgagatttatactacagccaacaaagtatccttggaattccacactcgctcattacacacagtacaaaccgtccaaactgagcgaatgtgtaaaggcattgcatcgcctttgcagcgttggttctggtagcaaccttccagcaatcagagaaaagtacagtcaacataagtacaaatttgttgcaaagaagcagtgtccaccgcagatccctactgaattctttcgggacacgacatgctagactagaaacccagaagtgattccagttgcttactggattcttcttgatgtgtcttgaatgcccagtgtagcacagcacaactatgcaagtgctgataacccccaggttgtttcaggtgattacaggggtgtaatcaatgtttgtggtcatgttaggtcattggtgtggtttttcttttcctgcttccagtctttctgtatgtagatcagtgttttcaggcgcttgtaaatccgagttctgtagtagagcacaatatcttgtaagttaactgaagaaatttggtgatcaaccaagttacctacaacttatgttgagctggtgatcaggtttttgcgctagttgaattgtgcttgcatttgtggcctaatgtggttgtcaatataagttgggaacgtatctggtgcaaactaacccctccgtgcaaccgtgaaaacttttaatctgaatcacatgatgaggacgtgcggaggagtgggagagggatttgaaaaagtgtgattagcagcgggcggttaagtataaaattatccacgtccctgcgtcccttgatcaacatcatgtagtttagattacaaatttgaacggttgcacgtatgggttggtttgcactagatacgttcccatataagtttaggtaacttggttgtccagatgtctggcccctacatttttcgatttcaatttgcaagctgtagcgtgttgttatatttacacgttttgctggcaaagtagtgaatgtatatggctgattttgctcgccataattttcatgtg

SEQ ID NO: 14749 - DNA, 1697 bp, Zea Mays
tgacggcgatggctactcactgttgctgccgcgatcgtgttccgcgaaggcgccgccgccggtggatgaccccccagcgtcgctggccgtggggctgctgtcggtgttcgcgtctgggatgggatcgactggcggcattgctggtgcatcctcccttgttgcgtcgccgtcaatatcaaccgggctcaaccctgcgtcgctcctcccgttcctgcaggcgagcaagtggctcccctgtagcgacatagtcgctgctgcaacgacgtcgcgcagctcaggacgcccagcaggtgcaacggctgcacctacaccgcgtacagctgcaccatcgcctcgtcctgcaccacgcgcagccgctccatcgccccgtcctgcaccatgcgcagccgttccatcgccccgtcatgtaccagtgccgtcacctgctgttgctgctccttccaaggtcggcatacaagcattggttgatagtgctagcatcgcctcaggttcagctgggattggaagaggggtcattgcctctggtgcagctggaatggtgaagaagagtggtgctagtcttcctgttggtgcaggggtgggaaggaagaccggttggctctcaaggtcaatgttcccaacatttgatgttggtgatcggatccttgctgagaagatttcgtacattttccgggaaccggaaattctggacattgtgatctttcgggcacctccagtccttcaggcattgggctacagcgcaggtgatgtgtttatcaagagagttgtggctaagggtggggatatcgttgaagtacgtgatggtaacttgattgttaatggagtagttcaggaggaagaatttgtgttggaaccagccgactacgaaatggatccgctgactgtgcctgaaggctatgtctttgtactgggggataacagaaacaacagctttgattcacataactggggtccacttccagttaagaacatcctcgggagatctgtgctccgatactggccaccatctaggataacagatacaatatatcagcatgacatggtgcagcacacagctgttgcatcctgataatacattgtggcaataccacgtggtgcacgccaatttctcctttccctgcatagctttattgacaattgatatgcttagccgtggggttctttatttatttgttgtagccttgcctcaaatgtcgattgggcagcttggctgacagattagtttttttttccctccctacgggcagatgcttgtttaaagacagcaattcttgtactccgtagctaagaatgaatgccatataaatgttgcagtagataagcatcaaggagtgtaggatgaggatggcagttcttttgttttatgagatgagatggtgctctaaacttacgtaaaggaaatacgaagcatagaagagtgcccaagttgtgttatgtatttttttcattccttgatcttggatcaaagattcaaggcaaagtcagcctggtgcaaaggttttggttgaatccttgtatcctgccagataaggttttttgatggtgcaattttggattagcatttgccctagtatttagtgttttttagttctgtattcatttatgatgtaatacaactttgtgagcatagttctgtttggcctgctttgttcaatcgcagtgcgggttcaatactacgttgcctgatgttattgtct

SEQ ID NO: 14750 - DNA, 946 bp, Zea Mays
gacgatgatccgtagtttgcaatcagaagcacgctaatatgaaaactggacccagcatcactgatactgccatggggaggattgctcagatatccaaggttatatctgagggtggctacgacaagatatttcagcagacttttgagtgctcgcctgatgagaagctcaacaaggcatatgtgtgctacctatcaacgtcgcatggaccaatcatgggcgtcctgtatctctcgactgtcaagattgcattcggtagcgacagccctgtgaaatatgtgactgaggacaacaaaactgagtcatccttttataaggttgttttaccccttcatcacctgagatcagttactcccacagcaagtcagcaaaaccctgcagagaggtacattcaggtcgtttcagtcgacaaccacgagttctggttcatgggtttcgtgaactatgatagcgctgtaaagaatcttcaggagtctgttcgagttgttcacggggcctagaggttgcccatcacttttcctctatgtggatgtagtatgcccgtgtaaatgtatttgtgcatggcacctgtaaagttgtgtgttgaaattggtacacatcattaaggctatgtttgtttctctcctaaattatataagttggattataatgaaaagatagtagagtaaattatcactttgatatcataaataagttaaaataaactacttaatgctagcttattttaacttatttgtagttctaaagtgatgttttactcttctacctttccaccataacccaacttatacaatctaaagagaaacaaacacaccctaagcagtgcattcagatctgtggcatgtgaatgtttttggataaatgtgtaaatctctactacttattaaggctgtaagggtagcctgctgttctgccttcgttcaatctggattgtccatcgctgttgttc

SEQ ID NO: 14751 - DNA, 1513 bp, Zea Mays
tccatttatttcctcatttcaaagcttctcgctcgaaccaaaaaaaaagataaaatagattggataagcctggaacgactgcatgtgaggtccgttcccgactcccgtgctcgccacctcctcttccgtaataattccattccagaagtaacagtgtccgtgtcttccttagttccttgctccactcagtcactctccagtctcctcacgacctggctgctcccaagctccgtcctctgctctgcctttatataatccccgagccacaccacctccctcacagtcgcagacacacaccgctgcttcaagaaaccaccgagagcccaaccgcacaggcaggagagagagcagggagccagggacagtagcgtggggccggggagcaaagatggaggggaaggaggaggacgtgcgcctgggcgccaacaagttctcggagcggcagcccatcggcacggcggcgcagggcgccggggccggggacgacgacaaggactacaaggagcccccgccggcgccgctgttcgagcccggggagctcaagtcctggtccttctaccgcgcgggcatcgccgagttcgtcgccaccttcctcttcctctacatcaccgtcctcaccgtcatgggcgtctccaagtccacctccaagtgcgccaccgtcggcatccagggcatcgcctggtccttcggagggatgatcttcgcgctcgtctactgcaccgccggcatctccggaggacacatcaacccagctgtgaccttcgggctgttcttggccaggaagctgtccctgactagggccatcttctacattatcatgcaatgcctgggtgccatctgtggagctggagtggtgaagggcttccagcaggggctttacatgggcaacggcggtggcgccaatgttgtcgcccctggatacaccaagggggacggccttggcgcagagatcgttggcaccttcatcctagtctacaccgtcttctcggccaccgatgccaagaggaacgccagggactcccatgtccccatccttgccccactgccaattgggttcgcggtgttcctggtccaccttgccaccatccccatcaccggcaccggcatcaacccggctaggagccttggcgccgccatcatctacaaccgggatcatgcgtggagcgaccattggatcttctgggtcggccccttcatcggcgccgccctggctgccatctaccaccaggtgatcatcagggccatcccgttcaagagcaggtcttaagctgccgcggactgctcactgctgcactgctctgttatctgaacccagaacttcgtgtactcctgtaccgagctgtgtgtatgtttttttttcttccatcgtgtttgttgcaagggttcccgtctccttttatgcgttgggatcgtggcaagaaagggcagatatcatgtggaaacgtgggtttataactatcagctggatttttcatccaagtggaatcgattcagaattttcttttaaaaaaaa

SEQ ID NO: 14752 - DNA, 874 bp, Zea Mays
gtgtaggtgtgaggagtactcaaagtgattcggaggctggacggcatttccagtactgggggaggattagttaggcttgtgtataagctttggagggttcctaccttcctgctattgtaataagttatgcactttatatatatcaggacttgtaataaatgtaactcttcctatgtaataaccttcatttttagaaatgaaaacaatgttttgtaaagtctgccgctcttatctccgaagtgtgtgtatcgaatgtgattactgtaatatgcatgtatggtgggagatccttgggatgatgagttcaagttgttgaactcgtgatagccttgttaagttacctagtacacgtgcatagccatctgaggccatcaaggcaaggattggtgcacgtgggcctgataacttgggagggctgccagaactacaaaccaagtaacttttgtattggagaatttccaagttgtatgatggaatttggacttaattgcaaaagggtcacatgagtactatgtgactaagtctgaaattcagttgaatggggtcaactttggagctctatatctttaaatctacaaggattttgccctaggtcaacacatcaaacttgtagagctatgttaggagtgtaactttgcttaagtgattaagcattggtgttatgtaaaaatttgagataaactggctcaaagatgggctatcagtcataaggaaattctgaacctggtttaacagtgacactgatatgactttagaaatgaattaaggacgattcagtgggtctaagttcaaggtcactgtgaggaagttggaggtaatatataggagcataactttgctaaagaagggttgggttgttgctgtacgaaatctg

SEQ ID NO: 14753 - DNA, 1081 bp, Zea Mays
ggcggacatcgtgctccccgtcgccacaggcgctcacgcccggctggagaagaagggcggcagcctgctggtgacggacctggacagcaccaacggcacctacatcaacgagcgccggctcaacccgggcttccccgcgtccgtcgaccccggcagcctactcatcttcggtgacatccacttggccatgttccgtgtaaggaagacggtggtggttgaggcgcccagtactagtaccgaggaggccgagggagctcagcaagaggccaccgcagctgaagatatttgacatgtgcctttattacagtaacagtagccccattttacaaattacatggtgatcgtgatccatctacttccagtctcctcaaaagctacattattgatcggcttatatatccaatatataaattacatgatcagataaaagctgacagatcaacaaagaattgccgtaacactagcaatgtacagaaccattccatcgtttcgatttacttgacggcgtaacaccagtaatgctcaaacaaagtttatggtgaatgagacgtaaggatggacctctgattcacctcccagaccagcaactgccacgtcatcttcgcctttccaataaatactgtaatccaaatgttgcgtttcagtgggaaaaaaaaagatactatatgacttaacaaagtagttactgcagcagtccaagcactgaagaatcacctatggacattgccgcaaaggtcctctaagatgctcctcactttcttctcgccctttgtagacggagcaagaacggcagactgatgcaatagagagatcagacaacaagacacacaagatagagttaagtatcacaacaaagagtcagagactagcagagcggattaccaggaacgatggtggcagaccgtatctaagaatgctctctacaaatatgcgcacggcgcagaagtgcatccaggaactgaaaacctgcacagaaataattacagccgttcaaggaacaggcccttgtgaaggaacttttacgcaaaagagacttgacccagccaaccacacaaggtggagtcgttgttgcgcaagcaag

SEQ ID NO: 14754 - DNA, 1467 bp, Zea Mays
cttctttcggagcggccttgcgggaaaaaaaattcaatcatccaaatagcagaggacctacgttcaccctttggtccgcgtccgtgcgcgcgccctctctcactcctggcgcaactggccgacgaccgccgccgccgtactcctggttctctggtgcccaggtctagcaacgtcagtcccttcgccaggtcttcgttggggccttcactggcgacgagcacccaccagttattgggtgtacatctgtatgctcatgtcctttgctgggtccgctcctgatcctaccatattgatgttttctgagagttggccaggtctaccaaggggtgtagaatttaatcccagtgatagtgatcttctgtggcatctagcagcagaagttgggaacgctctagctgagcgccatccatttatcaacgagttcattaaatttgttgatgatgttagagaatttatttgcactcatcctcaacatataccaggtgttaggcaagatggtcgtgcatcatacttcttccatagaagttttgagccctacatcaatgagaatgatgtaaataactgctggaagaaaattggaagccctagatccatcatcctggatggaacactgacgggttgcaaggaagtgtttgccctgtatgcagacatgccgagtgataaaagatctcaggaaactgattggagattacatcagtatcatttacaaaacacagtgaaggcagagtcagagatagtggcgtcaaaaatattccttgcatcacggaacagtctgtgtgaattggccgaggaaactcatattgaatccgaatgggatgtttccacacataaagattcaagcgtggaatgtgccaaaggctttaatcctgaaatctgtactgaaaccgatgagcttgatcatatatctctgaaagagcgctacaggatccttctagcagacaaaagtctggggcttactacagtatcagctgggaaatctataatgcatgtggaaactagcagagcatctcccaaaagaaatcatgagggaaaaataagcaaagaagatatattcagcatgttgcaggaaatttcttctgcaccttctattatagagagtaatcccatggatgatgacagcaacaggagaatacttggtgaagatcttccagtggagggttccgaaaaccagataggtggcactgcaacttgtatgggtgaaaacagtgagctggttgcaagaaaacaaggggctcatctggctgatgtaaaactggaacctgcattaggaggttatgagattggtccttccgaattacctcaagaaaattctactcatgccgaaggctcagtactatctttaggaataaaagatgaactaactgactgtgagttacctggcttatgtgagaatgtttctttcagttcccgacaacgcagaaaaaggaaaacaagttattcaactgaaaaaacacttaaagaagataa

SEQ ID NO: 14755 - DNA, 1377 bp, Zea Mays
gcagtttactagttgtacacccataatgacccattctaccgtcatatacatacaccgttggcacgccatctaatcagcgaagaggagacgacgactgctctgcctttcttccctacaggaacaggacgaatcaatcaatcattcccctctgcagccgccggccctcagcaagcaagcaagggacagacgcggcggggatgggcagcgggttgctgtgtccatcttgattcttagatacgttcctccagatgaggtacccctcccatcttccctgcaagcatcattccgcttgagccaagaaaatgacgaggaaaagctgaggggtacccttggagatgatgatcatgagcaaggctcagctgaaataagtgatgttgtagtagaaccaatcactgaccccctgatcgagaagcagctatacgcaagcaatttgagtgaggcaaaacggcgtaagaccgcggcatgcagcatcacatctgtttgcataggggttctgatcctcacgacgtcagcctcggcaacattcttgcccttcccggtgagatgctccgtttgtgttttgggtggcatgctcctcctagctggtctgggcatgctctgctggattgaccaagatgatgggaggcactcctttggccactccggaggattcatctgtccgtttgttcccttgctgccggtaatgtgtatcctcataaatacatacttgttaataaatcttggtggcggcacgtggatgcgagtgggggtgtggctagtgatgggggtgttcgtctacattttctatggccgcacccacagctcgttgacggatgtcgtgtatgtccctgtggccgaggcgaatgagatatacgggtcatcctcttcgttagggtttgtggcgtaaagagagatggaaggagatgtttgttgaagcctatcttgagccagtcatggtacttctcacaaaaacctcaaagatcctgactggagcaggtacctgcttgagctattgtgttgcaggcatgggtttgaagaattcaatttgtacgtcatatttttaaaatgtgtaaattgtaacgcacggctaagcttgtgtgtctctgttggaggaatgtaaatattagtatattgcatagaactatatataggtggtgccaatatacaggtgtttaaaaaaaagggggggggtcattctaggaatctgtatgttttactacgaacttgttctaaattcctaggaattcaaacaggcatgtctgaggcgtattatgtggttaaggcctcaaaggtccaaacacattttatttcatgttgaaatgaagattacacgagcagaaatgctcacggaaaaaacaatagtacatcaataattcagattcactgcaccaggtttcc

SEQ ID NO: 14756 - DNA, 1944 bp, Zea Mays
cgagatcggataataattcgaccggttaccatccaatccccatggtgttttccaaaggagaaggttcacacatagtggaccccgaaggcaacaaatacattgattttctctctgcttattctgcagtcaatcagggtcattgccatccaaaagtcctgagagctttgatagaacaggcagaaaggcttacgctcagttctagagctttctacaatgataagttcccaatctttgcggaatatctgacaagcatgtttggatatgacatgatgttgccgatgaatactggtgctgaaggagttgaaactgctatcaagctggctaggaaatggggttatgagaagaaacatataccaaagaatgaggctttgcttgtctcttgctgtgggtgtttccatggtcgaactcttggtgtcatttccatgagctgtgacaacgatgcaactcgtggttttggtcctttggttcctggccatcttaaagttgattttggagatattgatgggttaaagaaaatcttcgaagagcttggagatcggatttgtggttttttatttgaacctatccaaggtgaagctggggtagtaatcccaccagatggctatttgaaaggtgccagagacttgtgttctaaacacaacgttttgatgattgctgatgagatccaaactggcatagctagaactggtaaaatgctggcatgtgactgggaaaacatacggcctgacatggtgattctaggcaaagcactcggtgctggagttgttccagtcagtgcagttcttgcagacaaggatgtcatgctgtgtatcagaccaggggaacatggaagtacattcggtgggaatccgttagctagcgctgtggcagttgcatcactgaaagtggtcagagacgaaggtcttgttgaaagggctgcaaagttaggacaggagtttagggaccagttacagaaggtccagcagaaattccctcaaatcctaagagaagtgcgcgggaggggtttgctgaacgcagtggatctaaacaacgacgcgctatctcctgcttctgcatatgacatctgcatcaagttgaaggagagaggcattttagcgaaacccacacatgacactataatccgacttgctcctcccctcacaatcagtcctgaggagcttgcagaagcatccaaggcgcttagtgacgtgctggagcatgacttgccacagctgcagctgcagaagcagataaaaaagccagaatctgaggcagagaagccagtctgtgacagatgcggccgggacttgtacggatgaatgaagcctccgaacagagataacttcattttcgtaggcacccatctcgccccagaagaaataataacagagcagaggatgccagctgcctagctacttgggttaccgtaatgttatgcgacttgttgcatcgtataccaagtatatgagctattgcaaccttggtgaatatgtcaaataaatggcagcattcacatgctcaaatatgggcagcattcacatgcactgtgacttctttgcaacgttttatcaagtatccgaaagttccaacaggaagttggtcaacaatcgataatcagagcaaagaaaaaaaatggatgatatgttcgatcacggtactgatgacatagtattcccttcaaaaaaacagaaacgataaaaacaagggagtattaatcggtcgagtaatatcgtatatcctctttccttggaaaccgtgatgccttgtttttttttccggttcttttcagaattttgatagggaaccaacaatgaccatattaccctcatgtaaacgaactgttgtaatcttacagttttgggataggatagtctttttatattaattatgaatataacaataacgacccatataaatatcccacaatctatattgttcacggatatgagaaattttattcaataa

SEQ ID NO: 14757 - DNA, 1227 bp, Zea Mays
gatgtccgcgttcatgcagtgaaagttgtcgcaaatctggcagctgaaggagctctgaggatgagacaattcgtagagtagcagcaggagcaattgctaaccttgcaatgaatgaaacaaaccaagatcttatcatggctcaagggggtgtaaccttgttgtctatgacagcatctgatgcagaggatccacaaactcttagaatggtggccggagcaatagctaacctttgtggcaacgacaaactgcaaacacggttgcgggtagaaggtggaattaaagcgttgcttggaatggttaggtgtgggcaccctgatgtccttgctcaagttgcacgtggcattgcaaattttgcgaaatgtgaatctagagcagctactcaaggaaataagatggggaaatcactattaatcgatgatggagcgcttccctggattgtaaaaaatgctaacaacgaagctgccccaattaggcggcacatcgagcttgcactgtgtcatttggcacaacatgaagtaaattcaaaagacattatcaatgaaggtgccctatgggagcttgttcggatctcaagggactgttctcgagaagatataaggaatttggcataccggacattgacatccagccccactcttgaagcagagatgaggagattaggaataaaaatgtgataacagaacagagtgcagctggggctcacactatgaagttccatttctcgtgcacatacagaggtgtccgttgctatgggcgctggtaatcaagcacatcttcccttgatctacctgattttggcaggcatacacgggcaccgcactgactaatcagaagaggcaatggccttcgcaccaactttctcctcgagagttcatttttctttggtttgagggggcagttgaaaatctcgacagcactagcaattcgtttattttgtaaaataatgctagcatagcagatgttacctacccccaatgcagggtttgtaaattttttgctgtaaaaatatcaaggccaaaaggagtgctttcgcagtttgaagcataactgtattccctgatccctagaaggtttaacttttatttatttatttatttattgattgcagatgagccatatttgtaactgattttgtttctttcttaagcgttgacactgccatttcttttacactatctgctctcagatgatctatgtgagacacagcttttggaatgcgaagcgaaa

SEQ ID NO: 14758 - DNA, 1862 bp, Zea Mays
cacaaggcacatccctcttcactctctcctccgtcgtcccgtcactcgtcagtcctcgctctcttcactcgctgaaaggcaggctggtggagtggaagcgcttcactccccttcgtgccaccccagcccatcgccttccactggactcatctgcttggcactcctcgccccgtgcttggattcttgcacttggtgcttcccttctcctacctcacatcacccgcccagatccaatccacacgagatttgcgacgctccggcctcccggcacgaagcctttctagggatcgccactcgccacacgccggccggggcgaaaaaagctcttcttggagcccttctgcttggcctctccctctcttctctcccggcgtcgtgcgcgggcctggccccggccaagcaccggccggaggtgatatccatcgccgacttcggcggcgtgggcgacgggcggacgctgaacacgtgggcgttccgcaaggccgtgtaccgcatccagcaccagcggcggcgcggcggcacgacactgcacgtgccggccggcacctggctcgccggcagcttcaacctcaccagccacatgacgctcttcctcgccagaggcgccgtgctcaaggccacgcaggacacgaggggatggccgctggtggagccgctgccgtcgtacggccggggcagggagctgccgggaccacggtacgccagcttcatccacggcgacggcctccgcgacgtcgtcattacaggtgacaggggagtcatcgacgggcagggtgaggtgtggtggaacatgtggaggaggcggacccttgagcacaccaggccaaaccttgtggagttcatgcattccaccggcattcacatctccaacatcgtcctcaagaactcacccttctggaacatccatcctgtttactgcgacaacgtggtcgtaaccaacatgatgatcttggcaccacgtgactccccaaacacagacggagtcgatccagactccagctccaacgtgtgcatcgaggactcgtacatatccaccggcgacgacctggtggccatcaagagcgggtgggacgagtacgggatcgcgtacgggcggccgagcgccggcgtcacggtccggcgcgtgaggggctcgtcccccttcagcggcatcgccatcggcagcgaggcctccggcggggtgcgcgacgtcctggtggaggactgcgccatcttcgacagcggctacggcatccacatcaagaccaacgtcggccggggcggctacatccgcaacgtcaccgtcgacggcgtgcgcctgaccggcgtgcgcagcggcgtccgcatcgccggcgacgtcggcgaccaccccgacgcgcacttcagccagctcgccgtgcccacggtcgacgccgtgcgcatcagcaacgtgtggggcgtcaacgtccagcagcccgggtcactggaggggatccgggcctcgcccttcacccgcatatgcctctccaacgtcaagctcttcgggtggcggagcgacgccgcctggaagtgcagggacgtgcgcggcgctgcgctcggggtgcagccgtcgccctgcgccgagctcgccaccagcttcgcgtccgcacggtcctcatgcagctagttagtgtagtgatgcctagctaattaatttctgaattctgatgatgggtgtgcttttaagtttgggctttgttttacttattctatggcaccgatgtctgtctgtctgtctttgcttgctcaatcacttactttaggcttccactgctaaagtgctaatcgttcagaaaaccttaccactgcaaataattttgtactccctacattctaaattataaaatatcttagtatttatagat

SEQ ID NO: 14759 - DNA, 857 bp, Zea Mays
aagtacaacatcattgcttaatgccacccttcttcaagctgcaattcttgattaccttggcaagtcctctgatagtgacccgtcttcaccagtggagcacttggcctccagatcaagccggaaaacattgatatatctagttctcactcttggccacatatatccagattatgatttcagtgctgttcgggcacacttgttcttccaagaagaggagttggaaagtttcaagcagatggtagacacctacttatctgatgcctctaggcaatgggcagccacaaatgaaggcagttctcttctggacagtatgactaaagcaattgatgaggttatcaaaattaaagagtgtgacatctacagctataatccagactctgacgcagatccagttcttgagaaaggggccatatggtcgttcaactactacttctacaataggaagctaaagcgagttgtgagctttcgatgttactgcactagcaaattatcaggagatgacttcttaaccggtgttgcgtctgatggtgaagaggaagatgccttgattgacatggacatatgactgaccgtgttctgctagctacctgatgtgcgtataatatagaacatgtatgctcattcctggtagggaactttcaatatgacgcacttttaccgtttcctgtaaaaaccatggcacggtttagctttgtctgtatatgcggatttgagatttggtggcgggaaacttccaatcccctaggcttgaactgccacggtaattcggtactctgttgtttgctagacctgcaatgaataatgttgcgccaactgaattgttcaatttgatcaattgtgaattcacctctctggaa

SEQ ID NO: 14760 - DNA, 870 bp, Zea Mays
acatgacattgcatgacgaggctcttttttgtgcgactacagggttggtgcagaccagtggtctttacagcataaatcaattccagaaaaattgcaaagactgtacgatgatggttacaagctggtcatattcaccaatgagtcaaacattgagcgctggaagaacaagcgacaacaagctgttgactccaaagttggccgccttgataactttattgaatgtgttaaagcccctattcaggttttcattgcttgtggtttagggaaaggaaaaggtattccagatgatccataccgcaaaccaaatcctggaatgtggtggttgatggctcagcatttcaattctggaatcaaaattgacatggatcaatctttctatgtcggtgatgctgctgggagagagaacgatcatagtgacgcagatatagaatttgctaaggccatcggtctcaagttccatgttcccgaggagtacttcggtttctaattacctgtgaccagctagtaagatggttacactacgtcgtttagtgtttggatattatcaatactgtggctattctggtatggtgatctacatgtctgtttaaaccgtcaaataatatcccagttattcacttaggtcctgtttgtttccttccagaattatgtaatccatatggattatataagtacttaataacctgcttatggattatcataatctaggtatctagattatataatccacctaataatctgtgttgtttgtttgtctcttaacttatttaagttggattatataatctagagggtaaacaaataaggctaacttgctgacataattgagaaaactcaactctctgtatcgtagagatgttgagtcaatca

SEQ ID NO: 14761 - DNA, 582 bp, Zea Mays
gttccatgtaccaccactgtcccggacaaaagatctcgcatcaaatcctctccgattcttcggcaagtactccggcgagaacccgcaggccgcgggcgtgcagcccacgaacggctcgatggtctacctcggcggcgagcaactcgccacctcggtcgccgccgcggcccgtgcgtcacagctcctcctagccgccgccgccctcgccgccgtcgcgctgctctgagcttcgttcccgacgtggccgtgtgaagtcggcggctcgagtctttgtcctctttccggcgtgacggggccagcgataaaagattcgacaaccagcagagaggctcagacgagacgagtgacgacggtgctgctacgactaaccgagagaaaaaaaacaatgaaatataggtagcttatggcgtagggtttaggataactggtagcatgagttttaacctttgcattcttctccacgcttcctcgatttgttgagccagccgaaagatgtattctatatttctatccatcgttgttcgccgtgatgctatagattacagcaatgatgattatttactctttaccagttgaacatag

SEQ ID NO: 14762 - DNA, 765 bp, Zea Mays
gataagatcgttgtcgtgactcgtgattcgtgaacggcggcgacaagaagccgggagagatgccgctggccacaactgctccgacgccggcgccgccctgtcctccgccgagtccagcagcggcaccagtccggacgcagctcctctcctccgtcgcgaagctcgcgctcacggccgcgctcgtgtgcggctctggcggtcccgctgccgtcgtcgtcgttccggccgccgctcaggccgtcccgttcgtccgtcctcctcctcctcccctgcaaggaaggcccttcgcctcctccactccttacgcgcagtcccagaagctgcagcttggcctcgacaagctcggaaagatcaggccatgcccgtccaccaacccggggtgcgtgtccaccaacccgctgggatcctccggctccttcgcctcgccactgctcatcccggaatcatccgcaggggagaagaccgtcgcctcgctgcggcaagccatcgagaagacgcagcgtaatgtggagtttaaggtcgacgaagacactccatatggacactacatcgaggcggagatggacggcggcgtcggccgggacgtgatggagttcctggtgaagaaagacgccggcgtggtggcgtaccggtgcatggccaccaaggtcaccttcgtctaccccttcaccaccgctgtcggcgactccaagggccagaagcagaggatcgcggccatctcgcaggagctcggatgcttgaaacgcggcgcaagttttcttccag

SEQ ID NO: 14763 - DNA, 2004 bp, Zea Mays
cttaaacatgaactaacactcacacttgttttgtgggaaatggtcttcaatgctgccgtgaggaaggagatagctgatgaaaccgacagagaaacaggccgttcaaagcaaatatcacctgtccctatccatttaagcatattttctccatatgttgtgaatcttactcttattgatcttcctgggcttactaaagtagccgttgagggccaaccggagaatattgttcaggacattgaaaacatggttcgctcatatattgaaaagccaaattgtataattctggctgtttccccagccaatcaggaccttgctacttctgatgcaatcaagatatcacgggaagttgatcccaaaggtgaaaggacctttggtgttctcacaaaaattgatctgatggacaagggtaccgatgctgttgatatactggaaggaagatcttaccgtctccaaacaccatgggttggtgttgttaatcgatcccaacaagatatcaacaagaatgtggacatgattgctgctaggcgtagagagcgagagtattttgcaactacaccagaatataagcacatggcttctaggatgggatctgaatatttaggaaagatgctttcaaagcatttggaacaagttatcaaatcaaggatcccggggatccaatctcttataacaaagacaattgcagagctggaaactgaacttaatcgacttggaaaacccattgctaatgatgctggggggaagctgtacacgatcatggaaatttgtcgtatgtttgacagtatctacaaagagcatctggacggagtgcgccctggcggagaaaaagtttaccacgtcttcgacaatcaatttcctgtagctattaaacggttgcagtttgataagcaactctctatggaaaatgtaaagaagcttataacagaagctgatggataccagcctcacttaatagctccagaacaaggatatcgacgccttatagaatcttgtcttattagtatcagaggtcctgccgaggcagctgttgatgcggtacatgcaattctgaaggacctcgtccgcaaggctatcaatgaaacacatgagctgaagcagtttcccacccttcgtgtggaagtaggcaatgcagcttttgagtcattggatagaatgagggatgaaagcaagaaaaatacattaaagctagttgacatggaatgcagctacttgacagtagatttcttcaggaagcttccccaggatgttgagaggggtggaaatccaagccactctatttttgatagatataatgactcttatcttagacgaattggacaaactgttctgtcatatgttaatatggtgtgttcgaccttgaggaactccatcccaaaatctattgtttattgccaagtgcgagaggccaagcgctcgctgctcgatcacttcttcactgaactgggagcaagagagatgaagcaactttccaagcttctcgacgaagatccagcagtcatggaacgcagaactaaccttgcaaagaggctggagctgtaccggagtgcccaatcggaaatcgatgcagtcgcatggtccaaatagccctgatggctaagatatctgttcttacatgttctttatccctcgtctggcgattgtctcccctattctggggcatatatagctgatttttgtctgttgtaggtcaggtcattctatagattaccgcagctgtacggtgtcgtttagttgtgcttttgttccttgtacttgagggtctaggggacaccaggctgctgtacgcttgcatcacggacaagttcataaattgtgtttttgttaccatgcattcttttattccatctatgtgcagctatatgaagcatgttcttctgtcagtatgttcaaagtcttgataggccttgatcggttgcaagaggaacgaggggattgagcaattttaattagcaagggatgtaatctctccaatctccttcaatccatccttaactgaacaagctt

SEQ ID NO: 14764 - DNA, 885 bp, Zea Mays
aattaatgatacaatagtcgaaacatactcataaattatccatctagattggagcgaggtgccatatcaggttatgggctgtcatgtgggaccaccggtatacccacctgacccatgccagggacacgcagtgcacgcaggaagtgccttcgaactacctgacagtctcgttcaagctatatgatatggatagcacagggtttattgaacggaaggaggttaagcagatgttaattgctcttctaggagaatcagaaatgaggctatctgatgatatcattgagacaatcctggataagacattctctgatgctgatgcaaatcaggatgggaaaatagatagaacagagtgggagaattttgtcacaagaaatccttccttgatgaagataatgactctgccatacctcaaggacatcacaacaacattccccagctttgtgtttaactctgaagtcgatgatctcgtcacgtgaccacgattttctctccgatgtatagttaacaaggagaacctgtcgagggttacgactggagatttctagcctctggcattatgaatggagggtatattcatgcggctaccaggaagggtgcgtcaaaattgtctgccacagatgtacttgacgagctgtagtttttactcggtgataatgttgatgcttttgtgttggtgatgattgggacttgagttagtatgctgagatgaacatttttcatttttaccagtgggaagtctctattttgtttgtgaaactgcgacgtgcgtgtctgtactgatcaaatatgattcttgtcaaagtagtactgcattctactattttagcgtaaaataaacctcgaagtcccaaaacttgcatcacatgtcattgaagtctctgagtt

SEQ ID NO: 14765 - DNA, 1608 bp, Zea Mays
gagcccatgacccagagcagtgccgcacacagacaggcagcagccctctccctccctccctcccgcccgcccccactagtcaatactgagcacaatacgccacccaccacccctccatcaaagaaaagggcggcaggccgggggaggggaaggggctgagcatcagagcatgacgtcgggagcggcggcggtgggaggcctcgggcggacgccgacatggaaggagcgggagaacaacaagcgccgggagcgccggcggagggccatcgccgccaagatcttcacgggcctccgcgcgctcggcaactacaagctgcccaagcactgcgacaacaacgaggtgctcaaggcgctgtgccgcgaggcggggtgggtcgtcgaggacgacggcaccacctaccgaaagggatgcaagccgccgccagggatgatgagcccgtgctcgtcctcgcagctgctgagcgcgccgtcctcgagcttcccgagcccggtgccgtcctaccacgccagcccggcgtcgtcgagcttcccgagcccgacgcgcctcgaccacggcagcggcagcaacagccacacccccggccccgccgccgcagcagccgcagcggcggcggcggcctcctccctgctcccgttcctccggggcctgccgccgctccgcgtctccagcagcgcgcccgtgacgccgccgctctcgtcgcccacggcgggcgtcgcggccgcccgccaagcccgacccgcgcgcgccggcgcgaagagcacccggacaccatccccgagtgcgacgagtccgacgtctgctgctccgcggtggcggactccggccgctggatcagcttccagatcggggcggccaccacggcgcccgcgtcgcccgcgtacaacctcgtcaacccggccggtggcggcggcggcgcgtccgcttccgactccatggagctggacggggtggcgggcgcggagttcgagttcgacaagggccgcgtcacgccgtgggaaggcgagcgcatccacgaggtcgccgccgaggagctcgagctcacgctcggcgtcggcgccaagtgagtgaagcggccacggccgtcgtcgcgctcacagcaagctcgggatctttgagctcccctacagcaatgccgggagtaggagacgattgctgtgagaccggcaacaaaaaaaagtgtgtagttcgtgccttcgtggtcgcatgagaaattgtcgacgcattcattcgtgctgcgattggatcgggcataagtatttcggtgtaggtgatgattctgttgttttgattcatggactggtaaaatgaggtgaatcggaacagtcgatcgtccgtccggattgaattattgataacgctggctcgtcctttgttagcgcttcgaaatgcgtggtctcgtgggtaaaaaagaggacgcgctgaactttgtggctggacgatcttgtctctcttggtcttggccgtgactgtgactgcacgacattttactcttcacgtgctactcttgtttttatttttgacagtttatcacagtgggactgtgggagtatcttctctcaacactttttttttttacgatgtggccatgtggggagtatcttctctgg

SEQ ID NO: 14766 - DNA, 1617 bp, Zea Mays
catctctagactagggtacccaaacccgagccgtcgtccccagtgtggcagtgtgccgctcgacgcgcagccaaacccaaacccttcctccctcccgacgggcgacggcgatggccgccgcgacagagaagacggctgaggacatccgccgcgagctccaggagctccagcgccagcaccgcgagatcaccgagcgcctgcgcgacccccgtggccttcgccgcggcgcccccggccctggtcctggacctggccccccccgcccgctccgcggcttcgtgagaccccatgtgggtgcggaagtggcggatcaggctccgcagaagcgtcggctgctatcggccgtagttaaggttgatggcgctgaaaataatgaagaaggcacaaaggatgccaatggggaggggcaagaggcgggttcaggtgccactgaaggcagtgacaggaggactttcaacactggcgggttcagaagggacgggagcctgtggatgcagaggagggtggactataattcgctgccagagccagctccaagggagcttcccaggaatgaggacccgagtttggtgagaaggaataagaggatgctggggcagcttcttgtcggtacattagagaaatttcaacaagaggataaaaagctatccaactctgaggcttttctgcgcagatcagagactcagcgaaaggctgagcaaaaggttcgtgaagaaagtgaaaggctgcgacagcaggaacgtgagcaaattgcagagaagcgtaagcgtgatatgacgctccgcgctcgtgtagctgctaaggcagaagaaaagaggttggagctgttgtacattcagtggactgagcatcataaaaggctgtccaatttcttaaggacaaaagctgagccacctatttattacatgccaactaaaccaattattgatgatccagccattgttgagcagaacaaggaaaaggtattcgaagaatggaaatctatgcgcagggctgagctgactcggtttcaaaagcaagttgaggagcaatatctctcaaatgtggagaggcaattggagaggatccagaatgcccggaacgctcggaaggcgaatgggcctggtaacatgcaagaaatggacaaggagctggacacccacagggcggagcatggtccaaagcctcggcgagttcccgaggagggcggcaatgatgatgacgaagatgcagaggacatggctgcggaagacgagctgatggatgaagttttgggcatcaacgatgcaatcaatgaggacccatccaagccgtccgaagaagctactactgaaggtcagccagcaaccgaggaagcacaataggattctttgttcacacaaggtaggcgtaccattccggcattccgtatgcttagttgccgtcttgttgggtgctgtctgtgcgtgtatttttgttagacgtcccccaatggttagactgtgttttaatattgttgttttggccttttgatgttgaggccatacaactgtcaattattatcttataattgttgtaagcatactataattgttaccatgatttggtcgttttttttgtcgtcagacgtttattgccagcaggttatgttctttcact

SEQ ID NO: 14767 - DNA, 4041 bp, Zea Mays
gtcacccgtgttgccacattcaagcacaggctttcctaatgtgcatttcatggaagggcatgctcaaagcggtccaatccctcgcctacctcttgttacaatttcagattctagcaaccttttgcgagatgttcctgtttgtcagccattccatctagagctgaatttcttcaacaaggaaacccgtgttgttcagtatccagttagagctttctatttggatggatttaacctgatggcccataacttatcatctggggctgacaatctctataagaagctttactcaacgattccttcgaatgtggaatgccatcccacgaatatgtcatacagcccaaaacagcatttatttcttgtcgtgtttgaattaagtggtacaaatggagtggtacatgaagttgttctttactgggagcagactgatctacagacagtgaacagcaaaggaagttccataagaggtcgagatgctgcttttttgggcccagatgataatcaatatgctattctggaggaagatagaactggtctgaatctctttagtctcaaagctgtagctacaaaggaagctcttgaaaataatgctgctgtgcttgaagaaaacacttttgctgataatgctgctagtgctacctcaacggaacgtcaaggtcctctacagtttacttttgaatcagaggttgatcgcatattttcttctcctctagaatcaaccttgttgtatgttatttctggaaagcatattggacttgcgaagcttctgcagggatataggctgtctgcagacaacgggctatccattacaacaaaaactgatgggaagaagtttattaagttgaaaccaaatgagactgttcttcaggcccactggcaaacaaccctaagaggtcctgtggtaggaatattgacaaatcagagggtgctaattgcttctgctgatcttgatatactatcaagcagctcaacaaagtttgatcgtggtctcccatcatatcggtcaatgttgtgggttggaccagcacttatcttctcaagcgcaactgcaataagtatgcttgggtgggacaacaaagtccgatcaatcctctccactagcttccctcgctcagtattacttggtgcattgaatgaccgcctactgcttgtaaatccgacggatataaacccaagacagaaaaagggagtggaaataagggcctgtttagttgggcttcttgaacctcttctcattggatttgctaccatgcagcaacacttcgagcaaaaacttgatctttcagaagtcctgtaccaaataacctcgaggtttgatagtttacggatcactccaaggtcattggacatattaactaaaggacctcctgtttgtggagaccttgctgtatcattatctcaagcaggacctcagtttacccaaatcatgcgctgcaattatgcaatcaaagctctccggttctctactgcgctgtcaattttgaaagatgagttcctgcgctccagagattatcctcaatgccctcccacttctcatctgttccagcgtttccgagaattgggatatgcatgtataaagtatggtcagtttgacagtgcaaaagaaacttttgaggttattacagatcacgagagcatgctggatctatttatttgtcacctgaacccaagtgcattgcgacgccttgcacaaaagttagaggaatctgctacagattctgagctgaggcgataccttgagagaatattaagagttcgttcgactggatggacacagggtgtattcgccaattttgctgctgaaagtatggttcctaaaggccctgaatgggcaggaggaaactgggagatcaaaacacctaccaacattaagaatatacctcagtgggagcttgcaggagaagtcatgccttatatgaagacaactgatgctggtatcccatctgttgttgcagatcatattggtgtgtacctgggtgtgatgaaaggaaggggtaatgttgtggaagtaagtgaaaagagtttggttaaagctatagctgcagctagcagtgagaacacacagccggtgtcttctgcatcagcagagaaaagtaaggcaattcctcgtggtgattcggttggtgatactttggcaaggcaactgggagtccagattgcatcttctgatgaacaggcaaaagctgccgaggacttcaagaagactttatatggtgttgttgatgatggaagtagtgatgaagacgagtcaacctcaaagactaaaaagatacatataaggatacgtgataaaccggctgcacctactgtagatgtcaacaaattgaaagaagccactaaacagctaggcttgggtcctccgctgagtaggacaaggtcattatcagggacacctcaagacttcaatcaggctcctacacaaccaggaggtccagccgcagctgtttccccagcaatgccaaattctgcgattgatttatttggaacaaatactttagtgcagccgcaagcaccctctagttccacaggtcctgttattgcaggcatgggagtgacggctgggccgatccctgaggacttcttccagaacactattccatcgcatcaacttgcggctcaactacctcctcctggaatagtcctgtcacggatggctcaacccgctcctggcattgaacaaggccgaccagtacctaatcaaatgatggctaatgttggtcttccagatgatggggtgccaccacaagcaccaccgcagcagtcccagtttcctccgcagcagtcccagtttcctcagcaaccaggcattcctatggattctattggcctgcctgatggtggtgtccccccacagagtcagccacttccttcacaaggccagtttcttccttcacaggcacagggctttcaacttggtattcctgctccatcacaaccaattgatctcagcgctctcgagggtcctggagcggcgaagcaagctgctcgccctccagcacctactgctgtgcggcctggccaggtaccacgcggggcccctgctgcagaatgctacaagatggctcttgctcatcttgagcagaatcagcttaccgatgcactatcttgtttggacgaagcattcttagcccttgcaaaggaccagtcacgtgaagccgacatcaaagcgcaggccaccatttgtgctcagtacaagatcgcagttgctctgctgcaggaaattgctcgtctgcaaagggttcaaggagctggtgctctcagtgcgaaggaggaaatggccaggctatctcggcaccttgcttccctgcccatccaggccaagcacaggatcaactgcatcaggaccgccatcaagcggaacatggaggtccagaactacgcctacgccaagcagatgctggacctcctctactccaaggcgcccccgacgaagcaggacgagctcaagagcctgatcgacatgtgcgtccagaggggcctgacgaacaaatccatcgacccgttcgaggacccctcgcagttctgctccgtgaccctcagccggctgtcgaccatcggccacgacgtgtgcgacctctgcggcgccaagttctcggcgctctccgcacccggttgcgtcatctgtggcatggggagcatcaagagatccgacgccctcgctggtgggcctggacccgtgccgtcacctttcggctgaaggtcgagtctgctcctttcgtcctccatcggtcctgatattgtatctatagtgttcagtttgcgttcattacattcgattcgttgcagcttgtattgtatgtagcctttttgacgtgtagcacgcttggtgttgagagcaatgtacacctgtactgttgggttggttgtgattatacacgcggttttttttggagctagcaatgtaaggtgcatgtgcatatctgagacgcgaacgtcgacgtgaaacgttctagtctccatagttggtaaatacagttactgcagaaactcgcatctatacgataataacagtgatagagagacctaagggattaattgaatgga

SEQ ID NO: 14768 - DNA, 2034 bp, Zea Mays
agctttatgtcactgaagagtaaatttgacagtggcatacctcaaggagaagcctgctagccagggctctcagccatcaacaccaagcgccagcagtgggatgcggtctgcagcagcaaggctgctgggcactgggaatgggagcaaggcacttagctttggtggcggtaatggtgcaagccgagctgttgctggaagcagccgtgtaggaggcggccttggtacacctacaggccttggtggatcacaggggggcacaaattatgatggcaagggtacatatattgtattcaatgctgctgatacactattcatcagtgatctcaattcccaggagaaggatccactaaagtccatccatttcagcaactcaaacccactgtgccatgcattcgacccagaggccaaagagggacacgacctgatcattgggatgggatcaggggatgtctattcaatgtcgctgaggcaacagttacaagatcctggaagaaaacccgtggcagctctacattacaataagggtgataaagatgtctcacccaatggaagtcgttgcacttctgtcgcatggggtgccagagcgtgaaggcattttcgtttgttagccatttctgatggaaatttgtacgtgtatgataaaaacaaggatgggaacacagactgtacgtttccagctgtcaaggatcagtctcagtttatggttgcacatgcaaagtcgagtaagagcaacccagtcgctaggtggcatatatgtcaaggttcgatcaatgcaatttccttttcaccagatggcgcatacttggcgactgttgggagagatggttatttgagagtattcgatttttcaaaggaacaactaatatttggtggaagaagttattatggtgcactgttgtgttgcacttggagctcagatggaaaatatctattaacaggtggtgaagatgatcttgtgcaggtcagtggagttgcttttgattcatattggtccccaccaagttctgatggaaatggagaaaatgtatatcgctttggttctgttgggcagatcagggataagaattacttcttttcagtactgatggggttattttctcatgatgttttgaaagtaatttatgtttttgacacccaactacttctgtgggacctggcactggatgagattgttgtcccactacggcatccttcaagtgcctcacctacgtttagcagcgggagcccttccacacactgggacaatgcatgccctccaacaggtgttcttcaaccttctcctagaatgcgagatgtcccaaaactatcgcccctagttgcccaccgagtacatgccgatcccctatctggtatggtgttcaccagtgaatctatcctcaccatctgccgcgagggcctcatcaaaatctgggttcgaccagagcagagcgaaaacaatcagcaatcgaattcttcagaatttgctttaggccctgcttcgaaggatagggcgatcacatcttccaataaagcaagtagctccagctttaagaagctgccgcctgttcttgtcacatgatgaatcaacgggatggttcttgtggatatttctgcttcacgtggcattagtggtggatatgaatcttactccatggttgatggggatgaaactctcatatggagtctgcagactgcaagtaatgagggtgagcatttgatggttgatgttcccaggaagcagggccagcgttgccagtttttttggcacgaaagagtaaatgggagctcttgtacagacacatacttaatgataaaattgtaaaaactcactgtccgtttcataatattcaatagccaccgaaagatgattggacgaccatgttatcgattttagctggtgggttgatagtatccttaaactttggtacttcggagacttgtaattatggaccataatatctgaggaatgcttcagtcttacctggtgtaagttgtgttactatttccttctgccttttgtcaattattagatctagtttggcaactccatttttc

SEQ ID NO: 14769 - DNA, 1328 bp, Zea Mays
taacacctaatatggaatcttgctagtaacaagtgacatggcctgaagcgaaggaaggagagggaccacagaggttggctttggagccggaccaggatgctttagcagagctgaaagatgtcggtttgcagttggccgtatccttcagtggagaaggttcaatacttgctattggtggtgaagatgggtatttaagagttttcaactggcctaccatggggtctgttctcacagaaatcgatactaaaacatcgattaaggatcttactatcagttccgacgagaagtttcttgctgtgaataggagcagtggcccatgtagagtgtgggatttgcagtcatctgaagttgtagccagtctgccaagagaaacaggggaaatatttggattctgcagattctctaataaggctgacaacagtcatgtcctatttataactgtgatggaaggcgattatggaaaaatagtgtcttggaatactacctcatggacgagaaccggatcaaagaaaataactcgtgaggcaatttcagcttttgctgtgtcacccaacggtgctcttcttgcaattggaacaatagaaggaagcatcatcgtagttggctcaaaagacatgcggacacttgtaacagttaaaaaggctcatcttggtattgttactacgctgaccttctctcaggattcaagaacattgctgtcaacttccttcgactcttctgcaagggtgacatctgttgggtctccaaagagtaatggaacaagcatatggcccatgctactagttgttattcttgcaattttggtgtactactgtacgcagcacaaagaagacattttggcaatgttgcagcgttgagatagatttctgttcagcccctgactggtctactctgctggacgtattattagtgttgcttcagtgattgaagaaattttggacttgggccaacttcattattctctcaaggacaaacaatacagcaaaaggcactgagccctgttatgttttgtagtaaaaagggtaatgtacttactcatgttgtcgaagtttttgtaagttgatggccgcaagtgatagacatatgtggcaatgtttcttcatgctgcacttgtgaattgcaagatgttcgccccaagagtccaatatagagagttcagaaacaaatttttttggtgtgcgaaacaatttattatgtatgcgtaataaagctgtacaaagaatatctaaaaatgcagatagcttctgggtgcttatacatgtgatgaccaattattgtttggatgacaaaagggagttgtaacactatgctctacatctgtgtgtcgg

SEQ ID NO: 14770 - DNA, 1348 bp, Zea Mays
actccttttttctcctctcaatctcccccgtctcccccctccctctcccttgcttccctctccagtccccagcgcgcgcgacacgacacgggccaatcacccagccgccgccgccggcgatcgccggaactcggcgccggtgcttccgagcacgctccgctcggaaccatggtgaggagcgggagcatacggcggtccgcggtgcccgcgcctatgccggcgccggcgtttaccgtgtctcccgccgactacaggctgctggaggaagtgggatacggcgccaacgccgtcgtataccgcgcggagttcattcccaccggccggacggtcgctgtgaagtgtctggatctcgatcgggtcaacagtaacctcgatgatgtaagaaaggagactcaaactatgagcttgatagatcaccctaatgtcatcaggtcttactgctcatttgttgtgggtcataatctttgggtggtaatgccattcatgtcagagggttcatgcttgcacctaatgaaggttgcatatcccgatggttttgaggagccaattattgcctctattctaaaggaaacactcaaagctctagactacctccataggcaaggacatattcatcgtgatgtgaaggcaggtaatatccttattgataatcctggtgtagtcaagctcggggactttggtgtctctgcttgcatgtttgatagaggcgatagacaaagggctaggaatacatttgttggaacaccatgctggatggcaccagaagttctccagcctggaactggatataatttcaaagctgatatatggtcgtttggaataactgcactagagctggcacatggacatgctcccttttcgaagtaccctcccatgaaggttcttctcatgacgctccaaaatgctcctccaggtcttgactatgaccgtgataaaagattttcaaagtccttcaaggaaatggttgcgatgtgcttggtgaaagatcaaacgaagaggccaacagctgaaaaattacttaagcattcttttttcaagaatgcaaaacctccggagctaactgttaagaacattttaactgatttgccccctctttgggaccgtgtaaaggcactccagctaaaggatgcagcacaactagctttgaagagaatgccttcttcagaacaagaagcactttctatgagtgagtaccaacgaggtgtcagtgcatggaacttcgatattgaggatctaaaggctcaggcatcactgatatgtgatgatgatccacctgaaataaaagaagacgatgacactggtagaataactgacattgataagatctgtggatgcatttctggattca

SEQ ID NO: 14771 - DNA, 590 bp, Zea Mays
aaaaaaaaaaaaaactcggtgccacttttagcaaggtaatgaacataacagacagacggtgccgaggtaaaataacatggtacctggtatctaagttatgatatatcgtttatacttattcatcaggtagttgagcaaaatatggaaaatgggagaacacagtatatcaaccacaatgaaagacagattcagcgataaaggctctcagatctcaagttctcagcaatctcagtttcccagcggtcaccattctcgagcaatttctccttgtcgtacagtagttcctgcatcgaagcatcaaactcaaagttaggcccctcaacaatagcatcgactgggcaagcctcttggcagaacccacagtaaatgcatttggtcatgtcaatatcatacctgtgaggagataaaagcaacagaaattcagattaaagtttaattgcagaacacagtgggtaaatcatagttctattgacaaaaaagagagaaaaaccttcattttgattaccttgtggttcggcgactgccgtcttcacgttcttcagcctcaattgtaattgcctgagctgggcatatctggacatcgtttatac

SEQ ID NO: 14772 - DNA, 707 bp, Zea Mays
tggcaggctaccgttgcaatttaatacaaaacctgttcttaggttattgtaagcttgtaaggtggcgagtggatatattgctgtatggataaaccttggttcatggcgtgttacaactaatgtagtaccatcttctgattgtgatagctttgttcttgcatagcgcttgtggttcaggttcaattggcagggaatgttgttgtcaattgcactgccctgcccctgaggctgctagggatgaaggcgacaatgatatgaacactggtagcacgcaataccctgaaggttggtactcagacgatgacgacgggcagctctcatggttcaacgctggggtcagagttggcgtaggcatcggcctgggagtctgtgttggtgtaggcataggcgtcgggctcctcctgcgctcctaccaagcaacaaccagaagcttgaagaggcggttcttctgacagttgcagctggtgtagctaccaatgatgaccagagcagagttctgcctcacatacttgtatagttcatgtgtttgttgtgcaggagttttgttttgtttttaggggaaagtgtagatgctgtgttaatgtggttgtgtacatggctctcgccgtttcttgtatggcatggcatgcatgtaaactgtgaagttggtcctcggacatgtgaaggaaatggtttctagttttgagaacggagcagctgctgcatgg

SEQ ID NO: 14773 - DNA, 853 bp, Zea Mays
gtcatcaaatgcaggaattccactactatatgtgccacttaaagttgttatgtcaaaatattatggtgaaagcgagcgtctattgggatctattttttatcttgcaaatgatcttcctgaaggaggtaatatattcttagatgaggtatatatcgtaatacttatagcataaacactcaagccactacaagtaagctcttgccctttgcttgtttccagattgatatgtcaagatacgcttgtttcatttgagctcactgttatctgaaaatctatagactgccttcgtccccttcatcactgccaatgaccgtgacttggccaccacagcaaaagcacgcaggatccttgatgtgtgtggtctagacgtgattgaattgggcgtgcctgactttgatccattagccgaatgtccagttattcagctcagattgtttgcctatacaatttgttcttatactatactgtctatgtatgctcctgcttcctgcgttttggtccagtagaagggtgcaagctcatcagaaaagaaaagagttacaagaagatcaagcttggctgtggctgcagctgtgttgcctcctcttgttggaccgaagagagggaggggagaagcagctggcgtgcagacttctactcaggtggtcttttattctctatggggcttctaggatacatcttctccagaagcaccataagtcttgtcttgggcattacaccagggctagccactctgctacttggcactctcagtctgaagttctggaggagcgacagatccagcttcctgcttatcttggctcaggcagaggtgatgctgatgtgcaagcatcttcaccttgagttctgccta

SEQ ID NO: 14774 - DNA, 1337 bp, Zea Mays
ctcttttaacattggttcttgttaaggagggggtagcctggttggttggtttgcagacgctaacaggtttcctgaagaaattgctggttgatacatcagtatgttaacagctgttcagaccgtgggttgcaatgaggcttatacatgggcagggacatcagagagctaataatgacacagaagaggcaaggaagaagataagaaaattcaaggaatcagcttggaaatgtgtttatttcctgtctggagagcttttatctttgtctgtcacatataatgagccttggttcaccaataccagatatttttgggtaggaccaggagaacaggtctggcctgaccaaaagataaaattgaaacttaaggctgtatatatgtatgctgctggattctacacatattccatatttgcacttatgttttgggaaacaaggcgttcagactttggagtgtcaatgtcacatcatgttgctactgttgttctgattgttctatcttacgtgttcagatttgctagagttggctctatagtattggcaattcatgatgcaagtgacgttttcctggaagtagggaagatgtccaagtacagccattgtgattggcttgccaatgtttcgtttctgttttttgttatttcatgggttcttctccgtctcacatattttccgttctggattctgagaagtacaagctatgaggtcttgttgactttggacaaaaagaagcacaactttgatggtcctatatactattatgtgttcaattcccttctattttcactacttgttctccacatatattggtgggttttaatatatcggatgcttgtgagacaaatcaagacaagaaatgttggagatgatgttcgatctgattctgaaggagaagacgaccatgaagattgattgggggcatcatcttactttgtgtgttataacggtgcttatacattcttttgctggattccaacagattatgagaggacgagcattgttcctcacgagattcaccgaagccgggctatgggttagttgtgtcttggctgccaatttgtgctgtactaagtatgcattagaaacaacgctgcaatgcattagaaaaaaagctggaactggatgtcgaatataacattcttttcagtgttcacacaaagtgcagcggtaaatgtagcaccaatttagcattccggaaacaaaaggaccggttgtaaatcaaagcctttctgccgacataccatgtacattatgtttgccaggatgacaccgcttggagttttgtgaacggtagcgctggccgccggtgaaacgcttctcttgagctcctgttgttccata

SEQ ID NO: 14775 - DNA, 861 bp, Zea Mays
ctttgtcatgctcgcctactactgtttttttaccattgttcaaaatacaaagctggcgtgccaaaccttgatatggttgagagtgtcgatgatgagaagattgctaaccgtcttgatcgagtggtagctgacttggggagaaaacctcttaaggttttggtccaagtcaacactagtggagaagaatcgaaatttggagtagatccctcaggatgcatggaactagcaaagcatgtcaaactgaactgcccgaaccttgtgttctctggtctgatgacaattgggatgcttgattactcctcaacccctgagaatttcaaggtaaaatatagtatattctgggatgcagaaattgtgtacgagtggcaatatggcatgcatatgtgcgcttatgtctgttaaattcataggcgctggctaactgccgggaagaggtgtgcaaggagcttggaatacccgaagagcagtgcgaattgtctatgggcatgtcggctgattttgaacaagcgattgaaatgggaagcacaaatgtaagagttgggtcaaccatatttggtgcaagagaatacccaaagaagaactagggtgtttaactatatttggtgcccaaagaactagggtgcttatgcattcctgtcatgatggtagtggcacagaatctgcaacagatccaaatctgatgatgcatcatatatgtgcagttgtgtgcccattctactcagcttaaaacattttgacacccttttttggcccaaagtatcaataaggaaagttaataaaaagcattagaccacatgagtatcgattgtattttgatgtcgacagattttgtttacagttcaaacatccctgttacattat

SEQ ID NO: 14776 - DNA, 1243 bp, Zea Mays
acgctgtcaatgcataacctgcgttggcattccgcctgctggacttcctcgtgctgtgtctctgtctgtcgctctcgctctcagacgactgggccgccgccgcttggtgctgaggctttcgttggtctcttcggcggcgacgagcacccaccagcagttctgtagaaatggctgatggtgaggacatccagcctcttgtctgcgacaatggcaccggaatggtcaaggctggttttgctggggacgatgcaccaagggcggttttccctagcattgttggccgtcctcgccacactggtgtcatggtagggatgggacagaaggatgcatatgttggcgatgaggcacagtccaagagaggtattctcacgctcaagtacccgattgagcacggtattgtgagcaactgggatgacatggagaaaatctggcatcatactttctacaacgagcttcgtgttgcaccagaggagcaccctgtgttgctcactgaggctcctttgaacccaaaggccaacagggagaagatgacccaaattatgtttgagactttcaatgttcctgccatgtatgttgcaatccaagcagttctatcactctatgctagtgggcgtactactggtattgttctttgactctggtgatggtgtgagccacactgtgcccatttacgaaggatatgcccttcctcatgccattcttcgtttggatcttgctggtcgggacctcacagactccctcatgaaaatcctgactgagaggggttactccttcacaacctctgccgagcgagaaattgtaagggacatcaaggagaagctggcatatatagcccttgactatgagcaagagttggaaactgccaagaacagctcctcagttgaaaagagctatgagctacctgatggccaagtaatcaccattggtgcagagagattcagatgccctgaggtcctcttccagccatccatgattggtatggaggctgccggaatccatgagacaacatacaattcaatcatgaagtgcgacgtggatatcaggaaggacctctacggcaacattgtgctcagtggaggttcgactatgttcccgggaatcgctgatcgtatgagcaaggagatcacttcccttgcaccaagcagcatgaagatcaaggtcgttgcaccgcctgagaggaagtagtgtctggataggagggtcgatcctagcctcgctcagcactttccaacaggtatgtatt

SEQ ID NO: 14777 - DNA, 481 bp, Zea Mays
gtcgcagttgctgcgctgcagcttgcctgtattgctggcttcttcatcactgctgacaaaaccattctacggaacgcacgacaaaacaccatcgggaagcttgacaagtcaacctgatgcagagatgtagctgaagctgaaaaggttctctggttgccgcggcggttgatagggtgtcttttgccccatatgcagtggcaccatttctcttcgtggacaagtaatttttgggtgtttggctattcaaaccagaggttgttctgtaatgacttgtctaactgatggacccaactattgtatccagtttactccgaatttgaatcagaataaaaggtggttctatatgttcgtagacatggcttagacccttgttctgaacattcacttgacctggaatttgtgatgctaaagaacggggattagcgatgtgatttctttctaattaccgaatagagactagacagagcaggttaatgttgga

SEQ ID NO: 14778 - DNA, 225 bp, Zea Mays
gaccaagtctgacacatatgatgaatcatggtaaagatacaaatgtcacaactttaatatataataagagttatgtataaaataaataaataattacatcgtaaggagacaacgatccagcaaccaaaagttgactgggagacgacggcctagacctctcacgaacacatcgtagcatcctccatgtgcctcatcctgaggtacctgttcttgacctctgggggt

SEQ ID NO: 14779 - DNA, 113 bp, Zea Mays
gccacagatgccagatgtgcaacagcagtaaagttttgcaccaaccagaaatctcagctttccagctgaccacatgttgcgattaatttctctgaaccacaacccgtcccaaa

SEQ ID NO: 14780 - DNA, 3121 bp, Zea Mays
cttaaaccaaacacgcgctgccaccgaccgatcaggcgaccccgctccaagaggaaatccaccaccgcggccggggcctcccagatctcgctggaggcagcggcagcggcggcggtggggggcgatggcgctcaacatgaagaccctgacgcaggcgctggcgaaggcgtcggctgtcatcgagaagacggtgtccacgacggtgcaggaggtgacgggcccgcgcccgctgcaggactacgagctgctggaccaggccgggtccggcgggccgggactcgcgtggcggatctacacggcgcgaccgcgggacggcgccccctcggcgccctaccccgtcgtctccgtctgggtgctcgacaagcgcgccctcgccgaggcacgggcgcgggcggggctgtcgaaggcggccgaggacgccttcctcgacctcgtccgcgccgacgcggcgcggctcgtgcgcctgcgccacccgggcgtgctccacgttgtgcaggcgcttgacgagaccaaggccgccatggccatggccactgagcccgtcttcgcctccgtagctaacgcgctcgggtgccttgacaacgtcggcaaggtgcccaaggagctcaagggcatggaaatgggactacttgagattaaacatggactgctacaagttgcagagacgttagattttcttcataacaatgctcatcttgcccatcgagctatatcgcctgagacggtctttataacttctaacggatcttggaagcttggtgggtttggttttgctctttcagttgatcaagccacaggtggtttgacttcatcacagctattccattattcggactatgatgtcgaggatacagctttgcctcttcaaccgtcgttgaactatactgcaccagaattggttcgaagtggagattctaaagttggctctgcttgtgacatgtttagctttggatgtctagcttaccatctggttgctcgtagaccacttctggactgccataacaatgttaaaatgtacatgaatgccttgacatatttaacaagtgaagccttttctaatattccttctgatttggtatcggatttgcaaaggatgatatcgatggatgcagtatcgcgtcctagtgctgtggcctttacaggttcttctttcttccgggatgatacgaggttgcgcgctcttcgtttccttgaccatttgcttgagagagataatatgcagaagacagagtttttgaaggcattatcagatatgtggaaggattttgattcccgagttcttcgatataaagttcttcctcctctttgtgctgagttacgcaacatggttatgcagccaatgattttgcctatggttctaacaatagcagaatctcaggataaaggggattttgaacttgcaacactgcctgcgcttgttccagtgtttacttcagcatcaggtgaaactctacttttgcttgtgaagcatgcagatctcatcattaacaaggccacacaggaacatttgatatcacatattcttccaatgctggttcgggcttatgatgacaatgatccccggttacaggaagaagttctgcgtcgaacagtatcactgtctcgtcaacttgacaccaagctagtcaaacaggctgtgcttcctcgtgtacatggattagctctaaagacgacagttgccgcggtgcgcgtgaatgcgttgcgctgtttaggagatcttgtgccatccctggacaaagaaggtatattgggtatcttggagacggttcggcgttgcacagctgttgaccatactgcgccaactcttatgtgcacacttggtgttgctaatgcaatctataaacaatgcggtgtggagtttgctgcggaatatgtgattcctctcatcttcccattactcacagcacatcaactgaatgtacaacaatttgccaagtatatgctatttgtcaaggacattacaagcaagatcgaagagaagcgtggtgtgactgttacagataatgggaacacagaggtaaaagcatcaccttcattggcaaacgggatccattctgaacctatgccaggacaaataccagctgcaaagagcagccctccatgggatgaagactggggtccttctaagaaaaccggtgttccatctctctcagttgattctagtgcacagacaaagcaaccctcagtacacccttttgacttcagtactcaaacaaagcaatccacaccactcccctttgatttgagcacccgagcaaagcagccatcattagtttctcatgctacagcagctacaatcccacctgcgcaaccacaaccagtacaatctcttgtgcccagttcaggacctcaaacttctggctcatgtgcccctgttgacattgagtggcctcctcgaagaagctcgtcatccgacttcaatgcatccttgtctattagcaaggagaatgaatctggaaggctatctagcgacggacttgacgatattgatccttttgctgattggcccccaaaacctagcaatgttactagcattacagcaaccgagcatcgtccaagcataaatcaaaatatttctggatttagctcaggtaacatagggtttggtggcagcgggaattctatagggcaagcgaaaagcaaccaaatgagctggtcaaacacgcctaatctgatgggcatgaactcaactggcagctatttgaatcagggcagtgcagctctaggttttggaaatccaattggaggattgagcactggcctctccaatccaagcagttccagtacaggcctgagcatgatgcaaccaaaatctgattttggatcactgtccatgtctgccaataatgccgcaaatggcccacccagacttgcccctcctccatctacttcagttggaagagggcgtggtagaaatcaaggacaatcagcactctcccgagcatcaaggcctcctcattcgaactcgtcatcaggacaacaacctatcctggatttactttagtaagagaggcttgcctctattcttggcgatgacgattgtcaatgtgtacatcttcaaacctttgtaagacaaaagacagggacgcgcgcacgcacatatctactcactcatccaccc

SEQ ID NO: 14781 - DNA, 787 bp, Zea Mays
gacttacttttggagggtagttttgggtggtggtggattcggatcctttggtggtaatcaaggagctgggttctcggcatttggagcaagtggggctggaagaccggcagctgatttcttgacgcagatgagaaagtaggctccaggcaaatccccagacaggtttacgcattagctatagcatacacatgaggcgagttacttttatgttccactcttaagcgttgtttcggcacaggagctgtagcataaacatgaccgcagtataccctggactggatgagccctcgcttcgctccatctattgatgatggaggggggctaccatttgggagccttattgttttctcttcttttacaagacacagcaggtgtcaacagcagcatcgacggttggtcttggattccctactggtttctctccagggcgaccaacttgctaaggctttcatggctctctcttcaggttccatggctgcatgaaatgtagaagaaaaaaaaagaggtcgtgtaaaggtcattgcttggacgtgattcccctccagctttgtcaatacaattcccagcctctttcccacaatattccctgtcacgagcctgcccgcgcatcaagatgaaacccgccaccacaccaaagagcttgctgcgatttgcaaaggcatggagaagaaagggatcgagagaaacaaaagcataagatacccagacacttaaacaagtaacaaccgaacacaatctttcgccaaatatatatatatacacgatataatataagaacggaacaaag

SEQ ID NO: 14782 - DNA, 3740 bp, Zea Mays
tcccgttctcaggtcattggctcattgcttgctgctaacactaacaccaaccccccaagcagttcaaagtacttgccttgccttgtcttgtctgctccagtaatctctctctcgcctccccaaccactcctttaaacccgagctatcagcgctaggcgccgcggcggaggcgactgcgttcgcgccgccggcatgctccagcgcggcagagctgtctcgcttgctgtactgagttcaagaaaggaagaagggcgaagctgatcttccgaaagccaagtcaaaaaaagaatgctactcctaaccttgagagacgtttgaactgcaaaccttttctgggagctatcattatactatcgcaatgtcaagggtaccaaaatggaagatcgaaaagactaaagttaaggttgtattccggctgcaattccatgccacaaatattccatcaacaggatgggacaaattatttttgtccttcatctctgctgatacgggaaaggtgagtgcaaaaacaaataaggcaaatgtcaggaacggaagttgcaaatggccggatcccatctatgaagcaacacggcttcttcaggatcctcggactaagacatacgatgacaagctatataagcttgttgtggccatggggacgtcacggtctagtattcttggtgaggttgatgtcaatcttgctgaattcgcagaagcactgaagccgacttcaatagcacttcctcttcgtggttctgacttcgggacactgttacatatcacagcacaacttctcactacaaaaactggtttcagagaatttgagcagcaaagagaaactggcactagaagctctcagcagttattgaaccaaagaagtcatgatcctgttgaagttgctgcggcctcatcagacattggcactgataaggttaattcgaggattaagctaaaagaaaattctttggggttccccttggctgaagattctgcagggtcaacagacgactatgaaaattcttcacatacttcagatggtatttttactgaaaagaatgatccacacggtgctcatgaaatcaatagctttaggagctcaaatgacttacccctttgttctaccagtcaaagtcctacaccagaaaaaggtgcccattgggttaaacatcttttatcacaagggagcaatgattgggctcatagctcaagtcctgggtattgtgctgataaagatttagctgcggctcatgatgagaataaccggctcaggacaagattggaggtggctgagtcagcattttctcagcttaagacagaagcaacatctctggagcatgttactgacaagttaggcactgagacacagggccttgctcaacagcttgctgttgaacttatgtcacgtaatcaactcactactgaagtgtccttgctaagaacagaatgttctaatctgaaacaagagttggaagaaataaaatcttctaaacacttacagaacaagtttgacgtagaaggtaaaactatgactaagtatggtaaggatattcttgctacagagtccattcatcatctccaaactgaatggctgcaaggtttgctacttcttgaaagtaaactgcagcagaccagaaacaatgccctccatggactacaagcaagtgatcttgattttcttcttgctgatctgggggcacttcaacgtgtcattgagaacctcaagcaaggtgttcagccaggtcaaatgaaagaaaatcacaatgcagaacatttggttccaattgctggttatctatcaaactcaggacatgatgataccatcaagaaaagttccggtggtagtacaggcacaatggaggagaaaatgtgtgagctcctgcagaagctggaggactcaaaaactgagaaggagaatctcctggagaagatgagtcagatggagcgctactatgaatcttttatccataagcttgaggagagccagaagcagacaacaattgaattagaaaatctcaagaaagagcataactcttgcttttatacagtttctgtcctacaagctcagaagcaaaaaatgcacgaggaaatgaatgatcaattaatgagatttgtggaggaccgaacagctttagaagctcaaaataaggagtttgagaggagggctgttgctacagaaactgcactcaagagggttcgattcaattattctgcagctgtggaacgtctacagaaagaccttgagttactgtcgtttcaggttctctctatgtacgagtcaaatgaaactcttgccaagcaatcattactagaagattttgatagtttgcctgaggaacactctgccgtggaagatttatgtggcaataatgaacatgagcaatacaggcctggtgtcaaacaaatcagacctgaaggtctatatgcagagaaagaaactgatggccagaaaaatcttattcgggcactcaagattgaagacctccgtgcgaggtcagagtttcaagcacatactgattcacgggggaaccactcaaacttggaagggccaagaagggcctatagtgctatggagtctgagcatttagagatgtttatttctaatatcgagtggcagatattctctgatgtattacgtgagtctcactatgctacattggatatcattaaatgcatgcagggaaggttggacgtgttagaaatgcagcttcatgactctaatgatgctaggcaatctctagtgctcaagttgaactctgcactggcccaagccaaaagtgtcaaagagagcgaagcaggatatgttttgaagtgtgatgatctgactgtgaagaaccaaatattagaagcaaagcttcatgatattacagttgaaaatgctttgcttatggaaaagctcacggagtctgaaagacttgttcaggaacataaaacttgtgaaagcaagtacaaggtctgtactgaggaagttacgagattggacaaccttttaatcaaagaaactctactaaccaaccagcttaaggatgagctcacttcactaagagaaagttttgaggccatgaaagatgcgttaaataagcaatcatccataaacaatgatatacaaatgatttctacatcccttcaagatcaactgggtgacctatgctctaaaattatatcttttaacaaggaagcaaacatttcaggcttagaagaggcatctttgctgcatgaacttgagagtaagaattacgctgctgtgatgaaaagattggaatccttccatcagcaaacatgtgacaaggtacttcatcttcttgaggagaaggaagtaatggaaaaaatgtgtgatgctcttcagagaaggtcagagaaggctgagacaaaattgcatggtatggagcagcagtttatatgtgatatggatgccacaaaacagaagctaaacttgtctgaggaaattgtagagaagcttcagcaagaactccaggacatggctcacaaacttaggatttgctccgattctcaagaaaaatattctgttaccaatggtgatttaacatcaaaattgtcacaaatggaaattgagctacatcatgcaactagtgagaacaaggctcttgttgaaaaattgaaagagtttagtgttactgtagaggaactcgagaggacaaaatggtgtcttgtacaacatgaggaggatacccgtacctttggaccagtcattacagtctaaacatgaaattgttatgcattatggagagcgtaatctaatg

SEQ ID NO: 14783 - DNA, 1517 bp, Zea Mays
cgtaaaactatgtccaagggtccgacgtttctccagagcctgaagccaaatctagggggcttgcttcatctgctgtccgagcgtggtttggtttctcggggctggcgcggtcaagagctcacctgagttccaccgaaatctgccacggtagttcttgcctaggtgtgtcgttgcgttgtgacccttgcggattttcttgtttcttttgagttgcgatctttgcaggttagtctcccccccaatccgtagtcatccggcgtctaggaaattgcagtccagtttgcttatttgttcgtctagtgccttctccccatcctggttagaaagaatatcggaaggggggatttttttttttttgcctgttcgtagaggaagcagtgaagacataattgttgcatctgataaagctcgggcgaaatacaagcaaatccttggaattttgcatccctttgctggctcttttctgattcagagaacccaatgggggatgtgtccttgaatggacccgttaaggccgagccaactgccggtggcattgccaagggaaaccgagttctggacacgatgtccgccgggtggacggacgagagacacatgctgtatataagctccatggaggcttctttcgtcgaccagctatacaaccatggaaaccatccgcaggacgcaaatggtgctggcttcaaggttctccgcaggggggtgtgggagtacatcgagtatgagaagaccagtgcccctgtgcgaagtggggctaaatgctgcgtccctgcaaatccttggatccggcatttcaggccacgtgactgcggtagtaacgcacagagtgacgcggtcgaggcctcagtgggcgaccatgagtcgggtactcaggcaagccgcaagagcccttcagtgtctcatggaagggaacggggagcttgtaagggagaaccccagattctacatgaaagtacagaggtctctgatcaaaattttgctgacgatgaggctgaagctgaaacagaatcaatgaaagcatgcaagaaaaggagactaagcagggctttgcactccggtgctgaatgatcaagtaaattcgcaggaacaattagcttagcctgttgcaagaatcgatatgatttatcctaaaagaaggtgttaagatgatgggacatggctttcaaaactttcagctgttgcctgctggtagccaagacacactgaatccgaaggaaggcgttgaagggtagctgttagtgattttgtgatataaagagtactggggcagttagcatcggcatttttagcggatttaagttcttgttatgtatatctgtcttctgtcttcatcagtagtgctgcttagtacctcactctctcgtcagcaggatatttctatatattgtctgtacttggtagatatatgtattggttgatcctatgagtgtaatgtttttttttgctgcagcttttgggggcagttggtattaaattcagtaagagcatctacaacagtgacctataaaaatgtccta

SEQ ID NO: 14784 - DNA, 1194 bp, Zea Mays
atggtgctgtgggtcttcggctacggctccctcatctggaaccccggcttcgacttcgacgacaaaatcctcggcttcatcaagggctacaaccgcacctttaatctcgcttgcattgaccacagaggcacaccggagcatccggcgaggacctgcacgcttgaaaccgacgacgaggccatatgctggggaattgcatattgtgtcaagggtggtccagaaaaagagctaaaagcaattacttggagagaagagagtgtgagtacgaccagaagatatccattgatttctacaaggaaggagatcccttgaaaccagctgtgacgggcgtcttagtgttcatttccactccagatccaattggcaacaagtactatcttggccctgctcctttgcaggatatggcaaggcaaattgctacagccaatggccctactggctataatagggattacctgttctcaatggagaaggcattagccatcattagccacgaagatgattcgatcctagagcttgcaaacgaggtgaggaaggtgctcaacagaacaaaggagaccaagatcactgaaagattatgttcccctgaatataaatcactgagagtttattgttcctggcgatgcagggtgcgtgaactcttctactacctcaagggtgagcaggtggactatggcgaggagcacagcaaggcttgtggccacaacaggtttgggagaatatatcacacagggcactatcctgtttgttacgagcacaacccagtgcattttgtggggcactctgttggcacacaggttgtgagggtgctgcatcagatgcttgccgacaagctaattgcacttgatatgggtgcattaattgctggtgccaaatatcatggagagtttgaggacagacccaaggctgttctcaaagaagttacatattctgatgggcagaccattcttttcattgatgagattcacaaattgcaaatgccatggctgcaaaaagcaaagttgctattgcgggagctgaaaactgtgaaggcagatttatcttttgcaaaggaacgctatgctcagcttgaagaagagaataaaatgttgcgtgagagttatgacatgggtgataatccagaagctaatgatcagctgaaaatgatccacatgatgggaagagaaagtgtgtagctctctggcctattttccg

SEQ ID NO: 14785 - DNA, 578 bp, Zea Mays
cggtagcattctagtttttgcttaattgaatggtagcattctggtggacagtctggttcactatttttcattttggccccatggtagtgattgtggtatagtgaatgtgaacatacctactaatggtgctgaaattggtggagcatttggtggagaaaaagcagctggtggtggacgagaagcagggagtgattcctggaagcagtacatgaggagggcgacttggagggaggtcctagaggcagtaagtcacttgtttactccatgatgacaatagcaagcagatcgcggtggtgcctatggatgctacaataagaaagatcaaaagttcttttggatggatgcagctagatattttgttttgtattttctccaaaagagaaatttgcaacgttgtgaatgatattataattgtgatgcttttgtgaatatataattgtggtgcttttgtgtttatgtgatggatctatgactgtggtatactgattaactgtgtatgtctttatgatttgtgtataaaaatctgtgatttgtagtgcttaattaaatatatattattattaataacaactgtaaaa

SEQ ID NO: 14786 - DNA, 1152 bp, Zea Mays
atggaatcggagaacgaaaagctccgtaaagaactggctactctgctcagagttgttcaaaagcgtagttgtgacatcgttgatgtcgtcaaatcagccttccaacctttcaactcacctttggtggacgaattgaaccgagcactagttgagattgacgacctcgccaaggatctcgaagacgtagcagtgcaaactcagtgggaggtctatgaaagaccttgtgggttgtacatgctcatttatatcatgtttgatctacctctgttgcatagaatggggagtgattggaaccagtatcaactggcgcacatctccgctggagatttgttgcgggcggaaatcgctgctggctctgagaatgggaagcgggccaaggaattcatggagaagggccagctcgtgcctgatgagattgtcgttaatgttccagatgaactccttgttgaaagggtggttggaaggcggcttgatcctgtaacagggaaaatatatcatttgaagtattctccgccagagaatgaagaaatcgcttcaaggcttacacaaagatttgacgatacagaagaaaaggttaagttgaggctggagacttattaccaaaatatcgagtccttgctatcaacatatgagaacattattgtcaaagtgcaaggagatgccacagtggatgctgtctttgctaagatcgacgagctgctgggttctatcctggagaagaaaaatgaaatggtttccagcacatgagcaaggggaatatatctgaagcacaggacgacacgtacaagtaatgtaagccagtctcacgtaatggaaatttctccatgtggatgtggtcaaagcataggaatttttttcctccaattattaactgtacgcgaatggaagcgacagatcattcgtaggttgtgagggcttcagagatcatctgctgctgtacatgttttgttgctgtcttgtgaacatacatgtcttgttgtttctcaactggaggaatgctgttaacctgctgtatcatttccttgaatggcttatgtgagagggaggaggacctgagcagcagctcttgcaatctttgtctaaattccttcggatggtgaagcccatttcgtctgttctccgaaaagtatattgattgcattttccgaagaa

SEQ ID NO: 14787 - DNA, 346 bp, Zea Mays
cacgggacacgacgctcaccgctcgctgtcgctgaggcatacaagagtggagaactgcaggaaactctagagaaagcaatgtgttcgtagaaaaaaaatgaacaataagcagatggcatacaattaatcaaaatgttatagtatttgctgtacaattcaggcttgtcatcaactggagatgcaagttgtggataattcatgtccaaatgttcagtgcactttcgactggaaatacatctttctgcagtttgtgactagtcatccagtttgaaccccgatcatatattgtacgatttgtgactaccagattgctccgttttcagctgcaactaccgcgtccgcccgc

SEQ ID NO: 14788 - DNA, 1322 bp, Zea Mays
  misc_feature (1)..(2): n is a, c, g, or t
nnatcgttgagaagtattccaactccaacattgaaattcatactttcaatcagagccagtatcctcgcattgttaccgaggacttcttgccacttccaagcaaagggaaatctgggaaggatggctggtatcctccaggccatggtgatgtgttcccctctttgaataacagtggaaaactcgacatcttattggctcagggcaaggagtatgtcttcgttgctaactcagacaacttgggtgctatagtcgacatcaagatcctgaaccatctgatcaataaccagaatgaatactgcatggaggttactccaaaaacattggctgatgttaaaggcggtactctcatctcttacgaaggaagagttcagcttttggagattgcccaagtacctgatgagcatttcttgcccaacaggtgggtgaaccttaaagctgtcaagagactagtagaggctgaggcacttaagatggaaattattccaaaccccaaggaagttgatggtgtgaaagtccttcaacttgaaactgcagctggtgcagctattcgtttctttgacaaagcgattggaattaatgttccccgctcaagatttctcccggtgaaggctacatctgatttattgcttgtgcagtctgatctttacaccttggttgatggctttgtcatccgcaatccatccagagcgaatccagctaacccttcgattgagcttggacctgagttcaagaaggttgccaatttccttgctcggttcaagtccatccccagcatcgtcgagcttgacagcttgaaggtttctggtgatgtctggtttggttctggaattacgctcaagggcaaggtgacaatcaccgccaagtctggagtgaagttggaggttccagatggagctgtatttgaaaacaaggatgtcaatggccctgaggatctttaagctatgcttgccgtcaccagtttttcccaaggatttgtcaataggagcagccaacccaaatcactcccactgagctctaccttttgtaattctcgtgccattccgctcccgctgtgagggtcctgtgagcccgctagagaatatgactgtaatcttctttggtgcgtctgcccttctgtttttgtgcgccagggacgtatattttgctgaaatgatactaccatagctttgcgtgccggaggtgctatgtggtgtttctgtgcgtttggttgcaatgataggacgggatgagatgagaccctcaaattaggttgtttggttctgggtcaaagattgagacaagaatatcctagtattgtttcatgttgtcctttaaaattggag

SEQ ID NO: 14789 - DNA, 143 bp, Zea Mays
ctctttctcgtcttgccgtgcccatgtttctcgccttcgcgtacgccagttcccttcactctattcctgcgcatgaaggagttacccagacgagaagttccccaggcgctgcagcaacaggaaaggatgagcacggttcgtcg

SEQ ID NO: 14790 - DNA, 111 bp, Zea Mays
ctcagtggcactgattggttcagcttgtcatctttgcaactagggcttgtggccagtggttcactttatggtgctcttggtggctctcttcttgcataccgcattgcatat

SEQ ID NO: 14791 - DNA, 981 bp, Zea Mays
attattggtggccttgcagctttcgttaatgctgtgcttgtgctggattgtagctgttcgattttgaaaaggagaacttgtgcctctatggctatcccgatgagacatgggaggttaccttgccagctgaggaagtgcccccagagatccctgaaccagcattaggaatcaactttgctagggatggcatgaatgagaaggactggctggcgctagttgcagtccacagtgattcctggttactatctgtcgcattctactttggtgcacggtttggatttgacagagaagctaggaggcggctctttagcctgataaacaacatgcccacgatatttgaggtggtgacgggagcagtcaagaagcagcaggcaaaggagaagacacctaacagtagcagcaagagcaacaagcctagttcaaaagtggtaaatgccagccactttccgttgccatctgacctgaactattgctgataacaccgacattatgcctgcagcagtcaagagcagagtctcgatcgaaggctaaggtccccaaagacgaagaagagagcggtgacgacgacggggacgaggaggcggaggagcacgacaacaccctgtgtggaacctgcgggaccaacgacggcaaggaccagttctggatctgctgcgataactgtgagaagtggtaccatgggaagtgtgtcaagatcacgcccgcacgggccgagcatatcaagcagtacaagtgcccagactgcaccaacaagagggtcagggcgtgagcaaccgatgcgaccttgctaggaaggaaaggaagaaacgacctccttggcgccaagatatggcgtgtagttccctagtcttctgtaaacgttgtcactgaaggtacctctcggctgaccatttctccattgttggtgttgtgcaatgagtagtgaacgtagtagtcttagcatctgaattgctgaaaatggcgaatagccttccccgaaat

SEQ ID NO: 14792 - DNA, 1167 bp, Zea Mays
gagcagctgactaagatcttcgagctttgtggtacccctgatgacacaatctggcctggtgtcacaaaaatgccttggtacaacaacttcaagcctccccggccattaaagagacgagttaaagatttctttaagcattttgatcgacatgcactggatctgttagagaagatgttgactttagatccatcacagaggatatcagcaaaagatgcacttgatgcggaatatttctggactgatcccttaccatgcgatccaaaaagcttgcccaagtatgaggcatcgcatgaattccagactaagaaaaagcgtcagcaacagaggcaagcagaggaagctgcaaagcgtcaaaaacttaaccatcctccaccacattctcgtttgcctccactccagcagcctggccaagcacatcctcaaatgaggcctggccagggtatgcacaatgtgcctcctgtggcagccggcccaggccatcactatgcaaaaccccgaggaccaggaggccctaaccggtatcctcagggtgggaatcaagggggaggctacaatccgaaccgtggagggcagggtggtggctatggcagtggcccttatccccagcaagggcgagggcctccttaccctggagcagctggcccacggggcagcggtggcagtggctatggggctggagggccaaactaccaacagggtggcccatatggtacgtccggtccaggccgaggaccaaactactctcaaggtagtggttcccgcaaccaacagcagtatgggaactggcaataatgtggcagtattatgccattgatatgtatgtatttgcagaatgcatttgcagcacctttgcactttaagcatgttgtgagatgtatgtcatgatagtactctaattcagtccagatgtctcaaaaagatgtttatgactccagatgtagattatgattatcgagaaatgttttgtacttagaacccttgattcacttattagaagtatgccacaaagacctagcagagcttgctattagccccagtttcatacttcatatccatattggaatcatgaatgcatggaagaagcctgaagttcagaaatgaaatttgttatggttgtgtacagttttgttatcacttcgcttcaatcacattatcaagcttaaaaca

SEQ ID NO: 14793 - DNA, 1742 bp, Zea Mays
aaggtactctgacaccgcaagttcattgctgggactggattcctgctccaaagcgaggagagatcgttaggcaaatcggtgatgcactgagagcaaagctccatcaccttggcaggcttgtgtcacttgagatggggaaaattcttcctgaagggatcggtgaggttcaggaaatcatcgacatgtgtgattatgctgtggggctaagtcgccaactaaatggatccattataccatctgaacgaccaaaccatatgatgatggaggtgtggaatccccttggagttgtgggtgttataacggcatttaatttcccttgtgctgtgcttggttggaatgcttgcattgctttggtctgtggaaattgtgtcgtctggaaaggtgctccaacaactccactgatcactattgcaatgacaaaaatagtggctagtgtattggagaagaacaacttgccaggcgcaatttttacatctttttgtgggggcactgaaattggtcaagcaattgcccttgacattaggatacctttggtttcattcactggaagtacaagggctggtctaatggttcagcaacaagttagtgcaagatttggtaaatgccttcttgaacttagcggaaacaatgccatcattgttatggatgatgcagatatccagctagctgtgcgatctgtcttgttcgctgctgttggtacagcaggacaacgctgcactacatgtcgtaggctgattcttcatgagaacatatatcaaaccttccttgatcagcttgttgaggtatacaaacaagtccgaattggggatccgttggagaaaggcaccttactgggaccactgcacactcctgcttcaaaagagaactttttgaaaggcattcagactatcaaatctcagggagggaaaatcctttttggaggatctgccattgaatcagaaggaaactttgtgcaaccaacaattgtggaaattacaccttctgcaccagttgtgaaagaagaactctttggtcctgtcctttatgttatgaaatttcagtccttgaaggaagcaattgaaatcaataactctgttcctcaaggattgagcagttctatatttacaaagaggccagatattatttttaagtggctcgggccccatggtagtgattgtggtatagtgaatgtgaacatacctactaatggtgctgaaattggtggagcatttggtggagaaaaagcaactggtggtggacgagaagcagggagtgattcctggaagcagtacatgaggagggcgacttgtacaatcaactatgggagcgagctacctctagcccagggaatcaattttggttaatcctgcagaaatgttgcgcgtggatctcagtgttttctgcagacgtggatgccgtatggaaagaactgatgcaaccgcatttgagatctcagcagacttgagcagcatttattggcgtcagttgtgaaacttaaactgcaggagcatcttgtacataaataaaataagatgtttgttgctcgtgggccgtggcacgttttggtaccggtgtccagtctactaataaaatctaatgcaaaacggtcataactacattctcatgcagtatgattttccggccttttgatctggaattgaaatgagcgttgttcgttttgaacaagcacatgaagaaaaaactgctaagggttaatttggcaaccttattttttcaagggattttaattttttcaagagaaa

SEQ ID NO: 14794 - DNA, 1402 bp, Zea Mays
gccatgacaagtccatgcatggtgtggagatcaccaatgaggtgcttaagagcgtgaagatagggttgaccttccaaggaatggtagaattagttctatggattttcacagcaaggctaccaactatcttgtgacagctagcgacgatgaatcaatccgcctatacgacactcaaaatgcagtatgtttgaagactattaatagcaaaaaatatggggtcgaactagtgtgcttcactgataacccaaatattgtcttatattcatcaaaaaatggctgggatgaatctctgcgtctactctcactgaatgataatcggtttcttagatattttaaaggtcaccttgacagggttgtctgcatctcattttgctctgagaaagaaaattttctctctggttcacttgaccgtactgttctcttatgggatcaacgggctgaaaaatcacagggcttactgcgtgtgcaagggaggcctgcagtttcatatgacgatcagggcatggtatttgcagttgcctatggtggtcacataaggatgtttgatgctcgaaaatttgaaaaggggccttttgagatcttctctgttggtaataacgattcagaggcccatgtcataaagttcagcagtgatggcaggcggattctgttaaccactaaagctggacgtgtccatgtgctagattcattccatggcaatagcattgcgtcgtgcaatgtgaagccagtggtaaccaactcaacactggaggcgtcgttcagccctgatggaaaccatatcatatctggctccggtgacggtagtgtttatgcttggaatgttaggagtggaaaggtcgcgcgctggggaagcacagacgacgaaccgccgctggtaaggtgggctccaggatccttgatgttcgtgacaggatcatcagaactgtcatgctgggttccggacctgtctaagctgggatcctttaccattagcaagtaggtgaaaatgatgagaggtggactgcccttgcaaaccctgttcgtccctgtatggtatgtcgtgtggctggttgaagcgactcatcctttagccaggtggccgtggtaaacttgcaacctgttacaattgaatgacttgtatagagcatcggctgtggcgatctggcttctgaagccagcggctagacaatgaagatggatccatgctttagttctgtaaaccggagattgtagctgagtattgctgtatctctttgtttctggaaggcgtcttggctcgtaaagattctgcaactcagagcagatggctaatatatagagagagcaaagaaacaatggatagctgggctggttgttctgttttcagttggattccttgtactgacgtgtgattccgttgtgcatgcaccgattcatatttcag

SEQ ID NO: 14795 - DNA, 1158 bp, Zea Mays
atagaacctaacatctctctctaacatcatgggagtatatgatgtggatacacgtgctataacacgaagattaagagaagatggtagtcttattggtgtcttgagtactgatcagtctctgacagacaatgagttgttagaaatggcccaaaagtggaaaattgttggagttgatttgattagtggtgtcacatgtgatgctccatatgaatggtcggacaagactgattcagaatgggagtttaagagggatccgtcaagtgaaacttttcatgtggttgcctacgactttggtatcaagcataatattttgagacgattgacatcatatggatgcaaaataacagttgttccagcaaattggcctgcttcagaggctcttggtgggaagacatttaaaatgaaatttggacatcatggcgggaatcaccctgtctgtgatctccgtagtggacgtgtagacataagtgcacagaaccataactacgcagttgacccagaatcactcccagaaggagcaaaagtaactcacgtcaatctcaacgataatagttgcgctggcctccagtactccaagatgaagcttatgtctctccagtaccatcccgagtcttcccctggtccgcatgactccgacacagccttcggcgagtttatagagctcatgaagagcaacagattgtaagaaaggggatcaggggagtacttgaaaaggtcaataattgtattggtgctccctcgcaccaacctcaaaagaatttgttgtatctgtagtgtttttcttttggttttgggacgttcatgtgcttgaatttttgggtccagaggacatagcataagatgctctgcgcattgtaccatgaaatggcctggttggatttcgtgaagataacatgtcatcaaactgtacggtacggtacactcactcggacagcgcctcgcgaatttcttaacggcaggtaaagtcgtcagtggatggccatgaaggccggtcagtggatgctttacttttgttgttccaggctaatcagatgtgcacgacgttgttgtcatctttattaaatgctttcatcatccagcttttggtggcaccaggttgcgcgtagatttttcgacgtgcatctgatctaaaaacatttttgtttatccgtagttcac

SEQ ID NO: 14796 - DNA, 76 bp, Zea Mays
cgatggtatgactctttactcatatttactttaccatttgggagaaattgttaggccccaaagggggagaaaatac

SEQ ID NO: 14797 - DNA, 664 bp, Zea Mays
ctccatcacgcactcctgccagagaccaaactattcgtatcgtgcgtaggtgttgcttgctgttgcaacggaccatccatctagtgcttgcattgctgtcgcactcgctcagctatctccaccgctattggttgttgtttggttacccacgccctgctctctgataccagttgatagcagcagcagctagctataggttgtcagcaggatcgaccagatagatagcgcggatcggaattaacagcgctgcaggaggatggtgaagagcacgacgacgatgggggcggcgagctgcggcggcggcgtgctgccgctggcgtcgctgaaccacatcagcatcgtgtgccggtcggtggaggcgtcgctgcgcttctacacggacgtgctcggcttcgtccctatccgccgccccggctctttcgacttcggcggcgcctggctgttcaactacgggatcggcatccacctgctgcagtcggaggaccccggcagcctcccgccggagaagggagagatcaaccccaaggacaaccatatctccttccagcaaattaaggcacacactacaacaagcagtgaactatacgtctttccatgtatctctagctaggtctcttttacgtagtacagttgatcaatacaagaagttgaaatcggtgttcct

SEQ ID NO: 14798 - DNA, 428 bp, Zea Mays
tggccgtgagcttgaccgcatcgacaaccctcagggtacaagtttgatccgcacggggagtacgtccggcgatggctaccggagctggcaaggctgccaacggaatggatacaccatccctgggatgcacctgagtctgtgcttcaggctgcaggggttgagctaggatctaactacccacgccccattgtcgagttagatgcagccaattccaggttgcaggatgccctgtcagagatgtgggagcttgaggcagcctctcgtgctgccatggagaacggaatggaagaaggcctcggcgattccacggatgagccgccgatcgacttccctcaagaactacggatggaagtggaccgacagccggttcaacctgctatccacgcaccgggagtgactggtcggagacgagaggatcagatggtgcc

SEQ ID NO: 14799 - DNA, 920 bp, Zea Mays
ttctttttgaataaattggatgaaatagacatgggaatgacatatgaggagctgtctatatatggaaggttaaggaaaattttccgatgtggtcctgtttcaatgtttcagaacctgtgccacagttggtgtggaagattatctccgtctgaagtggctgacaaagtaaagcacttcttcaagtactacgccataaaccggcacaagatgactgttttgaccccatcttatcatgctgagagctattcaccagaagataataggttcgaccttcgccagtttctttacaactcaaggtggccctaccagtttcggaagatcaatgagcttgtgcaagagatggacaaagatggcaaatggggaacttctgcagaagggaagctgggagcgcagacaggtgcacagggaactggaatgggagtggtggcagcggggtctgccaatcccagtgccggcttctgaagagaaccatactaacgcgtggaagctagttcctccagtttttcggccttgacagaataatgcaccagccgtccagcccccaccccaggacacgggctgctaatgttaatttgtctgcttggttcccttgtactgcatcacttctccctgctagagagctggaatccccacaaaattttaggctaccagttctgtttcttccatttgtcatagtacgatctacaaagtatcaaccaaagaacatgtgaaaaataagatggaatccctttaatcagattgtttgtccgaagtggcatggcgatgaaaaggaaaacatcagtataaagaactagttactcataattctttgttctgtaaagagtcctttctaaataatgctgtgtgcatgatgatgatgatgtgatgtgatttctaccatgacttcaaagaactcaatatttgcaccttaactctccaat

SEQ ID NO: 14800 - DNA, 4608 bp, Zea Mays
gaactgtcctctcctcccgcagcggctgcggacaggagacgacgacgcgcacagaaaaacaaccgcttcccgcaccgcagtcccccgcccccgccgtgccgtgctcccccctctgccagcctatgcagcgcccgagcgctcgcctttttgaccgcgtccgcctgccgccctgtcctgtacccctccctccctcccccctcctccccttcacagtgtcacacgcacttctcgttctcgccgatccagtgccactacactacaatactactgcgcggtagcgctcgcactcgcaccacaccacgccaccgctgctgcctgctcctcacagtcctccccgcgctcgcattgcgattcgcgacctagcgcgagggtacggggggtggtgcgcgcgcgtgctcggtgatccgggaagcgccgcgagatggccgggggcggaggcggcggtgccgcgccgaagcacgacgacttcacgccgcaccccgtcaaggaccagctccctggggtctcctactgcatcaccagccctcccccgtggcctgaagccgttcttcttgggttccaacattatctggtcatgcttggtaccactgtgatcataccaactgcacttgttccacaaatgggaggaaacaatgaggacaaagcagtggttatccagacattgctgttcgttgcaggtatcaacaccctcctgcagagtttctttggtaccatgttgcctgcagtgatcggcgggtcatacacctttgttctgcctaccatttcgatcatccttgctggacgttatgctaatgaacctaatccacatattaaatttctccgcatcatgcgtgggacacaaggtgcgttgattgtggcttcagccttacagattatagttggcttcagtggcctttggcgtaatgttgccaggtatctgagtccactttcagctgctcctttggtggcactagttggatttggactgtatgagctaggatttccatcggtcgccaaatgtgttgagattggtctacctcaactcatccttcttgtgatctttacaatgtacctgccacatgctgttcacatgctgaagtctatcttcgatcgatttgctgtcctgttcactatccccatagtgtggctctatgcatatcttctcactgttggaggagcatacaggaatgcaccaccaaagactcaatttcattgccgcactgaccgttctggattaattggtggcgcaccctggataagagtaccatatccttttcagtggggtgctccaacttttgatgcgggtgaagctttcgcgatgatggcagcatcatttgttgctctcgtggagtccactggggccttcattgctgtctctaggtatgctagtgctacaccaatcccaccctctgttcttagccgtggtattggctggcagggcatcggtattcttctggatgggctatttgggactggaaatgggtcttctgtatcagttgaaaatgctggtttgctagctttgacacgcgttggtagccgaagggtagtgcagatatcagctggtttcatgatattcttttctattctcgggaaattcggagctgtgttcgcctcaattcctgcacccatctttgcagctatgtattgtatcttctttgcttatgccggttctgctgggatcggcttccttcagttctgtaacctcaacacctttaggaccaagttcatccttgggttctcagttttcatgggcctttctgttcctcaatacttcaatgagtacacatctattgctggttatggtcctgttcacacacattcaagatggttcaacgatatagtgaatgtgatattctcgtccaaggcgtttgttgctggcttcgtggcatatttgctggacaacactattgacaggcatgaagcttcagtcaggagagaccgaggctaccattggtgggacaaattccggtcgtacaggaccgatacaagaagcgaggagttctattccctgccattcaatctgaataagttcttcccatcggtctgagcttttgctgtggttaatgtgagatgctcttgttactctggaactgcccaccccctgttctccggcggtggcaccgtgatctggattttctcggtacatgaaaaaattactgtatattaaaacccgctcagctcgggtttcacctcctccccgtgcttcacgggaatttggcgacactccttccgacacgtgcccacatgaagctcgtctcgtccacactcccgcttgtgaaatgtggaccgctctcaccaaaccctagcttccatcccaatcccatcccacattctggccgccgcgtgcctacacgtcgtcggctagccatcggcgcctcccctcgttacctcgcctgtggatgacccatcaagtcgatagctgccctgagcgagcccctgcggccctgcctcctaccggtgacgcggcggtgcgtcaccacggcgtcgggattcgggacccaggagccactgcccgccgaggtttactaaaaccggcggggtacggtttcacttaaacaccggtttttttaaattcgttctaaattcaaaaaaatataaaattttgtaaaaaccgaaaataatcggtaaaccgttattttagactggtaaaccgtcaatttttgccggaaaaccggatttaatgtcacgtttaatgccaaatgttatatgctatatgtgaagctgaaactcgtagctcaagtcaagtttaggtatttagtggttaatttcggtttcattttttgaccaagatgaaatccgtggatcaagtagcttcagttcttctaataagtatccgtctggacaagacacgatctagaacccttagctccaattcttctgtatgtgttcctaagatttgctaatcaggagaatagttcaacacttggtgaggtgcacatgcaatacacaaacaccaaacacacatatcggtatatatttttttgctttgtgaataagtatttgtttgccgttcttattttcttgctaatgtatttcatttttttatagacctatcactataacggattggaacaatatcacgatacctccaacatgcctaagtactatcactatgactcgatctgaatatgtgagtattgaaaacaagtcgacctatgtgtcgttggctcgttggagagttgtaaaagaacttgtatttgagtattgcgaagttcgctgattgtttattgcatgagaactaaagtttatggttttcgccgttttttcccggttttctgccgataaaccggttcaaattcaaattgatttgaattggtcaaaccagccgacgtatattcaaactatggaattcaggaggacccttaaaatcaagattctggatattgcctccgctcagaggtcacgagcaagacaacattccagacttacttggatgcgattgggcgatgctaacactaagttctttcacttagcggccaataatagaagaaggaaaaatttaatcagatcgctaactcgagatgacatgctgttaatgagccaggaagacaaaatgaacgaggtacaacatcacttcggtcagattctaggcatgacaggaaggaggagcagtgctgtttgttgggaccatctggggtatgctccttttgagctagctgagctggacaacttgattgatgataataaaattaaggacgtggtcatgaggcttcaatctgaaaaggctcccgggccggatgggttcattggacagttctacaaatgctgctttgagttgatcaaaaacgatctctacatggcaataaatgattttttccatcatagatccaaaagcctgcatttggtcaacgaagcaaacatcatcctcatacccaagggggaaaatgctgacagaattgataggtttaggccgttaagcctgatcaatagcttcatgaaaattataacaaaaatcatggcaaataggcttgcgccaagaatgaatgaaattatttccaacgctcagaacgccttcatccagaaccggtcaatccatgacaactttctatacgtgcagagggtgatcatgaagctgcataaaaaaggtaatccagctctttttgtcaagcttgacatctctaaagctttcgacaccctgaattgggcatatctcttggatgtgttaagggcctgtgggttctcccagaattggcgcaattgggtagctgaaatcctgggatcgtcctcctcaagaataattttaaatgggcaacgttcaaaggcaatcaaacacagacgtggggttcggcaaggggaccctctttctcccttcctattcattttagcgatggatccgtgtcagctctcctggaatggctgaagatggagcaggggagacaacgctggaagggccacaagacagggtggtgggccgacgcactaggaagcccagctccagaatttctggtgccgaatggattcgttaaggcccgtattaaatagtggttgtaatagaataaataggagagttgagggaaaagacattcagttttggaaataacagaataccaaagctcacgctcaatcctccttcttcgtctcttcttgtctgtaatctccgttcagtgttcttcctctagtaagaacgct

SEQ ID NO: 14801 - DNA, 99 bp, Zea Mays
aatcctctaaccatgtctttctttagaactttcttgagtgtgctcattccaacatgtgcaagccttctatgccatagccatccaagagatgctttggta

SEQ ID NO: 14802 - DNA, 1245 bp, Zea Mays
ctattattttgggggtggggttggcttatcaaaggaagagtcaggtacaaatttgcatcgttttggaacagaaaccatacatttagagcattgcatcgagctatgaagaacttcgtaatgatgatagacgctgagaaacaggaacgtgctcagtctgcattacgtgcacacagtagttcaagaaaaaatagcaagaaggagataaatgtaccagaagattgtgctgcattaacagggaagttacaaccttttgtcaaagaagaagttttggtccctgtattcaatggaacttttccctgtactgcagaacagttcttcagtattcttttaagtgatgattcaaattacataacagagtatcgaacggatcggaaggataaagatataaatctgggccaatggcacgttgcagatgagtatgatggccaggtgagggaacttaattgtaaatcaatatgccatagtccaatgtgtcctccttattcagcaatgacagagtggcagcatatagttctttcagctgacaaaatggatctggtatttgagacagtacagcaagtacatgatgttccatttggttccttctttgaggtgcactgtaggtggtgtgtgaaaactatcagttctaactcgtgcagtctcaacataagtgctggtgcgcatttcaagaaatggtgcatcatgcaatctaagataaagagtggtgctgtggatgagctgaagaaagaagtgaaggtgatgttagactttgcgcaggggtatatgctcaaagttagctctcctgaccaagagaacagtaatctcgcgcagcaagacaacacggcgccggatgcgccttctgatacagggtgacagccgccatcacatgacaacgaatcatgccattacgatgttatacacagaagggcaggtggaccagtaactagtagtccacatgaaccacatctaacatgttaagctgacttccaaaagaatgggtggaccgtgtgtagcgtgttaagttcgtttcctgccattgctctatccgtttttggcagtttggctgatgtatatatatagctgtaaacacacgcaaatataaagtggtggctgtggcaggccagtgtgttgtttgagtataaaaacaaagaaagaaacggaagagagaaatatttgccacagaaccaacgcttctcgagtcacagactcacaggggggcatatgttgtgcaaataaaagcttgatgtcctagaaacaactttgcaa

SEQ ID NO: 14803 - DNA, 2649 bp, Zea Mays
atggcctccgcaccctgctccaactcttcccccgccgccagagccccgagatccgccgctgccggcaacaagaagccgacgacgtgcctctgctcgccgacgagccacccggggtcgttccgctgcagccggcaccggaacggggccgccgcgccgggcggcgaggcggcgcacggcgccagcaggggcggcactgctggcagggcggccaaggggcgccggaaggttagaccaaaaacgagactacacgccgacgccgtctaccctgcctggagggtaaacccaggctacatatttgacgcgctccttgtgcaggctgcagcggaacgagcccgggtggttggtcggcgagcacatgcagctgatgatcctgcatctgcatccccgcaattgatcctgcacgttgtgtttgtgtatgcacctttgctcgatctgccgaatggactgatgatgatgacttgtgttgatccgatcctcgccaatgccagcaccaccgatatacgccggcacggtacggcaacagatccttttcgcgcctcccaggcagcccagttccttcgctggaaacttgagaaggcgtacatgagattgagaaggagagaacgctttgtttatagggccgcaatggatcagagcggaatcgtggtcgtggagctggccgaggcccacgccgtgccggtttcaggcgggcctagtgctcgcggcccatttaagaagcccaggacggatgaaacgaacggacaagagaagacggaactttcccagcccaacagagcccacccgcgcgtgcgctgtactctctactactcgcgagataacgaacttcagcacgctctccgcccgaagctgagcagtgactgtgagcaggcgtttcttcctccactgcgcagccgcacgcgcgccatggcggcgctctgctccgcctccccggccatctccgcggcggcgtccctcgggtcgcccgcgcgcgtggtcgcgtccttcctccgcctgcgcctgcgcctgcgcgccgccaagcgctcctgctcccacgcgccggcgccgtcgtggcgggcgcgacggcgcttcgcggcggccgcggcggaggcggaggagtgctcgggtgtggagacgctgatcccgcccgacaatcgcatccccgccaccatcatcaccggcttcctcggctctggcaagacaactttactgaatcacatcttgactgcccaccatggaaagcgaattgctgttattgaaaatgagtttggagaagtagacattgatggctcactagtcgctgcacaaaccgctggagctgaggacataatgatgctaaataacggctgcctttgttgcactgtgcgtggtgatttagtccgtatgattggtgaattggtgaacaagaagaaggggaggtttgatcatattgttattgaaaccacaggtctagcgaatccagcacccattatacaaacattctatgcagaggatgtagtttttaatgatgtcaagctggacggtgttgttactttagttgacgcaaagcatgctagacagcatttggatgaagtaaagcccaagggtatagtcaatgaagcagttcagcaaattgcctatgctgacagaattatagttaacaagattgatcttgtcaaagaacctgaagtgttgtccttggttgagcgtataaggggtatcaaccacatggctaatttgaagcgagctgagtatggtaaagttgatttggactatgttcttggaattggaggatttgatctggagaggattgagagtgctgttgctgaaaagtcacatgaagatcacgcagagcatgatcatgaacaccatgagcatgagaatgaacacgaccatgaccatcatcaccatcatgatcatgatcatgatcatcatgcacatgaccacactcatgatcctggtgtttcttctgtgagcattgtttgcgaaggggagatggatcttgaaaaggctgacatgtggttggggaacctactgctggaacacagcgaggatatatacaggatgaaaggtctgctttctgtcagtggaatgccgcagcgatttgtctttcagggagtccatgacattttccagggatctcctgagagaatgtgggagccaaatgagccgcgcatcaacaagattgtcttcatcggcaggaacctcaataaagaagagctggataaggggttcaaggattgcctactgaagaaatagagtgatttcagaatagtcgggatatagatctccagttttggccttcttcgaatgtagtcagattcacatcaattcatatctgttggagtggattgaagacagtgaagcttgaactaaattctaccccaattcatccgacatatgtagattaaggtgaatccgacaacatctaaacaaggccttcatgattttgagttttgtggccgcagaacttatcctcgatatctgacatgacatgtaacgagagatgtatcgaatcgatagcattattgcaaccttgcatcctcacgaaatagtctatcatagttttattgcacggtgttgcaatgtaaccaatagagattattataggatgtctttgtctctgtgatacgaggaaatcatattgcatggtataatatactattgaatgtgttagcaatcaggagttgttta

SEQ ID NO: 14804 - DNA, 2041 bp, Zea Mays
tgtctcataaccagtgacagtagcgggctttgtcacagcatttacgtggcatgcgtaggcgcagccttttcaatgaaaaggctgggcttagtaataaaggtgtagacaaagcttcagatcatcatcctgtaaattcaactacccccaaatgcaaaaccatttctggtgacaactcaaagactctaagaacccccccatgtgcattgcctggtattggcttgcacttgaatgcccttgccgcaactgcaacacctaaagagaaaatagtccctcaagacattcagtctactataaatgaatcaagtaacttgataggccctgctggatcttctccggcaccttctgagcaaaacattataaatgatgatttcactcaaacaactgatgttgcaaccgctgaagcttctagtcagggtagtcccaagaagaaaaggcataagtttgatagtggtgatggcacttcatgcaagcgttgtagttgtaagaagtccaaatgcctgaaactttactgtgagtgttttgctgctggagtctattgttctgagccttgttcgtgtatcggctgtatgaacaaccagagtcatacggaaactgttctatctacgcggcaacagattgaatctcgcaatccattagcatttgctcctaaagtaattcatacatctgagcctggtctggaactaagggacttctccaataaaactcctgcttcagctcgtcacaaaaggggatgcaattgcaagaagtcgtcatgtctaaaaaaatactgtgaatgttttcagggtggtgtgggatgctccataagttgcagatgcgagggctgtaagaatgcttttggaaaacgggagggggctgccgtgttaagcatagaggaacctaagcagggattggaagaaaaggatgtttgtgtgaaagaagagaaaagtgaaatcgagaaacagcttgttgtctaccaaactcctgatgatgctcctgctgaaaatgtactgaccacaccttccatggtgcagtgcagacccttggcttgtcgtccacccccaagctccaagaaaagctccaaaaaaccacgatcttcaacaaaactcactggacatccttcgcggttgtgcaacttacaagctcctccgaagaccgacactatgctctccccattcgaaaactacgcggaaatggtccttggtgatagcacatcggatatcctcaagggaaattcatctcctcaaacttctgttaaagtggtgtcaccaaacaagaagcgaatctctcccctgcgaatgggtaccgggctatctccaatctgtaggagtggcaggaagctgattttaaagtccattccttctttcccttcccttggcggtgatgtaaacaatgaggatccagaaaccaagttgccagccccttgaatttaccatattttgtcactggtttatttctaccataccatctgatagtggacagccaagcgactttcctttcatcatttctatctctctcgatcaatgattatttatgtactgctataataatctgccgcgtgctggcaaaattctgcctccctagaacaaccaatggcatttggtttgctggtaaattatctcttggctccgtgtgttccctgtggctgtctgtctataatttatgttcattattttgttccggagaccgaagaatctgaggacttgtatgtatctgggatcaagatgtgaatctcgcatgtaccagatgacagaactgttaagacttatatttgtctgaggttaaactgcaagacttttatttaagctagaactttgatcactataggatatggcatgatatagcagggctcttgagatgcattctcttgtgcgtgcttggtaactgtagtcgtgcaactgttgacggcgtttgttcagaacaagtggttgatgaatttgaagatggtttagggagtgggaatgattttgtttgtgtgcgtgcgaacttgtaaaatctccgtgtatgaactggcaatgcttttatggtattgatcatctgcggtgtgttaactgagtgcaaaata

SEQ ID NO: 14805 - DNA, 106 bp, Zea Mays
ctgcgatgagccggagccagaggcagcggtgtcagcgtggatagaggcggagtcggctggagaggaaacttcgtcggcccaggagcaggggacttcctaggccgag

SEQ ID NO: 14806 - DNA, 967 bp, Zea Mays
ctgagtgaggcagttgaggaaataagaagccatgggcccatggccttattgtccttgtttcgagagtgtccagaaggtggcagaaagagcgctcttcctatggaacagcaatcacatcgagggtttgatcaaacacaacagcaaggttatactgcccgtagtcctcccagcattagaacggaacacgaaaggccattggaatcaggcagtgcagagcctgagtctaaatgtccgtaaaatattcatggactacgacccagcactgttcgaggagtgtcgcgagaagtttgaggaagaggaagctcaagaagccggcatgaggtcaagatgtgaggctagatggaagcgcctagaagaaattgcctcgtcaaaggaggtgaagtagctcgtcttgccgactgcccaggctgtagctcgtcagcagagttcctctagctatctagccttgctggctgcatacgagcagctagctctttctggcaggatcaagtagatgctgatgtaactgcccatggatggctgcttgcctcgtgttacttgctttaccgaacattttacaggctgacatgtaaatacgaggtacatggtgggccgtgaagcttcaacggggactcaggttctggctgccgtgtgatccactgatgacagtatcggttttcatcatcagaggacaaaggaaaggatgtaaaatggtcattcctgctttactgagatgctcatgccacatgttaacgtctagtctgcggctcaatgtcttgatccaagcactgctagaagcacttgaaagacagtcgagcagcacttgttcttgcctgctgatggtgattttgctgaaatgtatagcatgctttgtgtatgatgaatggtaacttggagccatgtcttgtgatgatatgtaatcgtgttgtacatgtcttttccttcctttgatgtatacagaaatttggaatgaagtgctcattgattg

SEQ ID NO: 14807 - DNA, 549 bp, Zea Mays
gcaccagaacaggcaacgcactactcgttcgtatctttaagcttgctgctgcagcgtaagaaaaagcagtctgcactcggtcggtcggtcgctctgttcagctagctgcatgctcggccaccatatctcctccagtacgttcgtcgttctccacgccgctatctggtctgcggtaagcagcagctagaggccgttgtgtaggctacacagaagatcatcgaggaggatgctggtgaagaagaacaacagcacggcgatggcggcgggcgtgctgccgctggcgtcgctgaaccacatcagcatcgtgtgccggtcggtggaggcgtcgctgcgcttctacgcggacgtgctcggcttcgtgcccatccgccgccccggctccttcgacttcgacggcgcctggctgttcaactacgggatcggcgtccacctactgcagtcggaggaccccggcagcctcccggagaataagggcgagatcaaccccaaggacaaccacatctccttccagtgcaacgcagctgtcacacagtgtatagcaaaagcttc

SEQ ID NO: 14808 - DNA, 146 bp, Zea Mays
caactctccaaccctaccctattatcttactcgttgccctatcatttttcactattattttgaatcaaacttacatgttttgtaaatggtgagattcgaactcgcaacctctctctcgtgcatactctcccataccactacactac

SEQ ID NO: 14809 - DNA, 3126 bp, Zea Mays
ccttgattgatctttgccttcggggggcgagaagccgagaattgatgacatggcgacctcgggaaagaaacacctgaattcagtgaccttgctgttcaaactaccgtattacacgcaatggggccagagcttgctgattgccgggtcggaaccagcactcgggtcgtggaatgtcaagcaaggagtatctctcagtccagtccatcaggacagtgagctaatctggtgtgggagcgtgtctgttgttgccggctttacctctgagtacaagtactatgtggtggatgacaagaagaatgtgttgagatgggaggctggggagaaaaggaaactagtcctgccggagggcgtgaaggaaggagacgtaattgaaatccgtgactggtggcaggatgcttctgaagctctattcttcagaagtgcattcaagaatgtcattttcaatgctactgaaggtgttaaaaaggaatcacagtcagtgtccctcaacaaaagtttggatcctgaagatatcgttgtccagttcgtgattagctgtcctcggctcgtatctggatctactgtcatcgtcactggaagtaaccctcaattaggaagatggcaaactcaagatggtctcaagctgagctatgttggagattccttgtggaaagcaagctgtgctttacggaagtctgagttccctataaaatacaaatattgtcaaatcagtcaagcaggaaactctacattggagcttggcccaaacagggaggttaatgttgatttatcatcacccaagcaatccagatatattgtgttatctgatggtgctcttagggatgcaccatggaggggtgcaggtgttgctgtacccatgttttcaatcagatcagatgaggaccttggcgttggagaatttctagatcttaaacttcttgttgactgggcagtcaattcgggcttccatcttgttcagctccttccaatcaacgatacttcagttcatgggatgtggtgggattcttatccgtacagctccctgtctgtgtttgctttgcatcccttgtacctgagggtacaagcactttcagatgcaattcctgtggatgttaaggaagaaattcagcaggcgaagaagcaattggataaaaaggatgtcgactacgaggcagcattgtccacaaaattgtcgattgctagaaaaatattcaatttagaaaaggaaaaagtgctaaactccagttctttcaagcagttcttatctgaaaacgaggaatggttgaaaccatatgcggcattttgctttttgcgggactttttcgagacatctgatcacagtcaatggggtcgtttttctcagttttccaaggataagcttgacaaacttatttgtgaaggtactttacaccatgacattatacgttttcattactatgttcagtaccatctatatatacaattatctgaggcagcaacatatgcaagaaagaaaaatgttatcctgaaaggtgatttacctattggtgttgataggaatagtgtcgatacatgggtatacccaaccttgtttcgcatgaataccgctactggagcgcctcctgattattttgacaagaatggacaaaattggggttttcctacatataactgggaggagatgtcaaaggataattatgggtggtggcgagctcgtctgacacagatggcaaagtacttcacagcatacaggatagaccacatcttgggtttctttaggatatgggagcttccagatcatgctgcaacaggtttagttgggaaatttagaccttccatccctcttagtcaggaggagcttctaagtgaaggtctatgggattttaatcggatgagccaaccatacattcgtcaggaaatactggaggagaagtttggatccttttggacagtcattgcagccaattttctaaatgagtaccagaagcagtgttatgagtttaaagaagattgcaacacagagaaaaagattattgtaaagattaaaacaagtgctgaaaagtcactgtgggtagagaaagaggacaatatccgccgtggccttttcgatttactacagaatattgtccttatcagagatccagaggactccacaaaattctatccccgttcaacctggaagacacatcaagttttagggaccttgatgaacacagcaaaaatatcctcagaagattgtattataactattattttgttcgccaagaaaatctctggcgccaaaatgccctgaagactttgcctgtcctgctgaactcgtcagatatgttagcatgtggagaggaccttggccttatccctgcttgtgttcaccctgttatgcaagaactggggttgattggattgcgtatccaaagaatgcctagtgaaccaaacttggaatttggtattccttctcagtatagctatatgacggtttgtgctccctcatgtcatgactgctctacattacgtgcttggtgggaagaagatgaaggaagaagaagtcgtttctacaagactgtagttggcagtgatgaggagcccccatctcgttgcaccccggaagtagtgcacttcattgttcagcagcattttgacgctccatcaatgtgggcaatctttccacttcaggacctccttgcactgaaagacaagtacaccacaagaccagcgccagaggaaacaatcaatgaccccactaacccaaagcactattggagattccgtgtccacgtgacattggagtccctgctgaacgacaaggacatccaggcaaccatcaaggacctggtcacaagcagtgggaggtccttccccggaaagaaggcggaaggtgccgacgagagcggggagaagctgtccaaggtgcagctgaatggtaaagcttaggaaaggattgcgagagctgctggaagtgaccacggttacaagtaaataaatagaataaggcgacagattgcatcaccgtgttgatccaggtgatgctgtttctggtaggaaattcttacccatgtgatgttctttcaactctggaaataagaagcaccctctaccaagtcagaaagtgaaataatccatccagtgtcggttttcattaatagaattttcgttgaccgcccagttatt

SEQ ID NO: 14810 - DNA, 3237 bp, Zea Mays
aacaatacttgatctatgatcgttttgtggctatgcagaccggattcgtgagttattggatgtttcacgtgagctgtctggggttcgtgatagatcactggatcacagttctcctggaaattatgtcagtgaagcaaaccatatagaattttcagatgttaaggtagtcacacctgcaggtaatgttttggttgacgatttgactcttcgggtagaaactggttctaatcttttgatcactggtcccaatggtagcggaaaaagctccctttttcgggtccttgggggtctatggccactggtatctggccacattgttaaacctggtgttggttcagatctaaataaggagatcttctatgtcccgcaaagaccatacacagctgttggaacactacgtgaacagctaatctatcctcttacggcagatcaggggattgaaccacttacatatgatggaatggtggaccttctaaagaatgttgacctggaatatttgcttgaacgctatcctcttgataaggaagttaactggggtgatgagctgtccctcggtgaacagcaaagattgggaatggccaggttattctaccataagccaaagtttgccatccttgatgagtgcactagtgctgtgacaaccgacatggaagaacgtttttgcaaaaaagttcgagctatgggtacatcctgcataacaatatctcatcgaccagctttagttgcatttcatgatattgttttatccttggacggtgaaggaggttggaatgttcagcatagaagggatgattcgtccttttccaccgaagaatctgatttttcatcatcagaaactgatcgtaaatctgacgcactgactgttcaaagggcttttatgagcagggcaaagagcaatgcttcattggggtccaaggatcatccatattgtacagaggttatagcaacttcccctgaggtggaaatagaacatccagcacggacacctcgaattccacatttacgatgtcacccaagacctttgcctctcagagtagctgcaatgctaaaaatactggttcctagactatttgataaacaaggcgggcagttgcttgctgtcgctgtacttgttttctctcggacatggatctctgatcgtattgcttcgttgaatgggacaactgtgaagtttgtcttggaacaggacaaagatgcctttattcgcttgattggtgtcagtattctacaaagtggtgcaaattcttttgtggcaccatctctcaggacccttactgcgaaacttgcccttggatggcgaattcgcatgaccaatcatatgcttcgatattatttgaaaaggaatgcattctacaaggtattcaacatgtcaggtaaaagcattgatgcagaccaaagattaacacttgatgtagacaagttgaccactgaccttgctggcctagttactggaatggtaaaaccgctagttgacattctttggtttacatggagaatgaagcttttatctggacgaagaggagttgctatactgtatgcttacatgctactgggtttgggctttcttagagctatatcccctgacttcggtcatctctcaggccaagaacaagaacttgaaggaacattcaggttcatgcactcgagactgcggacacatgctgaatcaattgctttctttggtggtggttcaagagaaaaagcgatggttgaggctaaattcgtcaagttaattaaccactcaaagattcttttgaggaaacagtggctttatggtattgttgatgattttgtaacaaagcaacttccacacaatgtaacgtggggtctgagtctgttgtatgctttggagcacaagggagatagagctttaacctcaactcaaggagagttggcacatgctctgcggttcttggcttcagtggtgtcacagagcttcatagccttcggcgacattcttgagttacataagaagttccttgaactttctggtggcattaaccggatctttgagcttgaggagtttacacgcttcgctcaaagaaatactgtggtgtctcccaatgccatcagtgcagcctcaaaagaaacgatttcgtttcatgaagtggacattgtaacaccatcacagaagctattggctagaaaactctcgtgcgatgtggtacaagggaaaagccttcttctgaccggtcccaatggtagtggaaagagttctatttttagagtgctcagggatctctggcccaccttctctgggagagttaccaagccctcagaagggatgtttcacgttcctcagcgcccatataccagcctaggtactctgcgggatcagatcatataccctctctcaagggaggaagcgaagataaaagttctttcgctacatagatctggtaacaattctagtgcctccatgctgctggatgatcacctgaagacaattctagagaatgttcggctggtgtatcttctagaaagggaagggtgggattctacaccaaactgggaagatgttctgtcgttaggggaacaacagaggcttggaatggctcgtttgtttttccatcatcctaagtttggtatcctggacgagtgcaccaatgctacgagtgttgatgtcgaagagcatctgtacagacttgcaactagcatgggcataactgtgatcacttcctctcaaaggcctgctttgatacccttccatgccttggagctgaagctcattgacggcgaagggaactgggagctatgtgcgatccagcagtgagtgatggtgcccattaggagttgatgccattaaatgcaccatcagctgcatgtacaaaagcaagcagctagcacattgccattgtttgtgtatggacaacgtagacagtggcagcgttgctatgttggaagatgctatattcttgtcatagtctgcctcaggttgagcagcaaagcattgtgatgatgtatgattgtgagccatgcatggtagctgaatcctgatattagcttttagatagtggacatgattgtgagccatgcatggtagctgaatagcagagcagaagggttgtgtgttagaagctgtacctattgattcattacattatattgattctgcgtagcagatgtatattacaggcaagcaaaatataaataaatacgatgtggaattgtggatgctgctgccatgcagacatcagaaaattgaatcaggtgtggatgggaaattgtgcaagggta

SEQ ID NO: 14811 - DNA, 1438 bp, Zea Mays
tcttggctagagttctttactcacgagcgaggagttgtacctctaggttttggccagggcttaagttgtttcgtacctctctgcctttgtatcatagttttgttagacttgggtcgaggacatgtattgttctagaaaaggctagcgaataaggaccttgatttcccatttctggctcttctaatttccggaggacacaaccttcttgttctcgctcatggtcttgggcattacattcaactggggactactatagatgatgcgattggtgaggcatatgacaaatcagcaagatggttgggccttgatatgcggaaaggtggtggtcctgctcttgaagagcttgctctagaaggtgatccaaatgctgttaagttcagagttccaatgcgacagcataaagattgcaatttttcttatgctggactgaagactcaagttcgattggcaattgaatctaagaacttatgtacagaggatattcccgtttcggctgcatcggaggaggacagacaatcaagggcgaacattgctgcctcttttcagcgagttgctgtgttacatttggaagaaaggtgtgagcgagcagttgaatgggcattgaatatggaaccttccatcaaatactttgtaactcagatatcttgacgatggttaatttcaaatcggtttactcatccagtgttgacttatccaattataaaaaggttgtttcaggaggtgtcgcatcaaacaagtatgttacgactcgcttgaatcatgttgctgggaataatggcctacaacttgtatctcctcctccaagcctttgtactgacaatggtgtcatgattgcttggactgggattgagcattttgttgccgggaggtttgaggacccacctgctgctgatgagtctgatgatatgcagtatgagctgcggccaagatggcctcttggtgaggaatattcaaaaggaagaagtgttgcacgatcattgaagactgctcgagtccatccatcactaacgtccatgatacagggctcccttcaaaagtagttgagttggaagttggaaactaattattggtctcagctgctttatgcagttgagtttcccgtcttctagttttgggttcacaaatcagctgatttatctgtattcgctgaattgaagtaacaaacctgcaaaagggccgaactagtttaatagtagatgaggctatatacaaattcagttcataccagtgtttttaaggcgttgcctaggtgatgtctaggcgtctaggcgctcgaataattctagtcgccttgcttgcctacgcgtccaggcggtggtctaacgtctcgccttaccgtattaagaacattggttcatacataccagaagatgcttatactccatttgtgtttaccatggaggctggctgtatcaggccccacgcattttgaatgtag

SEQ ID NO: 14812 - DNA, 975 bp, Zea Mays
ctaacacaacggaggcaataggatgggatggtcatctataaataagtagcccggcgcagccttctttggagcagggagaagaacacagggcacacgcactacacgcacggcacgcagatacatatagagagaggttagctatagcttgcacatctatttaactaactaactaactggctagctagctcgatccgcagagcaaagcgaaagcagcaagaagcaaagcaatggagaaccctgcgagtgtgctagttctaccagcgcagttcaccaaactcaccttcggaaacctgtacatccgccgggccgggccgggcagcagggagataaccgaggagggcaggtgcgacctggacaagagatacgtgagtgacttccccgtctacgacggccgcggccccgacgccagccttgtggcccgccgcagcgtctgcacagcgtcaccgttcgtgctggcgtcgccgtcgactccatcgagttcacctatactgacagcgctgggcagaggcgcgccgctgggcgatggggtggactcgggggcaatgttcgaacatcgaccttggcgacgccgaggatgtcagggaagtctcgggaacatacggcgcatttgaaggtgccactacgctgacctcgctcaggctcgtcaccagcagcagaacctggggcccctggggtgtcgagaacgggacgcgtttctccgtcacggcgcccatcggcagcagcatcgtgggattctatgcgcgggcgggaaccaggctcgtcgatgctatcggtgtttacttgcgtcagatttaattcgaataatagcaggggagctactgctagctacgtacctgctccatcctccattatcctttatttcaattcgctcatcatcgtcgtgtgtaaattaaataaataaagctcttgtgcccatattatatatagttgtcatggccgtgccgtgtctatgtgcgtatacaagtttggctcata

SEQ ID NO: 14813 - DNA, 216 bp, Zea Mays
agtgcttgaaattgccgggagggaagcggatggggactggcgacgcgcaccggccgtatgcggaacggctcctgctggtccgccgatcggctcggggcgtggaccgttgtcgcccgcgccggcggccaaagcccgggggccctaggcgcccccggcagccgtcgtcggcgcggacggtatccgcgtgcctctggcgcgcccctcggggcgctgcgc

SEQ ID NO: 14814 - DNA, 1047 bp, Zea Mays
acaggacttcgtctttggtactggaagtctagttcaaaacaagctagctggtgctccaggcgggggatcaagtccacatgtagtacaaaatgccgatattcctgttaagcaaaccactagctcttcctcacgtgagcagtcagacgatgatgatatggaaggagatgctgagactactggaaacggaaaccctgttcaacaaagattacagagaaggaagcaatccaaccgagaatcagccaggcgttcgagaagcagaaaggcagctcacttgaatgaactggaggcacaggtagcacagttaagagttgagaactcttcgctgctaaggcgacttgctgacgttaatcagaagttcaatgaggctgctgttgacaatagggtgctaaaggcagatgtcgaaaccttaagagcaaaggtgaagatggcagaggactcagtgaagcgggtaactggcatgaacacattgttccctgccgtgtctgatatgtcgtccctcagcatgccattcaatggctccccatccgactccgcctctgatgccgccgtacccatccaagatgacctgaacagttacttcgccaatccaagcgagatcggaggcagcaacggttacatgccagatatagcttcctcggctcaagaggacgacgatttcgtcaacggggctcaggtcgccggcaagatgggcagcactgactcgctgcagcgggtggcgagcctggagcacctccagaagaggatgtgcggaggcccggcttcatcggggtcgacctcctaggttcctactccatcggatatgataaaggccctgatgcagtgatgcccacggcaaagaatatgataaattaacagtttcacatactttgtagtggacattgctaatgctgcgatgcgcattcgttcgttgtggacttacgggtctactgctattgatttattgttcgttctccatgtggatctctggtgtccatgtgacgtgtactatgccaactgctgtctgctacacattgcagtggacacagcaagttcggtttccatcgaaga

SEQ ID NO: 14815 - DNA, 342 bp, Zea Mays
tgcctctcaaaaatctcgatcctccagtaccgaacatgattatttggaactgtgttcatcgtcaaacatcaggtaatgtaaatgttacagtttatacccatcaatctgaggtatcattggggccaaggataacaattgtggtatatactacagaactactcaacaactacaaccaccgctatatatataactaattcaacatgaaaatttgttgcctgtccaagtccagaagaaatcagagagaaacgaggacaagaatagaaaaacatggctttcagctcggcgccaagcaacgatcatatttcacaaaatgacctgcgttcttgatttaaaaaaaaaaaa

SEQ ID NO: 14816 - DNA, 1420 bp, Zea Mays
  misc_feature (952)..(952): n is a, c, g, or t
gaaaatcgatttgtccacatttcagccggacaccaccgtgtcgcccccgcgtcctaaacctctcacctcgccggggtccggtagccacgaacgatgttccgccgcgcgctcctctcctccgtctccccactccacggaacggtacgaatcccgagccccagctattctcctatccaagcccttctcgctcaatggagcaggtacgcctccgtggtctcatcctcggccccgccgccgccgccgccccctccatctccgcctcaaggtccatcgaggtcgagcggtggaggtcccacttcctcgtcgctgaaccctgcagaggtcgccaagttcgcctccatcgccgagacctggtgggattctagtggcccattcaaacctttgcatgtgatgaatccaacccgactgtcttttatccgctccactctctgtagacatttcaggagggatccaaattcatctaagccacttgaaggtctcaaagttattgatgttggatgtggaggtggcattctgtcagagcctcttgctcgaatgggtgctaccggtactgcaattgatgctgttgacaagaatataaagattgcaagtattcatgcggcatctgatccaacaactgcttctattgagtattgttgtgcaacagctgagggactggtaaaagagaaaaggctgtttgatgctgtaatttctcttgaggtgattgagcatgtcgccaatcctttggagttctgtgaatccctctcggctttgacaattcctaatggtgccactgtgatttccacaatcaaccgatcaatgcgagcatatgccactgcaatagttgctgctgaatatatcctcagatggcttcctagaggcacacatgagtggtccaaactggttaccccggaggagcttgtcctaatgctgcaaaaggcttccgtcgaagagatggcagggttcgtttacnatccgttgagcggagaatggtccctgtcagaaagatatcagtgtgaactacattgcttttggcgtcaagaagggcgaggcatcattgacaaatgacagagaagcaagtttatcatagcgaagaaaaacacgtgaccttgaattgtcgggcatcattttcagaggaccaattcatgtcactgaaatctattgctaagtatgcaaccaagtagcagaagagaattctcttgccctttgttagtcttggaaactggagcttgtggagtgatgcttcctggaagcgccattgagaagtcaagttgacaacaagtgactgctaacaagtagagctatctgccttttttgggtaatgtttcaggcagtttttctcaattttgtggcagtcactgatctaaataaaaatactactacactgctgtacgtgaaaactgaacagatttgctgtctggaaatgtaactatttttaaca

SEQ ID NO: 14817 - DNA, 1639 bp, Zea Mays
ttctgacctgtgggcgatatgctcatatcccatctaacctcccggcggacccacaaatcagcttctaagtatgtaacgctgtctgtggtcgcagcatttgtggcaccctgacgctccagaaccttctccacaaaccgctaaatccaccagcaattcaatcccccatttacctactcactcactgacaatccgaccgaatcggcgggcccgaagtgccagggactaacccctcccatcttcttgctccgcaaggcgcacgcatttatacgtctccctctccccatcgctccccaaaaccctaccacgtctcaaaaccctcgcgaatcgtcatttccgctctctgccacgccggagcccccactgcccaccacccgttcccgcggcctcgccctttgcgtggttgaagaagcgaaagatgctcggggcctctaggcgatccctcagtgccgccgccgccgcccgcagccgcgtggctgccggcgctgcctccgccgtctccgccgacgccgccgcctcaatcccgccccgacccgcgagcaatggagcgccaggggttcatcagcagcagaagaggctgctctcagtgcttgtagcgcccaaggttgcaggaaccagcaatgttgtgtccctcaagctgatgggtggtgcccttactgggagacgctatgaatcgagtgcggcagcagttgactccacggacccgccagctgagaagcatgagtaccaggctgaggtcaacaggctcatggatttgatcgtacacagcttgtatagtaacaaggaagttttccttcgagaactggtcagcaatgctagtgatgctcttgataagttgcgttacctgagtgttacggatcctgagcttctgaaggatggtccccaacttgatattcgcatccaaactgacaaggataatggaataataacaattactgattctgggattggtatgacgaaacaagagcttattgattctcttgggactattgcaagcagtggaactgccaagttcctgaaggcattgaaggagagtcaagaagcgggcatggacaacaacttgattggccaatttggtgttggtttctattccgcatttcttgtttcagagaaggttgttgtatcgacaaagagcccaaaatctgacaaacaatatgtttgggaaggacaagcagattctggttcttataccattagagaggaaaaagacccggagcagctcattcctaggggaactcgccttactctctatctcaagtgtgatgataagggttttgctcaccctgagaggattcaaaaacttctaaagacttactctcagtttgtttcctttcccatttacacatgggaagagaaaggcttcacaaaagaggtcgaggttgatgaagatccagcggaagcccaaaaaaaaggtgatgattcagcggaaaccaaaactgagcctaagaaaaagaccaaaactgttattgagaagtattgggattgggagctttcaaatgagacacaacctatttgggtaaggttcattttttttctgtttatcgatataatcatgattgtttatgcatgcatttttggaaatgtcaatgtctgagccttatgtggtgagtttgcatgcgtgcctttatgtgtgtgtctgcag

SEQ ID NO: 14818 - DNA, 1710 bp, Zea Mays
tggtggccatgtccctctttggtcctcactaagctccaccgccactgctgacattcagtcaactttgtgttttcaactatgacaccaaaaatgttgaagtgcacaatgctccatggcatatccaagatgagccccgctttgcttttcgtgggctgctcctagacacctcaaggcattatcttccagttgatgttattaagcaagtgatcgactctatgtcatttgctaagctgaacgttcttcattggcatatcatcgatgagcaatcctttccattggaggtgccaacatatccaaacctttggaaaggttcatactccaaatgggagcgctacaccgtggaagatgcacatgatattgtcaactacgctaagaaaagaggtatcaatgtgatggcagaaattgacgtgcctggtcatgcagaatcatggggaaatggatacccaaagctctggccttctcccatttgtacagagccattagatgtctctagtgatttcacatttgaagtaatttttggaattttgtctgatatgaggaaaatctttccattcgggctgtttcacttgggtggtgatgaagtatacacagggtgctggaacacaacgcctcacgtgcggcagtggatggacgagcgcaaaatgaccacgaaggacgcttacaaatacttcgttctgaaggcccaggagctggcgatcaagctgaactggactcccgtgaactgggaagaaaccttcaactcgttcgaagaaaacctcaatccactgacggttgtgcacaactggctggggcccggagtctgcccaaaggttgtggccaagggtttcagatgcataatgagcaaccaaggcgtctggtacctggaccacctcgacgtcccctgggaggacgtctacagcggcgagccgctcgccgggatcagcgacagagagcagcagaagctggtgctcggcggggaggtctgcatgtggggcgagacggccgacacgtccgacgtcctgcagacaatctggccccgagccgccgcagcggcagagcgtctgtggagccagctggaggccatatccgcccaggacgtcgagacgaccgtgctgtcacggctacaccgcttcaggtgcctgctgaaccaccgtggggtcgccgcggctcctgtcacgaactactacgctcggaggccgccggtcggcccgggttcgtgcttcgttcagtaaagcaagcagccaagcaggaaggtaccctcctacccacgccacgaggtgctctgccttcgtgtaccatatctgtgtgtaatccacggaaacaatctgtataataatctgtctccgttttcgatttcccaaagtcgaaataaaaccgcaccgttcaaacctccttcgagctcgggcagtactgcatttgttttctggcggcggggtgcgtcgctgtcggggaccggacgccatcttttcctcagtttggccttgacctgaaacccgctggtccaagctgcgcattaatggcgcgtgtaatttgcgaccacctgttgtgcttgggtggtttggagtgacgacaatgggtttggcaccttgttctatacttccaatatagagagagaggtcactgtccttcccatgccaccttcttcattgcccatgtatgtctttggccttttgctctatctatatatatctactgcccctatttcttaactattgggagcctaaaatcgag

SEQ ID NO: 14819 - DNA, 159 bp, Zea Mays
cggcggcttgccgagtcagccggtgtcgtcttccaccgtcctatcctcgccgcaagccgcatacggcgttgcctcctgatctccccagtcgagtcggtacacctgcggccgcgtttctagaggtacaataaatgataaggtggagagtttacatgaggc

SEQ ID NO: 14820 - DNA, 282 bp, Zea Mays
aacccccctgtgtggtgagcacactcatagttctcacctcgctgtggccagctggaacagaagtacgccgccacagaccgaagacatggatagccctgctctaccccgcgtcatccccgcccaggttcttgcgaacactattgtcgtgaacgcgaagaagaagtggaagtgactgaagaaaagacatcaccacctttggaatctcaggcagagacttggctctacttcgacatctgcgagtccgagcctgactcacctactaacaaaggcaagccccggtgc

SEQ ID NO: 14821 - DNA, 822 bp, Zea Mays
gacgaaagctgccgcagtcaaacagcgaataaaagccaaagccaccaggccagcaacaatagaagcgagcgagcgagcagcagtaggcagcggcgcgggcgaggagcagaccagcacccagcagccctcgtcggggggcggcagctgcagcttcaccagccgccgcctttccccgtctcctctgcctctgcctctccccctaacccccttccatttctccaccccaccccgctcccgcttccgcttcctcgccacttagttcgttccgcacccgcagccgcggctgcgttcgcattgggggcacgcaatggagcagtacgagaaggtggagaagatcggggagggcacgtacggggtggtgtacaaggcgctggacaaggccaccaacgagacgatcgcgctcaagaagatccgcctcgagcaggaggacgagggcgtcccgtccaccgccatccgcgagatctctctcctcaaggagatgaaccacggcaacatcgtcagattacatgatgttgtccacagcgagaagcgcatataccttgtcttcgagtacctggatctggacctcaagaagttcatggactcctgcccggagtttgctaagaatcccactttgatcaagtcatacctctaccagatactccacggtgttgcgtactgccattctcatagagttcttcatcgagacttgaaacctcaaaacttattgatagatcggcgcactaatgcactgaagcttgcagactttggtttagccagggcatttggaattcctgtccgtacatttactcatgagtacatatctatggaagtatttttcag

SEQ ID NO: 14822 - DNA, 876 bp, Zea Mays
ataagggtgccaccccctttcgacctcaccatctgctgtactacttttacaggaaatggggtttcgagaagctcgtcttccgtaattcgatcaccagagtcaggcgagaccgcaaatatgcgatccgagctcggaacgcgtactccacaggtgtacacatgtcccagaatgtcatcggtaggacaacccacaagacggagagcttgatcctatactaccactatcacaactcgatcaacgtcatgggggagccctgcagggaattcgtgccgagacccaacaatggaagcaaggtgatgtttgaggggataccgtatgtctacgatgacaacatggagcgcgtggcaggggagatcaaacgcttcgaggaggagacacttgggaccgtccgtacataggatcggcgcaaaagcatcgcatcgctggtgcgtatacagctctgtaccttgagctcgtgcccatccgttcgttccccgtgactctcgtcttgtgcactttgagctgccattccaacaagcagaatggaagaatctgtctcggggtcgaattagtgtaaagtttcagtttagctttgaatctgtcatctgtgtggagggcaatgcctttatgctgtgttttccgttcttgtctctatgatgttgtatgtatctcattgtagatttgtctagactgactgttgggctttattagatttttctgaatgtcgtatagggcgcagtgtgaagcgtctgaatatttgacttgttaaccaccctctggagtctgtatttgttcctgcacaaactggagcgtcagttcccatgttttctgttatgtacacctaccagaatagtggacagctcagcaatggtgaagcagttttttaacatgtactac

SEQ ID NO: 14823 - DNA, 2958 bp, Zea Mays
tgtgggctgggcctcatgtctccaaccttgtgaatcgatccgatcttctcggttcctcctccaaatccaccggcatctccaagccctagccccaaccccgaccgcccatgtccgccatcgcggcctcctcggccgccgccgccgcggcgtcgaactccgatgaggaagaaaactatgaggagtacatcccagtcgccaagcgccgggccatggaggccgagcgcctccgccagctccgcctctccaagtcggcgccggcctctgccgtctcatcactcccgatgccacctcccccgcctcttttgccagcgcagacctccgttcccgacgccgccgcgaagcccagccttctcgtcaaggccacgcagcttaagcgcgcggccccggaggtgaccgccacggagcagcgcatccagcaggagaaggaagtgattgaaaatctctcagacaacaaatcgctcaggtcagtccgcgagatcgccaagggcatcatctacacggaaccgatccagaccgggtggaagccgcccctccgcctccgccgcatgccgctcgccaaagccaacgagttccggcgcaagtggcacatcatcgtcgacggtgacgatataccgccgcctgcgcgtgatttccgggatctccgcctcccggagcccatgctccggaagctgcgcgagaggggtatcgttcagcccacgccgattcaggtgcaggggctgcccgttgtgctctctgggcgtgacatgataggcatcgctttcacggggtcggggaagactctggtgttcgtgctgccgcttatcatggtggcgctgcaggaggaatcattgatgccgatcgtgcctggcgagggcccgtttgggatgatcatatgcccgtcgcgggaactggccaagcagacatatgatgtgattgagcagtttctcattccacttaaggaggccggttatccggagataaggcatttgctttgtattgggggtgtggatatgaggacacagctcgatgtgttgaagaagggcgtgcacattgtggtggcaacgcctggtcggctcaaggatttgcttgccaagaagaagatgaaccttgacaactgcaggtacttaaccttagatgaagcggataggctggttgacctaggatttgaagatgacatcaaggaggttttcgaccatttcaaggatcaaaggcaaactcttctcttttctgctactatgcctcagaagattcaaaattttgcgaagaacgcccttgtgaaaccagttactgtcaatgtgggaagagctggagcagcaaatctagacgtcattcaagaagtcgaatatgtaaaggaagatgctagaattatatacctccttgaatgcctccaaaagactccacctcctgttctcattttctgtgaaaacaaggctgatgtcgactacatccatgagtaccttcttctaaagggagtggaggctgttgctatccatggaggaaaagatcaagaggagagacagaacgcaattgactccttcaagactggtaggaaggatgttctggtggctactgatgttgcatcgaagggtcttgattttcctgacattcagcatgtcattaactatgacatgcccgccgaaatagagaactatgtccaccgaatcggtcgaactggtcgatgtgggaagactggcatagcaactaccttcatcaacaagaaccaaactgagaccacgcttctcgatctcaagcacctgctgaaggaggcaaagcagaggattccaccggtgttggcggagctcaacgatccattggatgatgaggaaataattgccaaggagagtggtgtcaaaggttgtgcgtattgtggtgggcttggccatcgtgtcagtgactgtccgaagttggagcatcaaaagtccatggcaattgctggctcgagaaaagactactttggcggcgggggttaccgaggagaaatatgattgctctaggttgatgcttgcgtgtggttatcagaagctaagatgctgcaatttcaggtcatacatgtcacatgtatcagccaccagaacatccttcctcccccatcgttgaagggagacggtctgcgttaacgaacttgtgatatgctgctgggtatgacactgcttgctactgacctaccatatatcttgtttgaaggacgcaagttgattatcctgccctgttgtaaaatgtaaccagaacaattgctggcgtatttcttaagcaccagttttagcccctttctgtaagcagtcgacatttcagttcaactcatgtggtcgcttcagaaggaaatcatcatccgacgcatatgagagggcaacccctccagggacgaccagccaccctcctcccttcgaagtgtgaaccggctgcaccctcacacttgttttgctccttgacaagcatctcttcacctataataaggtagaggcagggaggagagaagacgacatcaagaggggaacggggatgagttgcgggtttacctctgctgtgatatattgtaggtgccactatgtgtattgttcccccctatctactacgtggcataggttgtattctagtatgttgaaagctcatggtgccgtgctgtatcaataaggtgttatgcgcatagagtggctcaggaccagggctgcgtttgcgctttgccactggctgtgttgtatgtttcttctgctgctatgccattagggtttagggatggtgtgtggatggcgtcgtgcttgtagtgttagctgggtttgaagcggactacatgtaggtttgttcaatgtctggtatctattagctgaaggtgtttgcctgtaagttgtaactctctgtgaactgtgatgcgggataatgctaagaatagatgatcgttctaagtgaccaagtaattgagtgggagtcggtctaagtggtgagtaattgagcggattaacaatgagtgactgaattatcgaa

SEQ ID NO: 14824 - DNA, 3285 bp, Zea Mays
accacaaagccccccacccgaccatggaccaccagtccaccgcaaggcacactcctgtctccaccctgctccgctctttgctcccgctcccgctcccgctcgcctacgctacttgccgttcatcgccggccacagcctctgcccccgccgcttagagttcgcctccgtcgctgctgcaggagctagggtttccggcgccgggcgccggggtatgagcatccgccgccgccgccctgcaggatctaaggtttcgacgactccgctcactgatggagggtggtagaagggcgagcgagtccctctcggcatacacccatggaccatgacgatactgattttcagagccaaaattttcaactagctggtgtaggaagtagcaaattcccatcaggtttgcgaccatttgcactgccaaaacttgatatcgaggaccaactacaaggccatcttcgatttgataatttgatagattcagaagcatttttcagcgtacaagggcacgagaatagctggattgaggttctgtccactggaagcagtgttgttgattttagctctagcgcagctgaatcttgctcgatatctaaaactaataatgtctggtcagaggcaacgtccacagaatctgtcgaaatgctattgaaatcagtgggaggaaatgagacaactggtaacatggacagtaatgctcaccttcagttaattggtatggacagtcaaactgatcaatcgagtgttcatcctaaatctagtacctccccgacagatagtactgtagtgccaactgagaaagatcagtcttggagcactcattctagaatgactgctgacctttcaaacactgagtctcagcttgaacattttgtgcctttcttactggacaagaaagctgcgcaggcagcagattctgttgctgagaagtgccttacaggtgagaagttgtcctcttcaaacaacacaccaggaagctgcccaactgttggcaactattttggggcaggccatgatgataattctttggacaaatttaatgtaccctcagctgaagtagattcaaagaaattgaataatgaatctttcccagagttggctcccctgcagaacatatatactgattcatatcacttcaagaaagatattaaagaatctgaggctgttgttactcctcaagattcgaagttttgccatatcaatgaaaataaagttgaaggtggactacaagaactgcaaaatttgtcatgtgctggtcagtccttgggcgctgtaaacttgtccagtccaccaagcaatgaaactctattgtcaaaaagttctgatggattactagaagccatcacaaatccagttaagatgctgcacaggagcgatgatacttgccataaagtgaacatcactcttcaaccatcttttttagcagtgcaacatggaactgaaggcctgaaaagttcagttcacaggagcaatgagcttgttgttaaggagtttagtattggttcaaattctcttatctctcaccaatctgaggcagacccaagaaattctaatccacatcctgtcagttctgtgtctcccaaaagtaaaattaccgatgccacttgtgttcctgaagaaacaaacaacactgaaacgaatagtacaaacacctgctatacatatgatgaatcaaaacatgtagtgctggagtacaatcaaggttctgttgacaagctaaaaagtggtgacatgggagaaaaggcaactggggaggaaataccagcagtttcagggagcattgagcaaatgatagaaaattatcatgaagaaaatgctactggtacatccaacaataaggttggcctttccgacagtattgcacctgaaaactgtgcagctgacactttgaatgcttcagaggaaccaaacagtccttcgttaaatcatgagaggtcatttgaggaacacgaattgcctgctttaggagaggagcctaaaagcacaaatttactcctttctacttctgggtttcaagagaaaatttcagcatcagtgatcagttctagcagtggtgtcatgcctaccattgttactgacaacgttgctacttctgaggataataatggttgttcaataggtgtttcttctgttgattcttctgttttactagacgaaaaggatttgagaacgtccacagtgaataatgaggagccattcaaggaaggcactaaatctgctttaggagatcaagaaaacgatggtatttctcctggctctgaacaaggaggggaaatgccagctgtgcccatggattcaaacattgccgtttatagtgatactgtttctgctacagaaaaggagaaatacaaggaccatcctaattctttgggtagtttgaccacaggaggaacccaggataaatcaggtaaccatccagatgctctttcactgaaatgccagactggtagatcttcaatacatacagatcttatagatccaaccacggcacctatgttaggtatcccaactggaaaggtggctgaaaagatagtaaaaactccactgaatgcaagtgatgatttgaatgcacatatgcaagacatagtgttaaatcatggtacggattgtagtcctggtactgtgacatcccaaggaaaggaaggctcaagcttgctggaacctggtaatggtatctgcactggggttacatgcggatccccttcagtgattagttgcgctgaatcgtttccccaaggtggtggaaatggcagcaatgatttacttgatcacacactatgtgggcaatctgaggatcctaaagaccgtggggcctcagctgatgctactcagagatcaaaacaatgctgtaccagaaacatgaaatctgctcctggttctgaggagactagtgcagcaggaggtgatagaagcttttcatttgaggtgggagctccacccaatgttgctgagaaagcacatagctctgtttggagtccttttcatttgaagagtactgagacggtcacagaaaatcttcaagctggaagttctttgaaggatactagtgatgatagtaagaaaacatctactatagatgcttgtaaagaacaactatcagaaaggaaagtggctgaaagttctgggggcagccccccagacaactctaatataggcggcagcattaagagcagaagttcgccaccgcagcagcatccaatccctgagtgttctgatttagtgaattttccattcacagaggcacagcatttgcagctacgcgcacaaatatttgtttatggagctcttatgtga

SEQ ID NO: 14825 - DNA, 1457 bp, Zea Mays
tcgatttacccatttcccagaccctactcataaatatgccatggaacaagcatttaagtcaatgatgacccaagcaccaccaaactcatttggctccaactcgcctttcccatttggcatgccaccacaggcatctcctactgcaccaagcagtttttcgtacttggaaccaaggaaaggtacctccccacaggtgtcaactgttgatgtctcagctaccgaagtggatgccgctggaacatcgaaagaggtggatgtgactgagacaccaaaaccttctaagaattttgcatttgttgatgtttctcccgaagatttgcagcaaaaggacctccaatcttcactggagatggtagatgtaaaacatgatagtacagaaagtgaaagtaaggaggatactgaggaaaaggctcccagaaatggagcgacttttaagctgaatgaagatgctgctcgtgggccaactgaatccagtcaatcaggacctatgctatctgttgagacaattgagaagatgatggaagatccagctgtgcagaagatggtttatccctacttgcctgaagagatgaggaacccagattcgttcaagtggatgctgcagaatccaatgtaccggcaacaactacaggatatgctaaagaacatgggtggatctcctgatcaatgggataaccgtatgcttgatcacctgaagaactttgaccttagcagtccagaagtgcggcagcagtttgcgcaagttggcatgactcccgaggaagtggtatcgaaaataatggcaaacccagatgtagctgtcgcattccagaacccaaaaatacagacagccatcatggactgctcgcagaaccctcttaacattgtaaagtaccaaaacgacaaggaggtcatggatgttttcatgaagatatcacagatctttccccaaatcaacggctagctggtcttcactgcgggattgcagtcttgattttttttgtcggcctatcatcccctgtgtctggagggcctgctgcggtaaccatctttgaaggaaaagggaacacctgttgctgttgggccgtgacgctctggatacaccctccctgtgtcgagctttttgagtttcatatgtagtagtacatcgtgtgatgtagcggccttggtctagctatgagtatgattgacccaccctcttcccgcttcataaagtcaggctagtgagcgtagcaggggcaaatatttgttatttacattgcatgggcagccagccggtctgcgctctgacgttgcatggtttatctcgtaggatgtgaaaggcgcagcagacagacatggttcgtatcagatcaattttgatatatactaattgctattgttagtgtgtaatacgtcagtgacacaatggcaatgcaagtaatctgtttcgagacttgctgaccatgtttgaccagggttgcgatgcaacgtattcc

SEQ ID NO: 14826 - DNA, 1347 bp, Zea Mays
agcggtcaaaggcgggccgccccaccggctgcggccggtcaccctcgcctcgggcgccgcgaagctatttagcgcggtggccggagcgccggcaacggctgccacaccaacacacacagactgacaggcgcaagaagaggagaggagaagaacagaggggagtggaaataatctagcagcggaaggggaagcagcacgaagggaagcggcagcggaagcggggttctggctaaagtacgttaaggtcttttttatcagcaattccagtaatgtgccttgcctcttttacgtgactatacaagacaatgaatggaactcatccctgggcctccatgtccggaggtccatgttctaaccttggatatgccagggacatgaatggtaatgttccaataagcactacaaattcttctgggccaagcattggagttagctcattggtgactgacgccaactcgtcactttccggtggtgcccagttacagccaagtactagcatgaatggtgattcattgatgcgtgttcctgcgtcaccaatatcgttttcatccaataacatctctggctcttcagtcattgacggttgcatcatgcagcaaagtccaccccaagagcaggtgcagaaacagaggtcttcaagtgtaacatcacaacctgtgattgatgctggtggtgcattgcatgctcagaagaaatcaaggattgatgtttgtcagggtggtatcacggaacaacagctgattcagcaactgctccatggtcagaattctcttcattaccaggggcaacagaatccacagcttcaagctttaatgcagcatcataaactggcacaacttcagcaacggcagcagcagcatccattttctcagatgcaacaaccccaagttggtattcctcggcagcctcaacttaggccaccactggcacagactggaatgcagttaggtggtcctgttaggtctcctatcgagagtgggatttgttctcgcaggatactgcagtatttatatcacaagcgtcatcgcccagagaataaccctataacatactggaggaagcttgttgaagagtacttcgcacctcgagcaagagaaagatggtgtgtctcttcttatgaaaacagagggaattcttcagctgctgctccacagaaagctttggatacgtggcgatgtggcatttgcaatacacatggtgggaaaggatatgataatgtcttgggagttctgttcacgacgccatgaggagtacaccactcgcaagactatagcaccacaggacactatggtagtttaatcctctttgccaatacgatattgcttggcaccatggtttttaaagcgg

SEQ ID NO: 14827 - DNA, 132 bp, Zea Mays
aggacacttgccttcaccaaacagatgcttagggtcttcaatctcgtggaactcgaagaactggatcacttggtcgccgaagcttgaccgtcgattcctcgaagctcggaaatggatcgcagtctattcgcg

SEQ ID NO: 14828 - DNA, 1090 bp, Zea Mays
taatgctaaatcaaggcagttgcaggttcagggtcaaaagtacgatccggacggtgaatatgtaagaacttggattcctgaacttgctagaatgccaacagaatggatccatagtccatgggctgcgccaaactctatattacaagttgctggagttgagctgggctttaactacccaaagcccatagtagaacttcatatggcgcgggaatgtttagatgacgccatctccacaatgtggcaattggacacagctgcaaaacttgctgaactagatggtgaagttgttgacgacaatctgaataatatcaggaattttgatatcccaaaggtggttttgaacaagaaattatcaccaagcacttcatccatggagcacagggtgttgtctactaatggcaaggacgaaaagtcgcagcctactgaagtgaaggccctgtacaaacagattattcgagatgatatgatgaatgactcaaacatggatgacacatgctctactgctaacttgaaagtgacaaggaaaagatctagcagtgatagtgcgttcaatgttccctcatgttcatcctcattagtcatggaatcacggattcatcataatgaacctagttctgttctgtattcaggctacttccagaagacagcagacagagatggcactagtaaggttgaagataatgacagtgaagatagtggtacgagcatctctaggccatccaagaaagctgcttagcattagcgcattgaagatgttgcaaatcttcaatgagaaatatttaccgtcacatgtaatttagctggtgcgtttgtagtgatcatgcaaaagctgttctgtgaattataattagttttacacggcctatccttattccgatagaaggcaatttttgtttggtgaaaaaacatcgctcacggacaggccatagtttgctgtcgctgctgaacagcctaatgcctggtgtaaatgactcatcaacgttacgacactattagcgctggttggttttgctatcaatccgtattcatggattgggtaagattgagtagatttaaatatcaaataaatcaaaatgttttataatttttt

SEQ ID NO: 14829 - DNA, 1109 bp, Zea Mays
atttccacctctctcacgcccgtctccggccgcctcacctccccccttcgcgctcggcctcacgctgacccatctgggctagggcacgcggtgacatctcactcatcggttcagggacccccggtctcgaaacaccgacacaaatagattataaaatattttttcagtaacagtataacaaatattttatatataatttatcgtggtattatatcttctgtcacacggacactcactcacctagtagctaaacaaggctgacgtgctcctcctccggcgattcgctcccttcctcttcccccggccacgcacttccccgccccccgaccccgcaacctctcaccgccggtccccgccctccgaccctccacgcgcaaatagcccgcctccatccactaggaggatccccgatgagctaggagaagtgttgatttggatattcgtggagtgtgcaatggtggactttgttcgacggctcgcctctgccctgctcaagtgctgcgaccttgacatacccaatcggccaaagggcctcgaggaccccgaacgcctggctagagaaactgtttttaatgtgaatgaaattgaggctctgtatgagctgttcaagaagattagcagtgctgtggttgatgatggcttgattaacaaggaagaattccaattagccttgtttaagaccaacagaaaggatagcatgtttgctgaccgggtatttgacttgtttgacacgaaacacaatggaattctcgagtttgaggaatttgctcgagccctttctgtgttccatccgagtgcaccaatcgatttcaaaattgattttgctttcaaattgtatgatctcaagcaacaaggtttcattgaaaagcaggaggtcaagcaaatggtggtcgcaacacttgctgaatcaggaatgaatctttcagatgatattattgaaggcattattgataagacatttgaggaagcagatacaaagcacgatggcaaaattgataaggaggaatggcgcagccttgtcttgaggcatccatctctgttaaaaaatatgaccctcccatatctccggtttgatggagtaacatcttttattgaaacattgttcctat

SEQ ID NO: 14830 - DNA, 374 bp, Zea Mays
tagagcttacacgatctgagcagctttaagtgccctcacagcatttgatgtgcccatttggaatacaaccctgcccctttcttgtgggcatgtacggaaaactacactgtcagtccctttctccacaaaatcagtagtcccaagagattacttcaagaatttgtgatcaataatttcttctccataagtaatatcagcaccatattcagcagccagtagcctaaatggcaagttaccacgcggaccatgggcgccagcacgagcttgtcgcggtactccatccccacctcgtcgccgtgccgcagcgcagaccgcgactgctccggcagaaaccttggcccccgcgaaacctggagacgaagacgagacgaggg

SEQ ID NO: 14831 - DNA, 126 bp, Zea Mays
aacaaccatgatgcatgcaaggcaaatcaaagaaaacttactatgcttgcaaatgtcaatcctacaaatacagtgattacaacgaacttcaccgctcggttcctgagaattcgtccatgaacgtcc

SEQ ID NO: 14832 - DNA, 1399 bp, Zea Mays
cccttgaaaaactgcatcgtctgggcgcgatggacgtcccggccgtggcggaccctggaacggagcgaggcgaaggcgcgctgatccagtgcccgtactgcgactcggaggcgatgcacaagctggcgcagatcctcctcccgggcctcgccgccgtctgcgtggacggcaccacgggggacccgttccgcagcccgtccgcggtggccgtggacctccgcaaggagatggtggactacatcacgcagcggagcgacagcttcatcgcggacgcgctgatcgagtcggaggcgaaccaggacgcgcccggggccgaggtgcccgacgaccccttcgagaccgtgtccgtcttcatggacgacttcgccagcaccaagcgcaacatcatcggccacgtctcagggtggctgctcaccgacagccgcgacgacaagatcgacgacttcgtgcaggagatggaggccaccaagttctggccgctggagcgccgggaggccgtcgccgagctcctgctcaagaacgtcgacctcaagaccaggttccactgccccgagaagtacgagaacgaggagcgcctcgaggaccacaaggcgcagtgcagcttccgccccgtcgcctgcgccaacgacggctgccgcgccaaggtctccgtccgctgcgtcaaggaccacgacgccgcctgcgtgtacaagctgctccagtgcgagcagggctgcgacaagcgcctgctcaggcgcgacatggaccgccactgcgtcaccgtctgccccatgaggcccatgaagtgccccttcggctgtgattcctcattccctgaccgtgacctcgagaggcactgcgccgagttccttcagccgcatctgctcatggtccttaaggccatccataagaaaggccggtcggaacaagacctcaaggaccttgctcaaaagctggaaaagtttgatggagatggtaaactggctaaggctctagatgcaagacctcttactaatgttgtcaaggacctcgaagccaagatgaaaggtggacagtcaagttaaaagggctgggtctttcatgcagacagacttcacagaatggataatggcattgtttagtcccacgcgcagcatacatacagagaagaatatgagttttgttttattcttatctcctttacgattttttttcacatttctccctgtctgtcagagttttgttttattcttatctcctttacgatttttttttcttcacatttctccctgtctgtcacaaacaaaccaattgtcagtcagtatgcatagtcgtccgctattgctctgtatcttcagcttttgtatgaggatattatatcatttgttttggtatataaatcaaagaacgggccatgtttccagcaggcttgttctgtacc

SEQ ID NO: 14833 - DNA, 1599 bp, Zea Mays
cctacctcgccagtaatggcgggaactccccagtttcagtccccgcacttcccgcctccctctccccctctcggtcccaccttcgtccctccggcgatgaactcaggcggacgcggcggcaagcggcggggtcccccgcccctcgctccctccggtgcggcggcgaagagggtcaatcccagccccggcacgccgcatgtgcctcctcccgcgtcggcggcggccgccgtggaggaggacatgatggacgaggacgtgttcctggatgagtccatcctggcggaggacgaggcggcgctgctgatgctccagcgcgacgaggcactcgcgtcccgcctcgcgcggtggaagcgccccgcaatacccaccgacctcgccgccggatgctcccgcactgtcgcttttcagcagttggaaatagattatgttattggtgagagccacaaagaattactccccagctcatctggttcagcagccatactcaggatttttggtgtcaccagagaaggccacagcttatgctgtcaggtgcatggatttgagccatatttctatattggctgtccttcagggatgggtcctgatgatatatcacgctttcatcaaacactagaggggaggatgaaggagtcaaatagaagcagcaatgttccaaggttcgtgaagagagttgagcttgtgcagaagcagacaattatgcattaccaaacacaacaatctcaacctttcctcaagatagtagtcgctctgcctaccatggttgctagctgtcgtggtatcctggaaaggggcataacaattgaaggccttggttcaaagagttttctgacatatgaaagcaacattctttttgcccttcgtttcatgattgattgcaatattgttggtggcaactggattgagcttcctgctgggaaatacaggaaagcagcctgtatcatgtcctattgtcagctagagctagattgcttatactcagatctggtaagccatgcggctgaaggagaatattctaagatggccccgtttcgcatattaagttttgatattgaatgtgctggtcgcaaaggtcatttcccagaaccaactcatgatcctgttattcagatagctaatttggttacacatcaaggagaagaccaaccttttgtacggaatgtcatgactcttaaatcctgctctcccattgtgggagtcgaggttatgtcatttgatgcagagagagatattctacttgcatggagggatttcatacgtgaagtggatcctgatatcataattggatacaacatttgcaaatttgacatgccctatcttattgagagggctgaggttctcaagatagcggagtttccaatacttggccgaatcagaaatagtcgtgttcgtgtccgtgatacgaccttttcctcgaggcaatatggtgtgcgtgaaagtaaggatgttactattgaaggaagagtgcaatttgatctcctgcaggctatgcaacgggattacaagttgagttcttattcattaaactctgtatcagcacactttcttggggagcaaggggcagccaaggagagccctttggctccaacaatttcctag

SEQ ID NO: 14834 - DNA, 1531 bp, Zea Mays
aatcagcctgccggactttgacctacgggatgagagcactgtcggaagtcaaagaagacgaactgcagaatccctcctctttacttatcctaatccactacaagatcatccagcctattcaactgtcaagcagtattttgtcaatgaagatgacaccgttcctcaaaaggttgttgttcagaagaacagtcggcgtggtgttcacttccgtcgtgctgggcctcgtcagagggtttattttggcaccgatgaagtgaaagcctgcattgtaacttgtggaggcctgtgccctgggcttaacactgttatcagggaactggtgtgtggcttgtcacacatgtacaatgtcagcagcatttttggaatacagaatgggtacaagggtttctattctagcaactaccttcccctgacaccaaagagcgtcaatgacatccacaaaaggggtggtacagttcttggaacatcacgcggtggccatgataccaaaaagattgttgataacattcaagatcgtggaatcaaccaggtgtatatcattggaggagatggaactcagaagggagcatatgagatcttcaaggaaatccggaagcgtggcctcaaagtttctgttgctggagttccaaagacaatagataatgacattgcgatcatcgacaagtcttttggttttgatacggctgtggaagaggcccagcgtgccattgattcagctcatgtggaagcttgcagtgctgagaatggaataggtttagtaaaactgatgggccgttatagtgggttcattgcgatgtatgctactcttgctagtcgagatgtggactgctgtttgattccagagtctccattttatctggatggagagggtggattgcttcaatatgtagagaagaggctgaaagagaacaagcacatggttattgttgttgctgagggagcagggcaggatcttatcgcgaaaagtttagccacatcagatcaacaagatgcgtctggaaataagctgcttcttgatattggtctttggctgactcacaagataaaggactacttcaaaagcaaaaagatggagatgacgattaaatacatagatcctacatacatggtccgtgctattccaagcaatgcatcagacaatgtctactgtacacttctagcccacagtgctatccatggtgcaatggcggggtacagcttcactgttgggatggtcaacggaagacatacctatatacctttctacagggtgacatccacaaggaacaaggttaaagtcactgacaggatgtgggcaaggcttctgtcgtccaccaaccagccaagtttcctgagtcagaaggatatcgacgaagcgagtgaggcggataggctggcaaacaggccaccactgccaacgggtgccagctctcgcgtgttattatgcaatcggctggtgttctatctgtcttcgcctatctgtactaccgtgcattttcctttggcaccgtgaaatttcctttaatgccaccgcgcgctctgtcaatgtgat

SEQ ID NO: 14835 - DNA, 103 bp, Zea Mays
gaaacaagcttcaagaaggaaagattgtgatcatgaagaaatttatggtggagaaagcaagagacatattcaaggtagtacctggtccatacttgatacaaac

SEQ ID NO: 14836 - DNA, 143 bp, Zea Mays
ggcgcccgctggtgcggtgttggtggacaggtggacgccggcgtcggtgctgaggtggtggcagctggagaaagcttctccgccgacgagaccgtcagtgctacccgcggaccgacctccggctctttggctttaatatctgg

SEQ ID NO: 14837 - DNA, 853 bp, Zea Mays
  misc_feature (853)..(853): n is a, c, g, or t
ggttatcacaataacccgactctcggacccacgacgagttaagcccggagggaaaaaggacaaatcacacaaaggcacagggaatcgcgccaccgtgggacgcgtacggcgcaccgcccgcccgccggatctgcgccggcgacgcgcccggacgtcggatctacgccgccgcaggaggggggaggcggcgctgtggccgttctctgcccgcgagcgcccggatccgtcccgccgaggtggtgaaaacatcttctcttctccaaagactgctgactgcaagttgcaaaagtttgtcttcagcttgctgtgttctttcttccctctctggcggagtacacgagaagtttgtagatataggcactaggcagctcctttcagctcttctatgtccagggatttggactgtcctgttcagacacagatggctgtggcagtcctggaccggagcttcagcagtgaatatcctggaggcagcagaactgaggggaggcaactgagctggaagagagtctttgtgcaaactgacaatggttctgtccttggcattgagctggagagaggagaaaatgtgcaaactgtgaaaaagaagctgcagatagctctcaatgtgcccactgatgagagttcattgacctttggtgacctggttctgaatgatgatcttagcagcattcgcaatgactcaccgttgcttctcaaaaggaatcagattcaccgaagcaattccacaccttgcctctcccctactggccaggatgtttggcaaagagaccggagtggacccattgaaatacttggctgttcaagcccttcatctcggatgaagcagattgcgaaggatgtcataaggccn

SEQ ID NO: 14838 - DNA, 792 bp, Zea Mays
tattagagccaaacaaacatgcttatcaaattcagaacctaatacacattaggaactgggtcatcaaatacaacgatcagtagactggttaactacaataatcaaaactccactagcatgtaagtggcaactgggtcattgccccgtcattacaaaacatcagttcactaccatcgctcccacaatccatcatctctgaccgcaatacccagccagcctagcttccattccatcaccgtgtcatcacacgactcactcgctacttcgctagacactacacctcggcagcagcttgtaactcactcactcactgggtgctgctgagctgctgaaccacggcctccatggtcggccgctgacctggcgtctcgctcgtgcaatacgcagcaacagccgccagcctcgccgcctccgttctcgagaacgcgccgtcgaggttcgcgtcgaccaggccgccgaggtcgctgacagcggcggcgccgaccttcagctgggagacgtccctccttcccgtgaggacctggaggaccacgaccccgaacgcgaagacgtcgctcttgtccgtgaaccggcccgtggcggcgtactcgggcgcgaggtagcccatggcggcgctcgctttcagggccgagaagacgacgtcgtctgcgaggagcttgtgcagccccggcaccgagagcctcggcgccaggtggtggtcaaggaggatcttgtcggccgatatgttctggtgcaccaccggtggcttgctgcccttcttgctgtggagagtggggatgatacctttcgcaa

SEQ ID NO: 14839 - DNA, 704 bp, Zea Mays
gtcagtacaagaggaatgggttgctgcctatgctgaagaggaacacctcggtgaagctggcgcctcagcggtggcaggacaatgccggcgacggggtgtttgatatgataatgacctttgaggagagggtctttgacttggttgttgaagatatgaataaccgcgagccgaggttgatgaagtgtgtgctgataataaatatggatgtcaaagataaccatgaagaagctggtgttggggcaaagcttgctgtagagttgtgccagaagcttgaagcaattgatggtgactgggaggacataattgatgacttgattactgcatttgagaagcagcacaagcggagacttgcatacagcatttcattctactaacatgtatagtcccgtgtggacagagatgttgcagtggatggttggtaacttggcattgtagtaagcaactgcataggagtgaagcatcatgttgtggcagtgttgcttgaattcttccacgcttacatttgcctgtgctagctgtttttttattgcaaggtgatggctatagatatcttccaagcactcgctgtttctttcctaactaccgcctttgttgtctggcatgtattcttaaacgacaatgtggttcagagtatcttctgtcttccacctcccaaaaaaaactaaatatcatgctttatgcaatatagtatcttctgccctctt

SEQ ID NO: 14840 - DNA, 1530 bp, Zea Mays
catctctgtgcagtgcatccatcccgatcaaagcaacagttggcatctgtcaatttttaaacccataaattgcctgtcgagcagatttggaaggctgcagggagtgaagtgtgcgattgcagggaggaacctttacatgaggttcagctgcagcacaggggatgccatggggatgaacatggtctccaaaggtgtacagaacgtgctggactacctccaggctgacttccctgatatggatgtcatcagcatatcaggtaacttctgttctgacaagaagtcagctgctgtgaactggatcgatggccgtgggaagtcggtggtttgcgaggcggtaatcaaggaagaagttgtgaaaaaggttctcaagacaaacgtacaggctctcgtagaattgaacgtgatcaagaaccttgccggttcagctgttgctggagctcttgggggtttcaatgcccatgcaagtaacattgtggcagccatcttcattgctactggtcaggaccctgcacagaacgtggagagttcccagtgcatcaccatgttggaagctataaatgatggcaaagatctccacatctctgttactatgccatctattgaggttggcacagttggtggaggcacgcagctggcctcacaatctgcctgcttggacctgcttggcgtcaaaggtgccaacagggaatctccggggtccaacgcgaggctcttggccacggtggttgcgggtgcggtcctagctggggagctgtcccttatctctgcgcaggccgctggccatctggtcaagagccacatgaaatacaacagatccagcaaggatatgtccaagacccttgcagaggaaacagacaaacccaagaaatgctgaataatatcaagtagttgttctatagccctttgggagaaaaggagcagaaagggtcgtacaggatgactttcttgcggcatgctcaggtggaaaggggggaaaaagaccttcaggcgaaaagagataattcagtcgccttgtcatatttaccaggcggtgagacctgttgtggatcctggagtatgacctatttaatttgttgatgttgttgttatagttcctctaccgtacttgaccccgtttgcatcttgttttgaccgtcccatgggcattggagaatctgaccatgggttttgtcccaagcttgcatcacactggggggacctctgctttgcggcggccccgtctcagaaaaaaaaattgcgctggtaactgccgggtactgtgtatttcagctttgaaacttttatccaatgcttttgagtcgaagagtcagtggactcgatgatgtggttgtaaagaaaaaaaaatgcttttgtgtggaagagtcagtggagtcgatgacgtggttgtaaagaaaaggtgtgcttcagaacaagagtacatcacgttgcctctctgctttctctgtagcgtgttcgtctcaattgcatgttccggttggctgggctgccccgtccacggatcaggtttataatataataatttaatacaaa

SEQ ID NO: 14841 - DNA, 1209 bp, Zea Mays
gcaaaatggtaaacgcttacccagtatatggggacaaagggaaggcaaaagatccattctttggcctgacgatgggatcaggatctcaatcttcatatgatattttcagatggttctgtgtggaggctgggagctcttctagtcctaaagtgcttttaattcacggcttgccatcgcaggcatactcttaccgcaatgtgatgcctgtactggcggacaaatatcatgccattgcttttgattggctcgggtttggattttctgataagcctcaaccaaaatatggttttgactatacacttgatgagtatacttcatccttggaatttctagtcaatgctgttgctcctgataagctctctattgttgttcagggctactttgctccggttgcagtcaaatatgctagtgaacaccaagacaaattgaatcatcttgtactagtgaatccaccaataaccgataaacatttgaaccttccatccaccctggcttcgttcagcaacttcttgttgggtgagatattttctcaggatcctctcagagctagtgataaggtattgactagttgtggtccatacatgatgaaggaagaagatgctatggtgtatagaaggccataccttgtctctggttcctcggggtttgcacttaatgcaataagcaaagctatgaaaaaggaccttaaggcttatattgaatccatgagaagcatattaagaagcagttcgtggaaaacaaagacaacagtatgctggggcatgagagatcgttggctaagctatgatggggtggaagaattttttggaggcctaaaccagaagattgtagaactgccaatggcggggcaccatgtgcaggaggaccgtggtgaagaattaggcaatataatcaaaagtatactgagatgatgactgcggatcgcgtgcagggggtgaggctctagagcgtgccaagaaccagatgctttacgaggggtcaaaatgtggcgaagcaataggatacgaaaaattgagtatgatgcacggggcaatccgctctatgcatcgatttttatcaagagaacgccaccctgaactcaagcggcgatgtggaacattttcagacaacaacaattgattgacgaccttgcgaaatctttttttttctcctaaactaaagtagcagaactaatgaaatatatccaaaaaaaaggaaggaagaaagaaa

SEQ ID NO: 14842 - DNA, 304 bp, Zea Mays
atcaacaatagaagtttcaactaatcagcttactaggatgaagcctgcaacggtggcactgctcattttgttgaacatgatgtgcatagttgcatactttgatcatggaacgatggctgaagaaaccaccttgctggcaaattcgtatggaagaaatgaaggaaccaagggcatacatcatggaagaaagctgatggacaatagtattggttcaaaccagttgtttcttactgagataagactacttgataaaaaaactcggccgggagggaactacacgccaccaccggtgataccagcacca

SEQ ID NO: 14843 - DNA, 100 bp, Zea Mays
ttaattaccatagagctccaaaggtgggtaaaactcactaaaactgctagcaacagtcaactaaatcaacatctctccatcctgacagcacaacttggaa

SEQ ID NO: 14844 - DNA, 1501 bp, Zea Mays
tgcgtatggcgtccgccttggcgagggtgtaagggaggaggtcattgttgaccttgttggccagtgccgatcctatcaatctcgtgtcatggatcttgttaacagtactggcgacgagagccttttatttcaggctctaggactaaatgatgagttacagcgtgttgttcagcgtcatgatgacatagcaaaggggatccctcctggtactggagcacctttacctgcttctggaaatgtcaaccaagggactgccccacctaggcccactgcggtttcattttctccacttctaaatgtacatgaggacgatgaaccagaagacgagttctctgtgctttcccgcaggtctgcgagggatggtgcagtagcacagaacaatgtgccctctgctccaagaaatgagaggtcatacccaagcccacttcttcctccaccaccagcatctaagaggcctgtttataccgaggcaagcagtgttgactatcttagtggtgactcctacaagtcagagaaggtttcagatgatttcatcaacccaactgctccagctaacatatccacatcatcccattcaaaggcagaagcacatccacctccgagttatggtggcaggccagacagagtatctgacgacttcataaacccaactgcacctagcttctcggcgccttctcgtcctacaaatgaggagccagcccgcccatccgtgaagcggcaagagagcctacctgacgacgacttcataaacccaactgctcttcctggtttctcgtcgtcttcagctactaaggagtctggcgaggaccttccaaaggctccatgggaagcacaagctgccgcgggttccctaccgccgcctccggcgaggtacggccagagacagcagtacttcgagcagaacgtgtattctggcgggagcaacgaaggcggctacaatggactgacgacacagaccgaaggtctctcgctgaacccgcggagcagcgagaacgagaggagcgcggcacggccggcagcgtcccgccctgccaaacctgaggactcgctcttcaaggacctggtcgacttcgcaaagaccaagccttcgtccccgtcgaaaccggccaacagccgcaggacccgctagaacgactcgtgcgatgcatggatggacattgggtcgttcggatattcatttcacaggttagcggcttttagatggtaccatgaaataaggccgtctggagactggttttcattgcatatttgcattgcatgggaaattgttttggttgcgtttagagtggcagatgtcagaaacgttgcttgctcataatcctgggtgtgtgatgtctagttagctgctcctaaatttctgtgtcgttggcttccgattctcattttctttttctttcacttagctgtgtatatatatgttacccgattcgacagcaaatattcatagttgagtttgtgacttgaggaatgaggtgttcctattttcggtattggataaatt

SEQ ID NO: 14845 - DNA, 1560 bp, Zea Mays
ctcaccttccatcacggattcacggtcacggtcgaggaggaagaaacggtacctcgccgccgacccctccaacgccgacctcctcgaggttcatgaggagcttcttgctgcgattaaggatgccgaggagggtcttctccatttgaagcgctctaggctactgaagcaagtagatgagatctttccagataaggaatcaatatcccaatcacccgaagttgctattgagtcattagatccagatgatgttgagccagaaccactggagtcacatgatttttcagttggatcaaagtgtagattccggcacaacaatgggcgctggtataatggatgcattataggctttgaaggttcaggcgatgcaaggatctcatttctgacacctacatctgaaaatatgtcgatatgcaagttcttcctacagcagcgatgtcgatttggtagtaactgccgcatgtctcatggtattgtaatgccttctaaagccttgaagcgattcactccaactaggtgggagcagtccttggtaggctccagcatactggcaacttctgggtataactctggcctttggaggagagcagagcttgagtcatgggatgataatctgaagattggccaagttgtttttcaagatgatgggagttctgcgagtctgccaagtgattctctttctgtctcggaatacgctgacatgagtgacgaagatgaaggaagcttaagtgacgaagaatctgagttcagtgacgatgctgatcaagaggacggaagtgttcatcagggtcttggccttttagaattcacaaattttagtggcattcagacagataccatgatcttcgcaaaatgggagcaccacaccaggggtgttgcctccaaaatgatggcaaaaatgggttaccgagaggggatggggcttggtgtgtctggccaaggcatgcttgatccaattccagttaaggtactacccccaaagcaatcacttgatcatgcacttgcttcaagcgaggctgacggaggcagtgggaaaaagcgcagtaggggtgggaaaaggaagcgtgagaagaagtttgcagaacaggccagggctgctaaagctgaagaagctgagagatctgtctttaattttatcaacagccatctagtaagccaagaaggttcgaccaccaaagttagaaagggttcatcagttgagaccaatggactcgctaagaaggaagacagaagatccttggttgcatacggtgaggaagtgaaggagctgaggattcgagttgagaaactggaagagatgaagaaccgtaactgcaaagacaaggcattctttgaagcagcttcaaggaaactggaagagactcggaaggcactcgctgatgctgaagctacccacgcttcagcgacgagtgcagttactagaaaggagaaagagaagaaatggttgaaattctgatgtcaatttcatgtgtgccaacgcttctctgtctgtgttctgacaagaacgtggcatgatgtatgcaacttacaattgttccccatggtacgaggacgtcacgaatg

SEQ ID NO: 14846 - DNA, 2196 bp, Zea Mays
tgtgaccatgggatccaagcagggcctaagttcttgaaggttcgtcctttatttgaggaacatggagatgttcttgaagttgctctaattaaggataggaagaccggtgaacaacaaggttgttgtttcgttaaatatgctacttctgaggaggcggagagggccatcaggggtctgcacaaccactacactttacctggagcaatgggccctattcaagttagatatgctgatggtgaaagggaacgacatggggccatcgagcacaaattatttgttgcgtccctcaataagcaagcaactccaaaggagattgaagagatatttgccccatatggtcatgtggaagatgtttacattatgagagatagcgtgaagcagagccgaggttgtggctttgtcaaattctcatcaaaagaggcagcagtggaagctatgaatgcccttagtgggacttacacaatgagggggtgcgagcaaccattaatcattagatttgctgatcctaagaggcctagacctggagaatcaaggggtcgccctgcatttggaggtcctggtttcagtcctcgatcggatgcagcacttgttatcaggccaacagccaatcttgatgaatctaggggtcagcatatgcttcctgaatcttggcgtccatcaagtccaaggccaatggcacctaaccaatataataattttggatctgacaaccccttggcacttagtggtggcactgtaacatcagcagatactgctacttttcggcctccgatgttccctggaaatggctccttgtcaaatcagacggctgtgccaacttcgtcacacatgggcatgaacactcccatggtacaagaacaccatctacgaggccaacagatcccatccctgcaaaagccacctggtccaccacagaattttgctgtacaactgcagaatgcacagccaggacagcctctgcaggggcatattccacagattgggcagcttcaggccccacaatccacgggacctgtttcatttggccagaatatttcatctatgcaattacctggtcaacctcctgcatcacagccattgatgcaacggaatgcttctctaggtgctttacatgcccctccatctggacaatccaatccaatgcaagctgtccctggccagcagcaacttcccaccagtgttgctccccaaatgcttcagcagtcgatgcagcagatgccttcacaagcgccacagttgctgcttcaacagcaggcagctttgcagtctagttatcagtcttcacagcaggcgatttatcagcttcagcaacagctacaactaatgcagcagcagtctaacctaaatcagcaaccctctgcgcaggttggttcatctgcagtttcttcaacatgtaactggacagagcatacctcccctgaaggttttaagtactactacaatagcattactcgtgagagtaagtgggagaagcctgaagagtatgtgctgtatgagcaacagcagcagaaactgcttttgcttcaacagcaccaacagaatatcgctgtacagcaactgcagtcaccgccacagggtcaatcacttccatccatgcaaccgattcaacagcttccccaggcacaaggacaaacacaaatgcatatgaaacagcaggaattaaattattctcaatttcaggcagctggttccattgatcccaacaggattcaacagggcattccagctgcgcaagaacgtgcttggaaaaattaagtctgcaggtcgcaataataaagcgctagtcaaagactggggaagtgtacaagcccttgtgctgcccaatttcagtgcctgcacagcctttcgccaacgctgatgagtgtaactccggatttagatttagactgatacgtagatggtagatcccgtatgtgtacattgttgcaacttaggtcatgtactcgtgtatatttttcagcgtgctgccgtgctggtgtccgtacctagttggtagatgtcgtcacttgtgttttattttcgactgtggcatgatttgttatgttcggcactacgtgtgacgctctggttcttcgtgtgctgtgttgataggggttaggaggaactcatgttgactcgctggccatttctcagagtaagcggacatttgactcgcgaaggactagtttggcagtcagatttccggaggggaactcg

SEQ ID NO: 14847 - DNA, 3085 bp, Zea Mays
tttgacgtctggaactgttgtagagggcacaatacaacaattgtttgaagggcaccacatgaactacattgagtgcatcaatgtagatttcaaatcaacaagaaaggaatccttctatgatctccagcttgatgtcaaaggttgtcaggatgtctacgcttcatttgacaagtacgtagaagtggagcaattggaaggtgacaacaagtatcatgccgataagcatggtctgcaggatgcaaagaaaggagttctttttatcgacttccctcctgttctgcagcttcagctaaaacgttttgaatatgatttcatgcgtgacacgatggtgaagataaatgatcgctatgaattcccacttcaattggaccttgatagagatgatggaaaatatttatctcctgatgctgacaggaatgtgcgtaacctttatacccttcacagcgttcttgtccatagcggtggtgttcatggtggacattattatgctttcatacgacctaccctttctgatcaatggttcaagtttgatgatgagcgtgtgacaaaagaagatgcaaagagggcactggaagaacaatatggtggtgaggaggagctacctcagacaaatcctggcttgaacaacactcccttcaagtttactaaatattcaaatgcatacatgcttgtgtacattcgtgaaagcgacaaggacaaaattatttgtaatgtggatgagaaagatatagcagagcatcttcggattagattggaaaaggaccgtgaagagaaggaacgtcggaagaaggaaaaagctgaggcacacctctataccataatcaaggttgcaagggatgatgacttaaaaactcagatagggaaagacatatattttgatcttgttgaccatgataaagtcccaagcttccgtatccaaaagcagatggcctttgctcaattcaaggaggaggtagcaaaagagtttggtattcccacacagttccaacgattttggctgtgggccaagcgacaaaaccatacttaccgacctaacaggccattgtgtcctcaagacgaagcgcatactgttggacagctaaaggaattggtgaacaaggcccacaacgctgaattgaaattgttcttggaagttgaacttggactggaccttaaacctcttcctcttccagacaagactagagaagatatatttcttctcttcaaactctatgaacctgaaaaggaacagctacggtatgttggtaggctctttgtaaaggcttcaggaagaccacaggacattctgccgaagctaaagatgttggcaggtttttcacaagatgatgatattgaactttatgaggaaattaagttcgaacccaatgtgatgtgtgaatacattgataacaggcttctgttccgatcttgccagcttgaagatggggacataatctgttttcaaaaatcttcaaaggcagatagtgctgaccgatatcgatttcctgacgtaccatcctttttgacgtatatacgtaaccgacaggtggtccactttcgttcactggagaagcccaaggaggacgattttttcctcgagatgtcaaagattttcacatatgatcaagtcgtggaaaaagtagctgaaaaacttggcgtggatgacccatcgaaaattcggcttacatcacataattgttattcgcagcagcctaagcctcagccaataaagtacagaggcgttgaacgtctactggacatgctgattcattataaccagacttctgatattctgtactatgaagtattggacataccacttccagaattacaagcgctgaagacattaaaagttacataccatcatgccacaaaagatgaggtgtcagttcacagtataagattgccaaaaaacagcactgttggcgatgtgctaaacgatatcaaaacaaaggttgagttatctcatcccaatgctgaactgagattacttgaggtcttttatcacaagatatacaaggtgtttgcaccaaatgaaaagattgaaaacattaatgatcagtactggacactgcgtgcggaggaggttccagatgaggaaaaaaaccttggtccctttgatcgattgattcatgtatatcattttacaaaagatactcaaaaccaaacgcaagttcagaactttggagaacctttttttatggttattcgtgaggatgagaccctatcttctatcaaagagcgtatacagagaaagcttaaggttccagatgaggatttctcaaagtggaagtttgcatacatttcacttggtcgtccagactattttgaagattcagatactgtagctttaaaatttcagagaaacatgtatggagcttgggagcagtatcttggactggaacatccagacacagctcctaggaaggcacacacaattaatcagaaccggcattcatttgagagacctgtaaaaatttataactaggcatgatagaaatttgagcaatgagctgccaagcaagggctaaaattgctgtcctgaaataaagcgtgccggggcatgttgctcaggtttttcgtggagctggtgagctagttcatgagactccaagtatgatcggggcggcttctcatctttccctgcttttccccggatacatataaagttgtgcagagatgaccccaccgaacaattgtctttagtagataagccagtacttcccgttagatgactttatacagtcgaatagccggcattttagtcgatctttccgttctccagttgctgttggtgctaggaggccttgagctgttgagggtacttgccctgctgtatattatgacgtagagtgtacaagtctttgttgttgacaattacacggtgttttgtaatttcagtgatacacttccaggtccttcagtacgtacttgcctggatggtgtcaatttggcattctatgttagatattgatccatctgttctaaattaaaattataaggcagtttgacttttttaagatatactgcctccgattttctattagttgtcgtttagaatagtgacacggtctccatattataacgtgtctccatattataactt

SEQ ID NO: 14848 - DNA, 1371 bp, Zea Mays
aactgaagagggggcgagtgtgacgacttcgaaggattcattcacgcgctgctttaagtcgaattctccagaaccatggaactggaacatatatttgttccctttatggtgcttcggtgtagtaattcgatatggattactcttcccactgaggtccttaacgcttgcaataggatggttagcattttttgctgcctttttccccgtgcatttcctattgaaaggtcaagacaagttgagaaataaaattgagaggaagttggttgaaatgatgtgcagtgtttttgttgcttcatggactggagtgatcaagtaccatggaccacgcccaagcacacgacctcatcaggtatttgttgcaaaccatacatcaatgatagatttcattattctggagcaaatgacagcatttgctgtcatcatgcagaagcatcctggatgggttggatttattcagaagactatcttggaaagtgtgggttgcatctggtttaaccgtaatgatctccgggatcgtgaagttacggcacggaagttgcgtgatcatgttcaacatccagacaaaaaccctctcttgattttcccagaaggaacttgtgttaacaaccagtatacggtcatgttcaagaagggtgcctttgagcttgggtgtgctgtctgtccaatagctatcaaatacaataaaatatttgttgatgccttttggaacagtaagaagcaatcttttacgatgcacttggtccggttgatgacatcatgggctgttgtgtgtgatgtttggtacttggagcctcaatatctgagggagggagagactgcaattgcgtttgctgagagagtaagggacatgatagcagctagagctggtcttaagaaggtcccgtgggatggctatctgaaacacaaccgccctagtcccaaacacaccgaagagaagcaacgcatattcgccgaatctgtcttgaggagactagaggagaaatgaagagacatcaaacactacaagcgcatttggttagtggtttaccgttcagctaccttgtaattcggttggctccccgaaaaaaaaaagtccgggacacgtcaagtgcccagctcagttttgttgtaaatttattagaaatttgacagaattggtagtgtgaacttaccaagaaaggaagaatagccgcatgtgttgtggctgttcattctatgattggttaggaattgacacttgaaacacggtactctattcagaggctgtgtccgtatttatgaatcgacgatgtaatggttttaattcatgtgattattgattcaataatatgagtagattacatcctctgtaccttcttgagatttaaaacattggatttgaagaggttgcca

SEQ ID NO: 14849 - DNA, 1031 bp, Zea Mays
cttggagaaggcttataacgaattatcaagaaatgttaagtggtgggctttgggaaaacataaggttccaacgaattgtgctgttgggattggtctacctgtatactccactttcagagctatagagaagaaggatgaacaagagaaagagcggatgcttttgtattgggcagcatatggatcttttagcattgctgaagtgtttgcagataagcttctttcaagtgttcctctctattatcatgtgaagtttgctatccttgtgtggctccagttcccttcaaacagtggatcaaagcatgtatacaaaagatacctgcgcccatttttcctgaaacatcaagcaaaaattgataggtttctgaatattctgtcaaaggaacttacgaagtttgtgagcagccatgaagatgaaattcgttttatagaaaatatggctatcagaggggctacaacagcaaaccacatcgtaaatggcctcgaccaacctgaagaaacacaagcggttaatacaattgaaggtccaaatacaactgtgacagaagaagctggtgtgtcgggaactgaaacttaagcaaaactttctatctctgctcatgatcccagacgctgcttcaaaattgttgttgaggtcacccagcttgtttggattgtgaatactactgttcctgaaaggctagatctagaggcaatgttttagctttaactagatattcatatagcaagtaaaatcggtgttggacaaatttattacagtgtaaaaatgacccggtgtggaatgcagttcccagcaatgttgtcatttttcacgtgggaataatttgaagtctgcgatgaagaatctttctaaagcatgaattcgtgttggttagcaattagcatgctttagaatataaacttgtgcgtgcttgatcttgtagatcaatggtgcatcataattcattcaaatttggtgacttcgttcttcattatagcttgtgaagaatgatttaatgatagatcaacttattctgtcttaaaaaaacaaaaaa

SEQ ID NO: 14850 - DNA, 172 bp, Zea Mays
gttttactttctactatatttataacggagggagtatataataacaaaatcaaaatatgtgggaagacttgtatgtggatgtctgcaacacattgcacaactaatgcatatatataccacgtttcacacacttaaatcataggagggggagacgtgaccatctaccagccag

SEQ ID NO: 14851 - DNA, 880 bp, Zea Mays
cacggacgcacacgcgcgcgcgcagggaatcaatcacgcacacgcgcacgcaccgccacccttcccgaaaagtctcctcacctcccggtcccggcctcccttcctctctctccccccctctcaaacatccccgcgccgatggatctccgcctcgcccactaggcctccggcgcgaccgagggtgggcagggggatggggctcctcgggcggaggacgttgctgcggctcctcgccctcgcttccgcggccgtcgccgtcgccgtcaccgtggaagcctacgagggcgacgctgatccgctctacaggcctgaacatgaaggtttgtactgtgataatcattgctcagtgtctcctatgggcactgtgggctgtcatgactcggcatccttcacggctgaagatcatatttgttgccatcggaggtgcggctgcggtacttctggaagcttctgacattcctccgcgatggggatatgtggatggccgtgctatatgccttgctgtggctatccccctttcgtacctttggtggagctttgccaaggaagatgcggagatgcgaacgtcagcaatcctgaagaaggcacgttaacaagtcgcctgtgtgataatttcatgcctgcgcccagccattgtaaagataaaagtttcacttgtaatcttaggtaactactaacttagcatgtgaattaccgtcttatttttgttccacgatgttcttgtcccagttcagaaggccatgttgtttaaggggccacttctattctttaatttatacagcaactgccacttggtaggctcgtgctcatcaactataatctcagaagattgttaccatgggttatcagtgagtggctatcataataatgtctttttttt

SEQ ID NO: 14852 - DNA, 844 bp, Zea Mays
aaattagaacatcgagctgttgaggcatcaaatgcactagctagaatccagagagctgctgatcaaagctcatcaagagtgctggaattggagcacaaggtggctgtgcttgaggttgaatatgcttcattgcaacaagaactgcaggagatggaagctcgtaaccgccgcacacagaaaaaaccttcagaagaagccaatcaagttcttcagatgcaggcttggcaggaagaagttgagcgtgcacgccaaagccaacgagaggcagaagcaaagatatcatcgttggaggctgagttacagaaaatgagagttgaaatggctggaatgagaagagatgcagagcattattctagacaggagcatgttgagcttgagaagagataccgggagctaactgacttgctgtaccacaagcaaacacaattagaatccatggccagcgaaaaggccggattggagttccaactggagaaatcattgaaacaatttcgtgaagtgcaggtcgaagcagaaaggagtaaagctactcgcagatcagcatcatcgtgggaagaagatactgatatcaaggcattagagcctcttcctctacatcatcggcacatggcaacagcaaatcatcagttacaaaaggctgcgaagcttttagatacaggcgctgttcgtgcaacaagatttttgtggcgacaccccgttgcacgagtcagcgtgctattctatctggcatgaaccacataacttcaatttcctgtgtttaccctcccccccccccccccccctctttttctaccaaatcaacacttctttctgacttaaaatctgtttccgccacaccaggtgt

SEQ ID NO: 14853 - DNA, 61 bp, Zea Mays
gaagctgaaagtggagttgcttcaagttttatggaggtttacgtccgtggtcaccatggcc

SEQ ID NO: 14854 - DNA, 2304 bp, Zea Mays
ataagaatcagaagaaaaggacccgagcctagggttcggtctgcctcccacagccgccgctacgctttggctgcatcactcgctcctcttcggagcctccctttcgccggcggcgtaggaagagatggcagagcgtttgacccgtatcgccatcgtcagcgaggacaagtgcaagcccaagaagtgccgccaggagtgcaagaagagctgccccgtcgtcaagactgaaatgtccatttgatgccattgaaatcatcaaccttccaaaagacttggaaaaggataccactcaccgatatgggcctaataccttcaagttgcacaggttgcctgtcccaaggcctggtcaggttttgggccttgttggaacaaacgggattggaaagtcgacagctcttaaagtgttggctggcaagctgaaacctaacttggggcgcttcaaaaacccacctgattggcaggaaattcttacatactttcgtgggtctgaacttcagaactacttcacacgcatattggaagataacctgaaggcaatcatcaaacctcagtatgttgaccacattccaaaagctgttcaagggaatgtaggacaagtacttgaacagaaggacgagagggatatgaaatctgaactgtgtgttgatcttgaattaaaccaagttattgaccgaaatgtaggagatctttctggtggtgagcttcagagatttgcaatagcagttgttgctgtgcaaaatgcagaaatctatatgttcgatgagccatcaagctaccttgatgtgaagcagaggctaaaagctgcacaagtcgttaggtccttgcttaggcctaacagctatgtcatcgttgtggaacatgatttgagtgtcttggattacttgtccgacttcatttgctgtttatatggcaagccaggtgcttatggtgtggttaccttgccattctctgtccgagagggtatcaatattttcttggctggatttgttccaacagaaaatcttcggttccgagatgaatctcttacatttaagattgcagagactcaagaaaatgctgaggagattgagacgtatcagcggtataagtaccctactatgagcaaaacacagggaaatttcaagcttactgttgttgagggtgaatttactgattcccagattgttgttatgcttggtgaaaacgggacagggaaaactacattcatcagaatgctggctgggttgttgaagccagacacggtggaaggaactgatattgaaattcctgaattcaatgtgtcgtacaagccccaaaagattagcccgaaattccagaataccgtgaggcatttgctgcatcagaaaattcgggattcctatatgcatccgcagtttgtgtctgatgtgatgaaaccactgcaaattgaacaactcatggaccaagaggttgttaatttatcaggtggagagctccaaagagttgctatatgcctctgccttggaaagcctgcagatatctatctgattgatgaaccaagtgcttatcttgattcggagcagcgtattgttgcctcaaaagttatcaagagattcattcttcacgcgaagaaaactgcatttattgttgagcatgatttcatcatggcaacatacttggctgacaaggtcattgtttatgaggggcgaccttctattgactgtactgccaacgcaccacagtctttagtatctgggatgaataaattcttatcgcatctcgacatcacttttagaagagacccaaccaactataggccacgtataaacaagttggaatcgacaaaggacagggaacagaagtcagccgggtcctactactacctcgatgactaatgaggaagtgcagattcttcttggagagccatatgtcgcataatctttccagagcgtggaaaggagaagctactttgaagctaccactgcatcatggcatgtgacttgttgaataattggttgcaggagtagagtgcgccggttataacttataaagcagagcatgccgtgttgatactgagttttttgttggcttgacctatatgaagagaaggatcggtgttaaaatgagatttgcgagggggaactaatttctgtttttaagcaatactgtactgtcgttttgctatcaagtatatttgaccctcgattatatagattacattgaagtttttgggcaacaatgtgaaatcttgtgataaatctctgtgcttattggttatctgattgtaactcgtcctttgtaaactttgtttgaatgagcaagtgaactgattgtcgatagtttgtt

SEQ ID NO: 14855 - DNA, 840 bp, Zea Mays
cctgcacgcagggacaacctcaaacctgatgaaaatcgtatcgatgtagtagaaactttctacaatcttgaggtcaatgactttgaggcaaagatagtactgaagcctctagattacgagcggaaatggaagttccagtacaagcccatcagtggcgacatacagctgctttccaagaagataccagtcacaaagtttctaaatctacaggttggcattggccacaattttcaactgaatgcaactggatggaagtggaagctttctacttgcctggggggagatggtgtgtctcagataagaaacaagtcaaaactcagcttgttcccagggtttgatttgaggattggatggaaagcagagtatgtgcttcctgagattcatggggctgttggcacaggagaaccagccttcagtatgaactatggaaggttgcatgcatcgatagatcgggtcgaggctatcgttactcagtcagatcagtattgatcttccagtgcggaaaggcaagggagtttcttgatcaataacaaacacgttgagtagatcccagggttacaagaagcattctgaagctccgtgcctgatgtacagcaaataccaaagtttaggaccacgctttgagaagctgtttgagttctccaaagcttttgactttgagcggcttctgttgcttctgaaagcgtaactataaataatgtttatcctgcttgtgtacgaaacaccagagtatcagtaattcagtatagtgagcgacgtcaaagcatgatctctatgcatcaagatttgtcttctaagctattcggaagtacgcttaaaccctgcataagtggccgcagt

SEQ ID NO: 14856 - DNA, 450 bp, Zea Mays
gacagcatttcgcataccaagtggagatatcagttgcagcacatgacaccaccggtgggatggagaccaaaatactggaggctgcagtgatagctaggcttggaatagacgtgtatattaccaaggctggaacagaacactcgctgagggccttgaagggagatgtgagcaccgactcggaagattggcttggaactattatacgctcttccaaatagatttcttgttgcaaaaacattcggactggtttactggcgattttcccgatgttatatgagcagtgatgagccttgggctttcgatgatgatccagcacgggtctattccctactgtggtcgtagtttggtttacaagcgtcagcctgatgttacaaatgccgttcagtaaatttgttttgttttctgaaaagataagatgcattggtcgcaagagaggaaaaaattgatttt

SEQ ID NO: 14857 - DNA, 2127 bp, Zea Mays
cgatgctactgcctctttcaagcaacgcgactcggtggaaatggagttcttcaccgagtacggagaggcaagccagtaccagatccaagaagtcattggtaaaggcagctacggggtagttgctgcagctgtagatacccgcaccggtgagcgggttgctatcaagaagatcaacgatgtgtttgagcatgtctcggacgccacacgcatactgcgggagatcaagctccttcggttgcttcgtcacccagacatagttgagattaagcacatcatgctccctccatctcggagggagttccaagatatttatgttgtttttgagctcatggagtctgatctccatcaagtgatcaaggccaatgatgacctcacccctgaacatcaccagtttttcctgtaccaacttcttcgtgctctcaagtacatccatgctgctaatgtatttcatcgtgacctaaagcccaagaatatactggctaactcggactgcaaactgaaaatatgtgactttggtcttgcccgtgcatcatttaatgatgccccttcagctatattttggacagattatgtggcaacgaggtggtaccgggcacctgaactatgtggttcttttttctccaaatacactcctgcaattgatatttggagcattgggtgcatatttgctgaacttctcactggaaggccactatttcctgggaagaatgttgtacaccaattagatattataacagatcttcttggaactccatcatctgagaccttatctcggatccgaaatgagaaggccaggagatacttaagctgcatgcggaaaaaatatcccgtgccctttactcataaatttcgaaatgccgatcctttggctcttcgtcttttagagcgtttacttgcatttgatcctaaagatcggcctactgcagaagaggctctagctgatccatactttgcatcccttgctaatgtggaacgtgagccatcaagacacccaatttctaaacttgagtttgaatttgaaagaaggaagctggccaaagatgatgttagagaattgatctatcgagagattttggagtatcatccacagatgctggaggagcacatgcaaggtggagaacagattagcttcctctacccgagtggagttgatcggttcaaacggcagtttgcacatcttgaggagcattatagcaagggagaaagaggttctccactgcaaagaaagcatgcttctttaccaagggaaagagtggttgtatcgaaggacggtgatactgatcaacatattaatgaccaggagagaagtgcagattctgtcgcccgcaccactgtgagccctccaaggtcagaagacgacgacatgagcgatgtgaaatccacaagcttaagctctcggagctacctgaagagtgcgagcataagtgcttccaagtgtgtcgttgccacgaagaaacacccggaggacgatggaatcgctgaggaaatggaaggcgccgtcaatggattgtctgaaaaggtctccaggatgcactcgtaagcaggactgcccctggcaacagcaaccttgttgcaaggtttctgtctctggtacactgtattccgacgacagccttggaaaggcaaacactgtatgtcacacagcagtacagcacactgtgctgcgaggttgggttttgcttgcgtacatccatccacagctagttcgactttacctgggtggaagaggaacacaccaccgcctgatggccctttcttcatcgtctgcatttccaccgtgtcatgccagcgctgcgtggcacctctagaaggtagaagccctgcatggattcatgaagaattcctaagatgtagcactagtcagtgcatggaggaaacatagtcggcctgtcgaccatgagatgttttcttgcaaatggagtctggacctatggttttcagttttattacaacggcttctgccgtaggaagtgtcagcagtgtatcatccctgtaatacccaatttataagagaccatataaaaggagaaaaatcatttgctttatgtatgtgtataacatatccacttatcatcacatgtgaatgccatatttaaagataaataactaataaaaagttataccact

SEQ ID NO: 14858 - DNA, 3096 bp, Zea Mays
tttgggcttaaactgaatatgggttcggtcgtcggcccacctagttccttatccgtcgtctcctacgcctccatccacactccacagccacgccacagtcgttgcccaccacccagagcacgcggcggcttgtcgccgtgcgcgccgccaccatcaccacacgaggcgccggagaaagacatcaagcgcacgcccatggccatgactcctcacgcctcggcggccaccgtagccgttacccctgcgttgcgctttccccacactttgtctgccacgcggaagaagtacgcagacaccgtggcgcgtatcaactccatggagctcgaggtctccgcgctctcagacgctgatttgcgtgcacgcaccgctgcgctccaggaccgtgctcgctccggggaatccctggattcccttctccccgaagcatttgctgttgtgagggaggcttccaagagagttctaggcctccggccctttgatgtgcagttgattggtggtatggttctgcacaagggggagattgctgaaatgaagaccggagaggggaagactcttgtggccattctgccagcatacttaaatgctttgagtgggaaaggagtgcatgttgtcactgtaaatgattatctcgcaagacgtgattgtgagtgggttggtcaagtcccccgatttctaggactgcaggttggcttaattcaacagaacatgacacctgagcaaaggagggaaaattactcatatgatattacttatgtcacaaacagtgagcttggttttgattatctaagagataaccttgcaatgactgtagatgaacttgtcttgaggaacttcaattactgtgtgatagatgaagttgattcaatccttattgatgaagcaagaacacctcttataatatcaggcctagctgaaaagccaagtgatcggtattacaaagcagcaaaaatagctgaagcttttgagcgagacattcattacacggtggatgaaaagcagagaaacgttttacttacagaagaaggttatgctgatgctgaagaaatactggacatagatgatctgtacgatcctcgtgaacagtgggcttcgtatattctaaatgcaatcaaggctaaggagctcttccttaaagatgtcaattacattgttcgtagcaaggaagtgcttattgtagatgagtttactggcagagttatggcgggcaggcgatggagtgatggtctccatcaagcaattgaagcaaaagaaggtgtacctatacaaaatgaaaccataactctcgcatcaataagttaccaaaacttctttcttcagttccccaaactatgtggcatgactggaactgcagctacagagacccaagagtttgagagcatatataaacttaaagttactgttgtcccaacaaacaagccaatgatacggaaggatgactcagatgttgttttcagagcaacaaatggaaaatggcgtgctgttcttgttgagatatcaagaatgaataaagttggccgtcctgtgcttgttggtaccaccagtgttgagcaaagcgaatctttatcaaagcaattgcgtgaagctgggattcctcacgaggtcctgaatgctaagccagagaatgttgagagggaggcagagatcgtagctcagagtggacgccttggtgctgtgacaattgctaccaatatggcgggacgtggaactgatattatccttggtggcaatgcagaattcatggccaggttgaagttgcgtgagatccttatgccaagagtcgtcaatccaatagatggtgttattgtatccaaaaagcagatgccaccaagaaagacatggaagacaaatgaaagcttgttcccatgtgaactttcaaaagaaacattatcgtctgtcaaggatacagttgaaatggctgtcaaagaatggggagataaatcattaactgaactggaagcagaagagcggctgtcctattcatgtgagaagggaccaacacgtgatgaagtaatagcgaatttgagaaatgcatttgtgaagatagcagacgaatataaagtttacactgaggaggaaaagcagaaggtcattacagtaggtgggcttcacgtagtaggaacagagcgccatgaatcacgcagaattgacaatcagctccgtggtcgaagtggaagacagggggatcctggaagctctcgcttctttcttagtctcgaggataatattttccggatctttggaggtgacaggatacagggtctgatgcaagcattccgagttgaagatcttcctatcgaatcgaaaatgctaacgagggctctagatgaagcgcagcggaaagttgagaattacttttttgacatcaggaagcagttgtttgagtatgatgaggtattgaatagccagagagatcgtgtatatgcggaaagaagacgtgctcttgcatctgacagtcttcaatcacttattgtggaatatgctgaattgacaatggacgacatattaggggctaacataggacctgatactccaaaggaaaattgggacctgaacaaacttatagctaagctgcaacagtattgccatctgttggatgacttgacaccagaattgttggagggcaaaagctcaagctacgacgatttgcgggagtacctgcgtaagcgagggcgtgaagcttacttccagaaaactgttagttatttctccttttcctttcatggatattgttttttcgcatggttcaaaggttttaagaagttcaacaacaacaacatcaacatagccttttagtcccaaacaagttggggtaggctagagttgaaacccaacaagaagtcaccaaaaagagaaagagagagaaaggggaggggaaaaagtttttgagagaactaaaagggaaaaggcctaatcacagttcgggcacgtggatagtttttttccaagcacttctatccaaacacaactcctttggatattccattccttcaagtcccttttgattgcttccttccatgtcaagtttggtcgtcctctacctctcttcacattattgtcctgtcttatgatgcctttgtgcactggtgcctctggggg

SEQ ID NO: 14859 - DNA, 472 bp, Zea Mays
ccaagctgtgaactaaattgactcaagcatttggctgggcatatgttaacaattggcacaacacatgggagcagctgtatgtgtactggatatgcccctttattggggccatgcttgctggatggatatttagggtggtgttcctaccaccggcacctaagcccaagaccaagaaagcatgattactcgtttatggatgctggtttagaagaaataagaaatagaggaaggtcacataagctcatgtgttgtacttgatttcctcaacttcccacaaactgggtgttgtgctctgttacttatttctcatcaataatttatgtttacttgtaattttgggctagtcaggatgtgtttttgtccttttatttagtttttatatgttttctttatgagtacagtaaaatcattgatctcaactgagttggaaatgagctgaggttggctcggcttgctcctctagtgagcctga

SEQ ID NO: 14860 - DNA, 724 bp, Zea Mays
gaattttaactagttctccacgaactcactcaagcagaatcgagttaagctgaatgcaaaccgtgttgttattggcacacttcggggattcgaccagttcatgaatctggtgatcgacaacactgtggaggtcaatggaaatgacaagacagatattggaatggtggttatcaggggaaacagtgttgtcatgatcgaggcactggagccagttgccaagtcgcagtgaatccttatttttcagctgatatagtcgcagcatgaaaactgatgtaaatgctatgagtgaaccctgttgtacttcggactcgtgcttttgcacagcaacataactcggctaccagcacccctgtttcaatggtgacttcattactgccttggcgctaacattggcaatgcatcatttcgtctattgttctacatagccggtgccttgtgaggcacatgagatctgtgattcatcgtcaatgctctgtttggatattgatattagagagcatggaattcaattagattcaataccaaattagctatgatattaaaatgagatgtcaccgtaaaattagattcaataccaaattctattgtttggatgtcactgtattggagttcggaattgagtggtctaatttcatgcaatatagttcggaattgagtggtctaattccatgcaatatagagttgatctgtaatgggagaggagtttttagttatagttcaatac

SEQ ID NO: 14861 - DNA, 1868 bp, Zea Mays
atctgatcgaatctatatgcatgcagtggacactttctctggtatcagaggatcaatgtccaattattatgatgactacgatgacattgacgggatggaggatgattatgatatggatgatcccattgatgacatggtagacgagcagcaagggattagggattctgatgtggaagataatgattatggacaaccaaatgataagatcccagatacttcatcagcagatgcaagaaaaggaagggacattcaaggaataccctgggagcagataaacataacccgtaaaaaatacagacagtccagattagaacagtacaaaaattatgagaatgtacctaactctggagaagaagctatgaaggattgcaaaccaacagagaaaggtgggatatactatgagtttagacgaaatactagatcggttaaatcaactattctacattttcagcttagaaatttggtatgggcaacgtccaagcacgacatctacctagtatctcattactcaattcgtcactggtcagcattgagtggtgtggatactgaacttatcaacgtccaaggacatgtggcaccaagggagaagcatgcaggaagtttattagaggggttttatcagactcaagttagtaccttgacagtcaaggacaatttactggtagctggtgggtttcaaggagagctgatctgtaaacaccttgatcaggaaggtattagtttttgctgtcgaacaacttatgatgataatgctattacaaatgcggttgagatatttaatacctctagtggcgccgttcacttcatggcatcaaataacgactctggtgtgagatactatgacatggagagattccagctattcaagcattttcagtttgaatggccagtgaatcatgcttcgttgagtcctgacagaaaggtggttgttattgtgggtgatgatcctgatggtctacttattgatgcaaactctggaaagacagttcattccataaaaggacatcgggactactcatttgcatcggcttggagccctgatgggcgaacatttgctaccggcaaccaagacaagacatgccgaatctgggacgtgaggaacctttcaaaatccgtccatgtgttgaggggtaaccttggagccatccggtccatccgcttcacctcggatggccagttcatgtccatggctgaacctgctgactttgtgcacatctacgacgtgaagagtgactacaacaaaaggcaggagctggacttctttggcgagatatccggcacatcgttcagcccagacactgacacgcttttcgttggtgtgtgggataggatgtatggcagcctgctacaatttggccgcctgtacaactactcgtatcttgactccctgttttgatgtggatccaaacgggtgttgaactgttgggttttggtgtacctcagtgctctgaatgttgtcagcataaattaggtggttatccctaatcaggatattaagttgcaaagataattgaattaataaatgttgtaccgtgcccgatgtgtatatgtaaaaagaaatgtatacatgtgcctattgagagaccgagttgagatgtgacttaggggttgtttgtttgggattataatctattcagattatataatctaatttatttgttttaggggttgtttgtttgggattataaatataatctaacttatttgtttgtttgagattagtctagcttgaaaagtatgtttgaccttgtgtgcataggattgaatacagtgtgtgtagtttcatgtagacgcaggtaatgtatgtttctgtcacgggactgaccggccgtggtaggaatgtgtgtcgaaggaaaatatcttttggc

SEQ ID NO: 14862 - DNA, 3485 bp, Zea Mays
acacaatattctcatacaagcgcccttgccccctgttcgctttcactcttgaaatcccctccgcctctcggtcaatccaccgcgtccaagcttcattcctccgcactcgaaatccaaagcgccccgccccgacccgaaccctaatcctgcatttcctttcccgccaccgcccgccccaatggcgaagccggtgaagtatgacgacgaggaggagatctcctcctcctccgccgaggaggacgatgaccagtccgccgccgccgcctccggatctggtgaggaaggggatgacgatgaggaggatgctgcggcgctgcccacggaggaggaggaagctgagggcgaggggcagcaagaggaggaggtcgacgaggaagagatcgaagccgtcactaccggcgctggagctgaggacggagaggacgccagtgccgctaccgccgctgaaggcgaagaggagtcccagtccaccgaggacgacgaatccgtcgcaagggacaaggacaacggcgacgagactgatgcagtggttgggaagcgtgagaaaacaaggctaaaagaactccagaagatgaagaagcagaaaatccaggaaatactggatactcaaaacgctgccattgatgctgacatgaacaataaagggaagggacggttgaaataccttcttcagcagacagaaatatttgctcactttgcaaaaggaagtcagtcgaatgagaaaaagcctcgtgggaggggacgtcatgcatcaaagatgactgaagaagaggaagacgaagaatacctcaaagaggaagaagatgcccttgctggtgcagggggtacacgtttagtttcacagccttcatgcatcaagggaaagatgcgtgattaccagttggctggacttaattggcttatacgattgtatgagaatggtatcaatgggatattagctgatgagatgggtcttgggaaaacacttcaaactatttcattgctgggctatctgcatgagttcagaggtatagctggtcctcacatggttgttgcgccaaagtccactcttggcaactggatgaaggaaatccaacgtttttgccctatcttacgtgccgtgaagtttttggggaacccagaagagcggaaccatataagggacaatttgctgcaacctgggaaatttgatgtgtgtgtgactagttttgaaatggcaatcaaagaaaaatctgcgttgaggcgcttcagctggcgctacataatcattgatgaagctcaccggataaaaaatgaaaattctcttctatcaaagactatgaggatttacaacactaattatcgtctcctcatcacaggcactccactccagaataatctccatgagctctgggctctcctcaatttcttgctacctgaaatatttagctctgcggagacctttgatgaatggtttcaaatatctggggaaaatgatcaacaggaggtggtgcagcagcttcataaggttgggatatagttttcgtgatcaccaattttagtaccttaaaatgaactctttataattgtttctcgcaacttttgcaaaggttcttcgcccattccttcttaggaggctcaagtctgatgtagaaaagggcctacctccaaagaaagaaacaattcttaaagttggaatgtctcagatgcaaaagcagtactatcgtgctctgcttcagaaggatttggaggttattaatgctggtggtgaacgcaagcgattgcttaacattgccatgcagttgcgcaagtgctgcaaccatccatatttattccaaggagctgaacctgggccaccctacacaactggtgaacatctaattgagaatgcaggaaaaatggttctacttgataaattgctgcccaagctaaaggagcgtgattccagagtccttattttttcacagatgaccaggcttttggatatcttggaagattatcttatgtataggggatatcagtattgtcgaattgatggaaatacaggtggagaagatcgtgatgcatccattgaagccttcaatagtccaggaagtgagaagtttgttttcttactttcaactagggcaggtggccttggtatcaacttggccactgctgatgttgtggttctctatgacagcgattggaatccccaagctgatctgcaagctcaggaccgtgcacatagaataggtcaaaagaaagaagttcaagtgttccgcttttgcactgagtacactattgaggaaaaggtgattgagagagcatataagaagctagcattggatgctttggttattcagcaaggacgattggcagagcagaaaactgtcaataaggatgatcttctgcaaatggtgcggtttggtgctgaaatggttttcagttctaaggacagcacaataactgatgaggacattgaccgtattatagctaaaggagaggagacaacagcagaacttgatgcgaaaatgaaaaagttcactgaggatgccatcaaatttaagatggatgataatgctgaattgtatgacttcgatgatgagaaggatgaaaacaaggttgatttcaagaaacttgttagtgataactggattgagccacctagaagagaaaggaagagaaactactctgagtctgactactttaagcaagcacttcgccaaggtgcaccagcaaagcctagggaaccaaggattccaagaatgccgcacttacatgatttccagtttttcaataaccaaaggctaaatgaattgtatgaaaaggaagtgcggtaccttatgcaagcgaaccagaagaaagataccattgatggtgaagacgaagatcagttggagcctttgacagcagaggagcaggaagagaaggaacaattattagaggagggttttgcgtcatggacaaggagagacttcaacacatttattcgtgcatgtgagaaatatggtcgcaatgatattaaaagtatatcatctgaaatggagggtaagacagaagaggaagttcaacgttatgctagagttttcaaggagagatacaaggaactgagtgattatgatagaattataaaaaatattgaaaggggggaagcaaggatatcccgcaaggatgagattatgaaggctattgggaagaagctagaccgctacaagaacccatggttagagttgaaaattcagtacggccaaaataaagggaagttctataacgaggaatgtgaccgctttatgctttgcatggtgcacaaacttggatatggaaactgggatgaactgaaagctgccttccgtatgtctcccttgtttcgatttgattggtttgtgaagtccagaactacccaagagttggctaggcggtgtgatacccttatccgactggttgagaaagaaaatcaagaatatgatgagcaagagaggcaagcaaggaaggagaaaaggcttgctaagggtttgcaatgatctgacatcaaacttgatatcaac

SEQ ID NO: 14863 - DNA, 3717 bp, Zea Mays
agttgtttcacttgttcaaattccaatcgcggggcaagcaaaggaggaaagcaaccaaaggcatttcgcttctcctccgacaaatccatatccagaagatagcaccagtgcgtctcctcccaagctctcggatccaacccaatggaaggcgcggaggcgcttttccccggcgacggatgcggcggtgaccccatggacttctcgtggaccgctgacggggagaagcacccggacccggcggcttgcgccagccccggccgcgacgacgaggctacctcggcctcgaccccggttccttcgccgcaggagatggcggagtccatgattctcgtgcccgggccgcgcgtcgtcatgtctggactcaggctggctgattgccgttcagatgactgtgttctcttcattaatgctggtggtggtgcaatcgaaagctgtgatccctgtgtgaaggtttctggtgattcattctttgaaggaggggatgtgatagaaacaaatgagagcatagccgaaggtggtgattgtccatttatttatcactcagcaagatacggcagtttcagctacaagttcgacggtcttgcccccggagcttattttctagatctgcattttgctgaaattctatacacgtgtgggccaaaaggaattagcatgttcgatgtcctggtgcaggacgagaagatactgtctcagctcgatgtatatgctgtagttggagggaacagggcccttcaagtgcgtgatattagggttactgttgagatgaatggtgctgttatgatcaatttcaaaggagtaagaggaagtcccatggtttgtggtatctgtattcgcaaagcaccacttttatcagcaaactcggttacaaatggcaatgtcttgtgcaaaagatgttcatctgatattgatgtctcaactacacagactaggacaagtaaactgatctcaaagtatgagaagcagattgaggagctcaccagccaatgcactatgaagtccaatgagtgctatatggcatggtcttcagtagacactaccaacgtggagcttgggagactgaaaatagagcttcaccaaaagggtgctgaaatggagaatcttgtgcaaactcttggtagagagagcgaccaactaagaaatgtttctcgtaagtacaaaaatgacaagaaattgtgggttgctgctatatctaatttggaaaggaaaataaaggccatgaaacaagagcagcaattgttgtcccttgaagcacatgattgcgcgaatgcaattcctgatttgagcaagatgatcggggctgttaagggcctagttgcacagtgtgaagatttaaagttgaagtactatgaagagatggataagaggaagaaacttcataatattgttcaagagacaaaaggaaatatcagggttttttgtagatgccggcccttaagcaaagatgaggtgtcatcgggtcagaaatgtgtagtggattttgatggatccagtgatggtgacattgtaattacaaatggcggaactaaaaagacctttaagtttgatagagtcttcacgccaaaggatgatcaagatattgtgtatgccgatgcgtctccactagtcacatctgtcttagatggctacaatgtatgcatctttgcttacggacagacgggaacaggaaagacttttaccatggaagggactgagagtaataggggtgttaactacagaactctggaagaactgttcaatattgcagaggagaggaaagaaagcgtcacatatgacttatctgttagcgttcttgaggtttacaatgaacaaatcagagaccttcttgccacgtctccatctaaaaagctggagatcaagccaaacagtgaaggacaaaatcatgtccctgggttagtggaggccaaaattgagaacataaatgaggtttggaaagttttgcaaactggaagcaatgcaagggctgttggttcaaacaatgttaatgagcacagcagtcgctcccactgcatgctatgcatcacggtgagggctaagaaccagcttaatggagagtgtacaagtagtaagctttggcttgtagatttggctggaagtgagcgtttagccaagactgacgtgcaaggcgaacgacttaaggaagcacaaaatattaacagatcactttctgcattgggtgatgtcatttcagctcttgctacaaaaaacagccatataccctacagaaattctaaattgacacacttgctgcaagattctctaggaggagactcaaaagcattgatgtttgtgcaaattagcccatccgataatgatgtttcggaaacattgagttcactaaacttcgctagccgtgttcggcgtattgaattgggaccagcaaagaaacatgttgatactgctgaacttcaaaagaccaaacagacgcttgaaagagctaagcaagaactcaggcttaaggatgattctttgagaaagctagaagaaaacttacaaaatttggagagcaaagccaaagggaaagagcaactttgcaaaaacttgcaagagaaggtgaaagagctcgagggtcagttagattccaaggcacagtgtcaaataacatcagagaaacagcaacggcagctttctggaaaactaaaagagaaggaagaaatgtgtaatgtacttcagcagaagattgcggacttagaatgcaagcttagacaaccacaacaatcagaatctgaggttgcacttcttaagcaaacgatccaagagttggaggtcaagttgaaggaacaacaacatgaccgatcagccatggaattaagtatcaaagagatggagctaaggttcaaggaagaagaacaccagcgatctgttgcagaactaaagatcaaagagctggagctgaagctgaaggaacaggaacaccagcgatcagttgcggaactaaaggcaagagaaataggacatgagctgctggagactcagagaaccgagtcaatgcttcagattaagctaagagaacttgaaagcaaggcgaaagagcaggacacaaacatgacggcagtggtggagtcccgcgtcgtcgtcgcgactcctgtaaacgcgaaggtgatgagcgagaaggagaaccacgtcctgaggatctcaaactccctgaacaagcagctggctcacgtggagaacactcctgaggcccctgaagcggcttgcaacgagaggaagaggaaaggcgaggcgaggaacgcgtccatcggcggcggcgagcaagagaacactaacaacggtgggaggaagaggagcctgccagccgagcgcgaggcgaggctgaagaggaagtcgacggagcctcctccccaggtgaagaatctggtgaggtcgacggcgtcgtccagggcggctgccaaggcggcggcggcggcggctccgagctccagagccggcggcgccaagcagcaaccgggcggcgggaacaagaccagagggtgggttaggtagacgagatgatgatggtgattgcgtgtgttgtatgtgcaccggtggctggctcaacttttggctgagtcccactcactacattgctgcggtgatgaattagccagcttgtttacattgctcctgtgtctatgctgctgcattgtcgtttgtgatacttttgtaaaatttgaaagctatgttgccgcaacaggaaacaacagtgcgtgtgcgtcggggaaaacagaatttggc

SEQ ID NO: 14864 - DNA, 1481 bp, Zea Mays
  misc_feature (1)..(1): n is a, c, g, or t
ntagcattcaggccttcgcatgctgtggtttccaatagtggtgtcattcctgttgcacctagcctggacactataggttggtttgcaaaggatccaagtgttttgcatcgtgttgggcatcttcttcttagacttccttatgctggtattcgccaaccgagaattttttacatagcagatgattgctttgatctttcaaagatacctgctaggagacttactcaggtggtgacaaaatctgtggagaagctctttggaagatttcttttttattttattaggacaagtccggcatgtgaatctcgaaaattatttgagttcaagaatatccagcctgggtaactattcaaatgggcataagaatggggattcaaagttccctctgttgctagcactttgtaactccatgatatcacttcacaagcaggaattcaaagataagcatatggagtggataaattcagttaagcctgctgtggatgcacgcatagtcagtgatttgtctgaggatggtgattcagatattgatggctgccaaaatgtgaggaaagaagcgcgctctgctctaagtggacttcttaaggatgatgggattctggtgattccaactgctttggggtgccccccgaagcttaacgctaaggaactctcgtctgaaagctacaattctcagacactacgccttttgtctttagctagcatgtcagggtgttgccaggtttccattcctttgggtacacatgataagtgccccatttcagtttcgttgattgctaggcatggtggtgatcggtttttgttggacaccacacaaaccatgtatacaaccatccaagagcaagtggagatactagcgaaatctagtgtttcaagtaaacaggcgatgaatgaagaagcagctgaagctgctaaagagaaaggtaatgctgcatttaaggaaaaacaatggcaaaaggcagtaaatttctacactgaagcaataaagttaaatggaaaagtggctacatactacagcaacagagctgctgcctttctagaactaactagctaccgtcaggctgaggcagattgcacaagtgccatcgaacttgattccaagagcgtgaaagcttatttacggagaggcactgcaagggagatgctaggttattataaggaggccgttgatgatttcaaccacgcccttgttctagaaccaatgaacaagacggctggtgttgccatcaacaggttaaagaagctgtttccttgaatatgaagctgcatgaagatatgataacctcatattttgtgcacacacaaggggtgggattgaagtacctgagttcaaccgacggatgctgatcacagtttgagctagtgggaacggatttcaacactgagatcaggttaagggtcaatttagcggtttctctccccacccaaagttttggaaaagcaaaataaagaaggttttttgggaaccggaaagcaaaaaagaa

SEQ ID NO: 14865 - DNA, 2134 bp, Zea Mays
aagaacacaaagctagagataatgctagttagatgtttttttatatctttgaattagattgtgtggtgtaattttacttttgttatgaacattagacaataaactgaacttacgaactttgtatagagctgattatagtctttttccttctaacaaaatgatttataaacgaggtagtcattgcatagctgtggtaactttaatacaaatattaagtttgattttgtacaaatttatttgtcttatcttttatttgttttgttattttttgaatttagggctctaatgtgaatttcgggccaaaaactgaatttcgggccaaaaattgaatttcgggccctaatgtgaatttcgggcttttataatttcggaccgcccgaaataagcccggcacgtttaagcaattacgggccgggccgtgggccgagggctaggcccatgggccggcccggcacggcccgaaattcaaacgggccgggccggcccgaaattcaaacaatacgagccttttcggacttgggccgggccgggccgggcggcccgaatgtacacctatagtactcgacacctttaaaacctaaaaaatcatagggataatatgtgaattttacagtaatatttttttatagaaatatgcatctagaaaacagcgttccaaaagaagcccaattttttttttgaggacacgtaaaaatggacaccaagccttttcttttgtgcctcctgcgcttctcgtgtgccggcggtgccgtcgcttgcctccccgcgtggaccgtcctaagagaagagacgctgccgtgtctccgtcgcaccgaagcaaacgcggggccaacggccaccaaggcctccgcgagggcgaggacagcgatgacccacgcgggacgcgcacgcggctttcgctccgcagctctcgaatccatcgactcgctcgggccgcccctcccgtcgtccccgttcgaaggtgcggcagccggcaggcgagcgatttgattcgacatgaatcccgagtacgactaccttttcaaacttctgcttattggtgattctggtgttgggaaatcatgcttgcttctcagatttgcagacgattcttatttggacagctatatcagcacaattggggttgatttcaaaattcgcacagtggagcaagatgggaagaccataaaacttcaaatttgggatactgctgggcaagagcgcttcaggacaatcactagcagctactaccgcggagctcatggaatcattattgtatatgacgtgacagaccaagaaagcttcaataatgtgaagcaatggttgaacgagatagaccgttatgcaagtgataatgttaacaagctccttgttgggaacaagagtgaccttactgccaacaaagttgtggcaactgagacagcaaaggcgtttgctgatgagatgggcatcccattcatggagacgagtgccaaaaacgccatcaacgtggagcaggccttcatggctatggctgcatccatcaaggataggatggccagccaaccagccgcggccaacgctaggccagcgaccgtgcagatccgcgggcaacccgtcaaccagaagacgtcttgctgctcgtcctaagattgcctcatttctttggttccttgtgactatttctacggtttgtgcgcgcacgcaaatgtatttgcattattcctgatagcatctattcgttggccagatgattagagagctgaaaatatgttaagaacaataccatagagagaagttcctcagtgctctcgcagcttaaggagcaaacagcaacactttacttcgttttttatactttattatagccgcactgtttattactcgggctacatttgtgaacagcgactgtaatatttttttactctatattcgtagtgagatgaaatcctgtgtgggcaacaaagttcccttgtgactaggttttttttactagaccacccttttggctagttgtgtggtcacattcatctgcgatcgttgcgcccgggtctgttcgtggattgaaaggctcggattaaatctcctagacgggagacaggaatttataatctaactagattatataatccaacaaactaggaagattatataatccaacaaactaggacggatt

SEQ ID NO: 14866 - DNA, 955 bp, Zea Mays
cttcgggcatgcaacatgccactgtccacatgacatttttcaggctgctctgagcaaatgtttatatagatgtgccagatacaattgatatcacacatatgcgcagcaaaggattacagcctggggaagagctgctacctgaaggaggttctggtgacgacagtgccgagcctgctaatcctgttgccagtgaggatattgtaacccagcttgcaagcatgggcttcaactaccttcattgtcagaaagctgctattaacacatcaaacacaggagttgaggaagcgatgaattggctcctctcgcacatggatgatccagatataaacgacccaatatcaaaagattcacgtgcttatgagccatctgttgacgaagcaagtgttcaaactctcatctcctttggattccaggaagacattgccataaaggccctgaaagcttctggtggtaatatcgagaaagctacagactggattttcagccaccccgaagcatctacctcagcatctgctgattcttccactagcaatgtaaatgctgatgacacatatattccagatggaagtggcagatacaagctgatggcgttcgtgagccatatgggcacctctacccactgcgggcactacgtagctcatgtcctcaaagacgggaggtggacaatctttaacgacagcaaggtcgcagtatctgttgacctgcccaaggaaatgggctacctctatttctttcagaggattagcaactaggcacgtcacacacaatggaaagaatggtgggctgttaggatactgtcttgctgattttaaagcgaacgtttactcacatcctgccatgctggttactgaatggtcaaccgggatatttgcttttttgttccttgagacctcgattggcatcttccggttacataagaacaaaatcgcaatgaaagaaagtagacaataagaca

SEQ ID NO: 14867 - DNA, 794 bp, Zea Mays
cttcaaggtggtggtgaaatgattgcggatgtattcgaagacaaatccacatatgctgagcctccctctagatttgaggctggaactcctgcaattggagaagctataggactgggagcagccatcgactatttatcatgcattggcatggagcagatccacgaatatgagaaagagctggggacatacctctacgaaagccttctctctgttccaaatgtccagatatatggcccggcgccttcccagactgtccaccgtgctccgttgtgctccttcaatatcgagaacgtccatcctacagatatcgcagagattcttgatctgcagcgtagcgattcggtcggggcatcactgcgcgcagatcttgcataggacccttggcatcaacgcaagtgctcgtgcgagtcttcacttctacaacacaaaagacgaggtggataccttcgtcgacgcgcttaaagccaccgttgatttcctcacggatcgatactagtgcggttcagttcagttcccttttttttttgccagtttcatcgctctctcgtttgaactgttgtatgcacacacaaaaaagtatgcatatatatttggtataaagaaaacatacaaagtgtacggcttggcaaagtgagctcccttatttggagttttggactgtactcccttatttggcggttgttgttgaattaaacgtagttcaggatgcagagagtacaaacgactcgaccatggtcactgttatgcagtaaaacattgttatacgagaagatgagccggcagttaactctggg

SEQ ID NO: 14868 - DNA, 93 bp, Zea Mays
ctatcatttttcactattattttgaatcaattttatatgttttgtgaatggtgagattcgaactcgcaacctccctctcgcgcataccctcat

SEQ ID NO: 14869 - DNA, 579 bp, Zea Mays
ggctttttgagcataccatctatttttttagggcaccacaaggcaaaagaagctcagaggcgccgtcaagcagaagcgatcaacggggcattggcagtgataggactcacggctggattgctagtggaggctcagacaggaaaggacatcttagggcagctagctggatatctgacggctatttctagtttatttgggcaataacactggaccatggttggagatttatttttcacgttccacggccaggagaggtcttatctgaatcttatttgatggatccacccaatttttttgggagctgatcccagatggatgtggaatagcgcacccagacttgtatgttgatcaagcacgatagcatgggctgaacattagtatttctatgtagcacatcaatttctgacgatagcgcctgctaaagagcagttctattcatactcaaatgtgaaatgttgaagtcttcgagaaatcttttccttcttctgcccaaaccattaagctgatggcacattggcacctgcagtggattgatgagtctcgctagcgtgtgacttcatcttgccatgaaaatgtgag

SEQ ID NO: 14870 - DNA, 1451 bp, Zea Mays
cgcattcaaagtggcctagaataacccgcgatcctatcctgtctgctgtctctcccgagtgacctcaaagtcagcgagcgccacatccgactccgagggccaccggtggccggttgcccgttgacgccgcggcacgcgattccgatcctgggttttacctaagaaataaacaactctgaatttcccaagacctgaagaccagccagcgcaagcctgtggctgccacggtgccaccatgtcccgcggcagtgccgcctccgtattcctcggcgtcgacgttggtactggcagcgctcgtgcaggactcttcgatgaaaacggcaaattgctggggtcagcaagcagccctatacagatatggaaagagaaagactgtatcgagcaatcatcaaccgatatctggcatgcggtctgtgctgcggtgaaatctgcgtgctcactggcaaatgttgctcctgaggacgttgctggccttggctttgccgccacttgctcccttgttgctgtcgatgctgatggttcccctgtttcggtttctttgagtggtgatacaaggaggaatatcattgtgtggatggaccatagagctgtgaatcaggcagagcgaatcaatgctaccaattcgccagtactgcaatactgcggtgggggtgtttccccagaaatgcaggctccaaagctcctatggatgaaggaaaatcttctagattcgtggtctatggtatgtaggtggatggacctaagtgactggttagcatatagagcaacaggtgacgacactcgcagcttatgcacaactgtctgcaaatggacatatcttggacatgcacacatgaaacagtggaaggaatctgattcacgtgatatggaggcatgcggatgggacaatgttttttgggaagaaatagggttgggagacctcctcgaaggaaattgtgcaaaaataggacgcagtgtcgcttttcctggtcatgctcttggttctggtttgacgcctactgctgcaaaggagttaggcttacttcctggtactcctgttggaacctcacttattgatgctcatgctggtggagttggagtcatggaaagcattcctgatgcaggatctaaagctgtgtctgatgaacatgcaatatgtcaccgtatggtattggtatgtgggacatcaacctgccacatggctgtttcaaaggacagattgtttatacctggtgtctgggggccgttttggtctgcgatgatccctgagttttggctcacagaaggtggccaaagtgcaactggcgctctgctcgattacattattgaaaaccatgttgcttctcctcttctttctaaccatgctgcttctcaaagtatatccatatttgagctactgaacaagatgttgctttctatgtcacaagagcagaatagtccgtttctttctgcattaactcaagacacccaga

SEQ ID NO: 14871 - DNA, 1350 bp, Zea Mays
cacatggaacctaacagctcattttgtaaatttttcggagataatgtccaagaacatggcacagtcaaggaaagaggctgcatttgctctttcagcattgatggagataccacaacagtataaagcaaccgtggaattaggaaatttagggtatgctttctttccctgaatcgtatccttattcttgctttgattatttgttcatcctaattgcctactgacttgtctgaatgtgttgcaagcagtcgtcgctcttccaagtctcccaacagagttcctctacctccgccttccgcaagtcatgatgcttattcctattcatctaaaagctttagcaaaccaactacctaccctcagagttcttcatcctcatcagcctatcctcaatatggaactccacatacagccaccccggccgcaccttcgtccacttatgacaaccaggtctgtcctatctgtcttgtgaaccccaaagacatggcgtttggctgtggacaccagacctgctgtgactgcggacagagtctcgagtcgtgtccaatctgtcgcactcccatcaccacaagaataaagctatactagcaagtggtggctttggatcattgccaatgggtggtatactggagccaccctgcctcacactggaggatcgcgacggcatgtcccagtaaccgtcggaacacccgctccgtagatcgattggagctaaggattgcagggccaagcttggatcgattggagctgaggattgcagcgttggtctatcggacagggttgccccagtattcatatccacgagtaatgatccaaatcgcagcttgcaaaaaacaatctctatataaacgagaagaaagagagaggagaacacaaaggtagtggtgtggtggagcagtcaattgcgtgtcgggccatgacacgcaacttcccttggtgccttcgttacttgtcaaaccagcaacactagttgtacatatcagaatttcgtgcttatctggacttctgatgccaggcttagaggattctttatttgtgcgcgtacttttagtttcgtccgagatatatgttgatttgttctttgcttgcaattgtgtaaaaaattcaatccgcaaaattttgttttggtgaatcagaaaaaaaaagtatttggtagaaatagaaaaacgaaatcttaaatttacaataaagagaagaatggatgttatgctcaccttactggcttactccaacggagcaagccgaagccataccgtgccatcgcggggctgccgcagccgtcttgcagggctgggacgccggtgccgcggccgctgacgctgggcgtcgccccgccctagtttctgttgggctttg

SEQ ID NO: 14872 - DNA, 5636 bp, Zea Mays
tatcaatcccctgctcgctatcattctcgctccctccctcccttccttggccttgccacttcctccgcctctgccctgctctgctcagcttctcacctcccagctgggctccccacccctctcgctccctgttctatcctctcgttccctctgcaaccttctctctctctagcttatcccgataatggctgcctcgagcagcaccacctagctagccgtgcccgctccacgcaacacgtacgtacgtccgctgctcggcgtcggttccgcctcgtacaacaaccacactttgcattgagccaggtcgtccagcttctgaggaggagcggcagcacgcacctgggcgccggcccactgctgcagctgggctgctagcttgagctgagcttgccgttgggcgcgcgcgtgcatggcgcccaagagcaggcgtgggaaggccaagggcgagaagaagaagaaagatgagaaagttctccctgtggccattgacatcactgtcaacctcccggaccagtctcatgtcattctgaagggtatttcaacggacaggatcatcgatgtgaggcggctgctctgcgtcaacaccgccacgtgtgccatcacaaattattctctcacacatgagatgcgtgatggtgcgttgaaggatgccgctgacattgctacactaaaaccctgcactctcacattggtcgaagaggagtacagcgaggagagcgcggtcgagcatgtccggcgtctgctggacatcgtcgcttgcaccacctgcttcggcccagcgccgccacctcctcctccgccgtcccccaaggacgccgatgccgctaaggagacatccagctccagctccacatccaaggccgtcgcatccgcctcctcgggtgggcgccgcacggcctcaccgccgccggcctcgccgtcctccgctgccgcgaaggagtcgtcagccgcaaaggaggcagcagccaaggagtccgcggctgcggtagagctggaggccgagatgagcggcgcgtgccctcgcctcggcgccttctacgagttcttctcactagccaacctcacgccgccactccaatttgtaaggcgagtgttgcagcctcgacaggaggaacagccttcggatgaccatctgttctttcttgaggcaaagctatgtagtgggaagttccttgttgttgaagctcggcgaaagggattcttcagtctaggaaagcagcgagtcttgtgccacaacctagtcgatcttctgaggcatcttagtagagcatttgacaatgcttatgaagatcttatgaaggcatttttggaacgaaacaagtttggaaattttccttatgggtttcgtgcaaatacatggcttgttcctccaattgctgcgcagtcaccatcaacgtttcctcctcttcctgctgaggatgaaacatggggaggcagtggaggtggttggggaagggatggaaagagcgacatggtgccatgggcagatgaatttctctatctcacatccatgccttgcaaaactgctgaggagagggaactccgtgacaggagagcattcctacttcacagcctctttgtagatgttgccatctttcgggctattgcagcagtaaggcatgtaatggagggtacagagttatcggcatcaaccaatatagatgaagtcttgtattctgagacagtgggacattttagcatcactgtcacaagagattcttcagatgcaagctgcaagatggacactaagatagatggaaacagagccacaggaatggactctaaggatcttgcggaaagaaaccttttgaaaggaataactgcagatgaaaacacagctgctcatgatgtcgacagtttgggcattatcaaccttagatattgtggatatgttgcagtagcaaaggtggacaacatcgacaaaaccaaagtaaatgcttctatcaagcctatgaatatcgcagatcaacctgaagggggtgcacatgcattgaacattaacagtttgaggatgctccttaatgaagccacctctaccggggagaaaaagatatcaaacctttcacaaaatcataggcaggaagaactaattgcggcacaaacttttgttgagaagttattgaaggaaagtcttcaaaagcttgaggaagaggaaaatgtaaaacattcatttatgagatgggaacttggtgcctgctgggttcagcatttgcaggatcagaaaaattctgataaggataaaaagcaaggtggtgagaaggataagaaaaaaacactggacaaatctaaagaaccaaagattgaagggctagggaagcctctcaaagctcttaagaatgcaaaaaatgttgattctgctgacctgggttcctcagcgggacccaaaagctctgcagaaagccagaaagataagccatcagatgttaaattgcctcaaggagagtccagtgcttctgagaatgaaaatctgctgaaggatttattaccagaatctgcttttaccaggttgaaagaatctgaaactgggctccaccagaagtcaccacctgagttgattgagatggctctgaagtactatgatgaagttgcacttcctaagctggttgctgattttggttctctggaactttcacctgttgacggtaggactttgactgatttcatgcataccagaggcttacagatgcgttctctaggacgagttgtcaagctttcagagaagctttcacatgttcagtccctatgtgtgcatgagatgatagtgcgtgctttcaagcatatcgtccgttctgtgattgctgctatttcagacattcgacaattagcactaacaatagctgcagcgttgaacttattgcttggtgtccctgaatctgatgtctctggaagttctcctaatgtgcatcccctagtatggagatggctggtgatcttcttgaaaaagagatatgaatttgagctcacggagaaacattaccatgatgtgaggaaatatgctgtccttagaggactgtgccataaggtgggcattgattttgcaccccgagatttcattatggattgctctttcccattccataagcaggacattattagcctggtacctgtacataagcaagttgcatgctcatctgcagatggtaggcaactgctagaatcctctaaaactgcccttgacaagggtaaacttgaagatgctgtcaattatgggaccaaggctctttccaagctcataactgtatgtggtccctaccaccgaatgacagctggagcttatagtctgctagctgttgttttgtaccatactggtgattttaatcaggctactatttatcagcaaaaggccctagacatcaatgagagagaacttggacttgaccaccctgatactatgaagagttatggagaccttgctgtgttctactaccgtctgcaacatacagaattggccctaaagtatgtcaagcgtgcgctatatcttctgcatcttacgtgcgggccatctcatccaaatacagctgctacatatatcaatgtagctatgatggaagaaggattgggcaatgtgcatgtagctctaagatacttgcacaaagctttaaaatgcaaccagaaattactagggcctgatcatatacagactgctgccagctaccatgctatagccatagctctctcgttgatggaagcatattccttgagtgtccagcatgagcaaacaaccttgcaaatccttcgtgcaaagcttggaccagatgatctaagaactcaggatgctgctgcttggcttgaatactttgagtcaaaggtaattgagcaacaagaagctgcacggaatggaactcggaagcctgacgcatcaatagctagtaaaggacacctaagtgtatctgatctgcttgattacataaatcctgaccaagagagcaagggaagagattctgaatttggaaaaaggagatactcaagcataaaggttttatctcattcaaatgaaagttcaaatggagcaagccctgagatatctccaagagattcaaatcccattatagatgaggaacagcaagttaaagagccatcaaaagatgacagcactaaaagtatttctgaagctgaagttaaacagactcctgaatcatttgagcatccagcaccttctgagccacaactagagatagttgaggcgaacattaatgcacctaaggaagttattgaagttgaaaattcagaacctgaagatggttggcagcctgttcaaagacctaaatcagctgggggttcaggaaaacagatgaaacattatcgcccaaccaccagaaaggtgtatgaccctgatagtcatgatccaacatatacttcacaatacaaggcaaggaattcctattcaaataaccggtattatttcttaaggaagagaacagttgtacctacaacgtacacagatcctcaacagcatgtgaaagttcagacatttggtgccaggtttggtcgcaagatttacaaggctgtgacctatcgggttaagccagcgactgcaacaacagaggtgctagatacttttaagagtacagagcagatgagtggtaaagcagaatcacaggtagcaaactcacaagcacacaatcctacctcaacagatcacaaaggaagtgagtcacatggaactttagttgcaagtagtggaaatgctccatcatacaaagatgttgcactagcacggcctggaacaattgccaagactcaaatacagaaacctagagacgatgtaccacagaaccaaccatcacttggtcagattattgcacaagaaatgaaagattctttggttgattcactccaagtggaacagggacctgtctctgcaaataccaataattctaaagaagaaaccaatgtgctaggaaaactccagaaattagaagaaacaaaattctctgaaggggaactggagattgagaatctgtgcaaagacagggtacaagatttgccaataccaaaggctgaggaatctggaattggaagtgagcctgtaaatagtaaaaaagatgccaatgtgttaagtaacacaagtcaagaactatcaagtagtagcaatgatggtgcagccattgagttttcggagtcaactggatctgtaaaaactgaacagactgagaagtctgatacggatttttttgaagctctaccccgcagtatagaaaatatttcagtttcagcatctactacaaacacagggagtcttggaggtgatggaagtgagaagtccaagcctaacttagtgctaagtaatattgatttgagagagatgcctaataagaagctatctgcttctgcaccaccgtttaatccatctccaccatctgtacttagcccactttctggcaatgttggtctcccgccaccaggtgccattccaggagtagcaccttggcctgtgaatgtatccctgcatcctgggcattcaactatggtgccaagtggtcctcctttgtgcacttcccctcatcatttataccctcctgctccccgatctcctaatctcatgcatcctgtgccatttatttatccaccatatagtcaaccacaggtggttccaaacaccacatttcccatgaacactaatatttttcggccat

SEQ ID NO: 14873 - DNA, 1308 bp, Zea Mays
tatcaatattttttatgctgccatcaacccctttcaatctgaagttgtgcttttgtgctacttggttgacgttaattgtccccactagcatgacagcctacctatatctgtactcacatggagaagtgtcccttgcagcatctcaaccagttctcttgtatgctattcttctgatgatcctcctttctccttttgatatgttttacttatcatcacgcttttactttctgagaacagtctggcgtataatactgcctttacaagcaattacatttcctgacttctttttggctgatatttttacatccatgtcaaaggtgttctcagatctggagcgttcggtttgtcgtatggtgaatcgccaggttgcaacaatcgcttggtttgaagcagattctatttgtggcagtcattccgtagctattcctcttgttctcgtgtttccctacttgtggcgtttcttccaatgtctccgtcagtacaaggatacaaaggagaagacatgtcttttcaatgctctcaagtactcgacagcaattcctgtgattttcctttccgctctcaagtatcatgtatatcctgatcaatgggttggcttctaccgccccctctggcttatctctagtgttgtaaattcactgtattccttctactgggatataaagcgagattgggatttgagcatcctaaccaggattttcatgttcaaaaatccaagcatatggactaatcttctttacgggcagaactgggtattctactgggtactgggcagcaacttggttctgcgatgcacatggacatacaagctctcggcgcatctccggcacaactacctgacagtgttcaccatagcagctctggaaatcctgagacggtggcagtgggtgttcttccgggtcgagaacgagtggaacaagatgacggccaaacaaaacttggagatgtcatctgacatgccttccgaaggggacaggctactggattcgagtaaccacacagtgtgagctgaacagcagcctcacatttctcgatacagattcattgccattcttttagcgtgaccattgtggccaatcttacgtcgacggttcagattttgtctgtagagctcaaaaggtcaaagggatacacaataggtttctatataaaaaagttgaaatttgttggcggcttcggatgttatacctcttgaggatgtatactgttatagccctcttgaacgattgaatctaacaggaggtattcgttgagacatgaaagaataaaagtaatgctgaaattttacgaaacttctttcaggttgtc

SEQ ID NO: 14874 - DNA, 1224 bp, Zea Mays
aaaatagtaattttcccgctcgcggcttgccactctgcttccgtgcttggcttgctcgctttcctttcccgtctcgactctcgagtctcgactcctcgcattcgccgctgcgtcaacgtgtcttccttcccgcggtctctccgccgcctcccagatccggcggccatggcaaggaacccgggctgcaccgtcttcataggtaggtcgtgttgtagacctacacatacctcgtgacaaggaaactagccgaccaaaaggctatgcttttgctgagtatgaaacagaggagattgcccaatatgctgttaagctattttctggtcttgttcgacttcataataaaacgcttagatttgcgatctctgggcaagacaaaccctcattaaatggcaatatccctgtaactcctaggttaaactctgtaccacagccaaagcctcatcaacctatgaggtctagtgatactcctttgccacagcatgcagcagtgaatggcaggaatgccgggtatggtatcccaccaaatcattcatacgacacgcacactcaaggtgaggaaaactctggtcattttggaatccaagttaatgttgaattatgtgttaagtctcacaactccccttttgaccagcactgtcgagtgggttaccgaatagaggactaagcaacggtacatatgaatatagtaggcgtgtatttggttctgttctgaatgatgttagccgtcgagctaccagggaaccaatcccgtacccgtcctactagcatgttgagccccggtgactgtgactctgtgctgacagaaaatatttctgaagatgttgtctgttgtgtcagccacctgtaatatctctgtactcaccatttcatgcctgtaaatatgggttatggtggtaggacatatgcttgtttttttggttctgcttcgcattgtagtgagacttgtccctgcttgttaggtccttctcatcccctagtgtgaaggccatgcctccactagtatggctgcactaggaaataccattcctagttacatgaatgggtggcaatatgctggcaattgtgttttaacattagtgccattagctatttcaatgttacagcagggcgtgtttgtgtttgcgatattagtatttggtggattttgtgcttctcatcatgtatctgggacatctgaaggagaaacattgttttaaaagaaaattgtgaaataaaaaaaaaaaa

SEQ ID NO: 14875 - DNA, 1217 bp, Zea Mays
ggaatcatcgaccctgactgtagactcattggtcttcatctctatgacggcttatttaaggttataccatttgacaacaaagggcagctgaaggaagctttcaatatcagactggaagaacttcaagtactggacatcaaatttctgcatggttgtgttaaacctacaattgttgtcctctaccaggataataaagatgtgaggcatgttaagacttatgaagttgcactgaaggacaaagattttattgagggcccttggtctcagaataatgtagacaatggtgctggtttgttgatacctgtaccagctccacttggtggtgtgataataattggcgaggagcaaatagtttactgcaatgccaattctacatttaaagcaataccaataaaaacaatccattattagagcttatggacgggttgacccagatggttctcgatatttacttggtgataatactggaattctgcatttacttgtccttacccatgaacgagaaagggttactggtttgaaaattgaatacctgggggagacttcgattgcatcatcgatttcatatcttgataatggcgttgtttatgttggttcacggtttggcgattcacagctggtgaagctgaacctccaagctgatgcaagtggttcatttgttgaaattctcgaacggtatgttaatcttggaccgattgtggacttctgcgtgattgaccttgataggcagggtcaaggtcaggtggtcacttgttctggggcatttaaagatggttcccttcgggtggttcggaatggtatagggattaatgagcaggcttcagtagaactccaaggcataaagggattatggtcattgaaatcttctttcaatgatccatatgacatgtaccttgttgtgagctttataagtgagacacgattcttggcaatgaacatggaagatgaacttgaagagaccgagatagaggggtttgatgcacaaactcagaccctgttttgtcaaaatgcgatcaatgaccttcttatacaggttactgctaattcggttcgattagtcagttgtacctcccgggagctagtggatcagtggaatgcaccagcaggattctcagtcaatgttgcttcagctaatgccagtcagcctccgtttgggagtgctccagctccagaaaatttggtggagttaatggagcactttattaggtgatccggaa

SEQ ID NO: 14876 - DNA, 1702 bp, Zea Mays
atgaagaaattcaattctagttgttgctgttaagaaaatgaagaaaaaatattattcttttgaggaatgtatgagtctacgtgaagtaaagtctttgcggcgcatgaatcatcctaacattgtgaagctcaaagaggttatcagggaaaatgatatattatacttcataatggaatacatggagtgtaatctctatcaacttatgaaagaaagggtcaagcctttctccgagtctgaagtccgcaactggtgttttcagatatttcaggctcttgcatacatgcaccagaggggctactttcatcgtgacctcaaacctgagaatctgttggttagcaaaggtgtcataaagctagcagactttggtcttgcaagggaagtctcatcattgccaccatatacagaatatgtctcaactcgctggtatcgggcaccagaagtcttgctccagtcatctgcttatgattctgcagttgatatgtgggcaatgggtgccataatggctgagctgttgacactccatcctctctttcctggaaccagaccaaaggcagtcaattgtctgaggtgatgacaacagctagtagcgaggcaattgacctcatctcatcactatgctcatgggatcctagcaagagaccaaaggccacagaagtcctccagcataccttcttccagggttgtacatgtgttccgcttcctgtccgtcggaaagcttcatcgcttcctaaaacacctccatgtgttggatcaaagagaatttccgagaacagtgttgctagaagattctcgaccgggactctatctacgatgaaatctcatagcaatgcacctgcaaaatcaaacggtttatctaggactggtgtacaaagaaaacttcacttggatcgtcagccaccgcagaagagtacaaaaccgaccgagaacagcaataagctagctacaaatcgggtcccagcccggaacagcccagggaatcctgtacttaggcattcacgcagcttgcctgaaactggtcgacgagcagtacagaaggtctcatcaatcacagagaaactgtcgcaaatgtcggtgacctccagaacacgaagcgccgtgaagcctgccgccccgacgatgaaggccggacatggcaagtcagacttcctggggaagtctgacgatatccctccggcaaagaggctgacgagaaaattggtcagctaaacaagggtacgtagagtgaaaatccgatcatctgcaggagggtggagggatatggtgtatagtgtgcaggaaccagtgtgccgaagagaggctagctcatcctgagcgtttgcctgtcgatggtcgcgcggatttgccatcgccacagttttgctgcatcgagtcatcttaggaatggctttgcaaactcctttgtggagtgctagagcctgcttcgagccttaaccctcttcctggccttcgatctgccttttgcctgcgtcaactttgcccccatgttttaataaacatgatgtgtgctattaattttgtcttgttcatatcttgctgggatggacgtttcatgtttggtttgaatgtacaggtacagtgcacaggtgagaacaccgtaaaatgccaatttcacgtactgtatgcacatgagttgtcactctccaatatggataaagtattataccaagtggcgctagaaaataccaatgtggatgattggaaa

SEQ ID NO: 14877 - DNA, 725 bp, Zea Mays
attaatcatgattggtccaaaccgacttagacaatcgtgattaatcggacgactttaaaacaacttctcgcaaggcaacaagcacaacgagaagaggaattggctcagtcacagaggcatatcttagcacttcaacaagaaattgaagagctcgagcgtgaaaatcgtctccatgatcaacaggaagcaatgttgaaaaccgagcttcgcaatatggagagatcacaaaagcgagaaggaatagatatgacatatctcaaaaatgtgattctaaaacttcttgaaacaggggaagtgggagcgttgttgcctgtggttgggacgttactacagtttagtcctgacgagctcaagaagtgccagcaaggtgtcctttcgagtgtggtctcttcacaagctactgcagtgtcagatggcacaaccacacagaattcgttctttgcaagattctcgttctgaggcattgccctcgaagatcagcagtttagctgggggagaggatgtcctgagccttcagattcacagttttgttgaccgtagaaaacgtttattcatttattagttacaagcgtccttacccccccccccccccccctctccttttgtaaaagtagtgcatatagcaggattaagataaacacatgtaatggagtatatattgtgcaactgccatatattatatgatatatagcggctcatattaggttgccgaatgtagaagggaa

SEQ ID NO: 14878 - DNA, 1006 bp, Zea Mays
gattcccgcgccctcgtctcttatcccaccggcaccaccagggcagggccgatggttgacgccatcgacgccatgccctcgcgctccacctccgccccgagagcagcgcgcaccgcccggagatgtcgtacacgttccccacgcagcccatcgtggcgccggcgaagaagaaggacgcccgcaaggacgccgccgacgccgcagagaggcactgcagccctctgccgtcgagggagcacgggagggcggccgtcgccgtcgacggcgacaggggcagccagtacgcgctcaagtgggccgccgacaacatcctctcccgcgcccgccccttcttcctcgtccacgtccgccgcaagcccaccttcctccagggccccggcggtaagcagttcgccatatcacacgtgcaggacgacatcccggccgatcttcacgcccagatggaccttcaggcgaaagatctgatgatccccttccagtgtttctgcagcaggagagggggaaattatcctggacggaacagacgtgtcgaaggcgatcgtcgatttcgtcgccaccaacaaggtcgacaagttagtgctgggctcagcatccaggaacgcctttacaaggacgatatggaagctggacgtgccgacatccgtgacgaagtccgcgccgagcttctgttcggtctacgtgatagcgaaagggaagatctcgtccttcaggcccgccacctacgcgaacgagacaagcggcagcaggggagatccggaacctgatcacccgcctgggaacagcctgccagttggtgaaccggctcacaacaagccagaaaacgggcacggcggcatttcgaggcctatcccagtacgtgcttcgacgcccacccatggtggcagctccgacgaaccgccgacggaagacggagggagcttcatgtcatcagaccagacagcgtcttcatcatgccccagtggtggatctctaaacgacgtcgatcagcatggctacagcccgctgt

SEQ ID NO: 14879 - DNA, 1731 bp, Zea Mays
actctcgtgagcatctggtttatcggaaattttgctctcgtcttgcctgtgtgtgcaatcactctgaaaatggtcaatggtggtagagttagcagctgggcatgcattaacttctcacgaaatgtgcaagatggtgctgctaggagtttctgtcatgatctcgctttgatgtgccaagtatcaggaatggattttgcacttgaacctgtgctgccccctgtctatgcgaggcctgaacatgttgaaagagcactaaagagactttatcaagatgccatgagcatactcaggcctcagggccgagagcttgacttgctgatggtaatactgcctgacaataatggctctctttacggggatcttaaaaggatatgtgagactgatcttggattggtctcccaatgctgtctgactaaacatgttttcaaggcgaacaagcatcagtatcttgcaaatgttgccctgaaaataaatgttaaggttgggggaaggaatactgtacttgttgatgctttggcaaggagaatcccccttgtcagtgacgtagctactattatctttggtgctgatgtgacccatccccatcctggggaagattctagtccttccattgcagctgtggttgcttctcaagactggcctgaggttacgaagtatgcaggattagtgagtgctcaaacccatcgccaagaattgatacaggatcttttcaacgtacggcaagatccccaaaggggggctgtctctggtggcatgattagggaacttctcatttctttctggagggcgactggacaaaaacccaagaggatcatattctacagggatggtgtcagtgagggacagttctaccaagttctgttgtacgaacttgatgccattagaaaggcctgtgcatcattggagtctgattaccagcctccagttacctttgtcgtggtccagaagcgtcatcacaccaggttgtttgttaataatcacaatgatcagcgtgctgccgatagaagtggcaacatactgccgggcactgtggtggactcgaagatttgccatccaaccgagtttgatttctacctgtgcagccatgctggcattcagggaacaagccgtcctgcccattatcatgttctgtgggatgagaacaaatttacggctgatgggttgcaaactctcaccaacaacttgtgttacacgtatgccaggtgcacacgctcagtatcaatcgttcctcctgcatactatgctcatctggcagccttccgagctcggttttacatggagccagatacaagtgacagcggatctgtggcgagcggtgctacgacaagccgtggccctccaccaggggcgcgcaacaccagggctggtgctgcgaatgttgctgtgaggccattacctgctctcaaggaaaacgtgaagcgcgtcatgttctactgctaagattgacgctgcgctgatgctgtgagcaagcaattatcgttatggtggtgatgctaggacaccgttatgcaccggtacgtacggtattacaacctctctctatctccctcccaatacagtacagaaaggacgcaattcttgatttcagatagacagtatctgttaggcaggtacttgttgcttgactgttcttcatatagatcgttggtaaagtatcggttacaatcctgagtatgtcacggagaatcaaggagatgtaggtcattaaatcaacgagattgctactggaaa

SEQ ID NO: 14880 - DNA, 2228 bp, Zea Mays
ctgcttctgctcctgctacttgccccctcttatcagagagagtggtgtggtggcgcctccccaccatcaccaccagccagcaccacccctcctgcccctctgcgctggcgggccgagcgccgcgagcgagctgggccgcgggcggaggaggagtcgaggctgaccgaccccgcggccggcggcgacgagcggacgcagattcggcagccgtgcgcggaatgcccgtggaaggaggggagagagggagggcgcaggcgcagctgagctgagctgagcccgcgaggttcgcggtctgcggtgcggcggcagaggtctcgccagcgcgatggccagcggcggctcctccaggtacagctcgtacaaggcgccggggctgcgcggcgcgctgctggaggcggcgcacgtgtcgtgcctcgaggaccggtacgcgctgggcccgcagctggggtggggccagttcggcgtgatccggtcctgctccgacctggtcaccggcgaggcgctggcctgcaagtccatcgccaagggccggctcgtgtcccccgacgacgtgcgcggggtcaggctggagatcgacgtcatggcgcgcctggcgggccaccccaacgtcgtggggctcaaggccgtgtacgaggaccgcgactcggtgcacctcgtcatggagctctgcgccggcggcgagctcttccaccgcctccacgagcgcggctgcttccccgagcgcgaggccgccgcgctcttccgccacctcatggaggtcgtcgcgcactgccacgccaaggggatcgtgcaccgcgacctcaagcccgagaacatcctcctcgtcagcaggtcgccccagtcgccgatcaaactcgcggactttggactcgccacctacacccagcctggccgaagcttgagcggcatggtaggcagcccgttctacattgcgccggaggtgctctccggcgggtacaacgaggccgccgacgtctggagcgcgggggtcatactctacatcctcctcagcggcatcccgccgttttggggcaagaccaagtccaagatcttcgactgcatcaggtccatggagctgcggttcccttctgacccatgggacagggtttctgattccgccaaggagctcgtcaccgggatgctgcggcgcgaccctaggctgcggctcacggccaagcaggttctagagcatccgtggatgcaggaacacgcggacccacaagactcgtgcgggcagtgccacgagaccggcctccaacgggagggcgccggctcgtgctccttctccacgccgttggcgtcgcggagcagggacgtgagctttgacacgcgtggccccatcgcgtggaggggtgggggcgaggacgaggcgacctgctgctcgcccacgttcgccgccgtctgcaggtcgtcgttctcggcgttcatcaccgacccggccccgccgccctgctcggcctcctccgccttgggtggctctggcttctcgttcggtgagccctgcgaaccacttgacggaggaggaggaggagggttcccgatgcccatggcttccatgccgagcttctcgttcttctgcgcgcgggacagcagcgagccagctgagccacagccggtcgctgcctcctcgactccgaggacggcgaggggatccacgccacggggcgtcaacggcaggcggaaccacacgatcggcggcggcgggcgggagcacctggacgtggcggtggagtctgtcatccgctgggcgtcgtgcaccaacttctccacggcgccctcacttcgggcctccctcgtatgctagcactagcaacgtcgttccgcgcgccggcgccgccaacgccgggctgagggtgaggaggagaattccgacgagacgagcggtagagagtgtgcagtagcctcgaattgtataatatatatacagacacagtgctgttatagtggtgatgatagattagagagtgaaggtgaagttgctacggagggatggatgcatggagatggagagcgagtggcagagctggaactgatgtgttttattcttcgctgtcacgctgctggtcagataagatttgggaacgctgctggtcagataagatttgggaacacacctggcgacggagagagaaggcgtctgataatttgatatgaacaagaagcaacaatgttcaggatgcatggccaggccacacataaaaggactgtttcagtttgtgtgtcaagaa

SEQ ID NO: 14881 - DNA, 352 bp, Zea Mays
gtcggatttgtcccttattaacggctctagcactcctctagattcgcgaacgaaaccagtcactgctaatcatcccgcacaaccacaacgaccgacgatggcgttgccgcaattatccccgatctccaagggcgctaattaggacaccccgacgcttgccaggctgcacatggctggcattgcattacattacccccacccgtcacctgatctccaccgtcattccactccatcagtgggcagcgctctgctctcctccactcacgaactcactcactcactccccttgcccccatccatccgctagccactagctccagcaggctcgccgccgacactccactagtgctaa

SEQ ID NO: 14882 - DNA, 871 bp, Zea Mays
cactgtgatcctatgttgtcagcacatgacacaaactaatggttaacgaggctagttttgataatatgtactcaacatggagatagttaatttaagatatggtcaaatgataaaatccagcgatcttggtaacgtcccttttatctgagtggcagcatgctatggcttgtgcaacactgtcaactcctgtccagaaagcttcagaacatggcctgttggtccagtttcttctcgggacacgagtcggcggtgagtttccatggatcgcccgagtcctcagtcagggcacacagcagtctgatctccatcaggttctacaagaagaaccattccaatgtgagaccacccagcgagaccaccgcagcccctgataacgtagagacagtttcaaggctcctggaaccgtaaccaagcgagaagaaggctagctcggtgaccgaacgctgcgggccgcggccaccaccacaggtacctgaacggaaaagctcgccacattctgaagcctctcaccttgacgaccggggctgtgtaaatcttccgagaccgccactggcgcttcctcctcgagcccctgctgtaaaaatgaacggactcctagcgttttgtgcgcctgggtcgcacgctgactagtgaatctgttggcagttgtgcgccgcagcccgcaggccatggctctagtgacgagagcgacgcgagcaagctgtttgtatgtgtctgattacaataataaaaggtttcgcgctgtttactgtattggcttctactgtttctactgtgtttttgcaactgtgtatatactgtagctgcagcagtgcgaacagttgggttgtgtttctaacgtaatgtgtggcgctctttttttcgtgacaga

SEQ ID NO: 14883 - DNA, 2431 bp, Zea Mays
ttttcttctgtttaccgactttcgtgacaaattatgatttcgctgtggaggttcttgatagagagaaaataatgaagactttccaggatgtcactgcaagacttgaacaagccttagctggtatctcgtttgatgaacttaatatatctgatgaagtaagagagcaggttgaattggtgcatactcagttcaaaagagctaaggaacggtcagattcatctgatgatgatctttttaatgagctgatgtctctatgtaattcaagcagcagtgatagtgttgacccagatactcttcgaaggttatctgagaagttgcagcttgtcacaatatatgacctcaatcatgaatctctgaccttgcatgagatggctagtggcggtgatcctggtgcagttgttgaaaagatgtcaatgctcctcaaaaggattaaggattttgtgcagacagaagaccctgagatgggtgcccaagcaagtacagcaaccatttctacaaaagacaattcagcatgtcctgttattcccgatgatttccgttgcccaatatcactggatttaatgaaagatccagttattgttgccactgggcagacttatgagcgggggtacatagagatgtggctggaggctggccatgatacctgtccgaagacacaacagaagcttgccaataaatccctgaccccaaattatgtcttacgtagtctcataactcaatggtgcgaggcaaatggtattgagcctccaaaacgccctgctcaacttagggatgcaccactgtcatgtagtgctgctgagcatagcaatgttcttgagcttcttcagaaattgtcttcccaaaaccttgaagatcaacgtggctctgctggtatgcttcgtcaacttgccaagcgcagtgctgaaaatcgtgcttgtattggagatgctggtgctattcctattcttgttagtctgctatcaaccactgatgttagcacccaggaacatgtggttactgctctcttgaatctttccatctacgaagagaacaaggcaagaataatatcttctggagctgttcctggaattgtgcatgtgttaaagaggggcagcatggaggctcgggagaattcagctgccacacttttcagcctatctattgtagatgagaacaaggtgactattgggtgttcaggggcaattcctgcacttgtgcagctattgagtaatggaagccaacggggtaaaaaggatgcggcaacagcactatttaacttgtgtatttaccagggcaacaaggggaaagctgtaagagctggattggtacctatactactagaactgctcatggagactgaaagtgggatggtagatgaggcccttgcaatattggcaatcctctcaggccatcctgaggggaagacagctatcggcgctgcttctgcaatacctgtacttgttggagttatcagaaatggatctccaaggaacaaggaaaatgctgctgctgttatggtgcatctatgcagtggtgagcagcagcaacagcatcttgctgaagcacaggagcagggcatcgtgtctttgctggaggagctagcagaaagtggcacggacagaggaaagaggaaagctgtgcagctgctcgaacgaatgaatcggttcctaaagcagcagagtcaagccgaagccgaagcagaggccatggcacaggctcatgcacaagcacaagcacaagcacaagcacaagcacaagcgcagcctcagatcctggttcaagctcaagcacatgcagatatgcaagctgaacgatcactacttcccacatcatctgacatttcggatagatgaggtttttgatcagcagcttgttttgtctagtaactggcttgttttttttaagctcaggctgtcaggtggaagattgcctgcaactgttattgtggaggtttctggtttctgttgaacactgcaaattaggaggtctgggcagcgtgatttaggtccatgagcatgttgacaggtgggttctgagtcagtttttaacctgcgtgtgttcgtaaaatgtaccggtgattgaaggtagtaagtatatcctcgagttttaggaggtatcgttgaacttgtacccggtacgagcccagtacaggactaattctggcgccctaggctaagtgcctgacaaagttgcaggaaagctttagttcagaaaaatgtttgttcatcgagtccggtgcagttggttcagctgtcttctgtgagttgtttgcgttgaaaaaaagcggttggttcagctgtcttgtgtgggttgtttgttgtgaaaaaactgccgcaagctgtatgctgtgaaaagttaaaaatcgtttggcttaagctgctgtgaaacagtagacttaacaagatttggctgtgttgtccctgagattgtttatatgcaaattgataataca

SEQ ID NO: 14884 - DNA, 2228 bp, Zea Mays
attcgagccctgaaatcccaaaagcccaaaccaaatccaagcgcaagagggggcaaagccgcaaagggggaggcaccaggcaccggcagccattacttactggtcctcactcccacaccaaccaaccaacctcctctgcctgccgcttctcctgctgcgggcgggcactgctgcaagtactagaggaggacatccgcttccattactgcgcctgcggaggatcggaggaaccagtagcggaggcttcgattttcggcgggcgcaataaatttcccgcatggctcggagggccgcgtcctcgctcgtctcccgctgcctcctggcgagggcccctgccggcgcgccgcccgctgccccctctgcgccgcgcaggacagtgcctgcagatgggatgcacaggctgttgccaggtgtccttcagaggttcagcactgcagcagcagtagaggagcccatcacgccgtcagtccatgtgaactacacaaagctcctcattaatgggaactttgttgattccgcatccggcaagaccttcccaactctggaccctcgtacaggggaggtgattgctcatgtggctgagggtgacgcagaggacattaaccgtgcagtagctgcggctcgcaaggcttttgatgaagggccatggccgaagatgactgcctatgagaggtcccgtatcctactgcggtttgctgatttgatagagaagcacaatgacgagcttgctgctttggagacatgggacaacgggaagccatatgagcaagcagcccagattgaagtacccatggtggcccgtcttatgcgttactatgctggttgggctgataagatccatgggctcattgtgccggctgatggcccacaccatgtacagatcttgcatgagccaattggtgttgcaggtcagatcatcccatggaactttcctcttctgatgtatgcctggaaagttggccctgctttggcatgtggaaatactctcgtgctcaagactgctgaacaaacccctctatcggctttgtatatctccaaattgttgcatgaggctggactacctgagggtgttgtgaatgtcgtttctggttttggccctactgctggtgctgctcttgctagtcacatggatgttgataagatcgcatttactggatctaccgatactggaaaaattattctcgagttggctgcaaagagcaaccttaagacagtgacactggagttaggaggcaagtcccctttcatcataatggacgatgctgatgttgaccatgctgttgagcttgcgcactttgccctgttctttaaccagggacaatgctgctgcgctggatctcgcacgtttgtacatgagcgtgtttatgatgagtttgtggagaaggccaaggctcgtgcattgaagcgcgtcgttggtgatccgttcaggaaaggtgttgaacagggcccgcagattgacgacgagcaattcaacaagatcttgcgctacattaggtatggtgttgacggtggagctacccttgtgacgggtggtgataggttgggtgacaagggtttctacatccagccaacgattttctcagatgtccaggacggcatgaagattgctcaggaggagatatttgggcctgtgcagtcgatcctcaagttcaaagacctcaatgaggttatcaagagggcaaacgcgagccagtatggattggccgccggcgtgttcaccaacagcctggacacggccaacaccctgacgcgcgcgctcagggccgggaccgtctgggtgaactgcttcgacgtcttcgatgctgcgattccgtttggtgggtacaagatgagcggcatcgggagggagaagggcgttgacagcctgaagaactacctgcaggtgaaggcggtcgtcaccccaatcaagaacgccgcgtggttgtagacgctgcaagtgtggccttgtgcacgagaaccacgtatattcatttcctggtcacatccccgaacaatgtgaaggcgttaatcagatagatgacgatgaagaagaacaactataataagatttgccctagcctgggttctcagttatctctaataagttttatggttggtgcctatatattgtgcaatttggttgctcccttttattttgtttctttttgataagactgttctagcaacggatatgcagagttcattatgaaaatgcatttgttagtgtctttgatggttaaaaaaaaaat

SEQ ID NO: 14885 - DNA, 424 bp, Zea Mays
atggtggatcaaaattgtggagttattcataaaactttgtataatcaagtgatctgtgacagtcacatcattctatatccagctacaaatcagactcgtactcgctgacgagcgcctggcggtcccagaaggcaaaggtggccgcaacgaagatgaagaagaggagcgtgaggcgcttgctcgagcacgggtggatcacgcggcctggcgatcggcacgggaccccaatgcaacgcgggggctgcacaaccctgaccgcggcaaaggggaggggcagcaaaggagaaagctgctggatgaggaggtggtggtgggtggtgaggcgaagcggagacgccgcgggcctctcagggacaggttgcaagtggagaggaagggtaactgggccatgctttttgggccgaaaaaacataactataagtag

SEQ ID NO: 14886 - DNA, 1420 bp, Zea Mays
cccttatttggtttacatgacaggctaagttgttatacggcaatagatttactgatgaggaacttgagaatatcaaactaatgatccaaagcaacatgtttaagtacctggggattctgcttgagggccgggagcgctttgaggaagaggctttggctgtaccaaatcacccaagctcagtgggcgatgatcctcagcaagatgaaagtaaatcttcaagttccaattcttgcatctactcgataaatgcaaaactgaagaagttttccgattggctcctggacatcatagcgacaggagacctagatacattcttccctgcagctacccgtgaatatgctccagttgttgatgagttgtggaaagatcctgccattcaagcaacatacaaaagaaaggatgaattgcattttctccctgatgctgctgagtacttcttgagcagggctgttgaagtatcaagtaacgaatacgaaccgtcagagaaagacgtgatatacgctgagggagtaacacaagggaacggattggccttcattgacttcaccttggatgaccggagccctatgtcagaatcctttggcgacaaccacgatgcgtaccctcaacaaccagtaaacaagtaccagctgattagagtgagcgccaagggcatgaacgagggctgcaagtgggtggagatgtttgaggatgttagcatggtgatcttctctgtagcgctcagcgactacgaccagctcggagccccagcgagcggcagtagcaggacactcgtgaataagatgatccaaagcagggacctgtttgaggctacaatcaggcagccgtgcttccgtgacacgccgttcctgcttttgctgaacaagtacgacgcgttcgaggagaagatcgggcggtccccgctgtcgtcgtgcgagtggttcggcgacttctgcccgctgcggacgcaccacaacagccagtcgctggcgcagcaggcgttctactacgtggccatcaagttcaaggacctgtacgcggcgagcacggggcggaagctgttcgtgtggcagacgcgcgcccgcgaccggcccaccgttgacgaggccttccgctacgtccgggaggtcctccggtgggaggacgagcgtggcgtcgccgggtactgccccgacgagtccttctacagcaccacggagctcagctcgtcccgcctcatcgccgctgcacagtgactgtcgcagcgttgttttgtgtataatgatcgtatgcttgcttgtttcccgaacaaatcaaatgctatcaaatatagtgatctgagtgatgagcagaaaactcgtactgtccttttggtgtccatgctgccgatgttcccttctcttctgattcggagcatatccggtgagcatgggcttacggtgttgtgcacatcaaatccgag

SEQ ID NO: 14887 - DNA, 4340 bp, Zea Mays
cgggacggcaaccccagccaaagccaaaacaggcctgcttccttacacctcgcttggtggtctgggcgaccggccgctggcgtcgcgccctcccttataaaccaccacacttcagcacccacagctccctcttgcatcccctcgcccgtcgtctcgccagtcgctacaccccaaaaacctcacgcgcgcgctcgcgacccctcgcgctcgcctcgtcggcacgccggcgagaggggcgcccatccccgtgcctatataaggacgccggattggaggtgcccgtcccttatccgcgcggccagatctacctctgttccacgcctccgtcaccgccgcgtcggggcgatcccaccgaggccacaggtataagctggtaccatggcatccaacacaggagcatcaggatggctcaggggtaaggtgaaggctgtgacatctggagattgtctactaatcatggggagctcaaaagctgagatcccacctgagaagtccatcaccctgtcctaccttatggccccaaggctggctcgccgtggtggagttgacgagccctttgcatgggaaagcagagagtttctaaggaagctttgtatagggaaggaggtcacattcagagtggattatacggctcctaatattggacgagaattcggaactgtttatctaggtgacaagaatgttgcgtactcagtaatttctgctggatgggcaagggtaaaggagcaaggcccaaaggggggcgaacaaaattcgtaccttgccgagctgttgaggttggaggaagttgccaaacaacagggtgttggtcgttggagcaaggaacctggtgctgctgaagagtcaataagagatcttccaccatccgcaattggtgaaggaagtggttttgatgcaaagggttttgcggtttccaataaaggcaagagtttggaggccattgttgaacaagttcgtgatggcagtactgttcgtgtgtatttactccctaatttccagtttgtgcagatatatgttgctggagtacaggctccatcaatgggaagacgtccatcggtacctactgtaattgctgaaactgatgataatgctaatatcgcgaacgctgaagatcctgagggaacacctgcgcaactgactacagcacaaaggctagttgcatctgcagcttctgctgaaattccaccagataggtatggaagagaagccaaacatttcacagagactagagttctcaacagagatgtgcgtattgtggtggaaggcacagacagctttagtaatataattggttctgtgtattaccctgatggagagactgcaaaggacttggcccttgagcttgtcgaaaatgggctggcaaagtatgttgagtggagtgccaatatgcttgatgttgaagtaaaaataaagctgaagaatgcagaacttcaggctaaaaaggatcaattgagaatctggacagggtttaagccaccagcgacaaactcgaagcccattcatgaccagaaatttaatggaaaagtggtagaggttgtaagtggggattgcattattgtggctgatgattctgctccatatggaagtccttcagctgaacgtcgggttaatctgtcaagcattagggctcctaagttgggcaatgctcgtacagatgtgaagcctgaccattttgctcgtgaagctaaggagttcttacgcacgaggttgattggcaaacaagtggctgttgaaatggaatactctcgaaggatcagcactgtagatggacagagtgctgctccaacagcaaacatggctgatacaagagttttagattatgggtcagtttttctgggttcaccatcacagactgatggagatgacacatcttctgctccgagctctgctagccagcctggagttaatgttgctgagcttttgctctcacgaggctttgctaaaacatctaaacacagggattatgaggaaaggtcacactattatgatgctttattagcagctgaatcacgcgctgagaaagcaaagaaaggcgtgcattctcagaaagaatctcctgtgatgcatataacagatttaacaactgtatctgcaaagaaggccaaagattttcttcccttcttgcagcggaacagaaggcattcggccatcgttgaatatgtttttagtggccatcggttcaaactaacaattcccaaggagacttgtagtatcgccttctcattatctggtgtccgttgtcctggtaaaggcgagccatactcagacgaagctattgctttgatgaggagaaggatacttcaacgagatgtggagatagaggttgaagcagttgataggacaggaacgttcataggttctttgtgggagtccaagaccaacatgggctctgtgcttctggaagctggacttgccaagctgagttcatttggcttggataggacctcagatgcttatatcctaacaagagctgaacagtctgcgaagcaacagaagattaagatatgggagaactatgtcgagggtgaaaatgcttccaatggatccacacctgaatctaaacaaaagcaaattctcaaggttgttgtcacggaagttcttggtggtgggaagttttatgttcagacaatgggtgaccagagggtggcttcaattcaacagcagcttgcatctttgaaacttaaagatgcgccggtcattggtgcttttaatcctgtgaagggagagatagtcctcgcacaatttagcgttgacaactcctggaacagagctatgattgttaatggacctcgttctgttgaatctccggacgacaagtttgaagtattctatattgactatggcaaccaagaggtggttacctacagtcgtttacgacctgtagacccatctgtttcctcgtctcctgctcttgctcagctatgcagccttgctttcataaaagtgcccagtcttgaggatgactttggtcaggaagcagcagagtatctaagtgaatgtttgctcagtagctcaaagcaataccgggcaatgatcgaagaacatgatacttctggggggaaatcaaaaggacaaggaaccggaaatgttctcattgttactcttgttgatgcggagacagaaagtagcataaacgctaccatgcttgaggaagggcttgcccggctcgaaagaagcaagagatgggacactagggagaggaagacggctctccagaacctggaacagttccaggacaaggcaaagaaggaaaggctgcggatttggcagtacggagatgttgaatcggacgaggacgagcaggccccgcctgcaaggaagcctggaggtcgtcggtagagactgggcagtgtaaggctgcagtctggcatgctatgaaagttttggacaaccacaaatgttggactctgccgggagttatagatgaggacttactgaggggtaccgtatttatattcggttagaagaagggaacttagcgaggcgaaatcacttttgatattccgtttttacaggcgaaactttctctgttttagcacttttgatattccgtttttacatcgcaagttataaggttaaagatgcattgtttctttttctctcaacttaataaggttgtgtctatgcgctgcggttctttgtagtcagaatataatattgagaagtgcagtgaattaagttaaggattgcatttaattattccagtgtccgtgcagtgacgatttctctcgtacgcatttactgattgttttttttttttggcttgatggtagctttcttcttggacaaaatgtctatttgcagtatatacttagcctgcctctgctggcgctgttgcttgatattccgtttttacaggcgaaacttttgaagctatgcttcgctctgagatagaacatcaatcctttcaagtgctaaacttcacggaggctcgatctcatgaatgaccgaatcactgacctcgacaaactcaaagaggccaagggcttggcggccatgcaagacacgtctgagataaaagttgtgctgttgacgatctagtgctacgcaagatccaaagtatgaaggacaaacataaactgtcacccccttatgagggtcctttcatcatctctgaagtacttcggctcgacgcttattgactccagctagaagatgacacaatcaaccgtttttacgtgtaacttctccattttttgcaataagtccatctcgaacaactccaccgccatgactgagatgttgggggcctaacatcatgtatcaatacattcatatggagctgttacaagaaaattcatatctcgcaaatttcgtcttgaatacttcttgaagggtaa

SEQ ID NO: 14888 - DNA, 885 bp, Zea Mays
  misc_feature (884)..(885): n is a, c, g, or t
tacgggcccaactgcatccggccccggtggcccagcagcctgagccagcgcgcctgtgcatcttcttccagcgtgccgtcgcctgcatcaagcgcggcgcacgcccactcgtcctctcggctctcgtccagacgcccagtcgccctagccataggcccctagccctagcacagcagcacaacagcgccgccccccgcccccggtggcccggccccccgcccgttcacccgcgcaaccgcgccgcgcgacccgcgtccggcggccgcccatcgccagtgccgtgacacgtcactccgacgccgtcgccaccaaatctcctggcaacgcctcacgtcttctagttctaattccagcctcactgctgccatcacctccgcctgctgtgtgtcttccacctcgcgctgccaaagccgacaaaccctagcccaactctccctaccctcgcccatcccactcctttcgtccgattcgtggaggcgacggaggggctaaggcatgacgaccgatgggcagctcagggagtgggtctccgacaagctcatgagcctcttgggctactccaagagcgtcgtcgttcagtacgtcatcaggcttgcgaaggagtgctcttcacccggtgacctcgtgggcaagcttgttgagtttgggttcagctcgtctgcggagacccgcaccttcgcgtcggatgtctacgccaaggttccccgcagggccagcggcatcagtaattaccagaaacaggagagggaggcggcaaagcttgtccagaaacagagtacttacaagctgttggtcaacgaggatgacaatactgacaaccagacactggcaagtcaaaagacctcaacaaatccatcatctaagagtcggaagcatttcaggann

SEQ ID NO: 14889 - DNA, 95 bp, Zea Mays
ttaaagggtcctcggtcagcacgcctacatacgcgttaatccttaactaacctgggtagaacatcacctgttcctaacccaagtctcaatttaag

SEQ ID NO: 14890 - DNA, 254 bp, Zea Mays
tcttcaagaaacttttcatcgagctggtctaagactccccatctatactactattagatcggggctagatcacacacctatgttcacatgcatagtggagttggcaggaatgaaatttactggcaatcctagcaagctcaaaacaatgttgcaatggctgcctggattgaattgaagaaacctggggtaggtgagcattcatcctcatcttgtccacctggtcaggataatgaagtgcaagaaaaggtcgtagt

SEQ ID NO: 14891 - DNA, 951 bp, Zea Mays
cagaagtgcagtagcatgttggttcttggtgagaaggcatttgagaaatttgggaagtggttcatctcgcttcgtttttcagaccagttggcaggttcttacaagaaggtccttgcattcaagtttgtattgccagatgcaagcaacatgtcagagatgacaagattggttgctcttgtgccatactacattgatttggttggccgttataagctcagctctcatgctcgctctaaaactgatggagctagaacaaaggctgctcaggaggctttcagggaactacagagtgcccggcaggaggccctgcaaaggaaaaaggctgaaaagaagaaactcatcgaggaggcagatgccaaactaagcgctgagtcactcaggaagaaagaagaaaaggaaagggctcggcaaatgaagaagtctggacccaaagtgaagatgctccgctcttaacaacgtcatgattcaagaatctatcatatcttggcttttgctattcacctgttgattagcatatagttcagtgtctgctagactcatttatattctaatcctgtgagaatgagcaaaaaggatccaggagaaaagaatcctcactggcgtttcggcttttattggatgtgtgccagaattatccgtggccccacgcccccacgcaacttctaagaaaaattggttatgcaaaacctgtgctgtatgagaaatagaacttacatgattcaatgtgtagaatggtgatagaactatgatatgaaattctatgctcggattacatgctttcagattctagcaacttcgctgctcagcatccatttcggttgtttgtaatgtgtttggtttctttttttctcactcctgctgggactttggagtacaagcgatgtcatagcctttccgatatttggaaccctgggagtgaagtgctaatgtccaattgctggactgatgttt

SEQ ID NO: 14892 - DNA, 1439 bp, Zea Mays
gaggcggctgctgctgagggggatgagcctgtccaaatgaaagtgcacaaatctttgaaactgtggagcttttatgttgatctggaggagagcctcggaaccttagactctacccgtgcggtttatgagagaatattggatttacgaattgccactccacagataattctcaattatgcatatctcctcgaggagcacaagtatttcgaagatgcatttaaagtgtatgaaaggggcgtgaaaatattcaagtatccccacgttaaggccatctgggtgacctaccttacaaagtttgtacatagatacaagcgaagcaagttagagcgagcaagagagcttttccatgaagctgtccaacaggctcctgcagaggaaaagaagcccctatatttacaatgggcaaaactggaggaagactatggtcttgcaaaacgtgctatgaatgtatatgatgaggctgtaagagctgttcctaactctgaaaaaatggccatgtacgaaatctatatagcacgcgctgccgaactctttggtgttccaaggacaagacaaatatatgagcaagcaattgaatctggcctcccagacagagatgtgctgacaatgtgcatgaaattcgctgagctagagagaagtcttggggaaatcgatcgttcgcgtgccatctatgtgcatgcatccaactatgctgatccaaacaatcctgacttttggaagaagtggaatgattttgagattcagcacggtaacgaagatacattcagggagatgcttcgtatcaaacgcacagtggctgctagccgcagtcagacacatttcatactgccagagtacttgatgcagagggatcagaagttaaacctggacgaagcagttgacactctgaagcgtgctggcgtccctgaggacgagatggcagctttggaaaggcaactggctaccggaccatctactgccccaccagcagcaccaagcactgccccagcctctgctaacaggatgatgaactttgtcagtgctggagtagaggcccaggtcgagagcagcaggcaacaggctgctaacaatgaggacattgagctgcccgatgagagtgacgatgaggaacccgatgtccaaattgcggagaagagcgttcctgctgcggtatttggtgagctcggcaagagagctgccgagaacaatgaggaaagctcaggtgcccaagggaatgagcagctgggcgccctcgagaggataaagagacgacgccaatagtctgcctctgctaagatgagagcccatgtgtgcaccatgacatccgtacgatctttagcgatgttgtacttgtaaacattttttcgagtggaattttactcctgtgcaaagcatttacgtaagttgttcgggggtatacccgctgctaatatgatgccgaaacgttattatctttggtc

SEQ ID NO: 14893 - DNA, 1446 bp, Zea Mays
aagcaaaagcccacagaacgagtgaggccaggcgacttcatactgctcgcctcgccgtctttcccccaatctgttgctcctccaagctgcgggcgatcgccgtaccccggccgccgcagggaaccccctcgccatggccttgcaggggaagaagctcatcaacaaccccgacgatgtggtgacggagttcatcgaagggttggtggagacttacccgggtctgcagtacctcgacgggttccctcagattaaggtcgttcttcgtgctgatgtcgagcgcggttcctatgacaaagttgcagtcatctcgggtggtggaagtggccatgaaccttcccatgctggatttgttgggccagggatgttgacagctgctgtttctggagatgttttcgcctctccacctgttgattctattttagctgctattcgagctgtaactggtcccatggggtgccttctaatagtaaagaactacactggtgatagactcaattttggattagctgctgagcaggcaaaatctgaaggctataagatggagatggtcattgttggagacgattgtgcccttcctccacctagagggatagctggtagaagaggtttagctggaacaattcttgtgcataaggttgctggggccgcagcagatgctggtttatctcttgcagaggttgccgcagaagcaaaacatgcatctgaggttgttggtacgatgggagttgcactttctgtttgcacattgcctgggcaaataacttctgatcgtctaggtccaaggcaaatggagcttggccttggaattcatggagaacctggagttgctgttgttgaactccagccagttgacgtagtggtagaacatgtccttaaacagatattgtcacaggaaactcagtatcttcctgtcacaagaggttgcaatgctgttctcctagtgaatggattaggagccactcctatcatggaacttatgattgcagcgagaaaagcagttcctgagttgcaattggtgtatggcattgctgttgacagagtctacactggcacacttatgacatcacttgatatggcaggattatctattaccattatgaagtccggcgaaagcattttgaagagacttgatgctcccactaaagctccagcttggcctgttggttctgaaggaaaccgtccaccagcaaagtttcctgttcctctaccaccatcaccttcaatgaaggatgacgagattcttgctccatctcaggagctgagcaagcaagggtgtatcctggaggctgttattgaagcaagtgctactgaaattatcaatctcatggatagcctaaatgaatgggacagtaaagtgggcgatggtgactgtggaagcacaatgtatagaggtgcaacagctattcttgaagatatgaaaaagcgtgcattttttctctattccag

SEQ ID NO: 14894 - DNA, 1106 bp, Zea Mays
ggtagatcttcagctgatggggtcgatggaggaggtatatgacactttggctgaacaccttctttcggtcttgaagaatattgaacatcttgattcaaaatacattgttggtctagctggcccacctggtgctggcaagtccacagttgcctctgaagttgttcgacgtgttaatacattttggtcccagaagcacacaaagggtagtggagcaccgcttcctaccaaggaaattgctgcaatgcttccaatggatggtttccacctttatcgtgcccagcttgatgcaatggaggatccaaaagaagcacatgcaagaagaggagcaccctggacattcaatccatcactgtttctgaaatgtctacatacactaagaacagagggttcagtttatgctccatcatttgatcatggtgttggcgacccagttgagaatgacatatttgtaaagccacagcacaaaatagtgatagttgaagggaactatctgttactggaagaagatgtttggaccgaaattagagacttgtttgatgagaaatggttcattgacattgacattgatatctccatgcaaagagtgctcaagagacatattgcaaccggaaaagagccagatgtagcagcatggaggatctcctacaacgaccgaccgaatgcagagcttatcctggaatcaaggaagaatgctgaccttgtgatcagatcagtagacttctcaagctagtgttcaattctttcaataggaaatagcattgtggttctagagttggaggttgttgtgggctgtttccgtggagattcctgtacatataataagctgaatgcctgtttcaaattttcatggtgattgtgttgcatgtaataagatattccttcactatgtaccgtggaggattgttaagtaatttattgacattttttaatagaaacacccttcagatttgtgtccaatgtcatatttttgttcctgtagaagatattaggagctttattgttgtatcgaaggagcaaaatgtctaggatcacaggccagagcagctccaagaggcgaccaaaacatatcccaaaactcgttttaggcttcaaaacataaaaatata

SEQ ID NO: 14895 - DNA, 1747 bp, Zea Mays
aaccaaccaaccagccagccctgcctgactgcctctccaaccagcgggagcgagcgggtcgtcccttccgccacctcaagagctcactgctggccctgactgaggccctcggccctcctccagtcccctccgcggctccgcctctattaaacccttgtcccttcggcgagactcctctcctccttcagatcaaccctcccctccccggcccgacgcccctcgccccccccctcctgaccagccatggcgaccgctgctgctgcgtcccggggcaacaacaatgttagcttcggcagcaaatcatgggtcggcggcacattggcctgggagagcagctgctcggtgcggcccaggcgcgccagcaaggtgctctgcatgtccgtccagcaggcgagcaggagtaaggtctccgtcgcgccgctccatctcgagagcgccaaggagccacctctcaacacgtacaagcccaaggagcccttcacggccaccattgtctcggtggagagtctggtcggccccaaagctccgggggagacttgccacatcgttatcgaccatggtggcaatgtgccgtactgggagggccagagctacggcgtcattcctcctggagaaaatcctaaaaagcctggagccccacaaaatgtccggctttattcaattgcatcgactaggtatggagataactttgatgggcgaaccggaagcttgtgtgtccgccgtgcagtttattatgatcctgagactggcaaggaggacccctcaaagaatggtgtctgcagtaatttcctgtgcaactcaaaacctggggacaagattcaattaacaggtccctccggcaaaataatgcttctgcctgaggaggatccaaacgcaacccatatcatgattgccacgggcaccggtgttgcccccttccgtgggtacctgcgccgcatgttcatggaagatgtcccgaactacagatttggtggcttggcctggctcttcctcggcgttgccaattcagacagccttctgtatgacgaagaattcaccagctatcttaagcagtatccagacaatttcaggtacgacaaagccctcagcagggagcagaagaacaggagcggcggcaagatgtacgtccaggacaagatcgaggagtacagcgacgagatcttcaagctcctggacggcggcgcgcacatctacttctgcggtttgaaggggatgatgcctggaatccaggacacccttaagaaggtggcggagcggagaggcgagagctgggaccagaagctggcccagctcaagaagaacaagcaatggcacgtcgaggtctactagggctcggattgctgtggttgcgacccttgatgctgccggggcagcgtcaggagacaaacacatgattgaaattgaatcgatggatggttctcggggcggtgtaaagtcacaaaagttccctttgtgagaaaaatcgccttttgtaattcataaaagcttccgcgccacggttatccgtggaacggaccgtgtaactttcagccgtttacatttgcagtgcagttgcttttggcagtctgtctagtgtctaacaataggtctctgtccagttcgtacgcatatgaaccctgatgactttgcataattgccgttcaatgcttgccccttgtgccccacattcgttggccactctgtcaacgggcgagcggcgatcttcattcttctgagcttcaaatcatgggcatctgctacctctgtc

SEQ ID NO: 14896 - DNA, 2500 bp, Zea Mays
  misc_feature (2500)..(2500): n is a, c, g, or t
ctttcatctcaaactcaaatgtggggctcggtcatcctgttgttccgcatacggacacggcatccgaggtcagatcccatcgtctggagtctggactctggacgcatcctttccccccacccccgactcgagtctagttccgttcgaaaaaattcaaatccccctccccccctgccaacgtctcgttctccccaagcggcctccgcagccagccattgagccatgtccctcttgtcgcggcacgcgcgtcaccccactacgccgccgcccgcctctttctccggcggcgttgagaccccacctcgtcgccgcgtccccaaagagaacgttgacccctcctccccggcgcgcaaccaccactctgccctcgaccacggcgcctcccccttccgctccccgtcctccgcggccaagccgctctccgcccgcaaccgcttgccaccgcgtccgccgtcctctaatccactaaagaggaagctcgaagtctcccctgcagcggccgcggtgggctccgcgcacgatgccgcacccgggctcgactccggcgtccaggtggtggtgaggatacggccgtcgtgctgggtcgatgaagaggaggcaggcgaggatgggaggggaccggaggcctgcgtgcgcaagacggcggccaactcggttgcgatccaggggcaggacttcacgtttgatgctgtcgctgactcggtctccacgcaggaggatatcttcacccttgttgggctgccacttgttgaaaattgcttatcaggtttcaacagctccatatttgcctatggacagactggcagtgggaaaacctacactatgtgggggcctctatctgcattgtcagaagattcattgagcagcgagaggggcttaacacctcgtgtatttgagcagttgttctcccgcattaacgaagaacaagttaaacatgctgacaaagagcttacttacaattgtatctgctcgtttctcgagatctacaatgaacagataactgatttgctagatccctcgcagaagaatcttcaggttagagaggatgtcagaactgcctgtgtttatgttgaatcattgacaaaggagttggttttcaccttgaaggatgtaactcagttgttggttaagggcctggcaaaccggaggactggggcaacgagcgcaaatgctgatagctcacgctcgcattgtgtttttacgtgtgtcattaagatggattctaagaatccagaggatggctcaagcatcacaagatcaagtaggataaacttggtagaccttgctggatcagagcgacaaaaactaacacatgcagctggggatcgactgaaagaagctggaaacataaaccgttcactttcacagctcggaaacttgattaatatacttgcagaaatatcgcagtctggaaaacaaaggcaccatgttccatatcgtgattccaagcttacatttctattacaagaatcccttggaggcaatgccaaactggcaatgatttgtgctgtttcaccgtcccaaagctgtaagagtgaaacgttaagcacacttaggtttgctcaacgtgcgaaagctataaaaaacaatgccgtagttaatgaagagaaaattgaagatgtaaatgcgttgcgtgagcaaatcaggcaattgaaggatgaacttcaccgaatgaaatctaatggaggcatagaagggaacagcggcagctttgccactggatggaaccctaggcgcagtttgcatctgttgaaaatgagtttgggtcatcctacaacattccaatgtataaaagaagatagtgacgaggaaatggaaattgatgagaatgatgttgagaagccctacaatcatgaaaatatggcaatgtcttctattaatgttaaagaatccaaacgtttccaagcttcaatgaatgtaagtgctggaacttcacaggttgaagatcttgacagggataagattttgatatccataaaaaggtcctgctgtagtgctaataaatttaatactggtactgatgttggagatggaaaatgcaaattaaacattgccgccagtatacagaggggacttcaagtcattgaaagtcaccaaaataatagtgcatggaagagagcatcggttggattaaatgctagaatcatggatattcaaccttgcaaggttgatgttgcaattcagactgatcctgaagaatacgaaactagagataaccctctagctctggttcctagttgtctgcttgaagcttctgcaaatgagagtagggatcccagtacttgcagggacctacaactagtaccagttgatgtgacagtaccatctgatgaccaaaagcagcgacattttctgaaagctgtggagaaggtcttggctggagctatcaggcgagagatggctcgtgatgaacagtgtgcaaagcaagctgcagaaattcaacaactgaatcgtctggtgcaacagtacaagcatgaacgcgaatgtaatgctgtaatgn

SEQ ID NO: 14897 - DNA, 1422 bp, Zea Mays
gtgagtttgcctctatcccgcccacctcaccgtcgttgtctccgccaccgccactgctcccaccactgccatgcattaacctcaacccttccgcaaactattcactgtcactttgtcatcggcgctccatcgttcactcaaatgtggtctccgatacctggcaccctcatgaggactagttcactccctgctgtcattgaggcttctggcaatgatgactggaagaaacgaaaggaagcacagagcctgaagaggctcgaggttaagaagaagaggattgagaggaggaactctctcgcctgcaacacttcaaaagaagctgctgggcagagtccaaaagagatgaatgcaaacactgacaaattagtaagttctgatgaaactattgtcagcgctaacgaaagtcatagcagtggcaagcatctggtgaaggggcttccaccaaagtaccaggccacaattacatcagaagacagttcgtcagcaatgcgaaagaagccaaactcggccttcaaaggaacagccatcactgaggagcagaactcatcatcgtctgttccttcctccggtgaagctataagtagcgtgacggcaccaagtctgcctctgttgtctttggtccccataacagcaacccttggttccagggaagaccaaagcattttaggcagggctggtgcaagggcaaacggcatgggggacgtggaaaggaggatgatgcaggagatgccgggcgtgttcaccaagggcctgtccaacggcagcagggtcgaaggcttcctgtacaaatacagcaaaggagaagtgaggatcgtatgcatctgccatggaagcttccttactccttcggagtttgtggagcacgccggcgccggcaaggtagataacccgctgcgacacattgtcgtcagcgctaccccgaacctgtgactgtgaggccaggcagacccgtgcacaagctatagtgttctgtagactcaggacctgagcctagcgtcagagcaatgtcaccgttagactgtgtggtgcggtgcttatgcccgattaaattggtgggcattgtggtaacataacctgttgataatgttttgacaatgttttgatccttcctatgcgtgatttagttctgcagcttcttcttctttttttcttttgtgttcctatcgtggtttcatacctgggcaagtagatttgtaggttagtgaggggcttgcggtgccactgtcccaatggccttgctctgggtgagctcgaagagaagttttttagactcatttgggcaagttttctacgtccaatatggtactgaagtttttgttgctggtttcgggtgttacaaagcagagtctgaactcttcgtgcttatgtgagatgaatacagactaagcatgcttgtgtttttataggaggccacctgtattc

SEQ ID NO: 14898 - DNA, 112 bp, Zea Mays
ctgacttacacgtagcaatccactaaagatgatgggtttgttaagaaattggctagtgcaggtcaagtgattgaactagggtagaaagaactctaggtacaggtaattttac

SEQ ID NO: 14899 - DNA, 545 bp, Zea Mays
agccaaacggggccattgtaaccttaagcctctttgttgtactaactggcaaggtgacacctagtgctcattttcagaaggaccttggacttgatagcttggacactgtggagatcgtgatggcgtttgaggaagaattttcctttgagattcctgacaacgatgcagagaagattgactccatcaagacagcggttgatttcattgcttcgcatcctcaagcaaaataagaggatttctttttttttcgtatttcaaagtgtgttttgcacttttgcatccagaactttatgcgacacgggactagttttatctagcttgccgcagtagataggaagtcatttctttacctttctgaatccgcgtgtaccaaacgattgttgtgttcttgtgacctcattggtacgctaatccataaatccatttggacttcctttctgcttcattgatgtgtaaattcgtaagggtgagatatatttctcaatctcagagttgcatatcagttgaatacttgaatttgaaatgctaaattacagaagtgggca

SEQ ID NO: 14900 - DNA, 81 bp, Zea Mays
caattttttacccgaagcgtgtcgaatgataaagtctagctcttcagtagacgcttcgggagtaggagattcaaccttctt

SEQ ID NO: 14901 - DNA, 3803 bp, Zea Mays
atgaccattagggcaaggggcacggaaaaccgagcaaaatataataaccgagcatctgatattacaggcgcaaacgcaacaggttacaccactagctggcgttctccgaacccctcgcggaaacccttccggctcccgccgctctcccgccgccatcactcgccgctctcccgctgccaaccgttgccttcaggctccagccgccggcacggctctgcgtacggggggattcacttccatccgacaccatctggccttctcttccatctcgtgggtgtttgttcgtgcgcgtggattgttttgtccgtgtctggtgcccgtgcaagagcccctaagctggtgcgtccgccatgtttccccccaaagggcccaaccactacgggcagccgccgccttacggcgggcagcagccgtacagccaaatccctagtagcactggatttgcagccccgacagcagcaggtggcactgatggtggtcggtttggtgggcgtggaggacaaggggctgctgcacagtatggagggccttatgcatcagtgtatggcacccaacaggttggtggacttggtggcaaaggtccagcttcttcaagtcttcctagcttgccaaatcgtccaacttctctcactgagtcatccaagttcacatctgcacctgtggggtctggcctggcaagaccaaatgatgactatatggctgtgcgaggttatgcacagaagcaagaccaatatggcacagattatccactagagagacgtatgtatggtgaacactcggccaatcttggtagaagggatggtctcagtgatttggatagaagatacactgatcagatagctgctggtcatcagagttcatcaatgcgccatcagcagctcttgaaaggtcagctgcagcctggatctgatacgaggtgtttccatttcgcttcgtggatgatgagagggattatctgtccttgacaaaacggtatcccagacttgcaattactccagaattttctaagattgtcttgaactgggctaaagaaaacttaaatcttcctctggatacaccagtgagtttggagcacgatatccatgattcagatgatggtgctgatgaaggagcaattatctctactgagaaaacatcaagcttcaatactccggccaccatttggaatgcaaaggtactattgatgagtggcatgagcaaaggtgcctttgctaacataacttcattgagaagtactgaggaacgagttgtgcacttgaacaatatcttaaaatttgctgtattcaagaaggatcgttctctttttgcaattggaggcccttggaatgcagatatagatggtggtgacccatcagctgactgttcttgcttgattcgaactgccatcagatgcgttaaggaaacggttcacgttgatctatctagttgcacccactggaaccggtttgtcgaggtacattacaatagaataggcaaagatggactgttcagtcataaagaaattactgttctgtttgtgccaaacttgttggaatgcttgccttcagtggatatatggaagaataactggattctgtacaaaaaatcaaaggcagaaagggagcagctcactgttaaaaagagccctggtgatccaaaagagcagatgcaaggggagctgaacgatggtaaaaatttagatgctgatcaattaaaagaggctgatgttggttgcagtgatatgaaaaatgagaaagacgatgttgatatcaaacagcaaggcaatgatggagagggtacgggtaaagttgaggaacctgttcagaagatgggtggggatgttgaaggaaaaagtacgggtgactcctctattgaccatgcaacaactggggataaaaagcccacaaaaaagaaaataataaaaaaggttgtgaaagttgttcgaaaaaaaataactggaccttcagttgataaatcttctgaggacaagattgttgtagcagaatctgcaaacaaaactgcagaaggggggcaaagtcaacaaaagaatgatgatgctggaaaacaacaggagggagctggtataagtcaacaaccagaagcaaagaaaactgtgaagaagaaaataattcgaaggattgttaaaaggaaagtttctggttcaggttctcagttgaatacccctactacacctgctgaaactagtaggcaagaagcagaagttcagccagaaaaaaatgttgagagttcggccgacgttggaaactctcagactaagctacaagaagggtccaaaattccatctgaagatatctcaaatcagaagaaagaggagaaaccagcggaaaaggaacacccattgactgatctcagtttaaatgcagataagggcaatcacaaggaagcttttgaacaaaaagacatgaaaaacgatggaaagaaggataaaacaaaggatgataaagagaagaatagagacctcaagatggatttaaagcaaaagctacctcttgacacacaagaaaaaaagaggtctgatgaaccaccaaagtatccaggattcattctccaggcgaaaagaaatacagaatccaaactccgcttaacatccctttcattgcatggcctcctagactatactgccaaggatatagaggagtcagtatttgagctttctttgtttgctgagtcattcagtgaaatgcttcaacacagaatgggttgtgttatcctgtcttttcttgagaaattgcacaggcgatatgttgtgaagaggaatcagcgtaagcgccaaagagaggaagatctaaagaaagaagagaaatcttcagagaagcggtctaagactactcatgagactactaaaactgaaagtgttgataatccaggaggcagctttaaaatgacaaaagagggtgaagaaaagatgagcacagatcaatctgcaaatgtccatgctgaactgtcaaaagagggtcagataaaacttggcaccgatcatccaattgctaaccatggagaaccagcaaaagggggtgatgaaaatatggaggaagatcctgaatacgaggaagatcctgaagaagtagaagtatatgaagatgacgaggacatggatgatgctcacgctgaagaacagattgcagaacagaatgagaacacaaacgacagagagattaagccaaaagaagtagcgacaacagatggtggaaataacaaaagtacaagacagcctgaagtagaaaatgttactaatatccatgaaagagctgcttcaatggaagaaaagcagtccgtgccagagataggagatttggtgggaggtggagaaaaggtagttagtaaagagattaagccagcaaaagatgaggtgatcgacaaggacctattgcaggccttcaggtactttgacataaatggagcaggatatctcaaggttgatgatttaaaatgtattcttcacaacatggggaagtttttatcaagcagggacgtgaaggacttggttcaaattgctcttgttgagagcaattctgcaagggacaatcgcataatctatcctaagcttgtgaagattgttgacctgtaatctggcactgcttggcccgcgtcagtccccttgaagttaaccatgctatgatcgttgagaagtcagttatgagaaactattttgtttacttattaatgggttcactgccatttttgtggctacctgtttctacgattatgctacaaggagctgcatttcgtttctgttgaattttttttacggaaattatcaagtcgtgaacgtagcagccgaaaaagataaacgaacattgtat

SEQ ID NO: 14902 - DNA, 2605 bp, Zea Mays
gatgcatatgttctgaggctataataccgaaatgacttaagatataacaatttgcaaaccagaacatcacaatgggtgaagcgatactcactggatatgggttattcaaggaaaaatactggttttggatcggtgttggagcattgtttggttatgcaattattttgaacatcttgttcacaatgttcttgacacttctcaaccctattggtaatctgcaagctgttgtggccaaagatcaagtacggcacagggattctaggaggaagaatgacagggtagccctagagctaagatcatatctgcattcaaattcactaagtggtaatctcaaggaacagaaggggatggtgttaccttttcaacccctttctatgtgcttcaggaatatcaactactatgttgatgtaccagtgttctgctagcaggaattaaaaaagcaaggtgtagcagaagaccgcctgcagctgcttgttgatgtcactggagcttttaggccagggatactaacagctcttgttggagtcagtggagctggcaaaaccaccctcatggatgttttagctggcaggaagactggaggtctcatagaaggaagcatcactatatccgggtatcctaagaaccaagagactttcactaggatatccggatattgtgaacagaatgatgttcactcaccttgcttgactgtgatcgagtctttgttatactcagcatgccttcggttgccttctcatgttgatgcagacactcaaagggtaagccttgattggttatacatcacacgcgctttttgtcctccttatcttttgtgttccctttcataggcttttgttgaagaggtgatggaacttgttgagttgaatcccttaagcggtgctcttgttggtctgcctggggtaaatggtttatcgactgaacaacgtaaaaggttgacaatcgctgtggaacttgttgcaaatccttctattgtgttcatggatgaacccacgtcaggattggatgctagatctgcagccattgtaatgaggacagtgcgtaatattgttaatacaggacggaccattgtctgcacaatccatcagccaagtattgacatatttgaatcttttgatgagcttttattcatgaagcgtggaggacagcttatatacgctggtcccttaggtgccaaatcgcgtaatctggttgacttttttgaggcaattccaggagtgcctaaaatcagggacggctataatcctgctgcatggatgttggaagttacaagcacccaaatggagcagattcttggagtggattttgctgaatactatcggcaatcaaaattatttcaacagaccagagaaatcgtcgaggccctaagcagaccgagcagtgaatcaaaagaacttactttcgccacgaagtatgctcaaccattttgtgctcagtatatggcttgcctatggaagcacaacctatcgtactggaggaaccctcagtacaccgcagttagattcttctacacagttattatttccttgatgtttgggacaatttgctggaaattcggttctagaagggggacccaacatgatatattcaatgcgatgggtgccatgtatgcagcggtgctgttcataggaattaccaacgccacttctgttcagcctgtgatctccatcgaaagatttgtatcttatagagagcgagctgctgggatgtattcagcgttgccttttgcattttctctggtcactgtggagttcccttacatccttgtgcagtcactcatatacggttcaatcttctacagtttgggatcatttgagtggacagcagccaagtttctgtggtacctgttcttcatgtacttcacgttgctgtacttcactttctatggcatgatgacgacggcgatcactccaaaccataccattgcgcctattattgcggctccattctacacgctgtggaatctcttctgtggattcatgatcccaagaaagcgcatcccagtttggtggaggtggtactactgggccaacccggtgtcgtggacgctctacgggctcctgacctctcagttcggcgacctggaccagcccctgcttatggccgacggcgtcacctccaccaccgtggtggctttcctggaggagcacttcgggtttcgccacgacttcctcggcgccgttgcggccatggtggccggcttctgcgtcctcttcgccgtcgtcttcgccctggccatcaagtacctcaacttccagcggcgatgagagagcaagtggttcagctagctagctagtatagtagccaccgccgacacagacccaccaaacggatcgcagcctactgtacatgcatacaccgatcagtgcaggagggcagcagcacaatgaattatgaatgcgatgtacctaccagcgcgtcgtattggcacagttaatttgcccattacccccagaacatttcgccggggtaaataatcttccggtcggtcacgggagcgagagtgagaaaaagtaaagggtactgtatagccagctattccatgtacttgctgccttggcctcccctccatcgttatacggtggcgtcgcttcatgcagggttt

SEQ ID NO: 14903 - DNA, 1340 bp, Zea Mays
cttatctttttggtagagctgaaagcgatggaatataactttgacctgtaaaatgaggccagttttttgcgggaaccttgactatgatgttcgcatctctgaggtcgagcgccttttcgggaagtatggaagggtggaacgagtggatctgaagacagggtttgcattcatctacatggaagacgaacgtgacgctgaagatgctatcagtagacttgatggaattgattttggcagaaaaggaaggagaatcaaagttgagtggaccaaggaggatcgcactgctgatcgaagaggcaactcaaggaggtctccaaccaatgcaaaaccgaccaaaaccttgttcgtgatcaactttgacccgatcaacacgagaattcgagatctggagaggcactttgataaatatggcagggtcgcgaatgtaaggatcaaaaagaacttcgcctttatacagtttgaggcgcaggaggatgctactagagcattggagggtgctaatgggagccatttcatggacagggtcatctcagttgagtatgcgctccgtgacgacgatgaaaaaggtgaaagggcgacgaacggatacagcccagacaggagaggccgcgaaagatccccaggtgcaagacggtctcctagtccttacggcagaggtcgggagagaggtagcccagactatgggagaggcaaggagaggggcagcccagactacggcaggggaggccgcagccctgataatggcaggggaggccgcccagccggcggtggcggcggcggcagaggtgatcacgccaggggaggaggacgacgacgcagccctgactattatgaccgcgagcgccgagaagctagtcctggctatgacaggccccccagctgctcacctggaactgggagggacgcgagagactagaaaagcgccccatgcctgtgttgtagaattcaagcatcaaagcctcccgcgtcagatgaagttagagttggtgatgttagccagcaggaaactcgtttacttatgtgcgttagctcgtgctgactttgcaagttagcttaccatttcccatttgcgactccagaatgtaactcgtatggtctggaatggtagctttcaggactcgtttgaacctttcttggagtttttttcttcttttccggctaccttgattgccctgtgcatgcgctgatgaatctacagattgtttcgtctgtcaagtgttccgctgtaatgtaagagacgaaattatttgttccttgttgatgtagtccctgttttgtgcagcgagaaatttcagtatcttacgctcagtatgcgcgcctctccagatctgacacctaat

SEQ ID NO: 14904 - DNA, 2605 bp, Zea Mays
gttcagttcttagctcaatccgtgtcgttggggaaccgttctgagtgagatctttagtggtgtctgggcctatgtgggaggcacatttgctgggaattagggcaatcgacttttaagtacatttggtgtacggctgtttgattattactgagattcagtcattcggctggatgagagttgttgctggagacttacgagtgtagcactgttgtcggcttgtgattaaatagcatcacttcacatacagcactggataatggatcgtagggatacttcagggtttgttagtggagggtgcaaaaataatgaagcctactgatttctgtagatcttctaaattggtagctttgttgacaattatttaacccagaagtgaggccagctggtacttcccataaagcttggttactctaggagcaatggatcccaggcacgggcgttcagcattcactataagtttctcaaatccaaatggctttgcgtatcagtgcactcccattccagccgtcagttatccagcaactggttctagccagcttgatgtgctagctcctagaggttgcaagagaaagtggactgagttggccctaggtctgggtgactcatcaagctcagacagcagcaagaggagcatgggtactggctgcactgtatcttctgccaagggaagcgatgacgtctcatgtatggactacgacataggttttgagctatctctcggcaatgaaggtacttcgaggctgtgtaaacaggcctgtgactctacaaggaccatggagaagcctgggttggatcttaagttatctttggctccatctcaatctgatgtaactgatgcagatgtaattagaagcagtgcacctcaggacatgtttgtgcatcatcagtacttaatgtcgtcagcgccaacagttgatgaaggatctacatccgctcgacgcttatctggaggcatggtgggttcgtttcttaaccaggatgggatttctctggaccaagcgctcccggttaaccctaatcaggttcaagtcccagctccttcagcaccaaaaagttcagctgcctcttcttctgggtttgtccatccacagcagcgcagcagtatcacaaaaatctgttcgcacccaggctgtgcaaaaggagcgaggggttcatctgggcggtgcattgcgcacggtgggggcagaaggtgccagaaaggaggctgcagcaaaggagctgagggaaagaccatcttctgtaaagcccatggaggggggaagcggtgtgaacaccttggatgcaccaaaagtgcggaaggccggactgatttctgcatagcccatggcggcgggcggcgctgcagccatgaagggtgcaagagggcagcacgaggcaaatcgggcctctgtatcaagcacggtggtgggaagaggtgcgaaaagccaaactgcacaaagagcgccgaagggcgttcaggcatgtgcattgcccacggtggcgggcgccgctgccagtacgctggctgcgggaagggagctcagggcagcaccagtttctgcaaagcccacggtggcggcaagagatgcacacgccccgactgttccaagggcgcagagggaagcacggcgttctgcaaagcgcacgggggcggcaagcgatgctcggctgacgggtgcacgaagagcgtgcatggtgggacccagttctgcgtcgcgcatggaggcgggaagaggtgcgtggtggaaggatgcaggaagagcgcgagaggccggagcgaccgctgcgtcgggcacggcgggggcaagcggtgccactccgctggctgtgggaagagcgcacagggaagcaccgatttctgcaagtcgcacggtggaggcaggcgctgttggtggggacatctcgggtcgggtggcgctccttgcgaccgtctggcgagaggcagaaaggggctatgcgatcgacacaacccgctggtggacgacaacagcgtccacgggggtgtatcgtttggtggtttttccaccctttctgagggaggcgccgaaacaagcttcttcatgcacacggtggaggatcctcgccacgtggcgccatcggcccgtgaaggccgggtgcatgggggcaactttatgcctttcatgctggatggtggtgtgggactcggcaagaagccagccaacaacgctgactctagtacctctgcccctcgcagctgcaaaaatatggagaagcctggtgcctctgcgcagcgcagctggctgtgatgccagaagtccgtggcccgcccgcccttccccatctcggtgtgctctgctcgattcaagtatctcccctgccctctggtgtggtgtgaaactgaaatctattatgcgtggactgtcggtgtgtagactggttggtcaggacatgtttggtagtgtggacgttgtggtttgtttgtgcttttttgcatcagtcaatcagtctggtcgaacatacctggtagcaagagtagtgtgtgaatggcctgtaaaaggaacccatcatcatgatgtatgtatatatctaaataataaaaggaggaaggctgcatcagtcggtgtaattaatcgaagtgttaatggtacgtactgcttccatgggc

SEQ ID NO: 14905 - DNA, 2374 bp, Zea Mays
cttccctgtcgctctctccccgttctggttttcgtctaatctagattggatgggatgatgattcgaggcgttagcttattttagctgtaatcccagactaaaccctggctcgttggttcggcggcctcccggtgagaatcgcatctccaatcaggatggagacgaagaaagtggagtctgtccctggtcataatcacgcggggagtggatgataagatcataaaaatcagacaatcatcggtcacaactcatactgttgtgtctttttaacccctgagccaccgaggccaggagtgattgattggtttaagctcagcgcacccagagtctgtgacattcatgggtagtgcctgttcgaggaagaggggccagctggtccaagaggatgatctctacagtgcgaggttctccaagagcggcagcttcaagtggctgctgcatacgctgccccgcagcaactttgctgatgtgcagcggagagcacagggcccagctccaaaccggtgcccgtcgcttgtggagctgtgcgtggccaaagtctgcaaggacataaatatgtattctgatttatccctgctgcccagagatcttagtcagcagatattcaatgagctggtggaatgtggatgcctcacggaggcatcgcttggggctttccgtgattgcgatttgcaggatatttgtctgggagactaccctggagttactgatgcttggatggaagtagtggcttctcaagggcagtccttgctatctgttgacctctcttgctcggatgtcactgatagtggattcaatcttcttaaagattgctcaagcatgcaaagtttggcatgtgattattgtgatcaaatctcagaacatggacttaagacattatcaggcttttcaaacttgacatcactgagcattaagaaatgtgctgctgttactgctgaaggagcaaaagcctttgcaaacttagttaatttggtaaacttagacctcgagcgttgtccaaagattaatggtgggcttatacatttaaaaggcttgaaaaaactggaaaaactgaatctgagatactgtaatggcatcacagattcagacatgaaatatttgtcagatctcacgaatttgagagagctacagctctcttcctgcaaaatatctgcttttggtgtttcttatctgagaggtttgcacaagctaggtcatctaaacctggagggctgtgcagttactgcagtttgtttggaggttatatctgagcttgcttcgttggtcttgttgaatctgagtcggtgtggcatatgcgatgaaggctgtgagaacttgaaaggtcttacaaaattgaaggctctaagtttagggttcaaccaaattacagatgcatgtttaattcatttaaaagatttggtcaacttggagtgcttgaacttggactcatgtaagattggtgatgagggtctatttcacctaaaaggcctcatacagctaaaaaacctggagctttcagacactgaagttggaagcaatggacttcgtcatctttctggtctgcgtaatttgcagagcatcaatctctctttcacattggttactgacattggtttgaagaagatctctggcttgagttcactgaagtctcttaatcttgacaatcgccaaatcacagatactggtttagcgtctcttacaggtctcactggattgacacacctcgacctatttggagctcgcataactgattctggcatgagctgcttcagatttttcaagaatattcagtccctggaggtctgcggtgggttgattacggatgctggcgtgaagaacatcaaggacctgaaagctctgacgttgctcaacctatctcaaaacggcaagctcacggacaaaaccctggagctgatctccggcctgactgcgctagtgtcgttgaacgtgtccaactcccgggtctccaactcgggcctccaccacctgaaaccgctgcagaacctgcgctccctatccctggagtcctgcagggtgacggcaagcgagatggataagctccggctggtcgccctccccaaccttatcagtgtgcggccggagtgatacgaccgccagcgctcccacagcgacctgtaactgtggagcaagtggcgcctggctagagcaggccgccttgtacatacttttgcaaaaacgaggtgtctgtacatattgttcgtcgtgtcgtgtcgtgtcagtgtgcctgatggcaacgggctaatacgtccgtgccaacgtgtgcatggtatcccacggaccctgtggtagtaaggagcagttgtaaatatgccgtgcttcctctccattttccatgtaaattcgtggatgtaccaattgctgcggtcacgccgtc

SEQ ID NO: 14906 - DNA, 72 bp, Zea Mays
tttcaatagaatcaaagcctctccaagtcccaaatacattccactcacctagtgacttaagagagagtttgt

SEQ ID NO: 14907 - DNA, 3153 bp, Zea Mays
cctgtgcccctggtccgagcctccaaccacactccatctcgccgcccaaaacccactctctccaaaaaggcaaaacccctccttcccgcggcggccgccggcgtagccgacgacgccgacgacgaggcagccatggccgcccccgccgcccggagaatagttggcgctgaggttcccatacccggctcggacaagctgcggtggatcgacctcaccatcccctcgtcctccgccgctgcgccggcgagcccctccgatcccttcgtctgcgtgcccccgcgtgctgcctcggggtgccacatcatcccttcgggcgattctcagtattacctctcgtggaggattcacgaggaacacccaaatgtgctggaggtcattgaacttagtccctccaaggagttccctagctttggactgcgtcttgccttccaggaggcgctatctccattcgcctttctatgtgaacgagagggtcgcaggcaaggggagcttgtatatatgctatatgtgcttaccgtttctggagttgctcttttgtgccacctacgcagcccattttcctacgtatctggttcagtgctgcatcaggatgatatagctgagtttaatctccaaactcaagctcagagcgcaaaggttacagcggtaacagcgaagccaggatgtattgtgattggtcggcaagatgggtccatctgttcttacagtcttggcaaattagccccaaactcaccaggtttctcgaatgaactacgagatgatgctgggattggacgtttatggactctcatgtcaagaacaaagactgtgggtcctgtgcaggacatagtagcaactgttgtaaatgaaagggacctgttatttgttcttcatttggatggacacttgcgcatatgggataatcacatgaaacttctcaactataatgtccactcaaatgacattgaaggccatccgtccaggctatgggttggtaaggctgatgatgatcaggagttgatatctttggcgattctgcatcaaaacactgtggttcaaggttgtgattatgttgctgtatatggcttcggtttttctgctgcggaaaggttcatgttctcttctgaaccttcaatttctactatacctttgctagaggggaagcttgcggacttgaaaatagccacatataagctttggatacttaaagaatttggctccatgctctatgaaatattacagtatgacattgacaccgaaactgcaaaatgttgtagtgagaaggtttgctgttatgtgctacaagaagatgctatcagtgaacagttgtttcaaagttctgacaatgcattggatgatttggtttggacagctgattcaatgttctcctccttgaaggaacaggcttttactttgatttcatccatgtttctgcggaggctacttcaaccaggagtaaaccactgttctgccctacgtgaaaccttactagagcataaaaggttcctatcagattctgagttccagtcacttacagcaaatgggctacgaaaagagatattatctattatagaacaagagggaagttcacagacagcaagtgctacagcttatcactggaaacaattctctgcacggtacctccacaattggtgctggcacaataagccctatggattgtttcttgatactacaaatgaagtgtttggtttagtaagaaagggttcattttctctattccgttgtttggagggtctggagatgcttatttatggttatgaccatggggtgaacttactcgacgatgtgtctgattttgaactcctcaatgaggtcctcagatgcatgggcaatatacaccatttgctggggagatcttccacagcagcatattatgaatccttaattagttctattatatcatctgatgaaattgtttcacatatagtaaagattctagagactggttttagtcatcagtcatcctcatccctcagtacattactaggaatggatacttatgtagaaagaaggcaggcagctcacaaaagtcaaaggaagttttctgttgagatgttacgatcttttcatacgttgcaatcaagatcagcatcctggtcggcagtattcgatgtgattgagaagtttatgaagtgtttgaacacaaacatgaacgtacaatcgtatggatcaaagagagtttgtaatgtaaattctgtgttactagttcaagctacttcacaggttgccagaacaatgtttgagtgtgcatttgatctgtttctgttccttagctatctggttggtgttggtgggcaggtttctttgttgcaaaatgatgttgccagaataaaactgaagctgttcccaatgattcaagacatattgggacaatggattgttctccattttgtaggaacctcaccaacctcaccaccaaccattgacgattttagctatcaactttcttctcttcagcttggtaaatcagatgaactgtctttgcacagaaagcttggctgctctgattttacattggcttctttacttgattttccaaaatctcctgaaggggacgttatgtcaccttgttttctcggtccagcggaaataataaatctagtaaggaggtttagtagtttgattatgcatggaggaaattttgaatgtgtacacactttcttgggatgcacaattaatctatcagctgttctcatcagacatagtcagtatgaagctgctcagaatctgctgggaattctggaaacatacttgaacaatggaaaagtatcgcatactggtcaagatgcagacactgcatgttcagcatatcttcatctcaatggattttgccttctgatgattgcacatgatgaagcaaatattattttgagagaatccaaggttcatgatgctatccgatgctttttcagggctgcatccgggtatgaagctccaaaggctttggagaacttttcattggaaacagggtttcaagtttctggggaatctagatctatttctttgtggagacttaactactatgagtgggcaatgcaaatttttgagcaacactccatgagcgagggggcgtaccaatttgctcttgctgcactagaactagttcttctcgacgggatagataatggaattgaagctgagggtctccagaga

SEQ ID NO: 14908 - DNA, 1503 bp, Zea Mays
gattagcaagccccaacctctggagaagaataaaccagaattgtctcgcgaagacacacttgaccaaaagtgatgttgatggcactaccctggcttgtattgcattttcctgcccaagtttaagaactctcgagattaccatggctgctgatgctgtcaacaggatgactggggaggatctaagtcgttttgtttcggagaagtcttctctctcagccctcaaaattggtggttgctctaatttggatattcttaatctgtgctcttcaagcctttcaattctttggttgtcagatctttgttccctttcgaaatcggttatgaactgtcctaatatgagcgagctatcactgtgcttcacagaacatagtagtgattgtaccaatctgattactttgatggatggcctaggtcgtacatgtcctaacttggaaaaaatgcacatatcatcaaaacaattatctaatgaagctgtatgtgctctagagaatgctaatctcaggggactgttcatgctatccctgattctaggttcaaaaataactgatgcagctgttgcatctattgttcggtcatgtgcaagcttggagttacttgatttaagtggatctagcattagtgacaatggtgttgggatgatatgtaaagcataccctcgtactttatcaaggctgctccttgctctttgcccaaatgtgaccacacgtgggatccagctagccacagcacagttgccatgtcttcaactcatggactgtggaatgagcctatgtgctaatgtgaagaatgaaaaagagggtccatattttggtgaaatcaatggaggtattagaattattcgaaaactgtccatcttaaagaggcaacctattcaccaaaagcttattataaagcatgggaatttgaagaagctcagcctgtggggctgttctgcattagatgctctatatctaaattgtccagagttaaatgatctcaatcttaactcttgcacaaatctacatccagttgaaccatctcttccatgcaagcggctagcggatggctccaaacgggttcaactccctcagttcctaaagcagcagccgtcgaaggacaacaaattaattgaattgagccagacccagtgcactgtgcatcttggttcataataacaccaccagagccagttaacggagcattgtacacaccgaattatgtgaatcatgcaccacataacattatcaattcgttgtatacttctgtattgcatcagaacctgtagtgattgttgtataagctgctaattgctgcatggacatgtctgaatccatcatggatttcttgcgaccgttagtctgttctaggaaacattatataggaataattcgtaaccatgacccgtattctctagggaaaaaaaataatgatcctaggtcactcattttggttggtgttattctgttattcttccgcatgagctatctatggactttggttcttcaatctctacttttaaatagg

SEQ ID NO: 14909 - DNA, 3250 bp, Zea Mays
atggcgtcgacggagcaggaggcggcggtcgaagcggccgccgtcgtggaggaagtgacgcggcagcagggcaaagggtgcggcgtcgcaggaggaggggataccgttgggtcctggaggaacatcgacattgcctggcgcaaggcggatgaagctgcaataagaaggtatgaggcagccaactggttgcgaaggatagttggggtagtgtgtgcgaaggaccttgcagaagagccttccgaggaggaattccgtattggcctgagaaatggcattattctctgcaatgcactcaataagattcaacctggtgcggtacccaaggttgtggaggttccatcggattctactgctcctgtcgatggtacagctctctgtgcatatcagtactttgagaatgtgaggaattttctcactggcatgcaagatctaggtcttacaacatttgaggcatcagacctggaaaagggtggacaaggtgttcgagttgtagactgtgttcttgctatgaagtcgttttgtgatgctaagcacgtgggaaaacgatctccattcaaatatggtggcattgtaaagcctttgtctggaaagtatgtcattcgcaagaataatgaaccttatatgaaggtgatgatgaggagtcactcagctgaattactccgggatggcatatcactggagcaaataggtcttgatttttctctagaacccactgaaacaactgctactccagactccatcaggatgcttgttcaaacagttctcgcagataagaaaccagaagaaattccatcagttgtggaatcactcttgagcaaagtaattaatgaatatgattgtcgtattgctagccagagtgaagtggtgaaagacactatggaacaggtgaaagacactatggaacaggtgaaagacactatggataccaatgactgtaactcagttttgagaatggattctccgtttgacaccaatgatactaagtcattatccagagtggactctccacaagtggagtctactacccccagcgatctggacaaggccactgaaaatattaagatggacgaagatgagcagaatgcatcgagtctgacagaagatgtaagcacattagtacctctaccagtaccagtaccactaagcaatgatattgtaattaatatcccaaagatagtgagaaattttgatcaagaagagaaacagatccaggatttgaaaagtaacatgtccactgttaagtctttcatggagcagttaaaactgctgtactctgaagaccttaaaaagcttggtgatcatttgcgtattatttctcatgcggcttctgggtaccgcaaggttgttgaggaaaaccgcaagctttacaaccaaatacaagaccttagaggaaatatcagagtttattgtcgagtaagacctttccatcctggaaaaagtggtcccaaaattttgacagaagaagggctcggtgtcaactacagagcactaaatgatctatttggtatccaggagcagaggaaagatacaatttgttatgaaattgctgtacagatgatggagatatacaacgagcaagtgagagatctccttcagactggcggaaacaaaaaattggaaattcgaaataattctcaaaacggaattgcagttccagatgcaaatgtggtgccagtcagatcgaccgctgatgtaattgacttgatgaatctgggccaaaagaatcgaacagtttgctcaactgccatgaatgaccgaagtagtcgctcccatagctgtctgactgttcatgttcaaggacgagatttaacatctggaacagtcctaagaggttgcatgcatcttgtggatctagctggcagtgaaagagtcgataaatctgaagtggtaggaataggattaaaggaggcacagcacataaacaagtcactggctgcactgggagatgtgattgcagctctagcccagaaaagcacacatgttccttacagaaacagcaaacttactcaactattgcaagactctcttggtaacccccaaagttcgaaatccttggtttgcaacttgccagcaccaaagatatgcgctgtgagtattttgtttccccttttttcaggaggacaagcgaaaacattgatgtttattcacatagccccagaaccagatgctattagtgagtccataagtactttgaagttcgccgagcgtgtttccactattgagcttggagcagccaagtcaagcaaggaaggaggaggaggaggaggaggagaagccagagagctcaaagaacagattgcttgcctcagggcagcattagctaggaaagatggagatcatgagagcatacgaagcactcaatcgagcccagacatatatagaatgggaacgggtaatgcatcacctgcgtccaggcacccaatagaagatgggatcatagagaacgactcagcattgggagatttggctgaacactcacagttcgggagcagcaattccctaccagagttgggacctgatgccacacaagatctagccttctaccaaagaagcaactccgaacagcaatggagctggtctgggtctgttgcaacggaggattccgatgatttcgaggttgcaactaattgctcgttagagctggactgcgtgaggccatctagtgccccaaaagcttcaggtttatcaaatggagggggcacagctgtaaaaaagatccaagtcaagggttcaaaaggttcagacgttaggggagtgaatcctggaaaaaggtcatcgccattacagaagaagccgagtggaccctcaccgacgctaatcaagaagggcggaggtgaaggaaggaagactccaaatggtaaaacaggaaccaagaagtaagcaacccagatgaaacttggttttgctgtgaccaacttcaccttggttagggacagataaacatgttgatactatcgggtgatacattgatatttgccacacgaatacgtcagtcctcttaagggaggaggtcgctagatcttcgggcatctgctgtaaatcactcgttgatttgttgtagtacgaacagaaaacggaccacaaaaaactcgaggatgggaggaagatcatcatcacaaggacgtttttgttagatgtatatgttgcttagcttatttttctcgctgtgtgtaagggcttctatgccctgcccatgtacatgtttggcttcttgccccatggaatatacaaagctcatttcgctctaaca

SEQ ID NO: 14910 - DNA, 2768 bp, Zea Mays
aatagcagacttttgttcagcagagagatgttcctttacatgttcctgccactgccgatgatttctggctattatgttgcaaggttctttactaagaaaagcttgtcatcatactttacctttgtggcacttgcaagcttgatggtcctttggtttgtggtgcacaattattgggatctgaatatttggattgctggcatgccattgaagtccttcacaaagtatgttgttgcagctgtcatcatggcaatggctgttcctggtttggcacttcttccaacaaaacttcggtttcttctggaacttggtcttattggtcatacattgttgctatgctacattgagaaccgattgtttaactatgcctccatgtattattatggatttgaagaggatatcatctatcctaattatatggtttttattacaacctttttgggcttggctcttgtaaggagattatatgttgatcagagactagggcccaaagctgcttggatcttaacttgtctatattcatcaaagttagcaatgctgtttatgacatcaagatcagttatatggttctcagctgttttgctacttgctgttaccccacctttacttctttacagagacaagtccaaaggagcttctaagatgaaggtctggcaagcttattttcatgcatctgtcatagcattttctgcctggctctgccgggaaacaatttttgaagctttacagtggtggaatggaagacctccttcagatggtctgttactgggttcatatattcttttgacaggagttgcatgcattccaatagtcgctctccatttccctcatgctcagtcagcgaagagattcctggtccttattgtggcaacaggccttctcttcgttgttatgcagcctcctattaagctatcatgggtataccggtcggattttatcacagcggcacatttatctgatgatgacatttcaatatatgggtttgtagcatctaagccctcatggccgtcatggctgctcattgcaactgtggtacttacactagcagcagttacatccatcatcccagtgaagtatgtcgttgagttaaggacttcatatgcagtggctgtggggattacactaggcatctacatctctgttcagtacttcttccaggcagttgttctgtatcctcttcttgttgcaacaattgtctctgcagcagtctttgtcgtattcacacatcttccttctgaatcaagcacaagggttttgccatgggtgttctctttcttggtagctttgttcccagtcacctatctgctcgaaggacacttaagagccaaaagttttgcagatgaggatgaagcagagaagttcaccaacatgttggctatagaaggggctagaatgtcacttttgggtctctatgctgccatcttcatgattattgcattagaaatcaagtttgagctgactttgctattgcgtgaaaaggctgcagacagaggtatgcatggtccatctagtcggagtgctgccttcccacccaaagcaaggctgctccagcaacgaagagctcatgctgcaccaacattcaccatcaagcggttggcagcagaggcagcatggatgcctgctataggcaatgtttctactgtgctgtgttttggcatctgcctggttctaaatctaacactcactggtggctcgaaccgtgctattttcttcctggcgccaatccttctgcttctgaaccaggattcagatatcttcgcagggtttggtgataggcagcgctatttcccagtaacagtttctatttctggctatttattgttgacagcgttgtataggatatgggaggagacttggcctggcaatggaggatgggctcttgatatcgggggcccgggctggctgtttgctgtgaagaactttgctcttcttgtgctcactttgccgaatcacatactcttcaaccgcttcatgtgggattatgtcagacagacagatgccaagctactgctgacgctacctctcaacttgccttcgattataatgacagacatacttactattcgggtgttaggattgctaggagctatgtactctcttgcccagtacatgatatcaaggcgcataagaattgctgggatgagatacatttgaaataggtcatgtaactttctgaggctgtcactatacatcaagttctttcaaaactcaggaacagatacttcattgcctgatcctctcgcagcaaaattgtgctatgtagcagagagaaacaagtgtcgaacgactttgctttttttgtactgaatgattgcatactgagtgtaggctaaaggtgttgtcgcatatatagatgtattttaacagcacagatgatgccatcaccttgggtcgtttatgttgaacttttgacggcgcaaagttttgcattcacctgagcagaagactttgatgtaactgttgatttcgttttttttttttgttccagctcgtgggcttgttttggttctttctcatagccagtgtctcggttcttcctcagccagtgagagagcgaagggagaggaaggtagacaggtggaggctttgtagtggtagatggagtcgtagatggttctgagagttgagttctccctcctgatcggagaggaagcaggtaggtaggtggtggctcgtcagatggttctgagagttgagtcttctcttctgatttgttgtactttctcgtgcactgggacattgaagtacctcggtgacggatggcttataac

SEQ ID NO: 14911 - DNA, 1933 bp, Zea Mays
ttatactccttcagtttcaaatttttgactacctaaaaagtttggaaatagaagagaagattaacaagatcaagtggtgccaaacaaccaacaatgcactctttctcttgtctacaaatgacaaaacaatcaagtattggaaggttcaagagaaaaaggtgaaacgcgtttcagtgatgaatttggacacctcccaaagttcagacaatggttcaacttcaagtccgggtaccagtagttgcagagctcttcttccaaatggtggatgcacaggaaaaatgtacagtccaaacaacaatatgtcatttcctccaggaggatgcacatcgctgcgtttgcctgtggtggttacaggccaagaatttactcatgttgcgagaagcagacgtgtatatgcccatgcccatgactaccatattaattccatttcaaataatagcgatggagaaacgttcatatcagcagatgatctgcgaataaacctttggaatttagaaattagcaatcagagctttaacattgttgatgtgaaacctgcaaacatggaggatctaactgaggtgatcacttgtgcggagttccatccaactcactgtaatacactagcatatagtagctcaaagggtactattcggcttattgatctgcgacagtcagcactgtgtgacaaccatgctaaactatttgaggagcatgaagcacctggatcaagatccttttttacagagataatagcatcagtttcagatataaaatttgcaagggatggaagacacattcttagtcgtgattatatgacactcaagttgtgggatctaaacatggattcaggcccagttgcaacttttcaggttcatgaatacttacgtcctaagctttgtgatttatacgagaacgattcaatttttgacaaatttgagtgctgcctcagcggcgatggactccatgttgcaactggttcttatagtaatttgtttcgtgtttttggttgttctcctgaaagcgtggaggcatcaacgttggaagccagcagaaatcccatgaggcgacaggttgctgatccagcaaggcctgcacggactctgaccggtgctgtgaggagaggtggagagaacacaagcgttgacgccagcggaaactcttgcgacctctcaacaaagctgctccatcttgcgtggcacccaactgagaactccatcgcgtgcgctgccgcaaacagcttgtacatgtactacgcataggggaacgtgctagagagaactggtacagtagtgctttttttttgcttgtttgcttgcttgaagtgaaaggcgtggtctttcacacgttcaaggatccaggcgcaggaaactgttgtcggttcgatggctggggagcccccgaaaagcggcagtcggtgattccacaagatcagtcctggcacaagctgacttcctcctcgggattttccttggtggatgtgaagctgaagcatgtgttactggtttattattaccgaagctttttggcacccaaggtatgacgacggctgtagctgcctgccttgtagcgaaattggctgcggaaggataaaaggaagcggtaagaagacagacagacaggtcacaggaatacctgctcacgtatcacaaaggctgtaagatttttccccccttctcttttacgacgtgtaatgcaacctagtcagagctaaccatcagttgtcgtgaactctgatagtttctgtcatagatactgtagattttatctatgcagctgctgttgtattcattagattgttcggataagtgtaccagtgggctgtgatttgctggttgtggccgtgatgtggctacgcggaggaattcgaccgaagttaaatctctttctatttaaaattaaatataaaaggatgtaacccaacaagaaggcctcgcaggttccactcttctaa

SEQ ID NO: 14912 - DNA, 1436 bp, Zea Mays
cggctgacgaggtgttcatgcagacctggatcagctgacagatctatccacgcaacagcagtacagcacccgatgtgctggaaggcagatcaagggcggcacgcattagaatcgcggttggtgtcagcgtctcgctgctggcgcttcttctagcggttgctggcctcctcatctggttaagaaagagaaggctaacgagaacagccggatccagcaaatggagcggctcacgcagcaccggccgtcggtacgaggggagcagccatggtgacgatctggagctgccaatatttgatctgggcacaattgcagccgctacggatggtttctccatcaacaacaagcttggcgagggtggctttggaccagtatacaagggtaaactcgaggatggaatggagatcgcagtgaaaacactctcgaagacatccgcacaaggtcttgacgagttcaagaacgaggttttgctgatagccaagctccagcaccggaatcttgttcgccttctcggatgcagcattagcggacaggaaaggatgcttgtttacgagtacatggcaaacaagagcctggacttcttcctgtttgagaaagacactgtggtgcttgactggcaagtgcggtatcgtataatagaaggcatcactcgaggtttactctacctccaccaggactcgaggtacagaatcatccatagagatctgaaggcggccaatgttctcctagacaaggagatgactcccaagatttcagactttggcatggcaagaatatttggcaacgaagagacggaaattaacaccttaaaagtggttggcacatatggttacatgtctccggagtacgcaatggatgggatcttctctgtcaagtcggacgtgttcagctatggagtactattgctggagatcgttagtggcaggaggaacaggggagtgtattccagttcaaacaaccaaagccttctaggccatgcatggagcttgtggaacgaggagaagagcatagagctagcagatgagagaatgaacggacaattcaactcagacgaagtgcagaagtgcgtcagggttgggctactgtgcgtgcaagagaatccagacgaccgtccgctgatgtctcaggtgcttctgatgttagctagtcctgatgccgcatcactgccgactcctaagcaacctggcttcgcagctaggagagttctaatggaaacagacacatcatcgaccaagcccgactgcagcgtgtttgacagtgcgacaaccatcatgcttgaaggtcgatagaaaacatgactaacacaccttgttgaaactgaaactagtcgaaaaatttgtattctagactaaatttcgtggcatcttcagtatcttgtatgattaggcagcaaaaaattatatgaatattagataatagtagtaggtagaatcttcgtt

SEQ ID NO: 14913 - DNA, 444 bp, Zea Mays
aaagagaagaaaagggaagggccccatctacgcccgccctcgtgtacctggagccgtcggcttccgccagcgcccagctggaggtctcgctgttcccttcacgatacgcccccccaaagcggatcaaaccctagatctcgtcttgtcgccccgttcctccgatcccatcctatccgatcctcatggattcctcctcgtccagcctcagccagcagcccgagttcgactacctcttcaagctactccttatcggcgactccggcgtcggcaagagcagcctcctcctccgcttcaccgccgactccttcgatgacctctcccctaccataggtgttgacttcaaggtgaagatggttagcattggtggcaaaaaactcaagcttgccatctgggacacagcacgtttgaagcagcatatacaggacggggacttttcagcaaaca

SEQ ID NO: 14914 - DNA, 986 bp, Zea Mays
gttaatttggattgcaccgagtggtggtagagaccgcccaaatccctcatcaggagaatggtacccggcaccattcgattcatctgcagtggacaatatgaggaggcttctggagcatgctggtgttcctgggcacatatatccactatcattgctgtgctatgaggttatgcctccaccacaacaggttgagaaggagattggtgagcagagggtgatatccttccatggagcaggcttgtcagtaactgaagaaataaactatggagacattactgctcataccaagaatgctgatgagggaagggagctattcacaaataccttgtacaactcagttgttaaccagtacaatgtgctcaaatctgctatctttagagatcgtggagcagctgtatcaaacaatgtcatctcactgtcacaaccatggcgatgaatgttagctttctcagttttggtccagtttcgttactgaagttaccttttcaaaagagcaggtgaactatcattgtgcaattttgctgggagaaactcttgaacttaaatctttttgatatcactagacttcatcaatcatggtggagcctgttattgtcatgcagatgctcgctaagaagtctgcaactgttggttggtcaagggtgattggcgattttgcacatacggatccgcagttactgctgcctcaggttgctcagcaatgtgctgctggttgggcaccgaggaatccatcaggttgcatcctttttgcccggacgtcgatttgtgcagttgaagtggtaaacgtttttttatcttgtttcgtcatcatgtatatacgtaggcttgagtcattgttggctccacattttttggagatataaatgcggtaggagttatgagatgtccacagtcggccctcccttgttgaattcctttggatgtatcctctctctttcgtacatgcactcactgaaagtcaatgcaaatatctcgtgtttctagta

SEQ ID NO: 14915 - DNA, 912 bp, Zea Mays
ttcttgtttgcaaattgttctactgaacttctaacggtaatttgaagaattgttgaagatgagggcatttacgagcttggttgacaccaactacatattagatgctatccgtggttctgagttattggaagtgcagggagataatgttcggaggcgcaatgattggatggaatggctacttcattaacgctgtccactagcaaatcaggttaagatgccaaaatgcagccgcatgctatcttcggggaactgaatagaagtcttgtggaaaattatatggaggagtcctgcaaattgacgcatttacatgacaatctcgatgcatgctacacgtctctgcgtactaatgtgaaactagatcaaatcttggcacgtttaggagccagtgtccctgcccaggccatcgataggtcgactccatgttgtatattggctagctctgtagcttggctcactggctcttaaacgtgggaaggcttgatctagtttgagattggtgcacaagggcatgtggcatggatcaagatcgtactataaacgcgtcggtttgcaggatatagattttattttctaagtcttgggtgatttgatcatgggcaccgggtaccggatccgtggactgatgtacagtgggtctattggaagcgggaagattttgtttgtttagatcggacatgatggctgcacgtaaagccactattgaggggataaataacaggaaataaatttacttaaaagtactttttttgcggtgtgtatagttgttcgaaaagaagtgtgatcctaccttttcatcatggattattggtcctggtgaacgatttggtgctacctagggtttattcttggaatcttagttttgtggtttgagtagtataccctgtatttgactctccttatgagcgaattttt

SEQ ID NO: 14916 - DNA, 4207 bp, Zea Mays
agagctctcttactctccgcatcctttcttatggacgaaacaatgagccaaaacagggcttacctgattcaacacatgttgattcacttccaatcccagagggtggaatggagaaagggaagagcatagttgacacatcagatgtcaaagcaatgtctgaagtagagcacttgttaatgcgaaagacatttactaaggttgagtttgatcgtcttacagacttattgcgtgcaagaaccattgagtctgatccacctaaaccaattgtttctcgtgaggaaaagaatgaagaaagtatcaaagttgatggaattagaggctcagcgttacgtcatatggacctagatgattctcctgctgttaaagtacataatcatggtgctagttctcctgcagaactcgcgaaacaatatatgagctctcgttatttgagggaaccccaatccagtagtctgcggagccgattgtttcttgagaataaaggtgaagcaagcaacactgtcaatgataggaggtctgtaccaccaattgttcagacaccacttgaacttcggaatgaaaaccctggtctccctgtaaatggctatgtgacttcgggattacgtgggcgttcagcgatatatagaatgtctcgctctccatattttaagggtcagaactattccagtgatttgaacacgtcttcattgtcccaacgatcacaaagcttgcatgttggtggcaggcaggtcttgaaacgaagcggggctgaattagagaatgaacttggatctataggccccattcgtagaattcggcagaaatcaaatatgatgtcttcatttagagattctcgtgcaaatcctaaaggaaaccttcttactagccatataagtagtactgatttcactgaagacggtgcatccattcagtctccgagctcaaaaaaattattggttgggagtagtcaatctctgcgacccttagaatcccaaaagaatgagggagatggtaaatctagtgatagcattccacccataccagctcaatcaaacaagatggctgaaaagatatttgagcagcttaatataatagctccatcgccaaaacaacaacagtctgttactctgaatgctagtaactctatgtcaaagaaacctgtttttcaagatgctgggtcaagcagtatgtataaccaatctagttccctgaagtttcaagatttggatggtgcaaatggaccccatgatacaaacttgaatggttccctgctgaagaaagacaagctaaatataataaaagacggatcgccaaaagctgccttttctgatagacctgcccttttggggaactcggtttctgcttctaaatcatggacgccagcctttaaaatggctgtgatagaggacttaccagagttggatgatgatctggaggtccttattcaatcaagtaagatagaggttgaaacaactgagcagaaaattgattcaaatagaaaagaacagaaggttgaacaaaatatattagagcaaagggttgaaccgaacttgaagaacattgctggttctacgattagtgaacagcctgtagcatcactgtctaaaactgtcacttcatctggtggtttatttttatcaaatgatcctgggaaggcagttcccaaagcttctgtggacaataataccgaatttgcattctcaaatgggcctcctggcacccgccctgcaactggtgtatcagcaatgccacttgcttcagttaataacgataaacagactggtgcttcaaatttcattttcggcatcaagcagccaattacgtcagattttgaaacatcaactgcaaaaaacaaatcaacactcgggcagagtgtcaccaagcccacaacattagccagcactagttcagagagaggtgataaaacagaaaaagcagaagatgtagccaacccatctgagaaggtgttgccttcagctgcatcaacaacactgaatgcacctctccattttacatctgtggcatctacttcgagcctgagcaatggcttgtcatactcaccaccaaagctcacaactcctccacctactgataaacctgctatcagctcagctgtttccacttccatatttgccgtatccagtagcagtccagctatttcatcgtctcctgcatttacgggatttagtttttcttccagtgctccggttggattgtcattggtaacatcagctaaatctgatggcacaactgctgaaaataaggcagctagcaccttatcatttggtatagggggtacaaaagctgaagtgaaatctgttgcaccagatgcaagcagcaaggcatcatcggaactttttatttcacctgtgtcatcaagtattgcaagcttttcaagttcccccgccacatctacgcctactttcaccgcagttgcaccttcaagtgatgctgctggaatatctgtggctgcaccatctagtacttccactgcaccaggtttacagtctgcttcaaccccttcatttacatttccgagctctggaaacaacctttttgggttcagctccccagcccaatctactggcctcagtacatcgtcacttgctggtagtacctctcaaccaccagctgctagcacactctttggtagtaagccgacgcagtcagacggaacaatacaacaaacatcccagagttcaaaaccacaatctggctcaccattcccggtcatgactcctggagttggagcatcctcgtctggacctgggacgctatcttttggacttggagcttcctcaactggttcaggcactgcatcttttggtgtcggagcttcatcttccgcacctggaactttatcaacttttggtgcagcagctcactcttctggacctggagttttctcttttggggcaggaacttcctcatcaggacctagcactgcctcttttggtgcagcaacttccacatcagggactggatttggcaattcaccatttggaactggagctacttttgcgaatccatttagctctagttcaagcactgggttcacattttcttcacctagctcttctgctggtgcatcaacagcggccagtacgagtgtatttgccagcacctctacagcttcttcagcctcagcttttagcaacccttttggctcaagttcatccccacccagcacatttacatttgggcaatcaggttcttcaggcaacacttttgcatttggagcgcagccagctccaacgttcccatctcaaccatcacttttctcatttagttcagccaacactagcatgaattcgtctccacagcctgcatttggaatgataaataccaacacagccttcagcatggcttcccccggaaatgatcagatgaacgaagacagcatggcagatgacactagtcaggcagcacctgcgccagcgccagtatttggttcatcatttggacagcagaacaactcatctgctgccccggtatttggtgctcccgcggtccagccaggtggtgtttttcagttcgggggccaacaaggttcagcacagcagaacccgtccttcccagctgttggcagtctagagtttcagggtgggaacttttcgttgggcagcgggggtggtggcggtgacaagtcgaaccgaagagtgatcaaggtcaaaaggacaccaaagaagagataagggtgcgccctctgttggaatcttcctttgatggtgtcatttgtgattggatcgcactgcttgggaacgaagtcaagtacgacgaggttttatggccacgcagatttccctgcagcagggcgatagcgctatatatctcatggctggcttgtaaacgcatccaccaaggtcagtgtagtctcctgtgcactcaattcatttcctcatcggggccggcggcctgcatgttgtgtaatatgcctgtgctcatggggtgtaaaatagaacaaaaaagtgttgtaatttttgttttcttgcctccaaatgccgacttgatttcttatctgtggtttggctacggtatatttgtatcggagtgtaacgcactgttgtatttttgtttttgggtttattacattcaacaaggtcagaactgtatcgtagaatacctgtccatacttaatcctgcctacgcattgattgtttactcgtcgtccgtgagctgttgcgtgctcgtgccacgctgtgttgtccttgtcgcagcagaatatttc

SEQ ID NO: 14917 - DNA, 2213 bp, Zea Mays
cgtccggccatccgggcaagtcacaactcactagtcaccagtaactttaccaatccgcgccggtggtaaccctgccttcggcggcggctagccggtatccagtgtgcgcactccctctatctccctcttggcgacgactgggcggccgtcgctgctgccctacgccgtcttcgggctcttcgttgtcgacgagcgccacaaggttcctaccatttttaagaaaaaagatcaatggaggcagctttgtcattctccaaggacagcccaccaatttcgataatttgtgctgcaaagattgtgggtctacccctaaccatcaatcatagcctcgctgctggctcggcacccaccctacagtttgcttctggagaatcactccatggtgtcaacccaatcatcctctacattgctagaggtgcatcaattgcctccttatctggaaagaatgatattgagtttgggcatgttgttgaatggcttgaatatgcccccaccttcctttcaggctctgaatttgaaaatgcatgcttatttgttgatggattcttggcctcccggacctttctggttggtcatggcctgacaattgctgacattgcagtttggtcaaatcttgctggaattggtcagcggtgggagagtctaaggaaatcaaagaaataccaaaatcttgttcgctggttcaacagcatagattcagaatacaaagaggcactgaacgaagttgtggctgcatttgttgggaaacgaggtattggaaaatctcctgcacctagccttaaggagaaggtacatgactcaaaggacccatcagctccagaagttgatctccctggtgcaaaagttgggaaagtctgcgttcgttttgccccagagcctagtggttacctccatattgggcatgcaaaggctgcactattgaacaaatactttgctgaaagatatcaagggcgcttaatagttcgatttgatgacacaaacccttcaaaagaaagcaatgagtttgttgagaatcttttgaaagatattgagacgttggggatcaaatatgatgctgtcacatacacatctgattatttcccaaagctaatggaaatggctgagagtttgataaagcagggtaaagcatatattgatgacacaccaaaggagcaaatgaggaaagagaggatggacggtattgagtcaaggtgcagaaataataccgtggaggaaaatctctcattatggaaagagatggttaatggaactgaaaggggcatgcagtgctgtgtacggggtaaacttgacatgcaggatcctaacaagtcactcagggatcctgtttactaccgctgtaatactgatccacaccatcgtgttggttcgaagtacaaggtctatccaacatatgactttgcgtgcccatttgtcgatgcattggagggggtaacccatgctcttcgttccagtgaatatcatgacagaaatgcacaatattatcgaattcttcaagacatggggttgaggagagtggaaatttatgaattcagccgattgaatatggtttacactcttctaagcaagcgaaagcttctttggtttgtacaaaacaagaaggtcgaagattggacagacccacgttttcccactgtccaaggcatagtacgtcggggcttgaaggttgatgcattgatacagtttatactccaacagggtgcttcaaaaaatctgaatctcatggaatgggataaactctggacaatcaacaagaagataattgatccagtgtgcgcaaggcatactgctgtgctaaaagaccagcgtgtcatctttactcttacaaatggtccagaggagccatttgttcgaattttaccaagacataagaaatttgagggtgctggaaagaaggctacaacctttgccaacagaatttggctcgattatgctgatgcggcagctattagcaagggtgaggaagtaacccttatggattgggggaatgctattgttaaagagatcaaggtggagagtggagtaattactgaactagttggagaactgcatcttgaggggtctgtgaaaacaacaaaattgaagatcacatggctagcagatatagaggagctagttcccctttcattggttgaatttgattacctcatcagcaagaaaaagaagactatgctgcactgaatcaaattgcatgctgatttctacggcattttatc

SEQ ID NO: 14918 - DNA, 1493 bp, Zea Mays
cccgtcgccgtcaccgtacgctggtcatgggctcttggcatccgtcgtccgtcccacgccacgccacgccacagtgcctcctcgcagcttcatccactcgtctcccctccccacaccaaaaaaacaagcaagggtcagcagatagccgcattaaaaggagggaggtcacgtaaacttaatccaatccaccaaaccccaaatctctgtctcgcgctggcgcagcgcagggcaccgccacgcgcgcctcatccggtaccggcatgacgagcgcctccgagctcttcaccgcgcgccgtgccgcccgtggggcccgcctctccgacctcgacctggatccgcacgccgacgcgctccgggaccagcacggacttggcgcccggcaccggcgccgcgggtgccgcccgcgacgccagctcgacgccgccggggacgtgcggcagcacctgcacaccggggccccgccaccgcgtcgccgcgggtcgtacaccgatcagatcttatcgtacatagacaacaacaaccttggggttggggattctgcagctcggaggaacagacttgataggctgatgttcaggacaaatgagcggcttcctggtgctgtactgcaagcacaagcgcgtgtcctggagagactcagaggcatttctcttggttcatctgtgtccaggccatccatctcattagatgaattttcagctagcgatgtattcagaatcatcgacttcagaaacagggaagcacggcatgaagaaaatcggcaccactcatcgtcgttccacccaagcagtgaatcagatgaagaaagaccaaccgtcggttccactcactccaaccggtcaaccggacttaccaaggcagctttcctgcgtctgcaggtcgagatttttgaggctagcaaagatgatagcagagaggcatcgcctgaatgttctatttgccttgatggattttacgatggagatgagctgataaggttgcgctgtgggcacaggttccactcgacatgcttggagccatgggcgcggaaatgtgcagactgcccatactgtcgaacgaacatacggtcacgatcctgacgacaaacccttagttcagagtaagcttataaccaccatggagtttcactgttgtaaaattcgctgttgtgggcatgccagttaatccggtgctcctatggcgacatgtaatttctaatatcctgaatattttgtgttgtgtcactcagagaggtttatggtgttgtgtgcgagtggaggctagtagcagtatagcttagaaagcacccttttgtgtgtatgtagcgagggatcacgcaaatgatcctgtactactaatgataatgttctgatgtctgaatttcagttgttactgcatgcttcttgttatgtagggcgaggaacatgacttcgctatgatgcggttaaaaatgctctgcaaaatactaggctgaaggagtcaatcattcagtcgagatcgatctgtccaacgct

SEQ ID NO: 14919 - DNA, 833 bp, Zea Mays
acagcggcagcgtccccctccatccctgcgtggtagcgccctgcagctgcagaaagcacttgcaggtctgagaagaatcagtttagatgggttgcgatggcgcgtatttgatgctaagggtcaggtgctcgggcgattggcttcccaaatagctgttgtgcttcaaggcaaggataaacctacctatgcaccacatgtagaaaatggagacatgtgcattgtacttaatgcaaaggatatcagtgttacaggaaggaaaatgacagataagatttactattggcatacagggtatgttggccatttgaaggaaaggaggctcaaggaccagatggagaaagacccaactgaagtgattcgcaaagctgtgctgcgcatgcttccccgcaacaaactgcgtgatgatagggatcgcaagctgaggatattttctggaaacgaacatccattccatgaccgccctctggaaccttttgtgatgccgccacggcaagtacgcgagatgcgcccccgtgcaaggcgtgcaatgataagggctcagaaaaaacagcaggcaaacagagccaaagaggaggaagatgctaagaatgccgcagcggaggtcactgcataggctcctgatgtggatttgcatgctgccaatttttttgcttggtagcatttcgagtggaataggcactaaaagctgggaatgtgccaacttcgttctgaatttattttgtattctattacaatttgtaactggaaccctgcctgtcacagctgcttgaaggttagaaagttgaaatatcacttttgcatcatattaagtaagctgaaataagctatccgat

SEQ ID NO: 14920 - DNA, 62 bp, Zea Mays
tgaattatagcggagcacgctggcgaaaacccgagagtggctggtttgggattgtacggtcc

SEQ ID NO: 14921 - DNA, 1460 bp, Zea Mays
ttgggtggttcgtcaggagacaccacggaattccgcgcgcctggctgctcggttcccggcgtttttttcttcgatgttttgaacacgccggatgccacctggaagatctgatgaaggaagtggatcattgaggtgggtgttctcattgagagagcttcgatcagcaacaaacagcttcaattacgataacaagattggagaagggccacttgggagtgtgtattggggacaagtttgggatggttctcagatcgctgtcaagaggttgaagagtgcaaagaatggcacagaagcggaatttgcttcagaagtcgagatattgggaagaataagacacaaaaacctcctgagttttcgtggatattgtgcggatggacccgaacggattctggtgtatgactttatggcaaactcaagtctctatgcacatcttcatggaccacattctgctgagtgtctccttgactggcggaggagaatatctattgccatcaacactgctcgggctctcttgtaccttcaccactatgcaacacctaagataatccatggaagcatcaagaccaccaatgtgttactggattcagacttccaggcacatgttggcgatttcggtctgataaggtttattcctgatggaatggatcatgaaaagattaccagcgaaagccaacgaggctatcttgctcctgagtacattatgttcggcaaaccaactgcaggttgtgatgtatacagctttggaataatactattggagcttgctagtggcaaaaggccgatagaaaagtcgtgttctgttaagacatatggaattcgaaactgggtgctcccgctggcaaggcagggtagatatgatgaaattgcagactcaaaactgagcgacaagttctctgaatctgaactgagaagaatggtcttagttgggctagcatgtactcattcagaatctgaaaaaagaccaacaatgcttgaagttgtgccgttgctgaaaggcgaatcaaaagaaacccttattaagcttgaaagagatgagttgttcagctcagactcgatggtgagttcacaaggaacaccaaccccagatgggggcacagactctgtgccaaaggaagatcaagaactggttggagcgtgaaatgtgatatgttgctactgtaggcgatggtagaatgcggatttgtgttattggttgatgattggtttgtgcggtttgacatgaatgtaaattgtataggcattgttttctgtaaggaggtatttacccatcccttttgagagattaaggaagagcatgggggctggagatagctgtttatgcgaagtggtttttgtatgcaccgcatagaaaatgcacatgttttttcaggatgtttgtatatttctctgatcaggctgtccacatattaagggtccgtttggttcgtgccttgtttttaaaatctggttctacaatctca

SEQ ID NO: 14922 - DNA, 1133 bp, Zea Mays
cggcgaagccagatttgcttttttccgtcgcgttagcacaagaacggctccagcttccgagtgctgaagccagagcagaacaagctctttgagaagctatgggcgcctatgctaatcgggcctaataatagttctcggcgcgtttcctaccgtctcgcacttgctcctcctgtgacagcgaaggcgacgaggcttccttgagtcgctgtggcgggacatcgacatggggcggctggaccaggaccccagctgcgagacgaacctggtgatcgtctcccacggcctcacctcgcgggtgttcctgatgaagtggttcaagtggacggtggcccagttcgagcgcctcaacaacttcgacaactgcgagttcagggtcatgcagctgggccccggcggggagtactccctcctcgtccaccacacccaggaggagctccagcagtggggcatgtcgccggagatgatcgccgaccagcagtggcgcgcctccgccaaccgccgctgctgggccgaggagtgctcctccttcatcgacaccttcttcgaggagccctacggctcgtcggagacctcctcctcggacgaagacgaagcagaggacaaggaggaggagaccaagctgctggagcaactataactggtttcatccacatccaatccacccattcgcctcgtcctttgaaattctctccattggattggatcttataccatgtgggaagagcggagcagtgatgctgcattcagtcatcgctgatccctctcttattcgaaaacagtctgtagcatgttcataatagctattagctagaactagaaatgattcgagggcaatttcagaaaatgctaaagaaacatatgctgtatctcaaggttttagctctgacatgattctgtatgttcctagatataagaacgcatacattctctattcaaaataaaatgctcagaggagataaatttgtctcgatcgctactttcctaaactctaatcctgtgggcgtcgctaccactcggtctgtcgtttattggttattggcactgttgatggacagtacaagtaccatttctcacatgctgggcatcagcagacacttgtccatatgtaaaagcagagaatctttccaattcca

SEQ ID NO: 14923 - DNA, 945 bp, Zea Mays
cgaccgacgaatgaaacttggcttttttttgcatccacaatgccgcagcttggcacatgttcattgcctggagctgcaatctatggcacttcaactaggagatttggaggtttggagtttcagcaacataaagttaatcacatctcatttggtcggaaagcgtctgttaaagcaacattgaaaactgtgagatgcaatgccactcaaacacaaagcgtccaaaagaaatcttcaagtgcaactattcagcgtgataagaaaggaaatgtacaagggccaaaactggatgacggaagcggtgggttccctccattccgctttggcaaaggtgggggtggtggtggaggcgggggaggtggcagcaactactttggcggattccttctcttctcatgtgtgttgctcttggactacctgaaggaattcgagaagtacctgcttgctcagaggcaccgagctggagatgatggcggcaacgggctgttgcaggcatgattgctttccgctggtctcactggcactagcagctactagtttctgatctgaagtgcttccttttgaacataacatgtgtctctgggttaaaatccaactgcaattgattgttctgggaacttgctctgccattgatccgtgtggtgtcaagtactgtggaaatcgtctgctgcgtccactcgaactttctcacctcgtcttcagcaaggttcataggaagttaggaacacagtggttaaaactccaagctcttcggaggaacttttttttggtcataataaggaaaacatctcctaggatgatgggaagttcatagtcagccgcggtcctgacattttaggggcctaagacaaaatttaaaatggaggaccttattatataaatattatcaatataaacactcaaaatacatcttaaaatgtatatatcaaataacaagtaaataaaaag

SEQ ID NO: 14924 - DNA, 187 bp, Zea Mays
aagaaaacaaaactggggattgatttatggatttgattgtacctctgagttcccatattctggttctacaacacctaaccttggtagtggaacatcagcatctgctttgcttcaacaagcacactctagtgctggccttagttcacttgacacagagttgacctcctatctggatagtgacactttg

SEQ ID NO: 14925 - DNA, 1022 bp, Zea Mays
ggaaagatcactttcaaggaatcaaagactcttactgctgggcagagccctactgttgtagacacagatgttgggcgcattggtattggtatatgctatgacatccgtttccaggaactagcaatgttatatgctgcaagaggtgctcatttgttgtgctatcctggtgcattcaacatgactactggaccactgcattgggagttgctgcaaagggcgagggctgcagacaatcagctgtttgttgcaacatgcgctccagctcgagataccagtgcaggctatgttgcttggggacactccactcttgttggacctttcggagaggtgattgctacaacggagcatgaggaggcgaccataatagcagatattgactactcactgattgagcagaggaggcaatttcttcctgtgcaacaccagcggcgtggcgatctctatcagctggtagatgtccagagactgggttctcagtagcgagcctggatgcggctgtgtgcccgctctgcaggcttgctcgtactacttcgttcatgagatgcatgtctatgggttctagagatcgaccaacatgatgagtgaaggcggagaggacgcaataaggcgactgtagttgtaccttcagtggtgtctccagttgccaaataaattggttactttaacgtctgaagaaaacctccctccatgggacgaagataaaacggaggactgcgacttccctttgggcccgactagtttgaagtttgtactagcttcgggggtgtctgggagtcaagttttttttcacagttttggtagaatactgtagtattctcgaatactacggtattatatacaaaatgttgtttggcaatctagataaaatctatgtttttaaaactgaagtattgcaaataccttagggcatgtttggaaatgcggttttgaaatactgtagttttgagataccatagtttataattgtacatgacataaatactacggtattgctttaccacagtaaaactacagtattgctc

SEQ ID NO: 14926 - DNA, 419 bp, Zea Mays
actcgtccacacgcgaaggcacccagcagcagccgctcccgaactgaggaaccctaccacgcgggcgacggcggtgcgcgaccggtgacgggacagcggcagcgccccctcctccatctgctggtcccaccgcctcctgacgttatccgatactgccaatccccctcttcgccgttgacggagcttaccgaggaaagaagggcagggccatggcgggagccttcgctttccgcctcgtgcctcgcctcgccgcagagccggcggcgagggggaagggtggcggaggaggagccaaccgcgacgccggcagcagggcgctggtgtcaaagaaaccaaacaagcagcagcatttgtggatcaggaaggagacagctgggtcagggaagaaggctctccgtcttattgatgctgtttcggtg

SEQ ID NO: 14927 - DNA, 94 bp, Zea Mays
tggtcgtgtctgctgagctgaccaacgctccagctcgccgttatcgccaagtcccacgcagctgtgctgttctctcgtcgtcattcattcctat

SEQ ID NO: 14928 - DNA, 1080 bp, Zea Mays
tggatgtcgtccgcgccggagcagtttgcactctgaagcgggttacagggagaaaggacatagtttagcaggtccatctcacccaattccccagccttccgcccttgtttcagcagacaccgaacattgtggaggagctcaaacttgcaagggacatttatgagcatgctgttgttttgagtgtgaaacttgaggaccaagatgcgtttgaacgcgatttctgccagctgaagccttattacatggatacatgtggcataattcccgcctcgccagaggagtacccaattttgggactcaatcttctgaggctgttggttcagaatagaattgccgaattccacactgagctggagcttttacctgccaaggcactcgagcatccttgcatcaagcatgctgtagagcttgagcaatccttcatggagggtgcctacaaccgagtgttaagcgctcggcaggctgtgccacatgagacctacgtttacttcatcgaccttctcgccaaaacagttagagatgagatcgctgggtgcagcgaaaaggggtatgattctctatctgtgagtgatgcaaagcaaatgcttatgttcagttctgaccaagatctgcacgagtacatcactgaggagcacccggaatgggagattaagaacggtgctgtcttcttccagaaggcgaaggaatcacagccctgcaaggagatcccatccttgcagcttatcaaccagacgctcagctacgccagggagctggagcgtattgtatgatttaaaccaatccctggtggttctttccccccctgtggccgcttggcatggcttgtactgtcctttgcatttgggatgatctttgatcgcagctctcatctgactgaaacatcatgtgaatctctgaagggctcagtctctccggcattggtctgttaactccatttgtatttcaccacattaactgcattgcttgaaaaatgccggcattcactgctgctgtgaacttttgatgggcttgatattgaattactgcctcggaattccactgacctctgcaggcttctgacgtcacgttttcttctgcatc

SEQ ID NO: 14929 - DNA, 1794 bp, Zea Mays
attatttcgtccagacctattaacagacctattaacaacgaggcaagtgggcaaaatcacaaaaaaatcgtgtttcctgtctcggagatagcctctaatttgaaatcagcaaaggagtttcgtggtggcacgacgcacatgcgacggtctcctgtcctgctctgtcccctctggcctccctagcagcttatactttcttattgtactttcttatagtcttccacggccgcagttagccacatctcgccgtcggcgacgagggacagggaggcaggatactcctgtcaggccgcgacgtagccctcctcctcttgctctccccgccatcctctgcttctcgtccacctgggattagatctatttcttggtacctgagcgatcgagtgaaatcgatctagccaaggtgcggcgggcgcggcttattcacgaattttctgtgttctttggaaagccgccatggacgagtggattcgccaagccgaggtgtgggtgcgccaatccgagagctggatccgccagcagcccccggagcagatctatgtcgcggccacggtggtcgccgtcacaatcctgctgcttatcgtagcatcttatctgaaatcctctaaaccaagcaccatagtgctatccgggctcagtggcagtggcaaaaccactattttctaccagcttcgggacggatcatcacatcaaggaactgtgacttcaatggaagaaaacagtgatacttttgtgctgcattcggagcaagaaaggaaaggcaaagtaaaacctgtgcatattgttgatgttcctggtcatgctaggctcaagcccaagcttgatgaagtcctgcctaaagctgctggggttgtctttattgttgatgctcaggatttcttgtctagcatgcaagctgctgcagagtacctttatgacattctgacaaaagcatctgtagttaagaaaaggatccctgtgcttatattctgcaacaagacggataaagttaccgcccactcgaaggaattcatcaagaaacagttggagaaagaattgaacaagcttcgggaatcaaggaacgccatatcttcagctgacatctctgatgaagtccagctcggggtccctggagaggcattcaacttcagccagtgccagaacaaggtggctgttgcggagggtgccggttcaactggtaatgttttggccgtggagcaattcatccgtgaacatgtgagggcgtaggtcgttcttattgttctcagggctccaaatggctctcttgatctaatgaggcaagatgtacattgcgtcaatggggttgcctttcaatgtgactcttcatccggtcctctgaagttgcttaagaagcagtgaggcgcaatcatattctgcactggttcagctgacccatgtttacatgttgcaatgtgtatgcctgacagtcatcggatatgaatagagcatggtatgacacgttgaaatgtcgaaggacacctttgtatgaagtagcgtgtagttgttgcggacacgaagacgaagctacgagcttcggcttggtggcttgcatgtatggtaaaagtgacagtaggagcgaggtgagatcttcaagacttgttcaacaagaccacaaaaggaaaagacaacgatgccctaagtcaactttgtagctcatatgtataggttaaggtcacgattgtaattttatcgaagctacaccctacgactataaataggagcacattgccatgcatacacaacttttttttgccggagaaaattgacattctccacctacaaagctattgaaag

SEQ ID NO: 14930 - DNA, 1554 bp, Zea Mays
ctcttagcgagccgatcagatgatttttcattttgttgggtgatgctaaaggaacgaggagttgcaccattttcgaagtgggagaaggaacttccaaaaatagtttttgacccacgctttaaggctattcctagtcactcaacaaggcgggctatatttgaccactatgttcgcacacgtgctgaagaggagcggaaagagaaaagagctgccctgaaggctgcagtagaggcgtataaagaattacttgaagaagcatccgaggacatcaaccagaaaacagactaccaagaattcaaaagaaaatggggtgctgatacaaggtttgaagccttggatcgaaaggaaagggagattctttttagtgagaaagtcaaggctgttcaagaaaaagtccaatcaatgcgcaaagctgtcatagctaatttcaaatcaatgcttcgagaaagtaaagatataacttcaactagccgatgggcaaaagttaaagaaaatttccgtagtgatccaaggtacaaagccatgaagcatgaagaaagggagactatatttaatgaatacatagtggaactaaaatctgctgaacaggaagcagagcaagctgccaaggccaaagtggatgagcaagccaagttaaaggagagggaacgtgaaacacgtaaaaggaaagaaagagaggagcaggagatggaaagagtaaaaatgaagatacgtagaaaagaggctgtgtcatcataccaagctttacttgttgaaatgattaaggatcccaaggcatcgtggactgaatccaaaccaaaacttgaaaaagatccacaaggtcgtgctcgaaatcctgacttaggccaaggtgatgcagaaaagttgtttcgtgaccatgtcaaggacctatatgagcggtgtgtacgtgatttccgggcacttctatctgaggttatcactccagaggtagcagcacggacaacagctgaggggaagacggcaatcaactcctggagtgaggcaaaaggtcatctaagatctgatctaaggtacaataagctaccgagtaaagacaaagagtctatttggcggcgctatgctgatgacttgacgaggaaactcagacaatcagacacgaaggagaaggacaaatcggatacagatgggaaacaacctaggtcctctgatccacctaggcggaggtagcttgtagtaacagtcacttgtacttcctaggtgctgctcctatatttcttactgttgatagttaagggtctgctcgcactcgtctgcaacatttgaatagtcactggctcactgccacttttgatactgagagtttctgtgttgtagggtgttttccttgcaaatgtttttcccgttctggatcagatgatatatttttgcagtatgagtctgacattgcagtaccgtgccaagttgcgtctcccatgctctcaggtctcagccttccatctttcaaacttcaagcccatttataggatctgtttcaccgttagaattctggcgacttcggctccagacctccagctcccagacagaggatagaga

SEQ ID NO: 14931 - DNA, 1255 bp, Zea Mays
tcaacatctagtggttgaatctatattatactgtggctggcgggttggctggggaccgagaacaaattttgagggtgagcatgatacagtcactgagaaggacctagaacatctcctgcaacttttagataataaggaaagcggggatacagcttggcagaatttgatggagcgtagaacctccaacatgacatacaatgcctggcggcgtgagcctgaggagggacctataatgtactgcagccgcactatttttgaggatgctactcctgaactggttagagatttcttctgggatggtgattttcgtctaaagtgggatcccatgcttgcatattgcaaatctttggatgagttccctcagaatggagcaacaattgtccactggataaaaaagttcccgttcttttgcagtgaccgtgaatacatctttggaggacgcatatgggaatctgggaagacttactattgtgttactaagggtgttccatatccatcattgcccaagaaagaaaaaccgaggcgtgtggagctgtacttctcaagttggcgtattagagctgttcaatcgcctaaacatgtgggtcagcaatctgcgtgtgaagtaactttggttcactatgaggacatgggtataccaaaagatgtagcccgggttgctgttcgtcatggcatgtggggtgctgttaagaaacttcagtctggattcagagcataccagcaaatgagacacacagaaactaccctgtcacacagcgtcatcatggctcgaatgaccaccaagatatccatcacagcttcaaatgatcccttggaccatgacctctcggttgccgataaaatcagtgacgagaatgacagctccaatgcagttcaacatggttttgattggaagtggttggtggttgggggtgcagtggctgcggtttgtgtgctcaacaccggtctggtaggcaaggccgtcttgcttggagcagcgagaaggcaagcaaagaagtgatatgaggagcagccttccagccagacattcatcagattgtagctacgatcgtacaggcaaaaaaatgttgagaaaataggtggggttcaacagagataactgctgtttgaggcgtatgcaatgggtctatcggatctagtttcacagtatagtctattttatttagagataaaaatcgcttgtttaagaataagtaaagctctttatttaagaagaggtgtttgagaattaagacggaatgaccgttttcttcct

SEQ ID NO: 14932 - DNA, 1717 bp, Zea Mays
gagaattcttgcggaccatgcgaggaacacaaggcgctctcatcatcgcgtcgacaattcagatcgtgcttggtttcagtggcctttggcgcaatgtcgttaaattgctgagcccattgtctgctgtacctttggtttcgctagctggatttgggctatatgagctaggttttccaggggttgctaagtgtgtggaaattgggcttccggaaatcatcctaatgctcatattttctcagtacttacctcatgctgtccatgcggcaaagcctgtgttcgaccggttttctgtgattttcacaattgcgattgtatggctgtatgcgtacattctcacggttagcggtgcctacaagagtgcccgaacaaagacacaactccattgccgtgttgaccgctctgggcttgttggtggagctccttggattagtgtcccatatcctttccaatggggggccccaacatttgatgctggtgaatcatttgcaatgatggtggccgcatttgttgctcttgttgagtcatctggggccttcattgctgtgtcaagatatgcaagcgcgactatgatacctccttcagttcttggtcgtggcattggttggcagggcatcggtactttactgggtgcgttttttgggacagctaatggaactgcagtgtcagttgagaatgctggtctgcttgctttgacacatgttggcagccggagagtagtccagatatctgcaggcttcatgatcttcttctctgtccttgggaaattcggggcgatctttgcttcaatcccactgccgatattcgctgccctgtattgcattctctttgcatacattggtgcttgtggcctgagcttccttcagttctgcaacctgaacagcttcaggaccaagttcatcatggggttctccttgttcatgggcctgtcagtaccccaatacttcaacgagtacacgtccgtggctggctatggccccgtgcacaccggcgcccgatggttcaacgacatgatcaacgtgcccttctcgtcgaagccgttcgtggctgtgctggtggccttcttactggacaacacgatccaggtgcgtgacagcggcgtgaggagggacaggggctaccactggtgggacaagttccggagcttcaagacggacagccgcagcgaggagttctactcgctgcccttcaacctcaacaagtttttcccttccgtctgatcctgcagggtctgcacactcttcctcgcagccgcagtagccctgactggagtcaggcaagaaatgatcctatgcagatgatgctggagcatggactgatggcgttttgtacattcaggggtgaactgaactgtgcaggttgcaggggatagtgctctgggtagcatcagtattccctagtaaccgaaattgaaaaggccgcctgttaaacttctgcaaacactagcatgattacgtctcctagtgctactgttgtttagattggaaaacatggaactcaaccgtaagcatagatttaccttgaagcaacccttttcttttgcttagaaataatttgtgttggggattttttttcaccatgtaagaactgagagcacttagattagaggggagggtgaataggtgagcctccaaaaaatactttaaataatacaaacttggtctaataaaaccgttattgaggactaaaaccaaatttgaatgagaagagtagaggaaga

SEQ ID NO: 14933 - DNA, 1333 bp, Zea Mays
gcaaaccgcactgagaaaccaaaccagcaagcgaagcccagcaagaaaaccacatgccccacctcgccgccactccccccacttcctccgccgccgccgtccccgccgcgggccgcatcgcgttccggcgcccgtggaacacgccacagccggaagcgctgcgcctgcgcctccgcctgcgcgcgcggggcgtccggcgtgaggacggcggcggcgtgcgcacggaggagcaggagcagacagcaccgcggacgttctacgacctgctcgggatctcagcggatgggagccccgatgatgttcgggcgtcctacaggcggctggcgctaaagtaccacccagacgtgtcccctccgggcgccgcggccgagaacacgcgccgcttcatcgaggtgcaggaggcctacgagacgctctccgacccaagccgccgcgccagctacgaccgtgcactcgcccgcggcgtctgccgcctcgccttctccgggcgccgttcccaatcccaccacgcctactaccattaccaggaagagggatctgggtggagaaggtcctgggaggaccagatcgccgagctgaagaggaggagcgtggcgaaggattcagaagagaacctgtcgtggggcgctcgcatgcggagaagggccgaggcgtcagcagcggagtagctgcgacaagcgagccttccaaatgcagctgtactcgtacgtagcatgtggagcgaagcgaaacggaatatatttttctggtgggtacaatttggtctgcaaggtttttaaggcgtggatctaaagatgtccagatggaaaccttcagagacagacctgttacgagaattggacgtgtagcagtagtagctgtagcggtggcatctggccaggattgaggaggaacagcagcacctggatggagtgtggtggctgctggctgcagaccaacacccttggccctggctacataatagttgagttcctgcctggccacctgggcctggctggctgtatgtaaacgactcaactatgttactccttgagactcctgttacatctgtggcaggtccagtgtaaatgtaaatactacaagcatcaataacgaaggagcaagccagttgttcttccaatattcagggtgtttccttcttttgttttgttttcctttctcaagcatcaatattgaggttgtgggcttatgcgggagaggcaattattcatatctttaggagcatgacctttgcttaggctatggccatacaaatggccgtgcaaaatagagtgcactgcttatagagtgtaagcttgaaatgagagatgacgataagataagtaagttgttg

SEQ ID NO: 14934 - DNA, 1479 bp, Zea Mays
aataaattgttgtcatttgttaagcatattgcaaatctattaggacaatcgcggtctgcgccgtcagcctgccaagctcagcggggcggaggcaggccaaaccaacccacctccaacacaagcgaataaaagtctcgcgtctatcttcttccttccttccttcctaccaacctcccctccctccccacgcccaccgccccgcatccaccccgaaaccctagtggatcgtcgccatggccgcagccgccctcattcgccgcctccccgctgcccgggcccaggccccggcattcatggcggcgcgaccgatctccgactccacggcagcgttcaccatcgagacatctgtccctttcacctcccacctcgtcgacccaccctcgcgtgatgtcaccaccacccccgctgagctcgtcaccttcttccgcgacatgtccctcatgcgccgcatggagatcgcggccgactccctctacaaagccaagcttatccgtgggttctgccacctctacgacggccaggaggccgtcgccgtcggcatggaggccgccatcacccgctccgattccatcatcaccgcctaccgcgaccactgtacctacctcgcccgcggaggggacctcgtctccgccttctccgagctgatgggccgcgaggctgggtgctcccgcgggaagggcggatccatgcatttctacaagaaggacgccaatttctacggtgggcacggcatcgtaggcgctcaggtgcccctcggatgcggcctggccttcgctcaaaagtacaagaaggaggacacggccacgttcgcgctctatggtgacggtgcggctaaccagggacagctctttgaggctctcaacatttcggccctctggaagctgcctgccatattggtctgcgagaacaaccattatgggatgggaacagcggagtggagggcagcaaagagccctgcctactacaagcgtggcgactatgtgcctggattgaaggttgatggaatggatgttcttgctgtgaagcaagcgtgcaaatttgcaaaagatcatgctgtcgcaaatggcccaattgtccttgagatggatacctacagataccatggccactctatgtcagatccaggaagcacttaccgcaccagggatgagatttcaggtgtcaggcaggaacgggatccaattgaaagggttagaaagttgcttttgactcatgacctggcaaatgctgctgagctcaagaatatggagaaagaaatcaggaaacaagtagatgacgctattgctaaagcaaaggaaagttctatgcctgatacttctgaactcttcacaaatgtttataagaagggcttcggcgtggagtcatttgggccagacaggaaggagatgagagcttctcttccgtaggttggcagcatgatgaggcagtcctcattacatgtttaattgatgtagctgttcgggcctgcgagtccggagt

SEQ ID NO: 14935 - DNA, 962 bp, Zea Mays
gtcagaatgctttgcaggagagaattgtccaacttcgtgaagctgagtttggtcgtctgaagaaagagagagacgaacggttcagtcagttgatatcatcgagaaagcgtgaaagggagagagtgaggaagttgatgtattatctgaaccgggaggaacagcggattgaaatgcttcgtgaggaagaggaagctagaaaacatgaagaggaagagaggaggaagagagaagaggctgaaaggaaagctaatcttgatgctattgctgaaaagcagcgattgagagagatagagttggaggagaaggcaaaggcgaatagggagaagctcttaaaggggtctgaggcaggtgctgctccctcttctaataaatatattcccaaatttaaaaggcaagatggtcttcctgcacgacaggatgcacccccaccccgccaagatggccctcctccgtctactgaccgctggcgtccatcaagatattcctcaacctcttcgtcaacctgggggcgggcacataactgatccttttttttttattttgctgactacatttataattttggagcttgtctcataggctatcgcaccttaccgttcactatactccatgcatattgtcggtagttgctgactgcattttatgatgtttttattggttcatatatttgttctcatgtctttggatgttgatgtctggcacgagttccgttttgcagttgggttgtgatacggtttggttgtctaactataaagtcgtcaattatcgtatcttgtacccaaactgatggcttactttcctgagtaacgattaagacaactgaaacacgggctactactcgattaaaattctgataaatgttctgttctctgtagctgatggcagtcagatgttatgcggtattgtttgattgttccctatattgccaataaaaaggtttgcacattgacagttgaaatgaa

SEQ ID NO: 14936 - DNA, 805 bp, Zea Mays
tgcctaaggcctaagcacattttcattaagagggcactgtttggaagattgcaacagctagctagtgtcgctggtgacgttctactgggaaaagataagatacaaaaggttttactctcaaggctaactgaaacagttatcatgtggctctccaatgagcaagagttctgggatatctttgacgaccgatctgtccaactccagccttcggggctgcagcagcttattcttgatatgcacttcattgtcgagattgctgtgtgtggaaggtttccatatagaccagttcagcagcttgtgtccacaatcataaccagagcagttgcagctttctcagcaaggggtgttgatccacaaagtgttcttcctgaggacgggtggtttgtcgacaccgccaaggccgcaatccacaagctcatgctgggggtttctgggtccgagtccgagcccgagcctgatgcggaagaacatattgctctgcatggtgaggtctcagattctgaggagagctcaggtgcatcgacagtaggatcagaagactcattcgcttctgcgaagaacgatgatctagaaagccccgtttacttcactgaccctgagagttgagaacttctcaggtcgtcgttgtagattcagttatcgtttatttgaagttttgtcatcctgcatagttggcagatttcagaaccgtggaacatcgttgcactcaagatgaaaacaaagaacccagaaatgccgtttgtaattatggtcgttgctattgtaccttgttgcttattgttagcgccgatttggacatcaatca

SEQ ID NO: 14937 - DNA, 76 bp, Zea Mays
cgacagtgtagaggatgtaccgcggcggtggcgattttcagcacaccgcacggtgctcacgacgacgtgggtctcg

SEQ ID NO: 14938 - DNA, 1534 bp, Zea Mays
cttgactccttgagcccagtgcccagacggcttgcgcttggcctcacctcctcttctcgtcgagcggataacagaaccgatgtgcaagctccggccggagcgtcaggataagaaccgcgcgccggcaggcagctgctcctgcgactgcgagcgcccgtccaatggcgtccctctccccttccctccacctcccttgcaattcaagaactggcttccttggaaagacacgtgggattcgtccttgtgttttccctgctggaagagttggatttgtcagaacagtagtggaatgcaaggaatctagaattggaaagcagcccatcgaagttccatcaaatgttactctcacattagaagagcagtttgtcaaagctaagggtccgctgggggagttatctctgagctttccaggtgacttgaagatcgtgaaagaagaatccggtaacctgagagtttataagactgcagagaccaagagggcgaaccagatgcacggacttttcagggcagttggttgtagcatcattgctgagcaggaacatcaagtcaaggttgctcctaagagatccagaaaaggcgtcgtccctgtttggcaagcaggatgagagtgtactacaggtttacaaagcggacacaagaaaccctaatgatttggatccacagatgtttgagggagttacgcatgtgatatgttgtactggaactacagcatttccgtctaagcgctgggatggagataacactccagaacgtgtagattgggatggcatcagaaatcttgtcagtgccttgccacagacagtcaagagactggttcttgtgtcatccattggtgttacaaaatacaatgagataccatggagcatcatgaatctctttggtgtgcttaagtacaagaagatgggagaagactttgtctgcaattcagggataccattcacgattattagggctggaagattgacagacgggccctacacttcgtatgatcttaatacacttcttaaagctacagctggagagcgacgagcagtagtcataggcaaaggtgacaagcttgtgggggaagttagcagacttgtggtagcagaagcttgtatccaagctttagatattgaatccactgaaggacaaatatatgagattaactcagttaagggtgaagggcccggaactgacccagagaaatgggaggagctattcagatctgctcggtcagactagtggcattctgcaaagcgtagtaacgtaatgtaggaatatgcatcgtaatacaatgtaatccatagagtgcagccctaattcaatagtcactgaacagtagcgatcatgtagagaatatttggtttgtgtacatagtatgagcattcatatatgacgattatacctcctaaaagtgatagtttttgttggaaagtaaaatgttcagtgttatccttatccactttcagacttgattttattttctttttctcggaatgcaatcataatttgattgttcatttcaatatatatccttatttttcaaatatgt

SEQ ID NO: 14939 - DNA, 1439 bp, Zea Mays
caagtacctagaatctcaagtctaagaaacattcacaaagcattttcagaagtatggagctataactgattctgtgatcatgaaggacaagcatactaggatgcctcgcggatttggatttgttacattttccgatccatctgtgcttgacagggttctagaggatgaacatgtcatagatggaagaacagttgaagtcaaaaggactgttccaaaagaggaaatgtcatcgaaagacggtcctaagacaaaaaagatctttgtgggtggtattccaccatctcttaccgaagataaattaaaggagcacttctcatcgtatgggaaggtggttgagcatcagattatgcttgaccatagcactggacgctcacgtggctttggatttgtcacatttgaaagcgaggatgctgttgaaagggttatgtcagaggggagaatgcatgatcttggagggaaacaggttgaaattaagaaagctgaaccaaaaaaacctggtgtgggtgattcaagctcaaatggaagacacagtcgtggtggtggtcatcgtgattcataccgtggtagtggtggcaatggcttttctgggaacagcagtggtggtggctatggatacagtggtggctaccgatcaactgctgcagcacattatggcagcacagcatatggtgcctatggcagagggtatggatacggtggtactgctggctatggcttaggttatggctctgcatatggtggctccatgtatggaggtccatatggtgcctacgcggcatatggtggtgcctatggaggtggtgcatatggtgctccaggagggtatggcgcgggaggatatggcagctacggtggggctggaggcatgggtggtggtggcagcgctggtggtcggggctccagcagataccacccttatggaaaatgataatccattcactgcctttgccttcctctaggatctgataataaagctatacattcccaccgagaaaatggaacattccattcaccttgttgaatcagcggcatctgaacatttttttcctggaacaaagattctagtctgtagtcgctgaaccctgaactgcctcatcccacccccaccccctgagctttctgtagaaggtgcagctcaaattctcgtaggcatgagccttagaagacccttgaaactacaagctttgtggtaacaatatggtgtcatggaacatatgtattttgatgtaaaacattcgctcactgaccagtgacttcgccatctctgcttatgtatgtagagaagcttagcaaaggattggactgatactattgaattgtgtgggtttctatttgtctccattctgatctgaatgcgtgttatctcgtttcaaaattctgtgttgttgctatccattttatgatagctggagctatgtgcctatgtgtggttgtctcat

SEQ ID NO: 14940 - DNA, 503 bp, Zea Mays
tctatccatccctcctgtggtctttatccacgtacttggaagatgtttacgcataaagactgttttggagagcagagaggccagagaatttgctagtggagcactagctggtgctatgtcaaaggctattcttgctcctctagagactatcaggacaaggatggttgtaggagtagggtctaggcatatttttggtagtttggtggagatcattgaacaaaatgggtggcaagggctttgggcaggaaatacaatcaacatgctccgcattattccaacacaagcagttgaactcggaacatttgaatgtgccaagaggagcatgatagaagctcaagagaaatggaaagaagatggatacccaaagatacaacttggtaatatgaaaattgagcttccacttcacttcttatctccggttgctatcgctggtgctgctgctggaatagctggcacattggcatgccatcctctcgaagttatcaaggatcgcttgactatca

SEQ ID NO: 14941 - DNA, 3415 bp, Zea Mays
ttatcctcctgacctcctctgacctctgcccccccctccattcccatttcccacgcggcaggcagctagccctacctctggtctcctctgccacctcctcccctgccacctcctcccctgcctagggtgcgccttcctcgccggacgccggcgcagggtcgggacgcttccgctgccgcgcgttccacgacccctctctgggagacgaaactcggcgccggcttggtagatacagacctgggattgccttttcctagttcagcatggagggcactctagttcagtctgcggttgttccaaccgtttacagaagcagctcaggtcggttccgtgtgcgtgcaagggccagaaccaatgctacaatggtgcgaaatatgccaacaaggactcttactcttggtggtttccaaggattgcgtcagacaaactttttagacacgaggtccgtgatcaagcgtgactttggatcgatcgtggcaagtcagattgcaagaccgcgtggatcagcctcaagaggggtggttcgtgccatgtttgagcgcttcactgagaaagcaatcaaggtgattatgcttgcacaggaggaggcaaggcgcctgggacataactttgttgggacagagcagattttgctggggcttattggtgagggcacgggtattgcggcgaaggttctgaagtctatgggaatcaatcttaaggatgcccgagttgaagtcgagaagataattggacgtggcagtgggtttgtggctgttgaaatcccattcacacctcgtgcaaaacgtgtattggaattgtcccttgaagaagctcgtcaacttgggcataactatgtaggatctgaacacttgctccttgggctacttcgtgagggtgaaggaactgatgttcgatatgatgttcaggtcataagaatggttggggaaagcacagaagctgttggggctggagttggtggaggaagcagtggccagaagatgcccacacttgaagaatacggtactaatttgacaaaattagcagaagagggcaaattggacccagtcgtttggtagacaagatcagattgagcgtgttactcagattttgggcaggcggacaaagaaacaacccctgcctaattggagagcctggtgttggaaaagactgctattgctgaggggcttgctcagcgtattgccaatggggatgttcctgaaacaatttgaaggaaagaaggttattactcttgacatggggctccttgttgctggaactaaataccgaggagagtttgaagagagactaaagaaacttatggaggaaattaagcaaaatgaagacattattctctttattgatgaagtgcacacactgattggagcaggtgcagcagaaggtgcgattgatgctgctaatattttgaagccagctcttgctagaggtgaacttcagtgcattggtgccacaacactggatgagtataggaagcatatagagaaagatcctgccttggaaagaaggtttcaaccagttaaggttccagagcctactgtggatgaaacaatacagatcttaagaggacttcgtgagagatatgaacttcatcacaaactgagatacacagatgatgctttaattgctgctgcacagctgtcttatcagtatatcagcgatcgtttcctgcctgacaaagccattgacttgattgatgaagctggatctcgtgttaggctgaggcatgcgcagctccctgatgaagccaaagagctggacaaagagctgcggcagataaccaagcagaaaaatgaggctgtacgtggccaagatttcgagaaggctggcgaattaagggaccgagaaatggagcttaaggctcaaattacagccattattgacaagagcaaggaaatgattaaagcagagactgaatctggtgaagtcggtccgcttgttactgaggcagacattcaacatattgtctcctcttggactggaattcctgtggagaaagtgtcatcggatgagtctgaccgcctcctaaagatggaagagacgctgcatacacgtatcattggacaggatgaggctgtcaaagctattagccgtgctatccgccgtgctcgtgttggcctcaagaatccaaataggccaattgccagcttcatattctctggaccgactggagttggcaaatcagagcttgcaaaggccctggcggcctactactttggctcggaggaggctatgatcaggcttgacatgagtgagttcatggagcggcatactgtctccaaactcattggatcacctccaggttatgttgggtacactgagggaggccaactaactgaagcagtccgtcgccgcccgtacacagttgttctctttgatgagattgagaaggcacatccagatgttttcaacatgatgcttcagatcttagaagatgggcggttaactgatagcaaggggcgcactgttgatttcaagaacacactattgatcatgacatctaatgtcgggagcagtgtcattgagaagggaggtcgcaagattgggttcgaccttgattatgatgagaaagacacaagctataacaggatcaagagccttgtgactgaggagttgaagcagtacttccggccagagttcttgaacagattggatgagatgattgtattccggcagctgactaaattggaggtgaaagagattgcagacattatgctgaaagaagtgtttgacaggctgaaggccaaggacattaatctccaggtgacggagaagttccgagatagagttgttgacgaaggttataacccgagctatggtgccagacctttgcggcgtgctatcatgaggcttctggaggatagtctggcagagaagatgctggctggtgaggtgaaagaaggtgactctgccatcgttgatgtggattcagatggcaaggtaatagtcctgaatggtggtagcggtgttgctgagccactggaacctgctctcagtacctaaccgaggttaaaatctttgggccgaaatggccttctttacaagtcagctgggctcttcgtgatggtaaagtagactgttattacttggccgctccattagttgctttatctttcattgatttttttttgttggaagtgaggcagtagggtcactatggaaacgaatagacggagaggcattagccgaaatgaatgtttttcagtttgatgcacttgtattattaggccttgctagcaacaaggtgcagatgcctctccgtttgctgttgtactttagtgtaacttaccttccgaatgtattattaggcgttgctagcaacaagatacggaggttatacatttgattttcagtaaaaaggtagactctttgttgcgccgcagctgttttattgtctgcgcactgcagtgttcgttca

SEQ ID NO: 14942 - DNA, 2596 bp, Zea Mays
aaaaatatcccacccaaacaactccaccctaccgcaccccaaattcgcaatccctctccacctctcctcccaccgcagcagcaggcaagcgcgaggcggaggcggagagatggagtcggaccagggcaagctcttcatcggcggcatctcctgggaaacaacggaggagaagctgagcgagcacttctccgcctacggagaggttacgcaggccgccgtcatgcgcgacaagacgacgggccgcccccgaggcttcgggtttgtcgtcttcgccgaccccgccgtcgtcgaccgagcgctgcaggacccccacaccctcgacggccgcacggtcgatgtgaagcgggcactctcgcgggaggagcagcaggcctccaaggccgcaaaccctagcggtgggaggaacactggcggaggaaatggcggcggcgatgcaaatggtgctcggacgaagaaaatattcgtgggcgggctgccctctactctgactgaggatgggtttcggcagtatttccagaccttcggcatcgtcactgatgttgttgtcatgtatgaccagaacacgcagcgcccccgtggcttcggattcatcacctttgactcggaggacgcggttgaccacgtgctgcagaagaccttccatgatcttggtgggaagctggttgaggtgaagcgtgcattgccccgtgaggcgaaccctggtggctctggtagtgggcgttctggggtgagtgggggttaccagagcaacaatggccataacaccagctctggtagctatgatggtagaagtgatggtggcaggtacgggcaggcacagcagggtagtggtgtctatcctggctatggtgctggggcagctggatatggatatggtgctaaccctgcaattggatatggaaattatggggctggaggatatggaggtgctcctgctgcttatggtggacattatggaaacccaggtgcagctggttctggttaccaaggtggacccccaggctcaaatagaggaccttggggcagtcaagctccatctgcatatggaactggagggtatggtggcagtgctggctatagtgcttggaacaactcttctggtggtggcaatgctcccactagtcaagcccctggcggacctgcgggctatggaagccagggttttgggtatggtggatatggaggtgatccatcgtatggtagtcatgggggatatggagcttatggagcgcgaagtgatggtgctggcaatcctgctactggtggagcatctggatatggtgcagggtatggaagtgggggtgccaactctggctattcaagtgcttggagtgatccttcacaaggtggtggatttggtggttcagtcaatggaggttctgaagggcaatcaaactatggcactggctatggcagtgtgcagcccagggttgctcagtaaagaaggcattttgagtgtctgaaatgaaccagcacatctgggcagtctatgtattgatttgtcattccagttctgatttgttctcagcattctgaagattgcccatttgctggttaaatcagtatttctccgggttggaatgcttgatcctttagtggcttactactagaacttgtagtcaataagtagctataatgtggagtagcagtatcttgcagaatgcttttattaatttctacatttagctttatctatctgtgtgctttgccatgagtggagtttcaggttccttcatctctagttataagctagagtagcttgactgcttatggacaaaattatctagttgtacctctattctacagatcatacattcgtgtttgatggtagtatttatgctggatattgtacctctattctggaatgttctatatttggtggttgtattgacatatggtattatcaacattcatggtttgaaacagatgcaacccctgaaatatgcagtcatagttggcttgatgctgtagctgcttctaacattatgttcaaactgtagtgcaagtgtttatatagctggaatgctacatccttcaagtatgtcatcaagctatgaattccatccatttggccctagaatttgatattttccaagcagcagtaagcttattagcagcaagattgtagcactaagtttctgaggttgaatgggatgacattccttttcagagatgatacccaagcaaggttatgaaatcaggcatctgaaaaaaaatgtggcagtgattttacatgacgagctggtaaaaagttgcaatattggggtgcagacagaatgcaagataccagcttgagcgtttcattgtctgaagggtcttgtgctgtgctacaagatagtggtcacgggttccaagcagcctccccagtccccacgtttctggaagaagtcttctcggattattcctttccaaggccttgtttggttattcctatcccatatggattgaatgagattggaaaaaattatgaaagattttgacttgtttgggattgagacccactcattcgcacccaatcgacatggattgagagcaaaacgaataagccctcatgtggaagcctctagcatgggtctgctccttatacttgtctctt

SEQ ID NO: 14943 - DNA, 1404 bp, Zea Mays
tgtcgaccgattgaaatgtatctggggtggtctgatagggctactccgagggatcgaaaaatttgatgcatcgaggggattcaggatttccacctatgtgtattggtggattcgtcagggtgtttcaagagcattggctgataactcaaaaacgttcaggctccctacgtatttgcacgagaggttgatagcaattcgtggtgcaaagtacgcgttagaggatcaaggaattgctccgacaatagagaacatagcagagtcgctcaatatatcggaaaagaaagtgcacaatgctacagaggctgtgaacaaggttctttcactggatcaacaggcgttcccctccttaaacggtctacctggggacacactccatagttacatagaggatcaaaacgtcgcaaatgatccatggcatggatttgaggaaatgtatctcaaggaggaagttaacaatcttataaattcaaacctcaacgagcgtgagagggacattattcgattataccatggcataggaaaacagtgccatacatgggaggatattagcagacaatttgggttgtcgagggagcgtgtgaggcaagtaggactcgttgcgatggagaagctgaagcatgctgcgaggaggaagcatttggatgcattgcttgaggattattgagtgagatgtttttcgtttacacaaatgcagtggctgtatatactcggaaacatagggttcatcatccttgaaaggctttaccgctactcactcggcagataactatacatgtacatttgtgacaatcaataggcacgattcagatatctatgtctgcagctgcacagtcatcaaaacgacccaacaaaaagagaagctgtttttttccttgggaagcttcgtaaattttctgtaatgtatcatttagcaccttaatcagcagaagagcaacatttatgtaccggatctgtattattatctagttacaattacatggaagcaaaatgcttacaggaatatggtgcctacaaaatttatcttacatgtgcctaaaatgtgcgatcaaataaatttcaggagaaatttctgaatatcttggaaaacttttgttgacatatgggcatatggccagagtttggtcagggtaattccgcaagaatatgtacgtgacgtctcatttaggcctgcatattccatcaataattctagttgcatcaaatcaaccagaagatttttgcatgtctgaaatagcaacaatatggtggtattctgcaaatgattttgggaaacttgaaatgatagacctcaagaaaaatctctgaacattcccgagaactcctgattgacgtgtagcatgagctctaatcaaggcaactctacaaaaatgtatgtgtgatgaagcaattaaggaaatgcttgaa

SEQ ID NO: 14944 - DNA, 2499 bp, Zea Mays
tttttgtttcagcagcagctgcatccacaaatggacaaagagaacctggtagatatgcctacaacgatgaacaatcaggacaaactgttacagtttcaagtcctgatggagctgttgttcttgggactcctgttgctcctccggtcaatggggacatgtatactgatattagtcctgagaatgccattatccagggacagagaaaaatgagcaaaggtgttgattatttggttgaagcatcagctgcagaggctgaggcaatcagtgctactttagctgctgtaaaggctaggcaagttaatggtgagatggagcattcacctgatagggaacagtctccagatgctgcaccaagtaccaagcaaaattcaagcctcataaaaccagatgttgctcttgtcaacaattcaacagcacctcctggtgttcggttgcaccatagagcagttgtggtggctgcagaaactggaggtgccttaggtggcatggttaggcagttgtccattgatcagtttgagaatgaaggtagaagggtcatttatggaacccctgagaatgcaactgcggcaaggaaattattagatcgacaaatgtctattaatagtgtgcccaaaaaggtaattgcttctcttctgaaacctcgtggctggaagccccctgttcgaaggcagttctttcttgactgcaatgagattgcagatctatgtgatagtgctgaaagaatattttcaagtgaacctagtgtcttacagctgaaagctcccattaagatatttggtgatctgcatggtcaatttggtgacctcatgcgcttatttgatgaatatggcgctccttcaacagctggagacattgcttacattgattatcttttcttgggagattatgtcgatcgtggtcagcatagtctggagacaatcagtcttctccttgcactgaaggttgaatatcctcacaatgtacatttaattcgagggaatcatgaagcagcggatatcaatgctctttttgggttccgaatagagtgcatagagagaatgggtgagcgggatggaatctggacctggcaccgtgtgaacaggttatttaattggcttcctttggctgcactaatagaaaagaagataatttgtatgcatggtggtattggtcggtccatcaaccatatagagcaaattgaaaatcttcaaagaccaattaccatggaagcaggctcagttgttctgatggatcttctgtggtctgatccaactgagaatgatagcgtagagggactcaggccgaatgcacggggccctggtcttgttacctttgggcctgatagagttatggagttctgcaacaacaatgacctgcagttgattgtgcgagcacatgagtgtgtgatggatggctttgagcgattcgcccaaggtcacttgatcactcttttctcggcaacgaattactgtggaacggcaaacaacgcaggtgcaattttagttctcggaagggatctggtggttgttccgaaactcatccatcctttgccgcctgctatcacgtcacctgagacctctccggagcatcatattgaggacacatggatgcaggagttgaatgcaaacagaccaccaacaccaaccaggggccgccctcaagcccccaacaatgaccgaggctcccttgcctggatataacaggctggccatattattaaacaattgatttcttgtctcctatcattggcttgaggctaaaattatccatccattctggacacatggaagcactctgctgaaagcacacactggcccaaaacaatgtcgaaagaaaactgttcagggagcgagactaagcggtgctctgaaggcgaaggccagagaagagtcactgtcgacagcgctccccaaatcctttccacaaacaagtagaagagcagaaccaagtgttggtaaaccacaggatcttgcctgggatcgcgcctgtacatactcagacgccagcagatagaggaggggttgtgtatgtgttctttttgtcttagcgtcgaaagggatagcagcgtccattgtactaggtattcatttgctgtagattttgatttgttgcctcatgttgcaaagtatggagtgggaaagttggtttcctcgtgtgacggacggtggtctgtcaggtcttgtataatagcgttgtcggctgtttatgtttgcagcgcgtcagctgttacttagcacaccttacacctccctcatgttgtaattcccatcaccggtgctgatgaatgtgcacaatatattgttgtctgttgtccaaagttttgggtcctggacgggttaggtgatttgatttggtttattggagaagcaatacgttgtttgattttgagctgtatgctgtgcacctttgggatttattttattttgcaaatttgtgtactagcttacagttcagtggtcttgctttcagcaccgtgcaagcctactaccaaactcaggcaaacaacaccgcatagtcatg

SEQ ID NO: 14945 - DNA, 1345 bp, Zea Mays
gccaaaaaagccgcgcaaatccacccaccagtccactaccccgcacgctataactgcaaccagcgtagcgtaggctcgcggcggccgccgacaactcgggcgggacacgggagacagccatggcgacgggcggccaggggaaggccgcgggctactaccagtacccgacatcgtacgccggtgctgcggacgaggagcgccggtggtggccgtggctcgtgcccaccgtgctcgtcgcctgcatcgcggtcttcgccgccgagatgttcgtcaacgactgcccgcgccacgggagcacgctcggcggcggcgccgggtgcgtggcggccggtctcctccgccggttctccttccagccgctccgcgagaacccgctcttcgggccttcctccgccaccttggagaagatgggagctctcaactgggccaaagtagttcatgagcaccaagggtggcgcctcattagctgtatctggctccatgctggcctagttcacttggttgtcaacatgctaagcttgctcttcattggaatccgccttgagcaacaatttgggtttgtgcgcattggtgtcatctacttgatatctggctttgggggcagtgtgttgtctgcacttttcttacacagtaactacgtctctgttggtgcctctggggctttgtttggcctccttggatctatgctttcagagcttattataaattggactatctattccaacaaggcagcggcaatcataactctactttttataattgtaattaatctggccattgggatattacctcatgctgataattttgcccacattggtggatttgcttctgggtttcttattggatttgtgctgctggcaagacctcaatttggttggatggaacgcagcgagctacctcagactagtcaacctccaaagtacaaatcgtaccagtatgtcttgtgggttgctgcactcctcttgctggtagttgggtttgccattatcttggtcatgctcttcacgggtaagaatgggaacgacagctgccactggtgccattacctgaactgcgtaccaacgtccagatggaagtgcgatacctgaattccgcaaagtatatgctccactggtgttcgtgtgttcgtggaaatgtacgaccaaatgtatcctccacttgaccatcctgcgcttcttttgcccggattctccctggttccatgaaatacaaatgttccacttgaccatcctgcgcttcttttgcccggattctccctggttccatgaaatacaaatgttccagaattgtagcacgagcttataactgttgatttcggcataattgatgtattcatctcaccaaa

SEQ ID NO: 14946 - DNA, 3593 bp, Zea Mays
ttgaagttccatgactggacaagcacagaaatgagagcttgtacgaagatgaggagtttgagcagaggcagcttgcagcacttgttgtttctaaggtattttactacctgggcgagctaaatgattcactgtcatatgcacttggtgctggacccctatttgatgtttccgacgattctgattatgcccatgctcttttggccaaagcattagacgaatatgccagtatcaaaaccagagccttgaaagctacagaggaggaagagaacattgatcctcgattagaggccatagtggagaggatgcttgaaaagtgtatttttgatgggaaatatcaacaggccatgggtatggctgttgaatgcagaaggctggataagctggaggaagcgattgttgggtgtgataacattcagggggctctatcatattgcatcaatctttctcatcaatacgttaatcaccgtgaatatcgtttcgaggttctccgctgtcttgttaaaatataccaaactttgccaaatccagactatctgagcatttgccagtgtcttatgtttttgggtgagccagaaactgttgcatgcatattggacaagctgctttctggaaacaaggatgatgctctccttgcatatcaaattgcctttgatcttgttgagaatgaaaaccaggctttccttttgaatgtgagaaatcgtttgtcctcaccgactcctgtgccatctaaccctgacagtgggccagccgtacaagatgaccaaactgccagtactgtgggtacagacacagaagcagctggagatgttcagatgagagatgatacaagtacaccaaatggaactgctcacagtgtggatccaaatgaggtagcgcatgctgacaggcttgaaaaaattaaagggatactgtcaggggaaacttccattcagctggcattgcaatttctatacagccacaacaggtctgatcttttaattctgaagacaataaaacaggctgtggaaatgaggaatagcgtttgtcacagtgcaacaatatgtgccaatgcaatcatgcatgcgggaactactgtagatacctttctaagagagaacctggagtggttaagcagggcaaccaattgggcaaaattcagtgcaactgctggactaggtgtcattcatagaggtcatcttcaacaagggcgggctttgatggccccctacctacctcaaagtggtgcagttggtggtgggagtccatattcagaaggtggtgccctctacgcactaggtttgattcatgccaatcatggtgaaggaatcaaacaattcctccgtgaaagtcttcgcaactccagtgcagaggtcatccagcatggtgcatgtttggggcttgggcttgcagctttgggaaccgcagatgaggaaatatatgaggacataaagaatgtcctttacacagacagtgctgttgctggtgaggcagctggtattggcatgggcttgctcatggttgggaccgccagtgagaaggctagtgagatgcttgcttatgcacatgatacacagcatgaaaagattataaggggtttgtcactgggaattgcattgacagtatatggcagggaagaggaagcagacaccttgattgaacaaatgactagagatcaagatcccatattacgttatggtggtatgtatgcattggctctagcctataggggaactgcaaacaacaaagccatccaccagctgctgcattttgctgtatcagacgtcagtgatgatgttcggaggactgcagttatggctcttggatttgttctatacaacgagcctgagcagactccaagaattgtgtccctgctctctgaatcatacaacccacatgttcgttatggtgcagccttggctgttgggatatcatgtgcaggatctggattaagtgatgcgatttccttgttggagcctcttacatcagatgttgttgacttcgtgcgtcagggagctctcattgccatggcaatggtaatgatccaaactaatgaatcctttgattctcgtgttggagcatttaggcgtcagttggagaagatcattcttgacaaacatgaggacaccatgagcaagatgggtgccatattagcatctggtatcctcgatgctggtggtaggaatgttacaatcaagctcctctcaagaaacaagcatgacaaactcacggctgtgattggtcttgccgttttcagtcagttctggtactggtatcctctcttgtatttcatcagcctggccttctcgccaacagccttcattgggctcaactctgatttgaaagtgccaaagtttgaattcctgtcgcatgctaaaccgtctctctttgagtatcccaaaccgacaactcagcagactacaacttcaacagtgaagctgccagcagccattctgtcaacttatgcgaaggcaaaatctagggcaaagaaggacgcagaaagcaaagctaaccaggagaaggccacagaagaggcttctggttctacctcaagcaagacggctaaagctcaggagaaggatgctgatgcaatgcaggttgacaatgccagtgagaagaaagctcctgaaccagaagcgacttatcagctccttacgaatccagctcgcgtgatccctgcccaggagaagttcatcaagctccttgaaaacagccgatatgtacctgtgaaaccagcgccttctggattcatcctcctccgagacctgcagccgactgaggctgaggatcttgcgctgaccgatgcccccacaacagtcgcaggaagcaccggcaacactgcccctgctgcaggccaacaggggtcaggatcatcagccatggccgtggacgatgagccacagccgccacaaccctttgagtacacctcgtgagcgaccgagcgtcaccttttcttattcgttttttttttgactttttgagtatgtagtgtgcggaaatttgttgttggctggaagaccttttgtagaaacatgagtagagaattttacttgaattgaagctataggatcaacgttgggaatctgggatatagcccaggtcaaaacccgcgctcccgcctgtgatcttttttttcgtgcaatgcaaagtcgagttgacatgagctgaacacggcggtaaaaatacgaaaatgttcggggcaaaccttctcggtgaaattgtaaaaaccctttcgagaaccataactcgaagttctaaatgtctttaaaactatgtagtacattcgtagtgcgtttctagaaaaaagtatatgaaaaatatcaatttcaggcaaatatgcattagaggacgagaaattttgggatttgtcctcacttgatatgtcgtttcaacattaaatttacaaaacgagattttttaaattttgcgctaatgcatatctatagatgcactattggtgtgcagagttccatttttaaaaaaacgcctaaacgttttttttctaaagagtttttaccatttcacagagtaaagggcccgccgagaattcgacgtggcgcagacatcggtcagggagattttacactagtctccaaatggtgcaccgtagggtgaag

SEQ ID NO: 14947 - DNA, 107 bp, Zea Mays
ttaccgtttcagcagctgactcgaagccgcaagatcggtagtgattttccgatccagacaatttgtcgagcgcttggggaatatcgcgctgctaacttcgtcttcac

SEQ ID NO: 14948 - DNA, 2754 bp, Zea Mays
gctgccagactgcaacagccaccggcggtcggcacgacagcacggtccttccattgttgctcccagctccaacgcagcattactcatctccattctccagtccgataatccactcattacctcatcatcgtttccaaaagcaaagctttccacgcagattccaccattaaattgggcgaacttttttgaattaaaaactcaaatcctggaaaacgagatgcggtaggctggtagtaggaggactaatcatgtgggcgacgctacataaacccgtcgcgcacgccaacttgcgtctcctcctcacagtctccgccttctccggaccactccacttaggcaccgccagcgctgtcgcggcggcggttacgacccgacgctcgagttctagcaggggcgtcgcggccaccgcgatgccttcgtcgtctccgcctccgctgccaccagccgaggagacgaccgcctctgctgccgctctcgcccctgagggtggattctccctcaccgagccctcgttcctcgagtccctcatgccgaagaaggagatcggcgtcgaccgcttcctcgccgctcaccctgagtatgacgggcgcagcgcactcatcgctatcttcgattctggagtcgatccagctgctgctgggttacagactacttcagatggaaagcctaaaatccttgatgtacttgattgcactggtagtggtgatgttgacacgtccaaagtggtgaaagctgatgctgatggtgctattgttggtgcttcaggtgcccgtttggttataaacccctcatggaaaaacccttctcaagagtggcatgttggctgtaaattaatatatgaactgtttactgacacacttacatctcgattgaagaaagaaagaaagaagaaatgggacgaggaaaaccaggaatcaatttccgatgctctgaagcagctgaatgaatttgaaaagaagcatcctaagcctgatgacaccatgctgaagaaggcacatgaagacatgcaaagcagacttgattacctgaggaaacaagctgaaggttatgacgataaggggcctgtaattgacattgttacatggaatgatggtgatgtgtggagggttgctgtcgatacccagacccttgagggtaacaatgatggtggaaaactagcagattttgttcctctgacaaactacaggcttgaacgcaaatatgcaattttcagcaaattggatgcttgctcttttgtagcaaatgtttataatgatgggaaccttgtcagtatagtaactgactgctctccccatgctactcatgtcgcgggcattgcagctgcatttcatccagatgaacctctgctgaatggagttgcacctggagcacaattgatttcctgtaagattggagacactcgcttaggatctatggagacagggacggggctggtgagggccttgatagctgcagtagagcacaaatgtgatctgattaacatgagctatggagagcctacccttcttcctgactatggcagattcattgatctttctaatgaggttgtggacaaacatcgcattatatttattagtagcgccggaaacaatggaccggctttgaacactgtgggtgctccaggtgggactagtacaagcattattggtgttggtgcttatgtttcaccagccatggctgctggagctcactgtgttgtacaaccacctgcaaagggaatggagtacacatggtctagccgcgggcctactgctgatggggatcttggcgtttccattagtgcacctggtggtgcagttgctcctgtaccaacttggacgcttcaatctcgcatgctcatgaatggcacttccatgtcatctccttctgcctgtggtggggtagctcttcttgttagtggcatgaaggctgaaggcattccattaagcccttattctgtaagaaaagcaatagagaatacagccgcatctataagtaatgcacctgaggagaaactgaccacaggaaatgggcttttgcaagttgatagggcttttgaatatgcacagcaggctaagaagttgccacttgtttcttatagaatctcaatcaatcaagtgggaaagtcagttccaaaactaagaggaatatacctccgcgggggcaatgcatgctgccaaacaagtgagtggactgtgcaacttgacccaaaatttcatgagggcgcgagtaacttggagcaactggttccttttgaggagtgcctgcaactgcattctactgatacctctgtggttcaaattcctgagtatatactggtgacaaacaatggacgcagtttcaacattgttgtcaatcctgctaatatcagcagtggccttcactattttgaagtttatggcatagattacaaagcaccatggcgtgggcctattttccgtgtgccaattactgtaataaagcctattgctctattgggagagccaccactattgtcaatttcaaaccttcgttttcaatctggtcatattgaaaggaggttcataaatgtaccttttggagcttcatgggcggaagttactatgcgaacatcagcttttgatactcctagaagattctttttggacactgttcaggtggcttaactttggagttgtccatagcccagttctggtctagtggaattgctagccatgaacctacctgtgttgattttgagattgtgctgcatggaatatccattgatcagaaagtaagtacccttgatgcttgcag

SEQ ID NO: 14949 - DNA, 2149 bp, Zea Mays
ctcacctcattgttgttaaattgagagcaagcaataagtatttgtttatttccttgtctctgtttttctttgtactggactccccctacttctgacaagaagaaaatgcaacgggcagtgcaggccgtcaggtcacacggcaatgttcttaaatatgctgttctacaacacatcagcgctcccaagccagcaatgcttcctgctgccttttctcgtttcatgtcagtttcatctgctcgcctagaggatcgtggatttgaaactgccactgtagcagatgtcttgaagtctaaagggaagagtgctgatggatcttggctctggtgcaccacagaggatagcgtctatgacgctgtcaaatctatgactcagcacaacgtgggagctttggtggttgtcaaacctggacagaataaatcaatcgctggcattgtcactgagagaggtgatgaacaaatttctgtactcttggcatctaacttttggcctgtgggtatgatgggaaaaatacaaaatcatgtaccactacctccattttcatttaactggcacccttgaccaaagtttttctgatcataaatacttgatttaagataaagctggtcagctagtgcttgtagcttgctatttgaaacaatgggcttttgaggtgtttcccaattttctctcatctctctatgttttcatagttcttgccttttcctgttcctttaattggaaaaatatcattagatgcaaaaccatattactttactgcccctttatggtgataagaaactccgacgcattggaaagggaagtatgttcggcgggtaggttgtgaatgtataactccgctttgtttttacttcagctgtgcatcatagtacttttggcatcaaagagtctcaactctttagagcactttatagtagatacaacagaaattgcatcaagttaaagtatacgtgtaagtaacataggatcttcttcacatggcacaatcatagctgccacttcacactgaatttcctattagagatgtataggctaactgacatcacttgttgtattcttgtatcacaagatgtactcagctacacacacgcgtcgcggtacaaacactgccgagcatggaggttgaaactgggccaacttcaggcacatcacatgatgatttctttttcactatgccttgctgcactgttcgcacgttacatcttggacttgaatgtgaccaagtagtatccatatacagacgatcactcgatcagcatacatagatggtatttttgagattagaaccaatacttgacagatcttgcattctgaaaacggaaacgtaagcgtggcaatcttttaagacatgcataagatcatagtgccatgaggctaacatctgagacttggtgttttcagattatctccggaaaatcatagtgcagggaaggtcttccaagtcaactaaggttggcgacatcatgactgaagagaacaaactgatcacagtgaatcccgacaccaaggtcctgcaggcaatgcagctcatgacagaaaaccgcgtcagacacatcccggtgatcgacggcacggggatgctggggatggtctccatcggcgacgtcgtgcgcgcggtggtggccgagcacagggaggagctgaaccggctcaatgactacatccagggaggctactaggacggcgtgtgcagcgacgaccccctccgatcccgccagtcagtgaagtccgcctttgaaatccaataactcggaacaatgatgatgacgaaataggccgtgttttcttggacaatgatgttaagttcggcaaggttttcctttctctttttttattctactgcgtggtctatgtgtatattgccaaaggcatgcgtgagccatgcgcccggtgctggggcgcagagaccatctgatggtggaaacaccggaaataagagcgtgccgctgtgtgtttcctttgaaggaataaaaatggtgttcgtgttgtgcattgcttattgttgatgttcgctttggattaaggccttgtttatgaacggtacggattcagtgcagtactgtacgtgcagaactgggaaggctttactttatgaattacatcttctgtttttagcttcatcatgaaatattttcaacagattcgtatttag

SEQ ID NO: 14950 - DNA, 1111 bp, Zea Mays
gccagcttccggtcacaactcacaaccggcaggcaggcggtggcgccgcggcgacaccgttccacggttccactccacgtctccacccctgacgcgcggaactggcggtggcgagcgaagctaatggccatccatgccccgctccgcctctgcctccgcctccatgcgaggaaggtagccagacgcgtataaagggcagccagaaattcggatccacctgtatgcgtctccgttcgttcacgccacaggcaaggcacaggggcttgtgagggagagcgaggagcggaggaggacatggtgcacgggacgctggaagtgctgctcgttggggccaagggcctcgagaacaccgattacctctgtaacatggatccgtatgcaattctcaagtgccgttcacaggagcagaagagcagtattgcaactggaaaaggaactacccctgagtggaatgaaaactttatcttcactgtgtctgaccggacaacagacttggtaatcaagcttatggacagtgatacaggcacagcagatgactttgttggtgaagcaacgattccattggaagcagtgtatactgaaaggagcattccaccaacactctataatgttgtgaaaggtgaaaaatactgcggggaaatcaaagttggtctcacattcactcctgaggatactcgccagcggggtctcccagaggacttcggtggatggaagcaatcatcttagagctagatgctttaagggtgcaccagagcacagcgacaattcatgcgcttggagccttcagccgtcgagtacttcatgctaatgcagaattcattcgatttggcttcttttgattgtttcagaagaagtgttattaggattgaagctgcactgctgcaggacagcagaaggcttctggtgcaaaatgtgcaacctcctcgcctgttcgcctcgctttaatctgtttctacaatgtttttgttttcttgtattgtagccgtaacagtctaaatagccgcgatggcaatcgtgggaagcaattgaacgaattggtgttgttactgtcgtttcggacactgaaagaccatctttctttgcttgctttgccccgaaaggaggaattttg

SEQ ID NO: 14951 - DNA, 237 bp, Zea Mays
gtggccgtccgcgagggaggaccccggccgccgcggccgccgctggcgcggctccctctgccgcaagctgctcggctgcctcagcttcatcggggcgctcttccgaccttgatgactcgtccgtccggacacacccgtctgtgcgtgacacttcttgcttgcggattctctggtccttctggaacgctgctcttccggttctcgagtgatcagaatttttcttattaggatttttct

SEQ ID NO: 14952 - DNA, 1963 bp, Zea Mays
gtgggccgcgggccgggcagcacggttttcttggcccgacccttgatcaaatcaggtctagcgaaatccaaaagcccgttcgaccccaaacaccgactgaccgacacgactccccccttcgtcttccaatccgccgctgttcgagtagtcggcggcgcggcgccggcggccggggcggcggcgatgaatcccctcacgcaggtgaagcggacgcagattatcaaccagaaggaggcgctcctgggcatcggcgaggacgcgtcgtggcacgccaagtttaaggactcggcctacgtctacgtcggcggcgtccccttcgacctcaccgagggcgacctcctcgccatctttgcgcagtatggtgaggttgtcgacgtgaacctcgtgcgcgacaagggcaccggaaaatccaaggggttcgcgttcctcgcgtacgaggaccagagaagcacgattcttgctgttgacaatttgaatggagctaaagttcttgggaggatcataaaggttgaccatgtgagcaagtacaagaagaaggaagaggaagatgaggaggagctgcagaagaagagggaggcccgtggagtctgctatgctttccagaaaggcgagtgcaaccgcggagcttcctgcagatattcacatgatgagcagagaaatgcaaacaccggttggggttctaaagaggatagtggtgcacgatgggagcatgacaaacacagtgatgtaccgaagagtcgaggcatgtgctatgctttccagaagggagagtgcaaccgtggagcatcctgcaaatttttgcatgacgagcagagaaatgcaaacagtcgtcgggactctagggatggtggaccatcgagatcagagcggtatggagaccgagaatctaggagtaggcatgatgatagaagagcagaagatcgggacagattcaggcgtgacaactcacctgagagatcacgaggtgagaggcagagggacgatgacagatccgacagaggaagagaagcaaaatcagaaagacgcagatatgatgtggaacatgaggatcgcaagcggtcaaggcacggcagagagtgatgccatgaaagaagtgtttacaaagaacacaaatggtgcaagaggccgtgggggattgacatcggtgtcatttttagttatcatcactgaaaccgtctgactggattgtgttggtgccaattgcgtggtttttgccgaggaagttgtttactggttaatcttcagctaggatggtgggcgcgcctccgcaaggaccacaatgcctgttctggctacgcgctgatgaacaatgaaaatgatgctgtattttgcagaaccactgttacctgcaacagcatcagcagcagcatgtgcaacccaaaaggagccgtattccccagtagaaattttgtactggacagaggcacggttccaaaaggttcggccctaaaaattgctctgcaatgtcagtggtccagcgtagatgatgatgatcgcttctaacatagtctataaaaaatgcatactggagatttggtactagataacaagaggaccttgagtaccgagttttttccggtgaaagattgatgggcgatgccacagcctgaagacgaagaggatgtaaagaaaaaaactcgccaattaagggcttgttcggttattcctatcccatatggattggatgagattggaaaaaattgtgaaagattttgacttgtttgggattgaaacccatccaatcccacccaatccacatggattgagagcaaaacgaacaagccctaagaattgatgatgttgtagtacaaattccaggccttcggttgattttctaagagttagtttggttaattttctaagagttagtttgacagcctcgttttttcaaggaattttcatttttccaagtgaaattaatttatttttagaatttgagaatcttttattctcaagagaaatt

SEQ ID NO: 14953 - DNA, 1245 bp, Zea Mays
aagggttagatggagccctatttccgtggtacagtttctccaatgatggatgggccttatgacgctattgaattagagacaagaatttccaagctaaaagaatccatgtgcaatttacacagcctacaaatgaagttgaaggtacctgaggatgaaccactgcaaactaacatcagggcatctctactgtggtccgagaaagaaagttttgaagagtataatgagtcttttatccctggacgcccagaacgtctctcatttgctgcgtaccaaacagtttcaggcatgtcagatgaacttctcactgtgcaaaactacaagatacaagcaatggattcgacagacacccttgaaaggctgaacactggtatcaagtttgtagaacataacatcggaatgatagccgcaaggcttgccattcaaaatatatgatcctcattggcagtgtttagttcatatgctaaatgatgtccgtgatgctaactccatctggtcgtaaaaaagaactcaaagcttttcaagtttcaactgtaaacgtggaaggtctgatctggtacattcggataacttctgacataactttgatatacattcagagaacagtacgaagatgaagaacacaatatgaagttgcctgctcatttaaatttgcatggataagctaacagaaaacaccatataagttgttcaagcatccagtacaacattattccatcagataaactatgcaactgtttatcaggtattgagatagaacataaaaaatgtctgatcagacaaaacataccataccatcttcagtgttcttaaggcgtcgcctaagcgtccaggcgctcgggcaaaggtggttgcctggtgcatttgctcgcctaggcaccttaagaacactgagcaccttattcaaattccaaagactacaactcttgcttgaaccaaagtaattttgaacgaaattaaaagtagtttttcaaggaaagaaatactgtgccgagcatgagtcctgttggacttaatcggtagcagcaaaagcttctaaagcacataaagcttccgcaatgtaaaagttggtatctcctggaacaatggcaggaagatcagttatactcctttgtcttgatctacttctttggctctctaacttcttgctgaccttcagcgatgttgatgccaaagagaagaatggcgcgacctccgttattgccaggcactgtctcctctgctggtggattctccgcttgattctgc

SEQ ID NO: 14954 - DNA, 1517 bp, Zea Mays
catgaaaagcccaccatgggaattgaacctaggtcatgaagaaaagaaactcctttagctggagagagtgtgcaatttctgttgcattgtcagttggactaatcactggtgcaccaacgtttggaccaccggcctatgcttcttctcttgaacctgttcttccagatgtgtctgttcttatctctggacctcccattaaagatccaggtgctttattgagatatgctttaccaatagataataaagctattcgtgaagttcaaaagccgctggaggatatcactgacagcctcaaggttgctggtgttagagccttggattcagttgaaagaaatgtcagacaagcatcgaaagcactgaacaatgggagaagcttaattcttgctggccttgctgaaccaaaaagagcaaatggagaagagttgttgaataagttggctgttggatttgaggagcttcaaagaattgtggaagacagaaatagggatgcagtagctccaaagcagaaagagcttctccagtatgttggaacctgagatcttcctgggacattgcatttctgcagtgtagaagaagacatggtcgatggctttccctttgaaataccagaagagtacagcaacatgcctcttctcaaaggaagagctactgtggatatgaaggttaagattaaggacaatcccaacatggaagactgtgtatttaggatagttctggatggatataatgctcctgtgactgctgggaacttcgtagatcttgtcaaacggaaattctatgatggcatggaaatccaaagagctgatggctttgttgttcaaactggagatccagaggggccagctgagggctttatcgatcccagcaccggcaaaatccgtacggtacctcttgaaattatggttgatggtgataaggcgcctgtatatggtgaaacacttgaagaacttggtcgctacaaggctcaaacaaaactccctttcaacgcttttggaacaatggctatggcaagagaagaatttgatgacaattctgcttctagccaagtattttggctcttgaaagagagtgagctaacaccaagcaatgccaatatattggacgggcggtacgcagtatttggatatgtaactgagaatgaggactacctggctgacgtcaaagttggagatgtcatcgaatcaatccaagtcgtctcaggcttggacaaccttgtcaacccaagctacaagattgtaggataacgtgttttgtatcagagtttcttgtctgtgggtctctgtcctcaagtcgatgtaaagtgctatatagtatcttactcccatatccttctcgctcgttaacgagggtttgtgtcacgcggaattcgatagtaattgaaagtacagagtcattgattggttgtcccatacttagaaaaacctgaaacgaggaacatggccgtgtttctctgttctggaaactttgtccagaaacaaggaacgggaatggtcataaacgacgacgaaacttcaact

SEQ ID NO: 14955 - DNA, 580 bp, Zea Mays
gtagcatataatgggttgctatatactccattcatttttagttgtttgtggaaagagggcaggagctttcacttgcttgcttgatgaaacggggcgatatggtcctcacgattctttacctgaggaagtaaaacctgacttcaaggtgtcctcactgacagaagtattcgctgtgctggaggagcacttcgatttggcaccagtgcctgccgagagtagaatatgacagggaagttttattggacctcccttctaatgtgaaatcggctacccaaccaacagcttgaataatgtggaggacgttgatgggactttcaagtatcagaagcccctgctagagcctgcagccagagcccagaaggacgatggctgttccaaggggggattgaatgtctttggaaaggcaatgaagtgattcagttcgttgtaaatctattatattatgttgccccagactaaaccagcttgtgtggtttagtgactgaaatgaccacacgtatctggagattcagaatataacaatcgatttccacggatttcattcgttcaatttggttcccctatctctttcacacagcaa

SEQ ID NO: 14956 - DNA, 4162 bp, Zea Mays
  misc_feature (4161)..(4162): n is a, c, g, or t
gccttctccttcggggggcgggggtactgcaagatatggatagtaaaattaagctgatgatcaagatcattgaagaagatgctgaatcatttgcaaaaagagctgaaatgtactaccgacggcggcctgagctgatgaccttacttgaggagctgtaccgtgcataccgagctttagcagaaagatatgaccatgcggcaggagaactccgtcaagcacatcgaaaaatagcagaagcatttcctgatcaggttctaatggacttggatgatgaccttccagcagaaactgcttccattgaaactgacatggacaatccagacatggctccatatttcctctctttcatcaacgctagtgatttgaaaaggaatgctaaagatgaccaagattttgagagactgcagaaagaactagcaagcttgtcacaggaaaaccaagacctcaaggacaggatctcgtccatgttagagcaaggcaacaaggctgagtgcgagatccttcgcctcaaggagtcccttgctcaacaagaagcagaaaaggagtctgcagtttcactatgccagcaatcaactgctagactacaaaacctgaagtctgaaattatgcatacccaggagaaattcaacaggctgaaagaagagatgcaaactgaactacaacctttgaggaaaggagatgaacatttatttttacttgaaagagctaatcaggacttgcacttggagctagataacctgaaacttctgttgaaacagaagcatggcgaagtaaatgaaaagcaagatgagttggaaaagcttcatatctctacagaagaagagcatctcaagcgtatgcaagcagaaatggcacagctttctttggaaaaacagttatcactggcacaagacaaactgaggcatttgactcttgagaagcaggttgaagcacacaagataaaggaggtcgaaacgagcaaagttgtgattcagaaagaactggagaagattcttgaagagaaccaaaggttgaatgaccaaagtcactcttcttcagcagtgataattcgtctgcaggatgagataatttccatgaaaaatgtgcaacgaagattagaggaagagatttttcagcatgtggaggaaaagaagacacttcaacatgagctttcttatcttaaagaggataggagtgacttggagaggaaacactctacaatcaaggaacagataggatctatgaacttgaatttggaatctctacaagcactagcacaagagctgagggatggcaatgttgagctgaaagagattgtcaagaaccatgagagcattgaacttgtgcatatcgataacctaagaaagttggagaggatgtcagagacaaatgcacatttagagaagtctttgtcagctgcaacaactgagcttgagggactgagggagagcaaggtggcattagaagaatcatgcatgcacttcagatccacgattaacactcatcagtctgagcgagctgtgcttgtagcgcagattgaggtaatttctcagaccatggaggagctactggagaagaatgttttcttggagaattccttatctgacgctaatgctgaacttgagagtttaagaatgaagttcaaagaactaaaagaatcttcagaagcactccaaaatcagaattctgtacttcaatctgataagagaactcttgtccaccaggttgagggcatcactgtaactctgctgaatttggaaaggcaatacaaagaactcggaaggcggcactcagatctgcagaaggagaaggacttggtgcttgatgaagtgatcaagatacaggaacagataaggcttgagaggaaggagcatgaagattgtacacagtcaagcaacattagatttgatgctctacagaagaagattagtctattgctagaagagggcaggagtagagaggtgcagcttggtgaggaggagctcaagattgtcaaagctgagatagagatatttgtcttgcagcagtgtttgaatgacatgacagaagtaaattctgaaatcgcagaacaactgcgaaagaataaagaaatatgcaaggtccaggagggaaaaatctacagcttatcacagcataatcagaaactaactgaagggattgattcagtagtgagagtattgcatctggatcataagtatgaatccttaggccaaatgaagcttgaaatcattgtgcagctcatcttaaatgagatcagctgcctgctgaataacatatctgatgcccaggatgtgaagcagaaggagcttgttgagaaatcacttgtagttacacttctggagcatttcgggcaagaggtggctgacttgaggtcagagcggaatgtcttgaggcaagatcagcagataaagattgaggaactgctccagctgcagagagaaaaggaggaacttatgaagataagtgatgaattcttggaagaggtggaggctcgtaatcacaaagtggatgagctaaaggctgaggcgaagttcttggttgtaaggttctccgaactgcaagagtctaggaggtcattgcaaagcgagatcaccaagctattacaatcgaactcttttctatcaaatgaactaaatgattccattgaaaaacagaagaggtttgaacatgatttcagcaatcttgttagtgaagcagttagtaaagatatcctcagtgtgatctttagaagccttcatgaagagaggacattgcagctgaagtctttgcataataactttggctgtcttcaaacagcaggcggtgagctttatcaggagatcaagatgatgaacaagaggcttggagacatagaaatggagaacaagtaccttggcaaagaactaagtagaactatgagtgtttatggtggatctattgtgcaaacagcaacaggaaaaggaaatccagggcgaagagatgccaaccttctgaattcaaacaggaaaatccaacaagattgtcatgtaaatctggaggtggaacaagaggaagtttgcaatgctgattttcaggagtcaaatgaaacactacaggatgaggtccgtaagttaaggagcgaagtggaaatgcttaggagcaaggagaaggctgtgttcaacatcaaatcctgtgatgaagagatcatgaaattgctggctaacatgcaaatggctatcatgaatgcagctctgttcaaagagaaggttcttgagctcatcataacatgcgagagttttgagataagtgccatggtacagaaggaggttctgaaggaagaaatcatacaaagaaattcatatgtagatgagctgaaggacaaactaaatgctgttgagattgaaaacagaagactgaaggtcgacctaaatggtgatttcacaatgttagggtcattgcagactgaagtcagtgccctggaggagcaaaccttatctctcgctaacgaccacttgcatacaaataagctcaggatggaggaaaatgcattatctccacaccttgtgaagaccacaacaagatccagtggcgaagaaaatgcattgaggatggtgaaggggatggagctgcaaaaattgcatggaacaatcaaagcccttcagaaggtggtcacagatactggtgtcctccttgaacaagagaggcttgatttcaatgccaatttaaaagaagcaaagaagcagatcgaggtgctaaagctcaaggagatcttggatgatgatataattgaaatgaactacgagcaaatgttaaaagacatacagcttgacctcattcaaacttcttcaggccagaaaaccagtccgtttggtcaggaaaagaaaaatgtagcacaagtagatgacaagatggtaaactcacgcggttctattgggccgagccatggacatgtggctgacgacctaagaccgccgcaaagtgagtcatttgggagagagaacaatttaatggtcgtgaaagagctcagcattgacaagcaagagttaccgaggtcgcttgctatggagccacacgaggagtggagaaacaaggtcgtagaaaggttggcttctgatgcccagcgactcagtgccctccagtccagcatccaagaacttaaaacgaacgccgaaacatccgaagaggtagagctcgggagtgtcaggtaccaaataacagaagctnn

SEQ ID NO: 14957 - DNA, 2934 bp, Zea Mays
caccgatgttggagttggatttgaggattctcctgtgttcaatttcatcaacaatctctcgcctataccaccacctaaacctttagactcagcacataatgtgcagctattcaagtcatcagatttggcacctgtttcttcgatctttgcctcaccacatgttaatccaacaaagggaactaaagttctgatcagggacgaatctgttcagcttcctcatgaattgcactcacctagcagtgtcagaactcggataggcacctcaggctcttttagaatgatcagatgcaaagacattgtgccagagaattgtaatatcacttgtcaactaaacgaggcatctattgattcttcagatcatacatcaagctctacaggccaattgactcaatccataaaagatgctgctggcagtatggaaagcgataaggatcaatgcgctggtggtaaaatagaccttaccatgtcccaggagtgcacaggcctagaaggtatgaaccttgatgagagtagcccagacagaatggattcatcacattctgggatagttgttcatgaaaaccagctatctgaacaaaacaatgatgaacctgcggcatataatggggtttacatgattacacaccaatcaagtagtgatatgctgactttagccgtaccatctggaacagaagcacaaccaatgaatgatacacaaaaggctgataatccctacccttgtgaatccttgttggatgttcagtcaagtggaaattgcacccaaaattctgtgcatgaaccccatctgtactggaacggggcagttgaaggggctgcagtagcttatactccccaagcacttcctggtgctttgcaaagtcagttgatgccatgtaacaagctcaatgagccaaaagattacatgcctactgagcaaaatgctttgtcacagcatttacgtggcatgcgtaggcgcagccttttcaatgaaaaggctgggcttagtaataaaggtgtagacaaagcttcagatcatcatcctgtaaattcaactacccccaaatgcaaaaccatttctggtgacaactcaaagactctaagaacccccccatgtgcattgcctggtattggcttgcacttgaatgcccttgccgcaactgcaacacctaaagagaaaatagtccctcaagacattcagtctactataaatgaatcaagtaacttgataggccctgctggatcttctccggcaccttctgagcaaaacattataaatgatgatttcactcaaacaactgatgttgcaaccgctgaagcttctagtcagggtagtcccaagaagaaaaggcataagtttgatagtggtgatggcacttcatgcaagcgttgtagttgtaagaagtccaaatgcctgaaactttactgtgagtgttttgctgctggagtctattgttctgagccttgttcgtgtatcggctgtatgaacaaccagagtcatacggaaactgttctatctacgcggcaacagattgaatctcgcaatccattagcatttgctcctaaagtaattcatacatctgagcctggtctggaactaagggacttctccaataaaactcctgcttcagctcgtcacaaaaggggatgcaattgcaagaagtcgtcatgtctaaaaaaatactgtgaatgttttcagggtggtgtgggatgctccataagttgcagatgcgagggctgtaagaatgcttttggaaaacgggagggggctgccgtgttaagcatagaggaacctaagcagggattggaagaaaaggatgtttgtgtgaaagaagagaaaagtgaaatcgagaaacagcttgttgtctaccaaactcctgatgatgctcctgctgaaaatgtactgaccacaccttccatggtgcagtgcagacccttggcttgtcgtccacccccaagctccaagaaaagctccaaaaaaccacgatcttcaacaaaactcactggacatccttcgcggttgtgcaacttacaagctcctccgaagaccgacactatgctctccccattcgaaaactacgcggaaatggtccttggtgatagcacatcggatatcctcaagggaaattcatctcctcaaacttctgttaaagtggtgtcaccaaacaagaagcgaatctctcccctgcgaatgggtaccgggctatctccaatctgtaggagtggcaggaagctgattttaaagtccattccttctttcccttcccttggcggtgatgtaaacaatgaggatccagaaaccaagttgccagccccttgaatttaccatattttgtcactggtttatttctaccataccatctgatagtggacagccaagcgactttcctttcatcatttctatctctctcgatcaatgattatttatgtactgctataataatctgccgcgtgctggcaaaattctgcctccctagaacaaccaatggcatttggtttgctggtaaattatctcttggctccgtgtgttccctgtggctgtctgtctataatttatgttcattattttgttccggagaccgaagaatctgaggacttgtatgtatctgggatcaagatgtgaatctcgcatgtaccagatgacagaactgttaagacttatatttgtctgaggttaaactgcaagacttttatttaagctagaactttgatcactataggatatggcatgatatagcagggctcttgagatgcattctcttgtgcgtgcttggtaactgtagtcgtgcaactgttgacggcgtttgttcagaacaagtggttgatgaatttgaagatggtttagggagtgggaatgattttgtttgtgtgcgtgcgaacttgtaaaatctccgtgtatgaactggcaatgcttttatggtattgatcatctgcggtgtgttaactgagtgcaaaata

SEQ ID NO: 14958 - DNA, 1229 bp, Zea Mays
ttcatgcacaagagaaaaggaatgggttaggctctttcgaaagaactctgcaaggtccaaccaaaattcaagtgatagtattcacaccatgataaggccttcatttccaaaatggtattttgtgcatgaagttcctgagcagttcccaaatagtgatgtcacagcaattgttgatgaaacctggcaaattggtgatcgagttgattggttgaaggaaggttgttattggtctgggacaattactaagataatcaatgaagatctggtcgagatagagctgccggcacctcccataggtgaaggaaaatgttataaagctaaatgtagtgatctgaggcctactctcgagtggtctctagcaagaggttggatggtccctctttcacaggcaaatggaaaaggttggcatgctgctcgtctacttcagcattataaatctgaatcagatgatgataatgacgacaacgatagctgggatgcccggcaaacggtgtgcagagcttcaaacacgcctgaggaagctccaggccccatggtccctgcacctccgtcagccacaaacaacgctcccagccacatgtatcagaaggatgctgctgtcacatccacagaggacctgctgaagcccagctcaacatccaagtcgccagaccccaggcacgacgcccaagctagcactcaacctgcaggtacgggggtctccatgaagccggaaccggttattggagtctcaacaatcaagaaagaggactcctccttgacagaaggtgaggttgatggcggcacggaagagtgcctggagaagctgggcgcgatcaaagccaggctcaaatacctcatgcagggcacgcggctggaacatgagcgcagcgccaccttccgtgggtagtcaggcagatgaagctgcatcaaaggtgcaacttcacgcaggggtttagggtttagggccatctaacgcctgttgtggttgctgaattttgtgtcctgtggttacaggtattattgtcctgaataatgacgttgtgaataagtggtttgtttttttgagtgcggcaatttgtaggagctaagaggaatgtgttgctgagttaagttatgaattagaccgtgtccagcagttcactcatatggtcatcctaaacaccgtgcagtagagtttgaatattagtatgaggatggataaactggtgcagatagccttatgttgtgaatgaatatgttgctgagta

SEQ ID NO: 14959 - DNA, 1792 bp, Zea Mays
ttcttctggtgtttgattatatagtatgatgtatatttgatcacaaaggaaaaaaacactaagccaaaaccacaaaatatgttattgttttttctatgtattattatattgtaaaaacagtgttctttttcacaacctatgtcatttcattactcgtgtattgaaactatgggtttgaaatgttctaatgtccagacattccataaccataataatattgaattcatgcatttatactagtgacaatgaatcttgcaatgcattttagcggtggaatttgtcaacatcgtttaaatttttagaaataaccattgaaattgcttgctgttgcaccaaggtgctgtgaacttttttgtttttgttttatgcatacatttttggtttacaaaagaaacatctccctctcatcatctgcatccattattagtcactattgtcaccagaaagtcgtgaaggttgtcttttttttatgactgcagcttatagttaactaaattgacattgctgggaaggatgtgattgagggagttggaggctctactgcagtaatttgcattgccttgtcatgcactagatattaatcagttctttaagtgacatgcagccccacccccaccaaatgatatgacagtgagacaagtcgctgacaaactggcaagctttgttgccaaaaacgggagacagtttgagaatatcacacgacagaggaatcctggagatacaccattcaacttgctgaagaggaaagggctcttgctcagtcaaaggaggctgaagcatcgaaagctaactctggcactgcaagcttcaaggcaccaggtggtacttatagaagctcatttgaacagaagtctaactatcagacacctgcatcagctttgtacggggcatatgagggtagttcttcccaaggaagctcttctagttatggtgatcatacagctccaccatcagatcctgtagcattgatggaattctatgcaaagaaggctgcactggaagaacggaagaggccaccaaggcagtcgaaagatgaaatgccgccacctccttctcttcaaggtcctcctaagaagggacaccacatgggtgatttcattcctcaagaagaacttgaaaagtttatggcacggtgtaatgatgctgcagcacaaaaggctaccaaagaagccgctgagaaggctaagattcaggcggacaatattgggcacaaacttttatctaagatgggttggagggaaggtgagggtcttgggagcgagagaagaggccgtgcagatcccgttatggctggagatgtgaagaaggatcatcttggtgttggggcagtccagcctggtgaggtcacatctgaagatgacatctatgagcaatacaagaagcggatgatgcttggataccgctataggccaaaccctctgaacaatccaaggaaatcatactactgatgtgggggagttcgtctgaggggagataaatgtcaagaagttcgttattcagcatatttcttggaatgccacagatgcaaggcttccgggggttctacaaagctttgttctttgtgtagtgtgtttatctttgtgggtttaaatgtctgttcaaacgtgtatcatgtttcagactgttgtattgctttcttggatcacccttttttctgatctcatttcagttacaagttggaaccataaggtacaaaatttgtgttgggaggggttatattttagaatggagtgtgaataactatagctagcataaggctatctccagcagattagccatcctcacatctaac

SEQ ID NO: 14960 - DNA, 1569 bp, Zea Mays
agcgattatgttgatatttcattgggacatataaatacgagtttttttagtttgtaaaaggaatcccgttaagtttatttatgctcaccaatttaagggcagaacttacggacctcaagctcttggttactcctgatcttctctaggcgactaggcacaattgccctctggcaaaatgccatcagtttatctttacatccctaacattatcgggtattttaggatcatcataaatttcattgcatttgcggtttgctattccaacaaggctctctttgctatcctgtacttcatcagctttgtccttgatggtgtggatggttggtttgcaaggaagttcaatcaagcatcaacctttggagctgtgttagacatggttacagatagggttagcactgcttgtttgttggcccttctctcccagttttacagacctggtttagtcttcttgatattgcttggattggatattacgagccactggtttcaaatgtacagttctttcttgtcaggtaagactagccacaaggatgtaaaacacacaggcaattggcttctgaaattatattatgggtacaggccattcatggccttctgctgtgtttcttgtgaggttttatatattttcctgtttctctttgctgatgaggagtcaacaagcttgcttagtgtatgcaaaggcatcctgaaccaaagtcccgtcgttatcttggtgtttgtttccactctagttggctgggcagtgaagcaagccaccaacgtcatccagatgaaaactgctgcggacgcatgcgtggtgtatgatctgaagcgcagcaaatgaagcatgaaggcagcttcacggtttagtatcgacatatccaagggaaaactctgcgagggggcgggctacgtcttgcgtgccttgacatctttctgatgatgcggtcatatgtgggaccaggggatgacatgccgtggccaatgcaaacaattgttttgtgaaagcagcggccgttaagttgttgtcagtgtgagagtggtgatgcgatcatgatcctttttacctagagtagctcccctttgtgttagcctgaacgatgttttgcaagccgcatgttccgaactctaggattatttggattacaaaacttacatattccatcctcaaggccagttccctcgagagttcgatagttacttatagtcgctggaataggcactagctactgttcgaatgatttcccttttgctccttaagcatcctttgggtcagctttatcgataaaatttctttttttatgtgacatccctttgcttagaaggggattgaatggaataggagaggattgaggaagaaataaactaatttatctctcaatctcttcgaatccctttctaactaaataaactgctttaaatgataaacaatacctctatcctaaaatataataattcgttttagattaattatataccaatggagtttgtatatatatctatattaattatcatttgaatgtatatgaacagaaaaaatgggctagaagtaactatattttaggagaacggaggaagtaccaagttaac

SEQ ID NO: 14961 - DNA, 1324 bp, Zea Mays
gatgggaaagatgtaaaaaatggttattttttctccaacaacctttcagaagttgcacggctcgtcaatagcaatcttcatggcccattaacaatgcgctaacaaatagacagagtccaattcatcgaggcccacgcaacgcgggcacacaaagattctacaatccgtggcggagccggtggggggatcccaatgtcgtaaatagctgcggagccggtggcggagcccgtagcgggcgctcgaaaatatctcggcacggctgggagctctggaaccttcgctggcggctccaacccccgacgaggcgacgaccacagcactcccctcctatttatttcagagaaagaagacgagagatatttttctcacgccctccccgcggaattatacctttttttttctctctctctcgcctcgcttccttcgaatccatccatctctcgcctccctttccaattcgatgcctttgtagcgctgctgcctcgcccccgccgcgtcgtcgcgggtccccggcttcgcttgctgctgcgcttccagcgtcatggacgggggatccggcaatgcctccagcggcggagcggcggtgtgctgctactacgcgctcctcggcgtccgcaagagcgcctccgccaccgacatacgcaccgcgtaccggaggctcgcgatgaagtggcacccggaccggtgggccagcgatcccggcgcggccggcgaggccaagcggcggttccagcggatccaggaggcctactcagttttatcggacaaggggaagaaggccatgtacgacgccgggctcttcgatcccctcgacgacgacgaccaggatttctccgacttcatgcaggagatgctggtgatgatggataacgtgaaaaacgagaagccggacacgctagaggacctgcagaagatgctggcggacatcgtgaacggcgacggcggggacggcgtaggcgggcgcgtgccgccggcgccgccggacgttgctcggcgaacgcgcgtcgcgccccacccgcagccgcagcaggcgcgtaggtgaccgccgcgccgccgtagctgcggcggagtacgtacgcttttggtgaaagggactggagaaggatcagaaacgggaggctctctggaaaaaggagaataaaaatttcaggccatcttttgatcataatctaccaatcctttattgtagcagtggtcgattgtgtaagctaccggccgcgccgccgcaataactgtcggtcgtggccgggtattcttactttttttttatttatctcgtcgacgtttcgatttattgtctactgccattttcgctcgaaaaaaa

SEQ ID NO: 14962 - DNA, 444 bp, Zea Mays
ggcttttgatgaccgttcccaacttcccattgctaatgttgtatcattttcacttggaccaacaactgatgtatcttgtttcccttccaacagggtggataaggacgattcacgctgcttcaattgtggttcttatagccatgctatgaaggattgcccaaagcctcgggacaatgttgcaattagcaatgcacgaaaacagcataatttgaaaagaaaccaatctaatgttaaccgtgtacaaaaccgatactaccagaaaacgcccggcaaatttgatgatttgaaagctggagtactgggacctgaaactagacagtgcttggggatcggggagaatgatcctcctccttggctgcacagaatgcgtgagttaggctatcctccgggctacctagaagcacctgcaattcaattagcttgattcctctatggaagtcaggc

SEQ ID NO: 14963 - DNA, 2389 bp, Zea Mays
cattgccaaggggattcagtcctttctgctattttacatgcttctctagtagtccattggagtaattaacatcgattacacggtcatggaagagcaccaagtcaagccatcggatctgccacccactagtttgcacaaccaggattcagccgcaactcctgttaccagtgctgaccctgctcgtcctgctgcttcaaatgattctcccagtcaggttgccagtgcagctcctgctgctgtttctgcacctaccgctgctcctgcagaagatgctgcagggcgtgaggcgtcagcatctgtgttctctgcgtctggtttatcctcctgggctaagaacctaaaaattcctcagccttcaccaggtcaagaatcacctacaggaaagaatacctttgcccgtttaacaagtggccttggactgcgtttgtctccaaaagcggcacagcaagatgagggtgctgaaggaagcacctccccaacaacaggacagcctggtgtttttggttctttaacgaaaggcattgtggattcctctaagaatgctgtaaaggcagtgcaagtcaaggctcgccacatggtctcacagaataaaagacgataccaggaaggaggatttgatttagacatgacatatattactgagaacataattgctatgggttttcctgctggtgatttgagttcagggctttttggatattttgagggtttctaccgcaaccacatggaggaagtcatcaggttctttgaaatgcaccataaggggaagtataaggtgtacaatctttgttctgaaaggctatatgatgcatctctttttgaaggaaaggtggcctgctttccttttgatgatcataactgccccccgatacaacttgtcatatcattctgccatagtgcctactcatggttgaaggaggatatagaaaatgtggtggttgtccattgcaaagctggtaaggcaaggacaggattgatgatctcgagtcttctactatttctaaagttctttcctactgctgaggagtccattgaatactataaccagaaaagatgtgtagatggaaaagggctgattctaccaagtcagattagatatgtgaagtattttgagcgcatcttaacttacttcaatggtgaaaatcagccacccaggaggtgtatgcttagggggtttcgtcttcatagatgcccctattggattaggccatcaattacagtctctaaccacaatggtgttcttttttctacaaagaagcatccaagaacaaaagaactaatgccagaagatttctggtttagtgcaccaaagaaggggattatggtttttgcattgccgggagaacctggcttagccgaggtagctggtgatttcaagatccagtttcatgatcgacagggagatttttactgctggctaaacacaacaatgatggagaacagggtaaccttgaacccaactgatcttgatgattttgacaagagaaaactgccctcacctggattccagattgaggttgtcctggtagattacgatggctcgcaaccagcaaaaccaaaaccaggcgctggacctgctgctgataaatctcatgctgattcctcggctagcacggttgcaaaagaaaatagtgctgcacctgaagaatccaacaagggaactggaagcaataatgatagagatgaagtcttctctgacagcgacggggaggatggatcttctaacggaaggaaggagaagactgccggcggtggtcaaagcagtgtaaatgctgctaaaccatcccagacaggcaacatggaggaggcggcggcatctgctgctgctagcagactggacaaagtggctataagcagcgaacagggaaccacaaaggcacctgatggtacatctctcaaaactgaagtcagcagcaaggccagctccaccacagcaccacctcctccagctgctgactcttccagcatgagcgaattcaaggcgattgccgcagatgcctcggtgttctcgttcggagatgaagatgattatgaaagtgagtaatgattctatgggtgggtacggtgttgagtttccgctgtacagtttggtgcttctaggaccccccatcatagaatgccaaagtccagagatgttaattcattcttgcatttcgtctccactgtagcagtgtcatcggtctgatgttgtacccagatgatgaaacttgttgtaactcaaccaggtcttgaacctctcctgtttgtttacagaaatgccttgtacacgaactcacttaaacagcgcaactactttttattattgatagttaaaagtgtgggtaatgtgtgtgcagccttggaaattaacaacggaaactaacactttggttgttttcggataaaaaaa

SEQ ID NO: 14964 - DNA, 897 bp, Zea Mays
agagcgggcaacatcgcagatagagagagagagagagagagagagagagagagagagaggcaaactggagaggccgagggtgatggtttccaaggagcagaataagcgaggagctttgcatgagaagctcaagattctccgcagcgttactcactctcatgcgggggataaagtgtcgataatagcggacgcgtcatcgtacatcaaggaactaaagcagaagatcgcgaagctaagccaagagatggcatcgtcgtctccgcagcacgccactactggtgtctgccaacaacaaccgtcgtcgtcgtcggaagtagtagtagatgggggcctcatcatcgacgcgcacgcggtggagcaagcagtagttcaggcaatcaagaattgccctgcaaattaaactaatcgacctagtcctccaattcgatcgatcgagttgacgatgcgctggtggtggaccacaaagttcatgccaagctagagactccgagctatatatacatactgattcgcatcgtactttttgaagagagcaaagcaattttttctcttttgcctgccgcaacgagtcagtcttgcgagttctgctatttagtaaggggggcacctgtggccatcgtttggcaaatgccaatatatatacctcaattatccagcttgcgtatccaaattctagagtaaaagaattactcgcacggcatcacggagatggcgtagctagctcccatcgatcacccttcttctctctacccctgatgaatgttgtggtcttcctcgaaacatatcctggctgtatgatttctgaaggttttcgtttcatcgtctgtccactgaatctagcgtgttgtttggttcatatatttgtaacgcgactgataacgttaaatcatatttgtt

SEQ ID NO: 14965 - DNA, 94 bp, Zea Mays
gcgataataataggcaagccgacgtgtatgttatttagcgggctatatcgttgctctagttagccgaattgttagatggtttggttaagctcgt

SEQ ID NO: 14966 - DNA, 1402 bp, Zea Mays
cgacccggacgcgactagtacactgcctgccaaacagctgagcagagtagagtagagcagagggcgaagtgcagcgcagtgtgccccgtctcggaacagcgcggaccaccagagcgtgcgcgtccgtgccccacccctccctctctatccatggcggtcccccgcgggtgcctcgggctccccctggtcgccgtgctcctcgcgtccctctgccgcggccaggcggcggtgagggagctcaaggtcgggtactacgccgagacgtgcccggaggccgaggacatcgtccgtgagaccatggcgcgcgcgcgcgcacgcgaggcccgcagcgtcgcctccgtcatgcgcctccagttccacgactgcttcgtcaacgggtgcgacggctcggtgctgatggacgccacgccgacgatgcccggcgagaaggatgcgctctccaacatcaactccctgcgctcgttcgaggtcgtcgacgagatcaaggacgcgctggaggagcgctgccccggagtggtctcctgcgccgacatcgtcatcatggccgcccgcgacgccgtcgtcctgaccggtgggcctaactgggaggtgcggctcgggcgcgaggacagcatgacggcgagccaggaggacgcggacaacatcatgccgagcccgcgcgcaaacgcgagcgctctcatccggctcttcgcggggctcaacctcagcgtcaccgacctggtcgcgctctcgggctcgcactccatcggcgaggcccgctgcttctccatcgtcttccgcctctacaaccagtctggatccggccgccccgacccgcacatggacaccgcctaccgccgctcgctcgacgcactctgccccaagggcggcgacgaggaggtcacgggaggcctagacgccaccccacgcgtcttcgacaaccagtacttcgaggacctcgtcgcgctccgcggcttcctcaactccgaccagacgctcttctctgacaacaccaggacccgtcgcgtcgtcgagcggctcagcaaggaccaggacgccttcttcagggccttcatcgaggggatgataaagatgggggagctccaaaaccccaggaaaggggagatacggcgcaactgtcgcgttgctaacaactcgccgtggcaaccaaggacggggatggcgtccggacagtcgacatctgagctccggtgatgaggttggtgtttcagaagaaatcgagccctgatatggtactaatatgttgacatgcattgttgtttttttggtcgtgtgtaagttttgcacctacctatggctgtggtgcccgagctgcgctcattgctgacgtggggaataattgagacattgtgccttagctccaataacgttcaatatatttatcctttatatctaaaaaaaa

SEQ ID NO: 14967 - DNA, 1204 bp, Zea Mays
ctggacatctaatttttgaccgggttggtgacaactcagacatatatataacatggtacagaccattggagaaaacagtttcatgcctttcaaagctatatcgctgcttagagccttctgtcttcactggattagcccaggaagctgtagaagtttgctcaacatctcttcagaatgcaagcagggttatctcaaagaaagcaaccccaatggatggtcagctttttctgattaagcacctcctcattctacgagaacagattgctccatttgatattgagttctctgtcacacataaggagttggatttctcccatttattggatcacctaagaaggattctcaggggtcaggtctcattatttgattggtccaggtcaacatcactagctaggaccttttctcctcgtgttttggagaaccaaattgatgccagaaaagagttggagaaaagccttaaagctacctgtgaagagtttataatgtccataactaaattagtagttgacccaatgctttcttttgttactaaggtaactgccgtcaaagttgcattgtcctctggtagccagggtcagaaattagattcagttctagcaaaacctttgaagactcaagcttttgcttctcctgataaagttgctgagctagttcagaaggttgccgctgccattcaacaagatttgcccaaagtaatgaccaagatgaggttgtatttgcaaaatccatctactcggatgatcttattcaaacctatcaagacaaatatagttgaggctcatatacagctgcattcccttctgaagtcggagtactctagtgaagaaatgcaatccatcggtatgttgccgatacctgacctgcagtctcagcttgacagccttttgtagtttgcatacaccatacagcggcgctgctgtagtccatgttgacgttgcagtgcagttctttcaagtaacgcaagtaaagttgttaccacaatttcgaacctctctaccatatcgttgttgtaacttttcattgtttatattgaaaaatggaaatggaacgcctcccatgattcatgtgattgtggacaatctggaagtttgaactcatatcctgtggtgacttatgtatattgtacacgcacgttgtttcctcctctgaaattgactggaatagtttcaacagatcatgggttcatcctcttgtgagatctgcc

SEQ ID NO: 14968 - DNA, 388 bp, Zea Mays
aaaacttagcaatccgtacattccgctcatattcctcaccggtgaccttcctcacctgcgtcagacagagaaagccgagattagcggcggcggcgatggcactcccggcgtcaagctccggcctcttccgcttcgtctccccccgcagccgtccccagtccactgacatcgtggccgctgcctcctggggagtcttcgccggcaccgccggcctttacctcgtccagccatttgactggattaagaagactttcttccagaaacctgaaccagaggcatgagtctccaggcagaaaaatgctgcaaatctgcaactttgtcactgtgtccgtataaattgatccaccaatatatctagggccccgattggatgtcgatattgaagagg

SEQ ID NO: 14969 - DNA, 238 bp, Zea Mays
ttctgctcgccgcccgccccgacccacgttagggcgttcgcgccccaagggcccgtgccattggctcagcccgcccggccgacgcgccgcggcgggccgcctcgaagctcccttcccaacgggcggcgtgctgaatcctttgcagacgacttaaaacgcggcggggcattgtaagtggcagagtggccttgctgccacgatccactgagatccagccccgcgtcgcacggattcgtcc

SEQ ID NO: 14970 - DNA, 1908 bp, Zea Mays
aaagagtcacccgactaaaagttgaggattccagtgctgatgtatcagcagcagcagcaaacttccagagtttaagcctacataatgatgagttagctgcaaaaaagtctgcagaagataaccctgcagtgataattcctgaccacttgcaagttacaaatacagaatgtgtcaagttgagctttggcagttttggatctggtgcattttctgggttactcccacaaaataccactgatagcaatgtggaattccctgctcgagaggaatctgcaccagtagatcaaatagatgccaggaatcaagattactatgaaagtggtgctgtaacttcaccagcagacgaaaatcttgaggccatgcttggagctaacatggagaatgtagatgcgccttctgtttcacaggctaatgagctcaggcaggacgtacttgatccttctgaacttcaatatgacgtcccatcagttccaagtcatgcttattcaaacacggacactttacagcctagcacaattgaggagccacaaggaaacaaccaagcacatactctttcccatttgtcaaacttaatgcaagcaaatcctttgagcaccagcagcctattggggtcaaatcaaaatcatgcaactcttcatggcttagagtttgatttaccgccttatctgggagcaaaatataacgcaggctcaactacaaatcctagaccacccatatccatgcagcaggaggcactgaaagcaggggttttctccaacgcccagtctacacagagtcttccaagtactagcattcagacggggcttcctctgccacagcaattagcacatcacccttactctcagccaactttaccaatcacacattttccaaatatggttgggtatccgtatttgccacaaaactatgctacttacctatcttcaggcaccttccagcaagcatacccgagtagcggaccattccatcagtctgctgctgctgctttgctggcatctggtatgaagtactcgactccagagtataagaacaacctgtctgccacaggcttacaacagcaacatcagccacaaccacaaccactttcatcagtcatctctggttatggaggctttggaagctcaagtaatatacaaggaaattttacccttagtcagagtaccggctctgcatcagctcttgggtttgatgaagcattgagcagacagtacaaaaacaccagtcaatacatggctctccagcagggcgacaactctggaatgtgggttcatggctctggttcaagagcggcctcgacgcttccgcctaaccacttctatggttaccagggacagagtcagctgggtggctttgctcgggcgcagcagccacagccttcccaatttggaggccatgggtacccaactgtctaccagtctcagggacaggagcacccccagaaccttgctgagggcagcctgaacggcttccaggtcacaccgtctcagccatctcatccgagctggcagcatcagcacacgtactgagccctcctgtactccctggttagggtggctcttgtgctgtcacaagccaagtttcgcgtgcttgtgccctcactcgatgcagagtatgctgctcggattcagtgagcgctgagagggtcccaggcatacaacagttagagcgttttaacatgttgcgtgtgttgccagactgatgcattgcggtttgttttcgatagtgagttatatgtgcggaggcgcagtcctgtataactgagacatgataacctaacaagcagtcgtttctgtttcccaagagttggctgctcttagcttgagctgatgattgactgtttgcttgcagttttggtcatgattttactgcttcaaaaacatttccaattccaccatattggcatcgcgt

SEQ ID NO: 14971 - DNA, 109 bp, Zea Mays
taagcaaagttcttaatctgagccctatactctaatacacaacaccatattcattgaaattttttgacctagtgaatgcattctaggtgtatcaagcagttaatgcaag

SEQ ID NO: 14972 - DNA, 2939 bp, Zea Mays
ggcctgttggagtcagccaaagtgctgctgcacttcaagagtcagccaaaagagctgcttcactctgggtgttgttctctagggttttctgtagccgacctaggccacgcaaagtccaaaacccagagccatcgctgccgcctcggtcgcgattcctaaaggcggcgatggccatgacgcggcgttctgcttcccatctcctatccgccttccggcccttctccctcctcctccagccgcacctcgtcgactcttcgccggcggccgcgtcggcgaggcgggcgatgtcgtcggcgtcggccctgcgtgcacgggacgagaaggatgtggcgcggtggcgggagtcgatgggccggatgcggaatatcggtatctccgcgcacatcgactccgggaagacgacgctcacagagcgagtcctctactacacgggtcggatccacgagattcacgaggtgcgcggccgtgacggcgtcggtgctaagatggactccatggacctagagcgcgaaaaggggatcaccattcagtctgctgccacctactgcacctggaaggattaccagattaatattattgatactccaggtcacgtggatttcaccattgaggttgaaagggcactccgtgttcttgatggagctatacttgtactatgtagtgttggtggagtacaaagtcagtcgataactgttgatcggcaaatgagaagatatgaaatcccaagggttgcttttattaacaagttggaccgtatgggagctgatccatggaaggttcttaaccaggcgcgatccaagctccgtcaccacaatgcagctgtacaagtacccataggattagaagaggagtttgagggccttgttgaccttgtagaaatgaaggcttataagttcgagggatctagtggccagaatgtaactgcttctgatgttccattgaatatggaggatttagtcactgagaagcgtcgtgaacttattgaagttgtttctgaagtagatgaccagcttgctgaagcttttctcaatgatgagccaataacagctaatcagcttaaggcggctattcgaagagctacagtggcacggaagttcataccagtatacatgggaagtgcattcaaaaataagggtgttcaaccacttcttgatggcgtgctggattatctaccgtgcccgttggaggtttataactacgcccttgatcaaaacaaatctgaagagaaggtattattagctggaactccagctgaaccacttgtggcattagcatttaagctagaggaaggtcgttttggtcagctgacctatctaagaatctatgacggcgttatacggaagggtgacttcatatacaatgtcaatacagggaagaaaatcaaagttcctcgcttggtaaggatgcactctaatgagatggaggatattcaagaagcatatgctggccaaattgttgctgtttttggtgttgattgtgcatcaggcgatacatttacggatggaacagtgaaatatactatgacttcaatgaatgtccctgaacctgtgatgtccttggcagtttcacctatatctaaagactctggaggacagttttcaaaagctctgaatcgcttccaaaaggaggatcctactttccgtgtgggtttggatgctgagagtggccagacaattatttccgggatgggtgagctgcatctggatatatacgttgaacgtattaagagagagtacaaggtggatgcaaaggtaggaaaacctcgtgttaacttcagggaaacaattacccagcgtgctgaatttgattatttgcacaaaaagcaatctggcggtcaaggtcagtatggacgagtttgtgggtacattgagcctctaccttcaggttctgatggtaaattcgaatttgataacatgattattggacaagcaattccttcaaactttataccagcaatagagaagggttttaaggaagcttgcaattcaggctcgttgattggtcatcctgttgaaaatttaagaattgtattgactgatggggcttcacatcaggtggattccagtgaacttgcttttaagctagctgctatctatgcttttcgacagtgctacacttctgccaaacctgtaatattagaacctgtgatgaaggtggaactcaaatttccaactgagtttcagggcacagtaactggtgatatgaacaagagaaaagggatcattgttggaaatgagcaggaaggtgacgacaccattgtagtttgccatgttccgctaaacaatatgtttggatatgcaacagctattcgatcagcgactcaggtgaatttacgatggagtacctggagcataatgttgtatcgcaggatgtgcagatgcaactagtgacctcgtaccaggcggccaagggcacagagtgattcttctttttacagaagaacaaattttgtttgcgaacttttagggcttgttcggttagctctcaatccatgtggattgagcgggattggatgggtttgaatcccaaacagctcaaactttttcacaattttttccaatcccatccaatccatgtgtattgggaataaccgaacaagcccttagtggcatcgacttcccggtcctctggacacgtcacaaatagtaggcgataattcaaactgtggtttcttagtgaaaatacaactatgccgcaataattagcattcccacagtagaattgtacaaaacattatctagcaaatgcctgaagtttagtttgtaatgtcttggtaatgagaacatcttgtgcaatttctcctcaaaaagaaatatctaatgctacactgtgaaggcatggatgttttggttactggtaatatttctccttttcgtttttgggtttctgttcaaactgtttgtttttatattagacaaatggtggtaaagttaagctag

SEQ ID NO: 14973 - DNA, 125 bp, Zea Mays
ccaacgtaaacaaacccaccacaggcatctgactgtgggagatcgctagtctaaaccttgaacttgtcgaagtcccggaactcttggagatccgcctcgacaccttcttctttacccgagcatag

SEQ ID NO: 14974 - DNA, 1338 bp, Zea Mays
cctttttcttttgagaaaatattggacagtatatttcatcaaatggtggagttgttacagctgaagaactggcaccatttcttgatgtgccacctccatcagaagagtccaaggacgatgaatcatttgttcttccagttcttttacgctttcagggacatccagaaattgatgagcagggaaatatcctgtatcgattcccatcgctgcaacgtactgcttcatcaaaaagtggtaggagcagggaatatgtgggtaccaaatggtctgcaatgtttagcggagttgaaaagtacttagaggagaaaccgtggaaattcagtaaagcgaatgcaacagagaaggcgatggttgctggtttgggaggactcaatctctttggtgtcatcattcttggaaacttgttgaagcaaatgacagtgacacctggtggactaatctcatttgccgcacagttatatcctttgcttcagatatacgctggctccttttttgcaatacctttgtttagatggtttctgctacgcaagaccaacaatggcattaaaaagaggaataaggccagagaacagagagctcaggagctcgtgtcaccagattcttctctaagaagaaagttgctcagtgcacgtgatatggctgaacggaaagtaatcacgccagaggagattgtctatactactgaaaaggatctattggagcaggattatgaagtcaaggagtgggagaggagatttaaggagctcgagtcagagtgatggacatgaccgatatacttgacacttgcagtagctctacatggtcctcaccatacttgtcggtgatttttatccgcatccaacggagtggaagatggatctgactgaaccactcgagcaagcgaaactggatggtactggacctcactaattgtcgtgtcaccaccagcccaccactgaccacttcgctatggaagttttgtggaagctgttggtttaattggaaccgaccattatttgcaagatgatgttcgtatctgtgccattgacctgcatatatgtatagttccaatcacggatcaaattcagaatttgacacgaaaaagaaaaaaaacagggaatatggctaggatgctactcggtttgaatggagtccaatcaaaacatgtaaaaaggtcagcctgtgaacagggactcagactgtttgctgcggctttaatccactggctcctaacagtgctaggaatagacgtactgttataaaaacttccaggtggaccaattcacgatgggaacctaacattttcttgcattaagctgaaacgtgtatctcctgcctgcgtttgtcattgcgaacgag

SEQ ID NO: 14975 - DNA, 609 bp, Zea Mays
caaccaacccctcctagtcctagctgcactgcacctgcattgcatgcacatgcaccgagaggtcgggctgctgaacgtggacggctactacaactcgctgctgaccttcatcgacaaggccgtggaggagggcttcatcaaccccagcgcccgccgcatcatcgtgctcgcgcccaccgcgcaggagctcatggacaagctcgaggagtacgagccttaccacgacagggtggcgtccacgctcaactgggagaccacgatggaccacctggcctactgacgcccacgctgccagagccgccagcaggcgactgggacgacatctctgatccatcgatgccattcaggaaacaagcttttagcttgccgtcagattggggcttttgtttcgtttttaactgcatgcagatcggttttatttggagtgccggagggagagagaaaaaaaaaacaggttgattattcggttcgcgtagcaggagtacgtagtacgtgcttgttttgtgtatatggtgccttgtgtttgcttcccaccaacggggatgattgatggcttgcagtgttgtctctgtaccagttcaaaaaaaaaaaacccgaccggtttcccct

SEQ ID NO: 14976 - DNA, 2773 bp, Zea Mays
tggccccggcccattttaaggcgtttcctctccggcgcagagcgggtagcgggacgaactcgtcactggtgtgggccgtggctgtacgccgcagagtgaagcgagacgagacgacgatgcgcaagtgggcgctctcctccgcgctcctccttctcttcctcctcaccaccctccccgacccagctaagaagctacaggtgaatgcggaagagagcagcgatgacttagctaacccacccaaggtagaggagaagcttggtgctgtccctcatggcctgtccaccgactctgaggttgcccagagggaagctgagtctatctctaggaagactcttaggagctccgccgagaagtttgagttccaggctgaggtgtccagactcatggacatcatcatcaactcactctacagcaacaaggatatcttcctgagggagctcatatccaatgcctctgatgcattggataagatcaggttcctttcccttactgataaggaagttctgggtgaaggtgacactgcaaagcttgagattcagattaagttggacaaagagaagaaaatcctctccattcgggataggggtattggtatgaccaaggaggatcttattaataaccttggaaccattgctaagtctggcacttcagcttttgtcgaaaagatgcagtctggaggtgacctcaatcttattggacagtttggtgttggcttctactcggtgtacttggttgctgactatgtcgaagtggtcagcaagcacaatgatgataaacaatatgtttgggaatcaaaagctgatggatcgtttgctatctccgaggatacatggaatgaaccccttggccgtggaaccgagataagattacatctgcgagatgaggccaaggagtacttggaagaggataagcttaaggatttggttaagaagtactctgagttcatcaacttccctatctatttgtggtcaaccaaggaggttgatgttgaagtgccagctgatgaggatgagacaagtgaagaagaggattcgtccccagaaactacagaagaagagacagaagaagatgaagagaaagagaaaaagcctaagacgaagacgataaaggagactacttctgaatgggaacttctgaatgatatgaaggctgtatggcttcgcagcccgaaggaggttactgatgaggaatactcgaagttttaccactcactagccaaggacttcggtgatgacaagcctatgggttggagccacttcactgctgaaggagatgttgagttcaaagctttgctcttcattccaccgaaggctccgcatgatctctatgagagttactacaacagcaacaagtcaaacctcaagttgtatgttagaagagtgttcatctctgatgaatttgatgaccttcttccgaagtatctcagctttttgaggggtattgttgactcagacacactgccgctgaatgtgtcacgagaaatgctccaacaacatagcagtctgaagactatcaagaagaagctgatccgcaaagctcttgacatgattaggaaacttgctgaagaagaccctgatgagtacagcaacaaggataagacagatgaagagaaaaatgagatggaggagaagaagggccagtacgccaagttctggaatgagtttggcaaatcaatcaagctgggtatcattgaagacgcaactaacaggaaccgccttgcgaagcttcttagatttgaaagtaccaagtcggatggcaaacttgcctcccttgacgagtacatttcaaggatgaagccagggcagaaagacatcttctacctcacgggaagcagcaaagatcagctggagaagtctccgttcctggagaggctaaccaagaagaactacgaggtcatcttcttcaccgaccctatggacgagtacctgatgcagtacctgatggactacgaggacaggaagttccagaacgtgtccaaggagggcctgaagctgggcaaggactcgaggctcaaggacctcaaggagtcgttcaaggagctgacggagtggtggaagaaggccctggagagcgagagcgtggactcggtgaaggtcagcagccggctgcacgacaccccctgcgtcgtcgtcacctccaagtacgggtggagcgccaacatggagaagatcatgcaggcgcagacgctgtcggactcgagcaagcaggcgtacatgcgcggcaagagggtgctggagatcaaccccaggcaccccatcatcaaggagctccgcgacaaggtcgcccaggacaacgagagcgaggagctgaagcagacggcgaggctggtgtaccagacggcccttatggagagcgggttcaacctccccgaccccaaggagttcgcgtccagcatctacaagtcggtgcacaagagcctggacctgagccccgacgcggccgtggaggaggaggacgaggccgaggagcagccggaggtggaagagaaggagccggcggccaaggaggggtcggagccgtccttcgacaaggacgagctgtagtcggcgtgctgtggtctcgtctcgtcttcgggatctgttttgaagtctagctgtagctcccgtttagttgagatatcggggagcccactcactgccagctttgtgtttaggaacgtgatacgggatctttttttttttgttgcctgtctttgtacttgtacaaacctcagttcagtgactcggtctaattaccggctccgattagtgaactgtttctaaaaaaaaaaaaa

SEQ ID NO: 14977 - DNA, 717 bp, Zea Mays
agcttgggcagttgggttccagaactgcgcctaaggtttcttgcacgcgcaaatgaagcggcagccaccacatcctcgaggcggcggcggcgcggcggtcggcgagagcggaagcggcggagggttccataagggggaggggaaagggaaagggaggtggggcggcgggtgccggcggcggaacgagcagcggctgggtgtcggcggcggcggcggggccctctccctcgctgctttcgccagcgccaagtcccggactaccggctacaacccggccgtcatcaagaagcaaaaggagttctacaagaatgctaaactaatcagcaaatacaaaaggacaaagaagcaacaaagtcagtcaaacgaccatccgcagattccaatccatgaggatggtggcgacaatgcccaatatgtaccgaaaccgcgctaccaaggcaagaagcgcaccgcgcatagtttgaaggaagagtacgagaagaaacgcgcagaggatgagaaggctaagaaagagcaggatgcagcagttcaggcgaagagggaacaccgggagaagtccgaggcaaagcggagggaactgagggagaagatgttcaagaagacgagatctggccagcctgtgatgagataccggatcgagcatctcttggagacggcactgagcaaataacacgatgccaccgtcatcttggcagattttgtagttccgccgccact

SEQ ID NO: 14978 - DNA, 4746 bp, Zea Mays
ttttttttctgtagcttaagagtgcagtagatagatataagtcgtttagtgggccggaaacctcactgtggcggtgtggcccgccttttgttctacattccagtcccctccggcacactgtgttcttccgttcctctcgcgtggttgtctggtgccgacgactgggccgccgccgcctccgtcctacgctcggtgctgaggccttcgggacttccgccggcgacgcgcaccctccgggttgaaatccctcgagaacaatggggcgcacggttctttcagatgaagaagaagatgagttcgaggctgacgaggaggatccgcggccctcgcggaggaacagggacgatatggacgagcgcgatgacgacgacgacgacgatgaggacggtcaggatgaatttgagaaggatgacttcatagtggacgacgaggaagaagaagtggaaggagaggaagaggaacagaagagtgatgacgagaggcgaagaaagaaaaagaaaaagaagagggaatcagacgacttcatgctcgatgaggatgactatatgttgctccaggataataacatcactggcatcagtcgcccaaagcctggaaacaagtttaagcgcttgaaaaaggctggaagggaatctgaaatggatgagcactctggtttttcagatggtgatggaacaggcaaaaaacgcagtggcaaggagagggtcgagtacagtttatttggtgatcatcaagatgctgcaccctttgaggaggacttcgaggacgatcagcaggcaggggagggtgaggaggaagttggtgatgatgaagatgaaatggcagatttcattgtggaggaagatgaaattgatgggaatggacaagttgtaaggaggaagaaatttaaaaagaaggtaccacgacaagcagcaggtgtatcatcgtctgctctgcaagaggcccaagacatatttggcgatgttgatgagctgttggcactaagaaaacaagagcttgagagggaggcccttaactctggtgagttaaggggggcgaggcttgaagatgagtttgaaccatttattcttgcagagaagtatatgacatcaaaagatgagcaaataaaagaaaatgatgttcctgagaggatgcagttgtctgaagagttgactgggtatcctccaacggataaaacaacgattgaggaagagagttcatggatacacagccacttaaccggtgatggatttctgtccttttttggcaatgagcacataaacaaggatattgaccagaaggacattgtcaatgtcgtgaccatgttgcatgccaacaaatttgaaattccgttcatcgcaatgtacagaaaagagagctgtccaaccctattaagttttgattctgatgaggataacgaggatattgaatctgatgcacgcaaattgaggtggcataagctgctctgggcggttcaggccttagacagaaagtggctacttcttcagaagcgcaaggttgctttacagttgtattatgagaaaagatttgatgatgagaaacggaggatagatgatgtcacaaggcaagaacttaatagccaactttataattccatcattgaagcactgaaggatgctaaatctgagaaagaggtggaggatgttgatgcaaaattcaatttacattttcctcctggtgaagtagaagaagaaggtcaatttaaacgtcctaaaaggaagtccttgtacagtatctgtcacaaggcagggctatgggaggttgccaaccaatttgggcgcagtgctgagcaattaggccaccatctgactttaactaagatacctgaagcaggcgagcttgagagcggtagacattcacctgaagaggtcgctgcaaatttcacatgtgcaatgtttgaaacatcacaagatgttcttcgtggcgcgagacacatggcagcagttgagataggttgtgagccaattgtgagaaagcatgtacgaggcatcttcatgaataaagcagttgtgtcaacaagtcccacatctgagggaaatacaatcatagatccatatcaccaactatcgggtgttaagtggctgagagagaaaccacttagcaagtttgttgatgcacagtggctccttattcagaaagcagaggaagaaaagctcctcaaggttaccgtaaaattgccagaagatgcaaagaaaaaactcatgtctgaagcacgtgagaattatctaagtgattgtgtcagcaagtctgcacaattgtgggatgagcaacggaagatgatactggatgatgctttcttcaattttctccttccatcaatggaaaaggaagctcgatcactgttgatgacaaaagccaaacattggctccatatggaatatgggaaacagttgtggaacaaggttactgttgctccttggaagaagaaagatgcggacaagaaggatgctgacattgatttggatgatgaatcagagttgagagttatggcttgctgctggggtcctgggaagccagcaaccacctttgtaatgttagactcctcaggagagttggttgatgttctgtatgcaggctctatcagtaacaggtctcaaggtgtcgctgagcagcagcggaagaagaacgaccagcagcgagtcttaaagtttatgactgatcatcaaccacatgttgtgtgtgtaggagcatcgaactacaattgcagacaactgaaggatgatctttatgaggttatttttaaaattgtagaggatcatccaagggatgttaacgcccaaatggaaaattttagcattgtctatggtgacgagtctgtgcctcgcttgtatgagaactctcgaatatcttcggatcaacttcctggccaatcaggtattgtgaagcgggctgtggcgcttggacgttaccttcagaacccgttggcaatgattgcaacactgtgtggacctgggaaagagatactttcttggaaactgcatgctctggaacagtttctaactcctgatgagaagtatgaaattgttgagcaagtaatggttgatgcaacaaatcagataggttttgatgtcaatcttgctgctagccatgagtggcatttttctactctacaatttattgctggtttgggtccgcgtaaagcttcagctttgcagaaagatctggtaagagagggatccatttttagtcgcaaagagcttgtaaaacctctaggcaggaaagtattcatgaatgcttctggatttttacgtgttcggcggagtggtgcagctgcagccagcgctcaactcattgatctgcttgaggatacaaggatccatcctgaatcatatgtattggcaaaaaatttagctaaggatgtctatgttgaggatgcacaacatgaaataaatgaaatggacgatgaggagcaagagatggctattgagcatgttagagaaaggccaagcatgcttcgaagtcttaaaattgtggaatatataaagagcattacagaagaataccgtaaactggaaactctgcgtgatataaagtttgagctgctgtgcggtttttctgactggaggattccctataccgagccaagcccagacgaggaattctggttgctttctggtgaaactgatgataccatatctgagggaaggattgttcaagttactgttcgcaatatacaagataacaaaataatttgcacctttgattcgggtttgaaagccatagttatggcagacaactattctgatgagggttttgatccagaatcatcacagttacgtgaaggcgatgtattaactggcaaaattcgaaacgtgaataaaaatagattcatggtttacctaacatgcaaggctagcgagatgaggagaaggccattctctagaggtgagcaggatccttactatcatgaacaagacatgacctcacaaactgtagaagataaggctcggaaacaaaaggaacttgcaaagaagcatttcaagccccgaatgattgttcatccccactttcagaacctgacagctgaagaagccatgcagtttttatcagataaagagcatggtgagaagttaatccgaccaagctccaggggaccatcatttttgacacttaccctgaaaatttttgatggcgtttacgcacataaggagatagctgaaagtggaaaggatcataaagatatcacaagtttgcttcgcctggggaaaacactaacaattgataatgaaacttttgaagacctcgatgaggttattgaccgatatgtggacccattggtaggacacctgaagagcatgctgtcgtaccgtaaattcagaaagggtttaaaaaatgaggttgatgagatgttaagggcagagaaagcagagaaccctatgagaatagtatatagttttggcatatctcacgaacatcctggcacctttatattgtcatatattaggagtacaaacccacatcacgagtacattgggttgtacccgaagggcttcaggttcaggaagagagacttcgacaacattgaccgtcttgtgtcgtatttccagaagaatattgacaaaccaccacctgatgctggaccatcaatgcggaatgttgctgcaatggtacctatgaaaaactcagcttggggttctggtggtggtggggatgcaaatggtggttggaggggagatggtagtaatgatagggatcgacctttctctggcagatcagaaatatgtgagcattatttatgcattttgt

SEQ ID NO: 14979 - DNA, 422 bp, Zea Mays
tatccccacacgcgaatcctccaatctgtccttgccgccgccgcccgatccaggtctgcagactgctcacttctccccacccaacgcggcggcactccttctccctccccgagtgcctgctgtgcgcctgtacttcacaccggcgtcgccccctcctccagaactccccaccggagccaccctcacccgtcacgcactcctccgctgagtgcagcaagtgctgatcagtgggtggacgggagatggtgctgaggcgggcggcaaccgaatgccccaagaaggttgcggggctgaaggatctggtgaacctgccaacccagctgcgagagttcgccggaggccggtcccaaatgtcacatatctccttcttcctcagtgtctggtcgtacatcaaggacaacaaacttcagaaacaaaaaaat

SEQ ID NO: 14980 - DNA, 1442 bp, Zea Mays
aggatatggatcacctttgaccctgattgatacatccaataaaataaaaaagggaactctaggtgatgcttctgcactaaagccaacattgatgactgctgtacctgctatacttgatcgtattcgtgatggtgtcaggaaaaaggtggatacaaagggtggtatagcaaagcaattgtttgacattgcctataaccgtcggcttgctgcaatcaatggaagttggcttggtgcctggggactggagaaactcttgtgggatacacttgtgtttggaaaggtgcgtgctattttgggaggaaagattcggtttgtactttcaggtggagcacctctatctggagatactcagagatttatcaatatatgccttggggctccaatagggcaaggttatggtctgactgaaacttgtgctggagggacattttcagagtatgatgacacatctgtcggtcgtgttggtgctccactaccttgttcgtatattaagtgattgactggcctgagggtggatacttgactgctgatttaccaatgcctcggggagaaattgtcattggaggtccaaatataactaaaggctatttcaagaatgaagctaaaacaaatgaagtctacaaggatgatgagaaaggtatgcgatggttctattctggagacatcggacggttccatccagatggctgccttgaaatcattgaccgtaagaaagatatcgtgaagcttcaacatggcgaatatgtatctctcgggaaggtagaggctgctttgattgtgagcccatatgtggagaacattatgatccatgctgatcctttccacaattactgtgttgctctcgtggtggctgcacacattgagctggaaagctgggcttcgcagcaaggaatcaaatacaacgatttctcagatttgtgccagaagcaagaggctgttaaagaagtgcttggatctttagcaaaggctgcgaagcaagcgcgacttgagaagtttgagataccagtcaaaatcaagctgataccagagccatggacccccgagtcgggactcgtcactgctgccctcaaactcaagagggaggtgatcaggaagacgtacgagaacgatctggctgagttgtacgcatgatggttctactctttttgatacgtttagtgtggaaaatgtgtagagtgtcaatgtcacgctgagatctatggtaatttgataccgattatcgttctgggattattattattattttgttcagttagaggagatatataaaccttgaagttttgagttatatggcttctcttgatgccgagaagctatattgcgatgattcctatgtgtttaggatataacgctttcgaattcttattgcgcttgttcatctcgtaccttgaggtaactactggtattgctgtctatagaattgtatgtacggtttcggtgta

SEQ ID NO: 14981 - DNA, 815 bp, Zea Mays
gcggcgtagggcgggcggggtgcgtgggtagatgggcagtgcatcgctcgcccgcctactggctactcctcaccggccccattcctccacccgccactataaatctctctgcttccgaccagccttgcttcgcccgttccagcgacgcactactgcggcgaaatcccgctcccgcgttccccatcctccggccgcctcgcttcggcctccctccggaaggtgtcttaaatcatggcgactggccaacttttctcaaaaactacccaagcattattctacaattacaagcaacttcccatccaacggatgcttgattttgacttcctctgtgggagagaaacaccttctgttgctggaataatcaatcctggttctgatggttttcagaaacttttctttggacaagaggaaattgctattccggttcatcccacagttgaagctgcatgcagtgcacacccaacagctgatgtatttatcaactttgcatccttccggagtgctgctgcttcttcaatgtcagctttgaagcagccaacaataagggttgtagccattatcgctgagggtgttcctgaatcagatgccaagcagctaattagttatgcacgtgctaataacaaagtcatcattggacctgcaacagttggaggaattcaagctggtgctttcaagattggtgataccgctggaaccattgataacataattcagtgcaagctttacaggcctggatctgttggttttgtgtctaaatcggttgtatgagtggctattggttggagggttggaggaagaagtgtgagagattgccg

SEQ ID NO: 14982 - DNA, 933 bp, Zea Mays
aagttatgcagttgggagtaggttgcatccaaggataacaacattcagaaatactgagatagataaatggcagaggaaaatacaggtgacaacgggtgctgctgcacttaaaggaaagctacatgcatttaatcagaacattagtgaccaagttgctggttacatgagagatccaagccggatgattaacaggatgtacttgaccaactctgctgttagtgtatttggaaaggatgtgggagaacctggaacagctgaggaggggcacaatatggaaggtgatcctgaacttattgacgattctgagttttatcaacaacttctcaaggagtttcttgagtcatgtgataagggggcctcagagtcggcaatttatgctctaaaaaagcagcaggttaaaaagaggaagcttgttgatcgtcgtgcttcaaaaagcagaaagatacggtaccatgtccatgagaaggtcactaatttcatggccccagagcccatggttctgcctccaatggctccgaagttgtttgagaatttgtttgggaatgccagctagaattcattaaagcttggattcactaaagcttgaattcattaaagcatgaattcgttaaagcttgaattcgttaaagcttggaatgtcagctagaattcacattacttgatgcaacttttttgtacttttgtagattgcaagtaggtcagtaggtatgatgttttgagtcgaaagttttgatgacctaccagttttgtgcgagacaagcacaaagtgccatggacaggtgggtcctcgctgaatcgatgttacctacaagattctcaaaaatgagagggagcctacgaaattcttacatgagtttggaagaagcgtatctcctagaaattgtatatagagccagcattctcagttttgatcccgttcagctgtgggcttat

SEQ ID NO: 14983 - DNA, 2083 bp, Zea Mays
gccgctaattaaccacaagcggccgtcgccttccccccctcccctcctcaaaaaaggcggagaggtggtggtgctcgtgggcacgcagtggagcacccagtacagcagcagcgctgcggcagtggagttaggagcttagcactccgcctccgttcccatcccgcgcgcagccgtcggccgagcctgctcagtgcccatcatggtgaggaagaagagaactggccctggcggctctggagaaacttctggagagtcttcaggagcttctggacaaggttcctcacagcggcctgaacggactcaacaacctggggcaggacgtggctgggtgcctcagcagggtggccgtggtggcgggcaacaccagggtcgtggtggacattatcaaggccgtggagggccaggtccacatcaccctggtggactgcctgagtatcaccagcgtgaataccagggacgaggtggtgagtaccagggacagtaccaggggcgtggtggtgcccgctccagaggtggaatttcacagccatactatggtgggcataggggaggtagtgttggacgaaatgttcctccaggtccatccagaacagttcccgagctgcaccaagccccatacgtccagtatcaagccccggtgatttcaccatccccatcgggacctggctcatcctcacagcctatggcagaggtgagctctggacaagtccagcaacagtttgagcaacttgccattcatggtcagagttccatgagtcaagaagttcaagtggcaccagcatcaagcaaatcggttcgattcccattacgccccggcaagggcacttatggggacaggtgcattgtgaaggcgaatcatttttttgctgagcttcctgacaaagaccttcaccaatatgatgtaactataacacctgaagttacttcacgtggcgttaatcgtgctgtcatgggagagcttgtaacactatatagacaatcccatttgggcgggcgtctacctgcgtacgatggaagaaagagcctttataccgctggaccattgccttttacttctatgacatttgaaattaccttgcaagatgaggaagatagtgttggcggtggccagggcggacaaaggcgcgagagagtatttagggtggtgatcaaatttgcggcccgtgctgatctccatcatctggctatgtttctagctggaaggcaagcagacgctcctcaagaagctcttcaagtgcttgacattgtactacgtgaattgcctactgcgaggtattctcctgttggtaggtcattttattctcccaacttagggagacgtcagcaacttggtgagggtttggaaagttggcgcggtttttaccaaagcataaggccgacacagatgggcctttcactgaatattgatatgtcctctactgcatttatcgagcctctccctgtgattgattttgttgctcagcttcttaatagagatatttcagttaggccattgtctgattctgatcgcgtgaagatcaaaaaagccttaagaggtgtgaaggttgaggtcactcacaggggaaacatgcgcagaaagtatcgcatttctggcctcacctcacaagcaacaagagagctatcattccctgttgatgatcgtggtactgtgaagactgtggtccaatacttcatggagacttatggttttagcatccagcacaccactttaccgtgcttgcaagtgggcaatcaacaaagaccaaattatctgcctatggaggtttgcaagatagttgaaggacagcgttactcaaagcgactcaatgagaaacaaatcactgctttactgaaagtgacctgccagcgccctcaagagcgtgagctggacattttacagactgtgcatcacaatgcgtactatgaagacccgtatgcacaggaatttggtataagaattgatgaacgccttgctgcagttgaagctcgtgttctgccaccaccaaggcttaaataccatgatagtggccgagagaaggatgttttgcccagagttggccaatggaacatgatgaataagattaaataagtggaaaaataaagg

SEQ ID NO: 14984 - DNA, 3884 bp, Zea Mays
ctccgcctccccacgcttcgttatataaaccctagactaaagcccccgagtccctccgcccccgctcgccacaaccactgcgcgtgatcccatttcgaaacaaaaaaggaggagcgcgctcgcactcaactccgcggagccccaatcccagcgtcgcctgcggtttagatggaggcgcacggcgaccagcggtggctggtggattgcctgacggctacgctcgacaccgcgcgcgatgtccgcgccttcgccgaggagtcgctccgccaggcctcgcttctccctggatatggagctgcccttacaaaagttacaatcaacaaagagatctcgtttggtttacgacagcttgctgctgtcttactaaagcagtttatcaagcagcattggcaggaagacgaagagaattttgtgccccctgttgtttctgcttcagaaaaggtggtcatacgacagctcctgcttacctcattggatgattctaatgggaaaattcgcactgctattagcatggctgtagcagctattggacagcaagattggcctgaagactggcctgagttacttccggttctcttaaagttaattggcgatcaaagcaatgggaatgaagttcgtggagcattaagatgcctagcccttctatcggatgatctagatgatatgtgtgttccaaagctagtgccagagctattcccatcactgtatagaataatatcatctcctcatctgtatgaaaattctcttcgtgcaaaggcttttgcaatagtccattcatgtatttctatgcttggatcaatgagtggtgtctataagagagatacagctagtctgatgacttcagtgcttgatccactaatagagcaattctccatagttctaaattatccggtgcagtcccaaaatcctgatgactggagcatgcagatggaggtgctcaaatgtttacttcagcttgtccagaactttcctagattacctgaagctaaaatttctgccattcttccagcactgtggcagacatttgtttcgtcattcaagacctatcacctgtcatacattcaaggtgcagaaactttggattctattagttatgattctgatggcagtgaaaaaagtcttgagtcattcgagattcagttatttgagctatggacaacaattgtggggaattctagattagcaaaggttattgggggaaacattaaggagctagcatactatactatagccttgcaacagataactgaagaacaggtgcaaaactggtcacgcgatgctaaccagtatgttgctgatgaggatgacctaacctatagctgtcgtgtgtctggatctcttttgctggaagagctagtaacagcttatgaagattatggaattgactcaattgtggaagcttcacaaatgcgttttcatgaatcacgagaattgaaggaagcgggttctgctgactggtggagactgcatgaagcatcactttttgctttaggttcactgtcagaacagttgtgtgaagcacaggattctggtttgacaaaatacaatgtgcgggatttacttgagcaaatgctaattgacattatgggaacaggggtgcatcagtacccatttctccatgcgcgtgcattttctagtgtggctaaattttcttcactgataagtaaaggggtcagtgaacagtatctatgcaatgcggcccatgcgattgcctcagatgtgccacccccggttaaagttggtgcttgtagggcactggcccaacttttaccagaatctaatcagaatctgattcagccaaacattatgggcatactttcatctcttgttgaccttctgcggcaggcatctgatgaaaccctgcatcttgttctagaaaccctgcaatcagcaatcaaatctggtggagaacaatcaactttaattgagcctgtcatttcccccatcatactggatgtttgggcacagcacattgctgacccgttcatcagcattgatgctgtcgaagtgttagaggctatcaagaatgctcctggatgcttacagccacttgtgtctcgaatccttccaacaattggatccattttagtgaaacccaaggtccagccggatggactggttgcaggttcactggaccttttgacgatggtactcaaaaatgctccagttgctgtggttaaagcagtcttcgacacatgctttgtttctactgttcaaattgttcttgaaagtgatgaccatggagagatgcagaatgcgacagaatgcttggcagcattcatatcaggtggccggcaggagttgcttgtctggggtggtgaacaaggacaaacactcaagatgctacttgatgcagcttcaaggcttttagatccagcgttagaaagttcagtatcactatttgttggaagctttgttttgcaactcattttacaaatacctctacacctgtctcctcacataccggaccttattgctgctattatgagacgtatgcaaacgagcagcattgcaggattgaaaagctcccttattgttataatagccagattagtacatatgagtgcaccaaatgttgatgggttcatcaatctattgctttctatccctgcacaggggtatgacaattcacttgtttatattatgtcagaatggtcacaactacaaggtgaaattcagggagcctaccagataaaggttacaacgactgcattagctcttctcatatcaactcgtcatcctgagctatccaaggttgaagttcaagggcatcttattaagactagtgcaggtataacgacacgttcaaaagctcgagtgactcctgatcaatggaccaagattcctctcccagttaagatcttctcattgctggcagatactttaactgaaattcaggaacaaattggtgctggtgatgacgatgactccgaagaggataatgactgggaagaagttcagaatggtgatgctagtatatcagatgatatcatacactcagcatcggttccttcaatgactaatccatcagttgaacatttaaatgcaatggccaaggtttttgatgaggatgatgatgatagttatgacgatgatctgacaaaaaacgaccctcttaatgaggtgaagttagcggacttcctaacaaacatctttgctaacttgtgggagaataatcgaccaatatttgagtatctttgccagggcctgtcggattcacagagatcagctgttgaaaaggttttgaggaggtgaagcgttaacttgggatcctgtcttccacctttcgggatataatatatcttcatattagttatcgagtcctgtttgcattgctgtggactggttttcttgctcattatatgttcattggtgtaaactgatacatctctgaagccggtgttatgaggttttgttagtgtaggtttctttatgttctttgtatttaaaatctacaagatgtgagtatttgttgtaccgggtgtggtgatgttgggtattcatgtctgaagaattcccggcttgacttgttcttacgttgaattcctccggagggaccttgattccttggctttattcatcaatttcatgcatgcctatttggaggaacgccacctttggtgtttggcaggagcggttaagctcagggagttgggtcccggggttggagttccttagggctctactagtgtgtgcggtggtcaagtgttttctccttccttggtcaagtgtttgcctcggttcaacccctcactcttggtttggagtacgggtgtagtttttcttttgtaagaaccttcctttttattctatcttaatttaaagatgcagttcttctgtgtatccaagatttttttcatttatggactagttgagctccagtg

SEQ ID NO: 14985 - DNA, 990 bp, Zea Mays
ctttgttcctccctcacaattcctgcttaaggtatctatgttcaagaggaattatgatcatcttcctaaagatacttactttggcatgtataaggaagcgacacgaggaaatccaaattattttctcacctatggtaatggaaaatctgctgcacgaattcaagaccatctccgtcctaatggcgcgcacaggtggcataattatgcaaagagcccaaatgagatcaagttggaggaggctgcagttctgcattatacatacactaaattttcagatttgacatctagacgtgatcgctgtggatgcaagcctacaaaagaagatgttaagagatgtttcatgttagattttgacagagcagcttttataattgcatcaactgctagtgaagaagaaatgcttcgctggtacaatgaacgagtcgtgtggaccgataagcagctgaacttaaagcttctgaggaaaggagtgctgactcgcatatacaccccaatgacaattgttcagagtctgcgcgaatccggtgtcttcacttccgccattacagctggccaacctgctgtgaatgccaaactctcacccaaggaaaccaatgcgcagagccaaaatgttaccgcacctgggaacatgacaagagtggtcagatctactgattcaaaggcatctggcagaaagatactgcaagccgttgatcttgccttcagcgatactaatgtaactgctgttccaccgttgtcgccgcccagtttggacgaacacaggcatcatagtgaataataatgtcatacgtatcatatatatattttttgctcggcgtataagttcctaagaaaaggaggaaaagaaagttactgacatcttcgttaagagaagtgctaacatcagcttggatggtcaatttttatgcaatcgagctttatttgtttcatttttaaactaaaattaattaatatctcgaacgaattttgaagaaacatttggattgtggt

SEQ ID NO: 14986 - DNA, 656 bp, Zea Mays
caagaaactgtatttttgtgttttttacaccgacactcacaaatgcatgcacataataaactctccgcgttgaggaagtcatcacagtcatcttgatatcgatgggaacgtcagccagcgattatgttaggttgagttaggtgtgacaggaagtggtccatgtgaagtgagaacaacgagcttcagcaataaggccgggtgtttgaagacgatcccactgttggtgtattttcgaaattttcttttctccaagcttagagctgagatcgtatgtcctatactcctatggggcttttattcatgaattgtcaagggttcagacagcctaaactctaaagcaagacgccaagaccctcgccgctggctcggtaaccatacgatggtttagcagtgagaaaaattgagaatcgacactcattgtccagtcatggatgtaccttgtactgcttgtaaatagtttctatacagtgattcatgtgctcgcaagtcgcaaggtgttgtcccacgaaaattcgttgggtgtgctgagatcattcaagtagggaaaaggttcagagcgcgacaaatgtgtagggtaacggcatgtggctatgcttcaataatctcttttagagttggtttggtgacaaaagaattaaaagggatccattggaaag

SEQ ID NO: 14987 - DNA, 1380 bp, Zea Mays
ctatcacctaaaatctaggatatattattccccccaaaacaaaccctaaccggccggcccaattctcacgcgctcgccgcctaggagcattcacgttggcggcgggcggcggctcggttcctctcctccaccgcacctccaagaatccacctccacgactgagctgacggctcggtagcgccatggcagttcaccggctccaaccttccccatccggcctacagtgctccaccgcccggtcgccagtgctcctccatgggccacggctgacgggtgcacgcaccggtaggagaggtggatttggtggacctagattcgatgtgcagagagcgacttggaggtggctgacatcttcaagcactgcatcatgcagttacaactactgttggccatacagggaaatgctgggcctattataccaattgttcaaaggacatattctcttgaacataaaggagaaaatgatctcttcgcacatcagacaaggcttctactctttcagaagaaagtcatttttaggagaatcgtgaacaaaatgaccagatgtttaggcctggttggaaggacatttttcgaatgaatcagagtgagctcgaggctgagatttgaaaaggtctctcgagattctactcttgatccaaggaggaaggcctatctgatccaaaatctcatgaccagccgttggatagttgctcagcaataatcaccacaaccaagcgtcgaaggacataatggatgtacacgatgacctggatgtgttccttcgtaccgagacccagggaaacaaatatttgggctgtgagcattacaaaagaaactgcaagcttgttgctgcatgctgcaataagctattcacttgcagattctgtcacgataaagtaactcaagaggtccacttattgactcttatgaccatgtaattggtgttaatacaactacattaacatgtaaaggttggtagatctggaaggtcttgatggtctaatacctatctatgagtacggaagaaaaggcgggagaagtcggtctctgcagcatcgcgcgtgaaaaaaaatcagccaattccacgagcattgatgttgtcatgacttcaaaagaggagagaccatgctaagaataatgcattatgacatttgtcaggcttacatatcgactgtttgatatggatagatgtataggtttatgaccaatccagttcaaagcaattggagtatagaagaaataaggagaaacaggaaagctctgtacatcttgcattttgctgttgtttgtcgaagtttcaatgtctgtcgcgtgacaaaatatagttgtaatttatattttggcatgcacgaaacaggtgtatttattcatttttgaacgaaattttatgtcaaatcc

SEQ ID NO: 14988 - DNA, 959 bp, Zea Mays
acctcttagaccacagcgaaggcagggaatttttatataaaatcaggggagtgtaggtctgcaatctcgcgtggtcaaagaatgtaaatgagcttgttagcacccacggctactctcagaaccaaataattgtttggagatatccaacaatgtcgaagcttgccactttgacagggcatacatacagagtattgtacttagctatttcccctgatggccagttactggtgctggtgatgaaacgctccggttttggaacgtgttcccctctccaaagtcccagagttctgatagtttaagttgtgtcggaggaacatctttcgttagaagctacatccggtgacaccgagttgtagttttgctgagctcataggactgttgcagcacatgttgatgaccatcaacatcactccatttgcatcaaccatcaaaggtagcccactttttgagatggcgcgatacagtttggtgaaccggcttgcgaatccaggcatggctctttttgctaggagtgtacatatttatcagagcaacggctttataggagtggacatagaggaggggggcttcaagcatcagcattgtcccaactgataagaatacgcccttttgtttgtttgctcaatacgtcggcttgagctgtttgtgtagtgcgcgagcagctaacctattcgaaacatttaccggactgtgaacacgcccacttcatccatgttggcaccatggtgtaaaatgagaacactcgtggctccaggtttattttatagtgtcttggaaggaggggctgattttgccctcacctggcttgtttcacatagagacaaccaagaaacgtgtgttcattgtttattgagatatggataccaaagcaatgctgaacttttagcatatttttttttatcatgcgactatctttgttgtaaagtgatatctcagcattgctaatgcttgcgtctttc

SEQ ID NO: 14989 - DNA, 1149 bp, Zea Mays
tgaagacaggccagactactcttttctgaagaaactgtttcgtgatgtatttatccgggaaggataccagtttgattacgtatttgactggactgtactcaagcaccctcaaatcggttccaacaacaagcttgttcaacaaccaagtgcaagaatggctggagttggaccatcagttgaccgaacagacaaagcctccggtaccgctcctgtgggacaagaggcccgggacagattcacgggtgctgttgaggcattcgccagaagaaatccaggctctggtcgccatggagatcattccaggcaccaaagccttgcagattcctttggcacatccaacgaagcagttgccgactcagagaaaacgcacatcttgtcctggggagggagctcgtcgaaaatgcccgcggcttcgtccagccggccgacctcctcgggggactgcagtgaccagaaccaccggtgggtttctggcagtagtggcggcagcgggcggccgtccacagtgcagaggcaccaccactcggcaggcgccgagaacagcaggtcgtccacgcgctcccccgtggcccggaacgcggccgagagaggaggctccggctcgcgggacagcacgacgttccggagcctcgagcgcctctccatcaccaccagcaggaggaagtgagctgccgaggaccacgccgacgatttctgtgagtgaaaggcggttactaggccgacatcttttgcgggatcgttgctctctgcagctgaagcaaatcggcaaatggatggacgggattgcagcgcaatgacctcgaggatggcctcctttacaagaactgccatgaaaatgctttctccaaaccgtaacgtataacgcttcccccaaccaaccagagggaagacaactccaaagtacaatgcaatcctgtttcacggcaagctttcactgttcacttgttttgccgttctggcactagtttctaaagtctccagcaatgtaatctatattcatcttctatgcctgtactttatagtctcatctaaaagattctctcttctatatctttctaatctgcagcagcgtcctctatatctcgtcctttatacatactagtcggttgcctatgcgttgtgacggctcacaataatacccacgtaaac

SEQ ID NO: 14990 - DNA, 1013 bp, Zea Mays
gccaacttggcatcattctttttcatgcaggaacaatggaaaacatccagcaacacccctggcaagagaaaagatagatctaagactgaagatgaagaggtgggaaataaaaagcggaggaggaagggaattaggaggaaggatcaaaaaacaaagatgcagtatggggaagaggaagatgagtacaaagatgaaccagaagcagatgatgactatgcagacctggcgaggtataatggcgctgacaattcagagagagccccagatcaccttcttgcggctgctggccttgacgattctgatgccgaagatgacatgggtcatcctcaatctgcaatagaacggaagagacgagcttggtcagaatctgaagacgatgagccagtgaagaagccagcagcacaacctagcccgggcgctgatggtttgagtgaatgaaagaaaccgagatgatgttcttgcagtgaagattaacatgcatgggtctttgctttaggttagcatggtgttgaattggggagattcagaacttcactatacatagctgatagtcaaggactatgtatataccttgttgccaatcttgtttatcgcattagattatggagttgtttaatctgctggtttctgcaatataacatggaatccagtcctattagatggtgacttgtaggtgttttagttgggatgcaaagttttgcacgtcaagtttcagcagttagatttcccaatggacgtatcatgaattaatgatatcacattggccgatatatgtagagaaatgttgaacatgctagtcatctcagcaagaggacataaaactaagccaaaacaacaaacttaagagaaatgttgaacgggctagttatctcagcaagaggacataaaactaagcaaaaagaacgagcttaggacttgtttgaatgtacttgtatctatcgtaatccattatatctaccttaagactgtttccattatatctatcttttaagactgtttttatgagttcaacc

SEQ ID NO: 14991 - DNA, 1261 bp, Zea Mays
tcccttgaacatatgtattcatgttgctgcatatacgccactggagggtgacaactctggcttactcctcgacgtcatcatgctctgcacctgaagtttgtggctacgatctgcatacaactccagcgaggcacaaccccgtcgagatggatcgatgccgtgctcactgggacgacaccaccacaagaatattcctggacctctgcatcgccgagaaggaaaagcagaactacaacagcaaggggttgaccaagatagggtggcacaatctgtaccgcaacttcaaggaagagacacgcaggtcttatgataccaagcagctgcagaacaagttcaacggcctgaagaggatgtacagcctgtggagactgcagaacgacaaggctggacctggaggaggaggcgggtgggacaagagttcgagcactgttacacaggatgctgacggatgggacaaccagatcacggagaccagtgcagcagaagacttccgtggcaaggcgctcgcgcacgaggacgcgctcgccgttcttttcggccccaaagacggcacaaattcgccgtccgtaggtggtggcgccggtgacagaacaccaggcgggggcggaggaggcgaggaagagaaccatgctcgagcgtcaggggacaatgccgcttgtccggaggagagcctggggtgttacaggtctggccgtgcgtccccatggtcaagccaggaccaccacatccacatggtcggcagccgcccagccaagaagcctaagaacacggggtactatgccgaaggcgtgtccgagagcatgctcggaagcaggaacgagagcagcagtgccatcaggcgtgagcaagaagaggtggtagagttgctgcagctcgtagaaaaggacggcgtgtctcagggatctgagctgttcttcatagctactgagctgtttaggtcgccgatccgacgcgcggcatttaggtgcatcaccactccgaagaaccgagttgcatggctccggtggacttgggacaatgttaagatgtgatgatggcggcgttcttgcttagttttcagttgcctgtactgagaattcttcctcgggcagttcgtgagaaactagttgtattgtattataccctgtcctgtccgttcttttttatttgtcgtgttttagttgcgacaaatattcgagatcggatttagtattattgtaaatatatacagatttccagcacagcgcgttctgtcaatatatacaatgcacacataaaagta

SEQ ID NO: 14992 - DNA, 128 bp, Zea Mays
tttttttattttttttatttttttttttttttttttttttttttttttttatttttttttttttttttttttttttttttttttttttttttttttttttttttttttttttttaataaataaatata

SEQ ID NO: 14993 - DNA, 259 bp, Zea Mays
gaggcggcttgcggcagcttgcgttcccttcgttgccgcctaccccacgcaacgcaacgcaacggatcgccaaatcaacttgagcttgagcatcccaccaatccactccccaacagcaatggacgccgcccagcgccgcgtcggtacccacctccagcgcccgccgccgcccgccgggggctacggcctcaccgtcaaccccaccgcggccgagtacgtccacgcatcaggatgggtccagtcaactcttattaaggca

SEQ ID NO: 14994 - DNA, 928 bp, Zea Mays
ctcgcagtggcaatgactcaaggagtggggttgtttgtttctctcctaacctagccacgaggattagcctatggaaggttttacagtgtcattggtggaggcagtcgtcttgagaagaacatattgaaaactgatattatccatcaccttgacagatgtggattgtcattggatgatgtgaagattgaatacaacaagggatatgctccattggccgctttgctgaggttttcttcgaaggcaatgtttaccaccgcaattaggcaagcaaatcagaatcgtctgcacaggattgatgagataagtcgtgaaacatgggatctcaaaaagtccttcgatgggaaagcggtattactgcaaggagtcccacgaaatgccctcgcagatgacatagagcgttttttgtgtggcacgaactttgaacctccaccgtttgaaacctttctaagagctggtgtcccagagcccataagaatgatgctggttaagttccacacaaagaccgatgcgatgaatgccttcatcaccaaaaacaggagtttctgtctgaacagtcaagttagcatgcgtgttcttcagtaactgagtagccagttgaatctcgtgatgtttgccccggctttgtcaaacaaaaagccttttaagtccgatctgaggtctatccattatccacaaatgttgccgcattgtgtgtttctgcaggttatattggactggcagcctgctttaggttttcattcctactagtttgtggtttcagctgtactgcaccgcttttatttcatgagtactctgaaaaatgtaccaccattccgctttacaatgaaataattaacggcacaaacgctaggggttcgaatctgctactgctaccgtgcccattgttaaaagagtgttaaaacagaagcaagcgccaccgatggatccc

SEQ ID NO: 14995 - DNA, 786 bp, Zea Mays
cgagaatttaattggtattgaacaaaggatgtctctgtatttgtggaaagcaaatgcgagctgtattgctcatccctcttttgcattagatgcctgtgtggacagtgtggtggactggtggtactgcatcggtagcattctagtttttgcttaattgaatggtagttattttggtttacaaggccccatggtagtgattgtggtatagtgaatgtgaacatacctactaatggtgctgaaattggtggagcatttggtggagaaaaagcaactggtggtggacgagaagcagggagtgattcctggaagcagtacatgaggagggcgacttgtacaatcaactatgggagcgagctacctctagcccagggaatcaattttggttaatcctgcagaaatgttgcgcgtggatctcagtgttttctgcagacgtggatgccgtatggaaagaactgatgcaaccgcatttgagatctcagcagacttgagcagcatttattggcgtcagttgtgaaacttaaactgcaggagcatcttgtacataaataaaataagatgtttgttgctcgtgggccgtggcacgttttggtaccggtgtccagtctactaataaaatctaatgcaaaacggtcataactacattctcatgcagtatgattttccggccttttgatctggaattgaaatgagcgttgttcgttttgaacaagcacatgaagaaaaaactgctaagggttaatttggcaaccttattttttcaagggattttaattttttcaagagaaa

SEQ ID NO: 14996 - DNA, 3219 bp, Zea Mays
cagcagctagctcgccatgtgagctagatctatgaatatcagcacaatcttgggcttattttattggagcggaaggagttgacgtccaaatacgaacaactcaaagcttcttttgaagccactgagatcatactcaagcgagagcgagcttcgcagcagtctgctttatctgaaacaagaaagagggaagaaaacctaaaaaaaaatctagccattcagaaggagtgcatatcaaatcttgaaaaggcacttcatgatatgcgcggggaaacagctgaaataaaagtttcatatgaagcaaaactggctgaatcccttcaaatgatggagacggcacagaaaaagtttgatgaagcagaagagaaacttctcactgcaaaatcattagaagcagactgcattcgaactcgcaacacctctctgagaagactgcaagacattgaagatcgcgaagatcagctaagaagataccaaacatcttttgaacttgagaatgcatcgaaagagaaagagattaacctcctgaggaaatcgttggatgataccaaaaaaattttgcatgaaaaggagcaatgtttactgaaagaacaagtacttcttaatcagagggatgacagcatccttgagagacttgcgtacataactagctcagagaaaaggttggaggaggaaaagttaaatctcgaagatgaaagaaaggttcttttggaagagaaaaataagctggatctgaacatgcaggcaattatatccagggaggaagaatccatacttgacaaacgtgaaagtgaactattgattctccaagagaccattgcaagcaaagaaagggctgaaatagaaaggctccgtcaagaggaagaaattgccttggtgaggaggaggcaggaatttgacactgacatggaaattaagctcacttcttttgaggaagagattgatgcaaggaaagccttgctcgatcaaagggaaaccaccatcaatgagaaggaggatgcagtggcgcaaagggaacagaatctcaaccttaggtttgctgagttagcgaacaaggaagaatctttggtgaagaaatcagatgagttaagggaggaagagaaaaggctctcctctgagagagagacactgcacattgatctgcaaaaagaaaaggaggaaattcataacatgaaattggatttagagaaggaaaaatctttctttgaggaggagaagcgtgaagcgattcaagctcaggagaatctagcaataacccaaaatgagcgagaagatttacaaagtttgcaggtgaaacttaaagatgaaattgatagtctgagagcccaaaaggttgacctaatggctgatgcagaaaggctattatcagaaaaagaaaggtttgagattgaatgggagttgatcgatgagaagaaggaggaactacaaaaggaggcagccaggattgctgaagaacgaagagtaatagatgagcatctcaagagcgaatttgatattatcaaacaagaaaaggaagatctccgtgttcagttaaaaattagtacagaatcccttgctcatgaacatgctgaattcatgaataagatgcagcaagagcatgctagttggcttagcaggatacaattagaaagagaagatctgaagaaagatattgatatccagagaaccgagttactgaattctgcaaaggctaggcagatggaaatagattcatatttgagggaaaaagaagaggagtttgaacagaaaaaatccaaggaacttgaatacatcaattctgaaaaggaaactatcagctcaaaactagaacatgtcaggcttgaattgcaaaaacttgaggaggagaggaaaaggtctatgctggagcgagagagaagagaggaagagctgtctgaaacaaagaagactatagacgcgcttaatgagcaacgcgagaagttacaagagcaaagaaaactgcttcattcagaccgaaaatcaattacacagcaaatgcagctgcttaatgagttagaagagctgaagattgaatctgagaacaggcaactgtctttgagacagtgtgggaaatcaaagcatgctggtgtggaaaacctggaagacaacggtgttcacctgtctcctgatgaggatcaaaatgctagtccaaaacaaactactgtaaagaaattggaagtgtccccttcagtctccacaccaatttcttgggttaaaaaatgtgctcaggtgatattcaaacgctctccagagaagagtgctgatcccaacaatgatatacctccaaagttgggaaatgtcaatgactgtacctccttagctactgcctattcagatggattgtttgcttgtcacctggaaaatggtgctgagaaagtaccacaagctatcgacggtctgaaagttgggaaaaagaggcttaataatgcactctctcatggtgactccgaaatttcacagccaaaacgcaagcagcaaaagagcgctactcagattttgagagtgattggaggagaaattgattccaactgcagcccatcagttctagaagaaaaatgttcaaagaatgaacatgatgcagtcccagttggtttgtgtgggaagggaccacaaaatccccaagcagagcattcagaggatatttcagtgtctgcatctgaaccgtcgaacggacctggtgttgtggactctgaggacaaggatggagcagatgaggagtctgacgatgaaggcgaggacgaggaggaagagaagacgtcatcggcgaagaagctgtggcgtttcctcatcacatgatttatttatctttgtcgtacgataaaaaatagcacggctaactgtaggttctatatgatggtaggaggccacttaggcatccaaagctctactagtttcattggctttgtcatggcgtgtcctctggtgtgtagtagaggtggaagaaggtactggtttggttgtgtgcttcgggtgttgtgagtagcgcggtggctttggaaggcgctgtggactgtctctcccccacctactaccacccatgccttttttttcttcctgtttatcttgtccgcaggaagacgtgtgtaaagtgattgacagtttccgggttggtgtgaaaatgagcctgcgtggttgctaccatggtccaagtgttagtgctcgcgtttgtgttgcttgtttgagctgtaacagtggttgctaccatgattcaagtttgattcaaac

SEQ ID NO: 14997 - DNA, 188 bp, Zea Mays
tgatccttcaggcagttaaagggatatgatgagtggtaaaagctcggttttttattccgagaggggtgcctgccccaaataagcctgttacgacaacatggcgctcacaatttgtaccatctgatcccgaaattaaaacatattgaatttaatggttctatttggtttctagtgattttttagtgctt

SEQ ID NO: 14998 - DNA, 1465 bp, Zea Mays
acgtctagtaaatctgaagcaaagaacaagcggcgaggtgcaccgtgcacctccagctctgacctgctcggtcgcccgtgtcttcgtcttccttaatctcgaattccgaatcctcctccaacacctcgttttcctggattatccagcgagggacgccggtttgttgctcgtcctcctccctggttgcccgaggcggcggtggcggggcgaccatgtacagatcggcgggggtcgcgatggcgtggaacgtgttccggttctgcacggctctgcgtgggctagcttgctatgcttttatggagttatttttctgtcgtgttcacggaccctggttctgttccaccaaattggaatcttgattttgatgtggagatgggagaaactgctcctcttgctagctcagagctctgtagccagatgaactcacagcaatctgtggctcttggcaatatgacaaatccaagggttaggtactgtaggaagtgcaaccagttgaagccacctcggtgccaccattgctctgtttgtggaagatgtgttcttaagatggatcatcattgtgtgtgggttgttaattgtgttggggcgctgaactacaaatactttcttctcttcctgttttacaccttcctcgagacaactcttgtcactctctctctattgcctcacttcattgccttcttcagtgatgccgagatcccaggaagtcctgcagcacttgcaaccacatttctcacctttgtgttgaatctggccttttctttgagcgttcttggttttatgattatgcatatttcacttgtttctgctaatacaacaacaattgaggcatatgagaagaagacaactccacattggatatatgatcttggccggaagaggaattttgctcaggtttttggaaatgacagaaaatattggttcatccctgcatactcagaagaggatttgagaagaactccagctctacagggtctggattatcctgtgagaccagattttgatggtcaggaactgtaacacagcaatttttgccagtgtcctcgtcagatacctcagtgttggacatctactgatacaactgacagcattgctgattgcgctatgcaaggcatcaaatgaaatgttcacaagattttagtaaccatgagtaattcatctgttgcacgtcatgtatgtgacgaagtgaaatttctcctagctgggccagaggaagtttgttgggatgtaaattagttttatcgacaacgtggattggtttcattccatccaaactggtagtgtgcttcaaatagtgctgtactttagtttagttattattatgtgatataaatatcatttctgataattgtgcctctgttatacactatcaatagtaaatggataagcgctgtgtaattctttcgaaattgtacaatgtgttctttccattgccctataaaagtattgaagtactagtttgcaa

SEQ ID NO: 14999 - DNA, 850 bp, Zea Mays
ttttgaagtagagggagtaagctttttactcagaactctcaatttactgttaggcacagtggaccacggaggagaaagtactctgctttgaatgggaagtgccatgaacaaagacaaagttcatgacaaggagactcacggaacaagtagtgatataactgagaaaacacctgtggaaacggtgaagggtcccaatctgcttgagcgagcaaaggaagagatcgaggcccttgccggagctgttcatactaagatggagcaccattccagtccccacgcgaagaaggatgaatcacataaggaaggcaaggaggggagcctgcacaaaataaaagcccacacggatgaaactcacggaacaagtgctgacataaatgagaacacaccagttgacaaagtcaaaggtccgaatgtgtttgagcgtgccaaggaagagattgaagctattgtggaagctatccatccgaagaatggatctgacagtaagtgaagactgaaacccctggggctgttttgccttaactggctgcaaaagccttaacgtgaggccatgtgctaccagatagataaatgctgtcaaagacgttcacccaatagtctttttatacgcgctctggagctgtaaaagctaagagcggacttgtttttatgctacactgttttccgttgtatcattgtggtttgtttgtccagaggtgtgtagaaatactcaacatggaattgtgatgcttaaattgttgagcttgacaggacattatattgtgccaccaactcgccatggtctggaagttgtaataagagtgatcatgaaacagggcataaatctattgctagtacttttttagtggaa

SEQ ID NO: 15000 - DNA, 247 bp, Zea Mays
catgaatgaatatgaacaatatcgaattacatttataccttcggcttgacagaaggtaaaaggctcgagagtgacgtgcaagcgaatacaagtcaacgtgaacagtacagtgctactattcatctatttatagacacaggacacagcttgtgtaaattacattcatgcccttgacatttactattgacctagggataatctatcaaggactagacagccttttcccctttaggtcggttccattttt

SEQ ID NO: 15001 - DNA, 1322 bp, Zea Mays
aggagctgaattctggcgcgcctactgtttaactgagagagatgttaatgaggaatcaggatggaagcttgtccatggtgacgtatttcggcctccccgaagtttgatgtttctttctgcacttgttggtatcggcacccaattggcagctcttatcctacttgtgattgttttggccattgttggcatgctatacattgggcgaggggctatcatcacaaccttcattgtgtgctatgctcttacatcgtttatttctggatatgttagtggtggtctttactcaaggagcggtggcaaaaactggattaaagcgatggttcttacagcatccctctttccgttcttgtgtttttcaattggtttcgcactgaatacaattgctattttctaccgctcattagcagcaataccatttggcacaatggttgtcatgtttgtactttgggctttcatatcttttccgttggtgcttttgggaactgttgttggtagaaactggagtggtgctcctaacaacccctgccgagtaaagactattccacggcctattcctgagaagaagtggtaccttacaccttctgtcatctcattgatgggtggcctgcttccctttggcagtatcttcattgagatgtacttcgtgttcacatcattctggaactataaggtgtattatgtctatggtttcatgttgctggtcttcgtcatccttctaatagtcaccatctgcgtcaccattgtgggtacttatttcttgctgaacgccgagaactatcactggcaatggacgtcgttttcctctgcagcgtcaaccgctttgtatgtgtatctgtactccatctactactaccatgtgaagacaaagatgtcaggcttcttccagacaagtttctactttggttacacactgatgttctgccttggtctaggcatactttgtggtgctattgggtatctagggtcaaccctttttgtaaggagaatctacagaaatatcaaatgtgattaaatccctgctacttactagcagcagaaagaccatatgtattgtcagtggaagcaaggcctgaaaaaaatggattttgatggtagaccctgaataggttttgtggaagtcagtggaaccattggaatgctttgactcaagttggagaggaaagaaggctctaggagatggctggggctaaggctgtctacagcaacgtctactaaattttgtcccctaaaagaatattctctgtactttacaaaacactctaaaagattctgtactctatatcatctcagtctccaacaacgttccttaaattcggttctct

SEQ ID NO: 15002 - DNA, 610 bp, Zea Mays
ccaatgacaatcaagtatatatagctgattcctacaaccataagataaaaaagttagatcccgtcacaagaaaagttacaactattgctggaacggggagtgcaggatacagggatggtccaggcttgacagctcaactttctgaaccagcaggacttgttgaagttggagatggtttactactgtaaagaagatgaagtttgtctctaccaatcgattgcttttgatgtcaaattccgtgaagaggcggaaccgaacccagcacaaattacgctatcctatactgtttcgccaagagataattcaggtagcacacaactactggctgctagaaagaatgccaaggtgtagtcagactcacggtgatttttttacttgcatcattgtattgattgtcaatttggccccaggcccacaatggcaagtgtttcaagattgacttctcctgtatgttgtatagcgacatgttgcttgtaacccagcttcattgtctcccctcagcacaacagtattaatggagtagtttattgtcagttcattggttgcttggaacaccgtatggagtccatttgttggaaccctgttaaccctaatgattgatgaatcgaac

SEQ ID NO: 15003 - DNA, 918 bp, Zea Mays
attttggtgatgagttttgcgacactgtgtacaagactaatgggcctaaaatccttaacctgaataaagcaagtgcaatctatgacctccaaaggaatagaagtaaccttgaatcgctattctgctacgacaaatctgtcccagaggagaatattggaaaaccgtccggtctagatctggaaaagaaggatgtcggggacaaccctccctgctcaagctgtgaagctaaaggcgctgtgctgtgcgcaacatgcgctggttcaggcttgtacgtcgactcgatactggagagccaagggatcatcgtgaaagtcagatgcctaggctgtggaggaactgggaacatcatgtgctccaagtgtggaggccgtgggcatacctgaatgataaaaagcttggacattgcagtgtctccgcagcaagacagtacaatcctgctagcatccttcccgagttacgttggtgggtatttggtctcatggtgacatcgtcaatcaaaaagagttacgattcttccggagaattttccttgtgctgatctagctgctgtaactgcatcgaaacatgctttagaagctattgaaccccatcccccccccccccccttttgctttttattcccctcgttttcatgcctaaaagtttaaaggacgatgcgtcaaaggattcgatgttatgttgtaatcataaaggttaatgaaatgtgaaagatacacttcgtttatgggagagattagattcaaagtgtcctgtgcagtaactgagcagaagtgtggtcacatcacatcacaaatactagtacatactccaactccattcaagaaagaatgcaattctagcagtgttatgttttggtattttaaattttaactaattatagataaaaaaagaatcaatatttataatgtgaaataaata

SEQ ID NO: 15004 - DNA, 161 bp, Zea Mays
agcacacaagttcttgacccggagctcacctacaccttgctaccgtagaggagggggtgacgccatggaagagctgccaaggtgagggaggagcatgggagggctcggtcgctagctccaagggagggggggctgctgctgcatggggagctagagagagg

SEQ ID NO: 15005 - DNA, 2925 bp, Zea Mays
gcgttttggttccatctcacggtgtcttgtgttgattggattgaatcagaggttttcaattgcttgtggttcgaatctgatgtttgtgtgggtactcgaggcatacatatacatatttgtagtggtaccatcataacaagtaaagatggtgaagttcacggctgaagagctccgtgccatcatggacaaaaagaacaacattcgtaatatgtctgttattgctcatgtggaccatggcaagtctacacttacagattcccttgtggcagctgctgggattattgcccaggaagttgctggtgatgttcgcatgactgatactcgtgcagatgaagccgagcgtggcatcacaatcaaatctactggtatctctctttattatgagatgactgatgagtcactgaagaactacaagggtgagagggatggtaaccaatacttgatcaaccttattgactcacccgggcacgtcgatttttcttcggaagtcacagctgctcttcgcatcaccgatggtgctctggttgtggttgattgtattgaaggtgtctgtgtgcaaactgaaactgtgcttcgccaagcccttggtgagaggattaggccagttcttaccgtgaacaagatggacaggtgcttccttgagcttcaggttgagggtgaggaagcttatcagactttctcccgtgttattgagaatgccaatgtcatcatggcaacatatgaagataagctccttggtgatgtccaagtatacccagagaaggggacagttgccttttctgctggtctgcatggatgggcctttacactcactaactttgcgaagatgtatgcatctaagtttggagttgatgaatctaagatgatggagaggctatggggtgagaatttctttgaccctgccacaaagaaatggaccaccaagaacacaggttctcctacctgcaagagaggatttgttcagttctgctacgagccaatcaagcaaatcatcaaaacctgcatgaatgaccaaaaggagaaattgtggcccatgttgcaaaagcttaatgttaccatgaaggctgatgagaaggagttgattggcaaagctttgatgaagcgtgttatgcaaacgtggcttccagccagcactgcacttcttgagatgatgatattccaccttccttccccggcaaaggctcaaaagtatcgtgtggagaacttgtatgagggaccccttgatgatgtttatgcaactgctatcagaaactgtgatccggagggtcctcttatgctgtatgtttcaaagatgattccagcatctgacaagggcaggttctttgcctttggtcgtgtcttctcagggaaggttgctactggtatgaaagttcggatcatgggtcccaactatgtccctggccagaagaaggacctgtatgtcaagagtgttcagcgtactgttatctggatgggaaagaaacaagagtcagttgaggatgttccttgtggtaacactgttgctatggttggtctggatcagttcatcacgaagaacgctacactcactaatgagaaggaggttgatgcatgcccaatcagagcaatgaagttctctgtctcccctgttgtgcgtgttgctgttcagtgcaaggttgcttccgaccttcccaagctagtagaaggtttgaagcgtctggcgaagtccgatcctatggttctgtgtacaatggaagaatctggtgagcatatcattgctggagctggtgagcttcatcttgagatttgcctgaaggatctgcaagaggacttcatgggaggtgctgaaattattgtttctcctcctgttgtgtccttccgtgaaaccgttcttgagaagtcctgccgcactgtcatgagcaagtcacctaacaagcacaaccgtctgtacatggaagcgcgccccctggaggagggtcttgctgagaagatttggtgcttcggacctgagaccaccggcccaaacatggttgttgatatgtgcaagggagtgcagtatctcaatgaaatcaaggattctgttgtggctggtttccagtgggcatcgaaggagggtgcactggctgaagagaacatgcgcgggatttgcttcgaggtctgtgatgtcgttcttcatgccgatgctatccacaggggtggtggccaggtcattccaactgccaggagggtcatttatgcttctcagctcacagccaagccgaggctgctggaaccagtttacctggtggagatccaggccccagaaaatgcacttggtggcatatacggtgttctgaaccagaagagaggacatgtattcgaggagatgcaaaggcctggtaccccgctctacaacatcaaggctttcctccctgtcatcgagtcctttgggttctcaagccagctgagggctgcaacctctggtcaggcgttcccccagtgtgtgtttgaccactgggacatgatgggctcggatcctttggaggctggctcccaggctgcccagctggtgctggatatccgcaagaggaagggtctgaaagaacagatgactcctctttctgagtttgaggacaagctctaatcttttcgtttttgctactgttactggttttaattgtcactcggagtctgggaactatttatatcttgtttccttttagttgtcaagtgcatgtttctgaacatcattggtcatactgtactatccaagtgctgttgagacacttttttctatcaatcgtgatgtaacagttggtatatgctggcttggtggaagtgtttgtagtaaatgcttgtgctatcttgatttaattcttgttcccttacattgcttattagtctttcggttgttacgtaggctaaaccatgctctatcaaaactccgtatttggtagatgttaataaaatattctattatgctaggtt

SEQ ID NO: 15006 - DNA, 3613 bp, Zea Mays
gtccagttccagtgctttagatccgcggccctgttcgcaccttgctcgcctcgcctcgcctcgccttccgctgcttcccgcctctaaccaccacggcatccagatcccgcgactccacctccactcgcggcggcgtgccctcgccgagatctcatcatggacacggtcgagaagatcgtcgaggacttcgcctcggacatcgccgtgagccccttctcctccgggacgagcctccgggagatgatacgcgcgatacgcgcgtgcaagacggcggcggaggagcgcgcggtggtgcggcgggaatgtgcggcgatacgcacggccatcagcgagaatgagccggagctccggcacaggaacatggccaagctcatgttcatccacatgctgggctaccccacccatttcgcgcagatggagtgcctcaagctcatcgcggccgcgggattcccggagaagcgggtgggctacctcggcctcatgctgctccttgacgagcggcaggaggtgctcatgctcgtcaccaactccctcaaacaagatctcaaccacacgaaccagttcatcgtgggccttgcattgtgtgctcttgggaacatctgctctgctgaaatggcgcgggatctttcacctgaagtggagaggttgatgcgcagtagggaagtcaatacaaagaaaaaggctgctttgtgctctataaggattgtcaggaaagtgccagatttggcagagaacttcatgggcctggctgcatcattgttgaaggagaaacaccatggggtcctcatatctgcaattcagctctgcacagaactatgcaaagcaagcaaagattctctagagtacctgaggaagaactgcatcgaaggtttggctcgcatactgagagatgtgtccaataggtcatatgctccggagtatgatgtttctggcattgttgatccattcttgcatattcgagtccttaaacttttgcggatcttgggtcaaggagatgcagattgcagtgaatatatgaatgatattcttgctcaggttgcaacaaaaactgagtccaacaagaatgctggaaacgccattctgtatgaatgtgttcagactataatgggtattgaagctactagtggtttacgtgtgctggcaatcaatattttgggtagattcttgtctaaccgtgacaacaatataagatatgttgctcttaacatgcttatgagggccattacagttgatgcactagcagtgcagagacacagaacaacaatattagagtgtgtaaaggatgccgatgcctccattcgcaaaagggctcttgaacttgtttatttgttagtcaatgatacaaatgtaaagcctttgactaaagagctcatcgattacttaaacatagcggatccagattttataggagatctcacagtaaatatatgctctatagttgaaaagttttctcaagagaagttatggtaccttgaccagatgttcaatgttttatctctggctggaaatcatgtgaaggatgacatatgtcatgcccttattgttgtactaagtaatacatcagagcttcaaggatattcagtgaggtcattgtataaggccttacaagaatatggtaaacagggaagtttagtaagagtagctgtttggtgcattggtgaatatggtgaaatgctggtgaacaatgttggcatgctggatggggaggagccaattaaggtaacagaatcagatgctgtggatgctgtagaggtcgctcttaaccgctactcagcagatatgacaactggagcaatgtgtctggttgctcttctgaaactctcctcacgatttcctttgacatcagagaggataaaacaaatagttgcccagaataaagggaatgttgtccttgaactacagcaaagatcaattgaattcacttccattatacaaagacatcagtctatcagatcgtccttgcttgaacgcatgcctgtattagatgaagctagttatctggtgaagcgggctactgctacacaatcaactatttcagcagataaaattgctccaacagtcactcctggaagccttaagcttccgaatggtgtagcaaaacccacctcagctcctttagctgatttgcttgatttcagttctgatggtgccccagcttccaccgttgcttctactacaacacctaatgattttttgcaagatcttctgggtattggtggagttagttcatcaacgacaggtgtaacttcaaccgcaagcacagatattcttatggatcttctgtccattggatcatctccatcacagaatggcacccccgtaacagacttccgtcatcctggacaagagtctaaacctgttcctggtgtacctgaagctgttgacctcctcggtagtttgtcaccagccgagtctaaacccacaccagttgtacctaaggacatggatctgctcgacggtttgtcatcaaatacatctatttctggacatgagaatacaacccacccatcaataacagcttttcagagtgcaaccttgaagatcacgtttgatttcaaaatgaagcttggaaacccacgagagactacaattcatgccacttttaccaatttgacatctagtacttttacagattttatttttcaggctgctgttccaaagttcatccaattgagactggatccggctagtggcaacactgttccagctaatggaagtggttcagtcacacaagggctcaacatcaccaataaccaacagggacagaaaccgcttgcaatgcggatccggatgtcttataaagtgaatggcgaggacagattggaacaaggccaagtcagcaattttccttctggactataggccgtttctgtatactatgacgtgtcggggacaggcatatagaacgaagccttgttttaccctctacctcattttttaattattctggggatttgtcggggtgcttagagaaaatgttttttccggcggttagttttcctgtactaagtatattgtatattattccagcagcgatgtgatcttcaaattcatcgtgatgtattcgacaccacgctaaaggatggtctgagcaaactttcttcagctcctcaatcattgtaaaactagcttctgtttttcttgtacactagagagtagagactggtagcatattctgtagcatattctgccagtaccgttgcacttctgatttgcggccgtgcaaattatgggatgccgaacgcgcggatttctatcgtaatgcgcaaactttcaactgccttttaatttttaaaccgctggtctgtacatcgagcaggtcggtcaggtgcaggcgctggtgctcgtcaagcttggacagcgctgctgagtgctgagtaacctcttacaacaattgcaccatatgaacttataacaagtacagtacattgaaccacgacaattactctagttgaccataattgagatcgaataagcagggtcaggcattatggtttctgtctacaagtttatctttgtaccttgcatcacaaccttccagtggaaaactgcaatgcaaaggacttctgcagcgcataatttgctttgcttatcttatcctgctctcatcagg

SEQ ID NO: 15007 - DNA, 1450 bp, Zea Mays
taagttggattaggtgcagcacagtcatagagcggttaggcctgttgcagtatgccgacgacgagtctaaagaagagaggtactgggaaaccttggatgctgatttgcgttactggaccagatccctgcgcccagtgcagtggtatcctggtcatattgcaaaaacagagaaagaattgaaggaacaattgaggctcatggatgtcgtcatagagatccgtgatgctaggattcccttgtccaccagccatcctaagatggactcatggctaggcaaccggaaaaggatcatagtcttgaatcgcaaggacatgatctcaactgaggatatgaatgcatgggctacttactttggtaatcagggcatcaaagttgttttctccaatggccagctgggtatgggtacaatgaaattaggtaggatggcgaaatcagtagcatctgttgcgaacacaaagagaaaggagaagggattgcttcctcgtccggttcgagctggaatagttggatatccaaatgttggcaaatcttccttgattaatcgcttgctaaaacgaagaatgtgcccagcagcacctaggccaggtgtcacaagagagctgaagtgggttcgttttggaacagacctagagttgttagattcacctggaattttacctatgcgaattagtgaccagacatctgcaatcaagctcgctatatgtgatgatattggagaaaggtcatacgattttgctgatgtggcggcgattcttgtgcagatgttgataagacatcctgcagtaggttctgaagcatttcgaagacgatataagattgatgtagatagtttgtcacaaagctctctgttcacttgttcaatggagacacaagccaggcagctttccgcatattgtctgactacaggaaaggcaaatttggatgggtagcgctggagagacctccaacatgaacaagcgggatatcatagatccttagataaaagacatgtgcttgttcatgtagtatcacacaatttagtgtcgttcattggaccactctcgacagttttcactggacctgcacatatacgaggaattaattcagaatagctgtccatctgatgatctaaagacaaaacttaagaaatgctcctgctgttatcagacagtccagagcaaacgagctgatttgtatgatctattgaatgagctcaactatgtttctatgtaacggaattaggtttgagaaatgaaagattgtatgtctcctaatttagttgctcatgtactttgttcttttaggaaaagttgctcctgtacttctggatgattcattagattcgggaactggtgtaacattttaggcccagacaatagacatccctctacaaattcagtttccctgcttttaagttttctgcaaaaaaatattttctcccttctaaactataagtcgttttggcttttct

SEQ ID NO: 15008 - DNA, 671 bp, Zea Mays
gcaggctcacctcgctcaccgacacctgggccctaaccccggcaactcgtgctcgccacccgattggccggtataaagccggtagcgcgtcgcgtgagccacacgcgcacggcgcacacatatcccttccttcactggctcactgcggtcccggcaaaagtcagtcaactcagccaacaagcgctgctgctcgggcacgggtggtttgggaggccggacgcaacgtcgggatgcagtcgctgcaggacaaggcgtcggagtggagcggggtggcggccgccgatgcctttgccatcgacgacgtcaacatattcgagtacctcggcggcactccgcagccattcgtcgacctctccaccaatttctacaccagggtttatgaggacgaagaggagtggtttcgggagatattcggggggtcgaagaaggaggatgccatccagaaccagtatgagttcctgatccagcgcatgggcggcccacctctattctcccagaggagaggacaccctgcccttataggacgacaccgaccattcttggttacccaccgagctgcagagcggtggctacaccacatgcaacaagctttggacgcaactgaaagcatagatgtggactcaaaaacgaaaatgatgaacttctttagttttgccgacactttcatttgt

SEQ ID NO: 15009 - DNA, 1978 bp, Zea Mays
cgcgcgcttgagctttcatttcatatgccacgcactgtcacaccgacacccgtcccctgtgcgtctccttatctctggccaccgccacagaactggccgcgcgcgtcgcaaggctctctcgctcacttcttcccagcggagtgcgcagtcgtcatggctaacgctagccgtggtcgtgtcggcggcggcgggcgaagttccgtgctcgcgctgcttctcctgctttccgccggaggagcccgagcgtcctacgacggcgagggcgaggcagcacgggcaggggcagaggagaaggagaaggctgcggcgtggacgggcgggctgagccggcggagctttcccaaggggttcgtgttcgggacggcggcgtcggcctaccaggtggagggcatggcgcacaaggacggccgcgggccgagcatttgggacgccttcatcaagatccccggcgagatcgcaaacaacgccaccgcggacgtgactgttgacgagtaccatcgctacaaggaggacgtgaatatcatgaagaatatggggttcgacgcttaccggttttcgatctcttggtcaagaatattcccaaatggaaccggagaagtgaactggaaaggagtggcgtactacaacaggctgataaactacatggtgaagaaaggcatcacaccctacgcaaacctgtaccactacgacctaccggaggcgctggaggtccggtacggagggctgttgagcagagaagtggtgagatcgttcgcagactacgccgacttctgcttcggggcgttcggcgacagggtgaagaactggctgacgttcaacgagccgcgggtggtggccgccctagggtacgacgacggcaggttcgcgccggggaggtgcacggggtgcgaggccgggggggactcgggcaccgagccctacgtcgtggcgcaccacctcatcctctcccacgccgccgccgtccagaggtaccgccgcaggcaccagccgacgcagaggggcagggtcgggatcctgctggatttcgtgtggtacgagcccctcacggcggactcagccgccgaccgggccgccgctcaaaggtccagagacttccacgtcggatggttcctgcaccccatcgtctacggcgagtaccccaagtcggtccggagaagcgtcaagggcaggctccccaagttcacggctgaggaggccggtctagtccgaggctccatcgactacgtcggagtcaaccagtacactgcctactacgtgcgtgatcgacggccaaacgctacggcggcgccgcccagctactcgtccgactggcacgctgagttcgtctatgaacgcgacggtgtgccgattggaccaagggcgaactcagactggctctacatcgtgccttggggactgtacaaagccgtcacctacgtcaaggagaagtacggcaaccccacgatgctcctgtcagagaacggtatggacgacccgggcaacgtcacggtgggccagggcgtgcgcgacgcggccagggtggcctactaccggagctacgtcgccgagctgaaggcggcgatcgacggcggcgccaactgcgtgggatacttcgcctggtcgttgctcgacaacttcgagtggaagctggggtacacgtcccggttcggcctcgtctacgtcgacttcaggacgctccggcgctaccccaagagctcggcgtactggttcagggatgtcatcgccggcaccaactgagatcacgtacagtggcctcagtcgatctgatggcttgtttacgttagttcatcagcttcgtccccatgccatgcatcaagtaaaacatcatatatatcacggtgtgcatgaagtcaaaaaaataataataacgtgatgtcacgtatgggttctgagacgaatgctgcctctctctctctctctctctctttatatatatatatatatatatatatatatatatatatatgtcacgtgattg

SEQ ID NO: 15010 - DNA, 2383 bp, Zea Mays
tctactgaatccatgcttcctttgtgcacttttactgggttctgatctcccatgccacagtttataacgttgaaggattcaaaaatctacagaactagatgatacttgcataatgcagtcctcaggtatttggaaggcgcatgctggttcatcacagtcagagggttcgggtctggatatggagaggaacggatgcaatcataattattgtccatctcctctccaaccaattgcctcagctggtcagcactctgaaagcagcgctgcatacttttcttggcctacatctactctaatgcacgggtcagctgaaggccgtgctaattactttgggaacctacagaagggtgtactaccaggacatcttggtcgcttgccaaagggccagcaagctaccaccttacttgatttaatgattataagagcattccacagcaagatcctccgccggtttagtcttggtacagcaataggctttagaatcaggaaaggaacattgactgacacacctgccatccttgtgtttgttgctcgaaaggttcacaggaagtggctcagcgctactcaatgtcttccaactgcccttgagggacctgggggtgtgtggtgtgatgttgatgttgttgaattttcttattatggtgcaccagccccaacaccaaaggaacaactttatgatgagcttgttgatggattgcgtggtagcgaccctattgtaggctcaggttcacaggtggctagtcttgagacctatgggactttgggtgccattgtgaagagtcaaactggcaataaacaagttgggttccttacaaacaggcatgttgcggttgatctggattatcccaaccagaagatgttccatccgctacctcctaatcttgggcctggagtttacctaggtgccgttgagagagcaacatcatttataacagatgatgtttggtacgggatttacgcaggaacaaacccagaaacttttgtccgagctgatggtgcatttataccgtttgctgatgactttgacattacaagtgtcagcacatcggttaaaggagttggagtcattggtgatgtaaaggcaattgatttgcaatcctcaattggcagtctcattgggagacaagttgtcaaagttggaagaagttctggtctgacaacaggaactgttgtcgcatacgcacttgagtacaatgatgagaagggaatatgcttcttcactgactttcttgtcgttggggagaaccaacaaacatttgatcttgaaggggacagcggaagcctcataatcttgacaggacaagacggtgagaagccacagcctatagggattatttggggtggtacagctaatcggggaaggttgaaacttaaaagtggccagggtccggagaactggaccagtggagttgaccttggccgccttcttgatctcttggagctagatctgatcacaacaagtgaagggctacaagctgccttggaagaacaaaggattactctagccgccgctgctgctgcggcaactaattcaactgccacagaatcgtcacctgttgctggccctcaagagaatgataaaatcgacaaaatctatgaacctctcggcatcaacatcattcctcgggacagttcttccatatcaacagaccaacccaacgagaatgtggaagagctaaacctgatgtctccgatgcgcaacggtcaagaaggcaacggtgacttgaataacttgatggacttggaactggaaaattcacctgatggtatttgtattgccctgaacctgggagagcgggagccaaaaagactccgctcagattttgattcgaccctggacatggacttgcagaaatgaggctgttatgctgcagacttgttgcaggaggctctgcactattcagcttttgtgttgatcattgaaggtatggccataaaggaaataatatgtttctggacgactggacctgttgtcctgcttggagccggtctgggttaagctgtgaagctcctgctgcagttttgcgtctagtgtcaagtgctctagtatatctagtgttgcgtaagatgtcggcacctcaatttgacagaggcgccatacttcttgcccatgtaatgttgtcatttgttgtatgctcgtgtatatgtactacatgaagcattgtaaaattgagcaacagcaaccggagctcgagaatcttaggcgcatgcgcaaccatccaccaaccccgtacctgatgaattgacaataaagctggatattttaggtgtttggaaagtgtgttgctcttggaattttggggagagatttgggtactaactttggtaaaggcaggccactggtgttgtccttgcctgcctgatcaaacaacatgctggctag

SEQ ID NO: 15011 - DNA, 1223 bp, Zea Mays
aatgatgaagggcatctctgaaaaggatgatctggaaagcacatatgctgtattcactgttgaagaacctaagaaaaaaagtggagcttggatcaaggcagggggcaagaacaagaaacaccaccttttgtctagcatagttggggaaataaaggttgcacgtcgaaaatcaagatgtcaccatacagcagatgttcatgtatacagggaatttgtgttgcttggttccggatttctaccatcatctgaagaatcgggtgattcacatgttagtggagagtttgcggcttttattagtgcacttcctcagcaagaagcagaaacttcgaatcaatcatcttcacagaataccagacaaaaaaatttagcactaactggctgtggttgccccccactgggaaacttccagcctagttctgcttcagccaatgttattgcagtacttcctgatggcttccatggcaaatcaacgtctgggcagccgttgcctttgattgagaggtggaagtcaggaggagcttgtgactgtggcggatgggatgaaggttgcatgctgagtgtcctcactgatgcggccgaagaaaatgatgccgttcaggctaaccaggcaaaggatggcagccagcgatttgaacttctagctcagggtggatcacgagaagataggcatgccttcagtatgacttcattcaaagaggggctttatacagtggaattcagatcatccattgcattacttcaagcttttgcaatgtgtatagtgatgctacatgggaggtaccctgacaggctgcaagttggttcgcaagcagcgcaggagcatgacctccttgctggtcatgaggtcaaggccatggtagccagtcaaggaagagctccgaccagctatgtgccccaccgtccacctctttctcctgtgggccgagcctagcttatcgcgattaaatgtatgttctttgtgtgtctgtgtcctctttctccttcagtcgcgtagtgctggtgggattgatataccatggtcctcaggcccatatgcaatacgcatattgaaagtgacaatctcagaacaatcaatcggctttagaggtagctacctgtacatgttgtgatgttgatgttgtatgactgtactatgatgcggctgcaaggcccatctcggtgattactcacccgttatatgttctcttatcagttcataagaatacacaaaaaagatgaaaaaa

SEQ ID NO: 15012 - DNA, 1530 bp, Zea Mays
cggccgtcctctcctatatatatccacgccaaggtccggcaccttttctcctcgcgccagagccacgcacgctagtgtcagtggcacgcagggcagccgcgcgcaccgaggggaggccagagctagcggcgaggccaagggcgcgggcgcgggcgcggacggcaatggcgagagctggaggcggcggtccggtccgcggcgcggcgctggtggtcgtgctgctaggcatcgtcgtgggcgcggcgagggctcagctgcggcagaactactacggcagctcgtgccccagcgcggagtccacgggatgcgacgcgtcggtgatgctgatggcgccgaacggggacgacgagagccacagcggcgcggacgccacgctgtcgccggacgccgtggacgccatcaacaaggcgaaggcggccgtggaggcgctccccgggtgcgccggcaaggtctcgtgcgcggacatcctcgccatggccgcacgtgacgtcgtctccctgctgggcggtccgagctacggcgtggagctggggcggctggacggcaagacgttcaacagggccatcgtgaagcacgtcctcccgggccccggcttcaacctggaccagctcaacgccctcttcgcgcagaacggcctcacgcagacggacatgatcgcgctctcaggcgcgcacacgatcggggtgacgcactgcgacaagttcgtgcggcggatctacacgttcaagcagcggctggcgtggaacccgccgatgaacctggacttcctgcgctcgctgcggcgggtgtgccccctcagctacagccccacggcgttcgccatgctggacgtcaccacgcccagggtcttcgacaacgcctacttcaacaacctccgctacaacaagggcctgctcgcctccgaccaggtgctcttcaccgaccgccgctcccgacccaccgtcaacctcttcgccgccaacgccaccgccttctacgaggcattcgtcgccgccatggccaagctcggcaggatcggcctcaagaccggcgccgacggcgagatacgccgcgtctgcaccgccgtcaactaagcctgcattggctgcttgctgcttgcgtgcgtgggtttcacttatttcacttcttctttctcttgtttatatacgtacgtttgtcggatggattttggtagccatgagatgacatccttgctctgagctagcggacctgccccgattggatgatatagattgatccagatgttcttctagtagattctaattctttagggcttgtttgggatcaaaggtaatggagtggattgaggggactagaatcccctactacttaattttgaatagtgagggattatagccccctcaatcccctccattaccctttgtcccaaacaagcccttatggatgtttcccattgacacgcggttacgcgcgcttcaaccgtacgcagctcacgaacttcctctacctctatatcatcagtatgtctccaaaagtccttcagcaacaacttccatgttctcaatcatg

SEQ ID NO: 15013 - DNA, 144 bp, Zea Mays
ggcgtgagcttgtgccgccctcgggcgtcttgtcgtagtcgaagcaccaagtcgcccgcctggaggtctcgggaccgaacccctcgggtgtggtagcgtcgcagggactgctgataccgcgccgagtgtagtaaggccacgtcc

SEQ ID NO: 15014 - DNA, 1481 bp, Zea Mays
atgcccgccgtggacaccctcgaactcgttaccggctcccccaccgacattgcggccccatcagtgatctgtcccccaccaacccttccaccacgccgcggcggtataataacccggcttcctccccaattccgccactcctcagctcaggcgagcagcggagccgagcagagcctcgagatcccgcccaccatttgccctccggccgacgcggagccgatcgcttcaccggcagcgaggacgatgggttccgtcgcggaggactccaccgcggcagcggcagcagcggcgtcggtagtgttccgctccaagctacccgacatcgagatcccgcggaacctctcgctgcaggcctactgcttcgagcggctccccgaggtgtcctcccgcccctgcctcatcgacgggcagacgggcgccgtgcacacctacgccgaggtggaccgcctgtcgcgctccgcggcggcggcgctgcgcgggctcggggtgggcaggggcgacgtggtgatggcgctgctccgcaactgccccgagttcgccttggtcttcctcggcgcggcgcggctgggcgccgccaccaccacggccaacccgttctacaccccgcacgagatccaccgccaggcggccgcggcgggggccagggtggtcgtcaccgaggcctgcgccgtcgacaaggtgcgcgggttcgccgccgagcgcggcgtgccggtggtcgccgtcgacggcgccttcgacgggtgcctggagctgcgggccctggtggacgccgccgagccgctcgccgccgacgaggaggtcggccccgacgacgtcgtcgcgctgccctactcctccggcaccaccgggatgcccaagggcgtcatgctcacgcatcgcagcctcgtcaccagcgtcgcgcagcaggtggacggcgagaacccgaacctgtacttcagcaaggatgacgtggtgctgtgcgtgctgccgctgttccacatctactcgctgaactcggtgctcctggcggggctgcgcgccggctgcgccatcgtgatcatgcgcaagttcgagatcggcgcgctggtggagctggtgcgcgcgcacggcgtgaccgtggcgcccttcgtgccgcccatcgtggtggagatcgccaagagcccccgcgtgggcgccgccgacctcgcctccatccgcatggtcatgtccggcgccgcgcccatggggaaggacctccaggacgcgttcatggccaagatccccaacgccgtgctcggccaggggtacgggatgaccgaggcggggcccgtgctggccatgtgcctggccttcgccaaggagccgttcgaggtcaagtccggctcctgtggcaccgtcgtcaggaacgcggagctgaagatcgtcgacccagacaccagcgcgtcgctgggacggaaccagccaggcgagatatgcatccgcggcgaacaaatcatgaaagttctacaagtgatcatcatagc

SEQ ID NO: 15015 - DNA, 1516 bp, Zea Mays
tagtcattaccttatttcttaaggaatgttctcaaagagtagtggtaaggatgggagtaggcttagcggctgtagtagtcgagcctcttcagcttctatgccaccaagtgcgaagactgaatgtgaaatcctgcgatccgccaatgttaagatcttcaccttcaataatctcaaggcagccacaaggaatttccgtcctgatagtgttctaggtgaaggagggtttggatctgtctataaaggatggatcgatgagaacacattatcaccttgcaggcctggcactgggattgctgttgctgtgaaaagactcaaccatgagggtttgcaagggcaccgagagtggttggcggaagttaattacctaggtcagttctgtcatcccaaccttgtcaagctgattggatactgcttagaggatgagcaccgactgctagtatacgagttcatgccccgtgggaacatggaaaaccatctgtttaggagaggctcatacttccaacctctgtcatggaaccttagaatgaaggttgcactgggagcagcaaaaggactagcttaccttcatagtgcagaggcaaaagttatttaccgagattttaagacttcgaacatcctccttgacacagattattctgcgaagctttctgattttggattggctaaggatggtcctgtcggtgagaagagccatgtgtccacaagagttatgggaacatatggttatgcagctcctgagtatctttcaacaggtcacctaactgcaaagagcgacatctatagctttggggtagtgcttctggagatgctgtcaggccgccgcgccatcgacaagaaccgcccccagggtgagcacaatctcgtggagtgggctcggccttacctcacacataagcgcaagatattccggatcctggatacgaggctggaaggtcaatacaatctgaacggtgcacaaacaattgctgcccttgctctcgaatgcctatcctacgaagctaagatgaggccgactatggacgctgtggttgctattctagaagagctccagggctctggtgaagccgagaagaagcttcaagaacccaaggccggaaccaaacaggcacctgctgctgtgagtgctagcatgagcagcagccgcaagcctcgccggaaaagtctgggagacacaaaggagactgttggtgttccagatcccaaaccattggcccattctcgttagcaaggaaaagcattgcctggtcaagtcgttagctagactgtagctcgcttgtgaatatgctatggtctgtgtatgtatgttcagagggtaatcgggcttttggcaacagtcttttcgtctttatcatgagctgctcggttcagcctgactggaacctgtatgccgaaacccatggcatcagagagagggggagagagctcatgttccgagtctttaacttatgtcttcgctacacaggctgcatttgttccaggtcatataggatgttcagtaggcacatcaatgtgtcgc

SEQ ID NO: 15016 - DNA, 183 bp, Zea Mays
gaatttagcggttctcgatcccacgatctcgtagcgatgcgtagattattattattcagtttattcttatgtttgatgttatgtaaattttgcctataccatgtttgtttgtattgctacgtctagtgcgaggtaacgagccacctgaagagcaagttggtacctggaatctcaagtcacacg

SEQ ID NO: 15017 - DNA, 1875 bp, Zea Mays
aacagacctgttcctagaggcgtttggatcgcggggtcacgcggagagtctccgtcttatcgacaagagatcagcaacggtccctggtgttggtttggtccatgctccattctccttgctcccagcacattttccagagtccttttggaggcaggcgtgcgagctcgctcccgtttttaacgagcttgtggaccgtgttagcatggacgggaatttcttgcagaatgctttgtccaaaacaaggcaggttgatgatttcacatctaggctcttggaaattcacaggaaaatgatggaaataaataaggaagagaatattcgcttggggttgcaccgatcagattatatgctggattcagaaacaagttctcttcttcaaatagagctcaacaccatttcagcatcatttcctgggcttggttccttagttagtgatcttcacaggtccttaattaaacaatatgggacttctttaagtctagaacacaagagggttcctgcaaatgcggctagcactcaattttctgaagcattggcccaagcatggtctgagtttaatattgacagtgctgtaattatgatgattgttcagccagaagagagaaatatgtatgatcaatactggctttccaaacatttgcaagactcacatggcataacaactataaggaaaaccttatcgcaggtggaagcggaaggccaggttctcccagatggaactcttcttgtaggtggccagaaagttgctgtagtgtattttagagctggctatgcaccaaatgattacccttcagaagcagaatggagtgcaagacttatgatggaacaatcatctgctgtgaagtgcccttcaatatcatatcatttagtgggaaccaaaaagatacaacaagaactagcaaagcctaatgtgcttgaaaggttccttaaaagtgaggaaattgacaaggttcgcaaatgttttgctggcttatggagtttggatgacgaatatattataaaaactgcagtggaaaaacctgagttgtttgtattgaagcctcaacgtgaaggcggagggaacaacatctacggtcttgatttgagggaaacgcttgtcagactacagaaggaaggaggggatgcgcttgcagcctacatactgatgcaaagaatcttcccaaaagcttctcctgcttatctcgttcgtggtggtgtttgccacgagggtcttgcaatttctgagcttggaatatatggagcttatctgcgtaacaaagataaagtggtgatcaatgagcaatgtggttacttgatgcgaacgaaggtttcttcatcagacgaaggtggcgtagctgcagggtttgctgttttggatagcttatacctgactggcaagtgagataacaaaaggagcggcggctacagctttcggttgggggcatacaccgtcaatggatcatcatgtcctccatttagatcgacacagaataagctgctgcaaactagagccattatgtgacaccatgtcacgttgtttgatgaattccttctatctgcccctgccaagggagagaagagaatagacatattattgtgtgtagattaaatgtgcatgaaatccatggaaatggtgaaggatgaaccacgtgcccataaccgtgatgtaggctggcggtgccgtttcttgttcttgatcaccttgacagcaacggggaattctgtgtttcttttgaggacacgtgatgtgcaccatcagtatgaatgtaaccaaagaataagggcctatttagtttatgactaactatgtcatattttgtctaaagttagttgttcgaattgaaaaactaattttagtcacaaaagtatgataaatgtggcaaattagacagcgaa

SEQ ID NO: 15018 - DNA, 276 bp, Zea Mays
gttgtgctggcagactaggagacacctccccactgcatggttgccaggttcagggacacatgcccttgtgcagctgccttaaaggcctgatgcagtgaagctttcgaccttgtcttaagccctagtcacagtccaacttgtgggagtggtaatccttgtgttcctgctggtataaaccctctccccagccccagggtagccctgtccagaactacgcgcgccaacacccagtctggtgaccacgttcacccgagtgatcaccttgtcgtggctagg

SEQ ID NO: 15019 - DNA, 463 bp, Zea Mays
ggcaccagcatcacatcgagccgggagattggaatccagttgagatttcgctcctctcctcccctcccccgccctggtgagcccctccgggcgacgtgtgtcccgttgcctttccttcgctcgacggccacctgttgccctcgcatggctctgcctgctcctgccaagcgtccaagctcccgctcgcccggcggctgcacgccgcagcgtctatccacccagatccgcacgatccccgctaatcgccgcaccccctacctcccatgcaacttctctagctcacccgcatcccggctcggcactgccttctccttgcacttcacttctgtatctagaccacctcatcacaattcgtcgtcagcgtcgcgccgtcgtctcagattgatgcaaggcgtgatgagaagctagaggcagcaactgcatatattgcaagaaaattgaacatctctggtttctactactg

SEQ ID NO: 15020 - DNA, 1977 bp, Zea Mays
ctaaaaaagcccacacatctttctatcagaagttcatccgttcgatttgcagttaacggctcagatgaaaaaaattcccaaacccacgagcatctcagtcccccaaaccgtaaatcctgtaaatttcattccacatataccccttcgatccacggggctatggcaattgcctctcaagctcaagggctcaaggccattagcgtaattgcaaaattgtaattaattctcaatctcaaggttagtaacgtaattctagagcttctgagcagaaaaggtacggagtcggaaggatatgatcgcttaggagtgcggctagggttttttcctgtcacaccttccctcggtcccttccatctcctagccgccgccgccgccgcccaaaaccctacctaccctcttctccccctcactctcctttcatctccattctaatggcggcccaacccgtccggcgaagctgctagtgcttgtatctactatcttcatcagaaagccgaggcgaagaagtccgccgtggcgcctgctgggaaggctgcccagcctgcggcgaccaccaagttcccgaccaagcccgctcctccctcgcagacggttcgggatgcacgcggcggtggctcatcagctcgtggaggctttggccgtggtgaacgtggccgtggcagaggtggacggggatatggtcagaaccgtggcttcagtggtgacaatggcaatgagttccagggaggttatggtggcggaggctatggggatggtgctgtaactggtggatctgaaggagaaagggagagagacactcgtcccccgtaccgtggcggaggcagacgtggtggttacaggaatgttgagtttggtgatgactctgagaggccaccacggagaaactatgagcgccacagcgggactggccatggctatgagatgaagcgtgatggcgcagggcgtgggaactggggcactgccactgatgagcttattgcccaggatgcagaggactctccgaagatggaggaggctgctcctgttgctgagaaacaaggtgagcagatcgatgccccagcagcagatgagaacaaagataacaaggatgctactgcaaatgaggaggaagaaaaggaagaggacaaggagatgactctggaggaatttgagaaaataagagaggagaagaggaaagcactacttgcgttgaaggctgaggagaggaaagttgaagttgacaaggatctgcgttctctgcagccactttcaaacaagaaagaaaatgatgaagttttcattaagctgggttctgacaaggataagaagaaggaaaatgctgagcgtgatgagcgtgccaagaagtcggtgagcatcaacgagttcctgaaacctgctgaaggagaaaggtactacggcggccgtggccgtggaaggggccgtggggatcgtggtggttttagaggcggatacggagggggatacagtcgtggcccagctgctgctgctccatccattgaagatcaagctcagttcccaagccttggtgggaagtgaagggcgcccagctgctgctgtcaccgagcgttgtgttgtctgctgttgtcatatttaaattttgtccgacgttacatttctgtgccacggtttaaacggaacaaataatggtgttgcatgtggctatctttggttatgtggtacttgacgttgaataccggagttgtttatcagaattagactccaaattttgtaggccagcttttaccattttgttgtcttagcatgctgccttgtaaccctctcgcagccctcgtccatgctgtgagtcacagtctaccagttcttgctctaagtgagacgaggttgccggtgctgggcttcacaatgccctccacggcagctacagccgagaacgcccagctcagcttgtttggctgcaattaatattagccgcagctagattaaagccgcagcaaacttgtcgcttcttgcttgcct

SEQ ID NO: 15021 - DNA, 923 bp, Zea Mays
ttgtctaaggcaaaatagactttttattgagggtctgtgtggtaatgtagttcaaaaaaaattggaaagagactattcattatcatgggccgaacaatgtttaggatgggccactttacaagcccagcggctggttgccagatgggatgaactcacattcctatccagaaacatagtccgtttaggcccaaaagaagcggcaccacgagtccacgagggtccaactgatgctcgggctccccaatccccacccggaaaggcccaatcgctcacaggttgcagcgcttcgaccctcctccggagtaatccacagcagcggtgggagcaacagggacggtggagacatggaggagccgctaccgaagcccgccccctcggcagccgcggaggaggtggcggagcggttcaggtcgctcgtcgaccccgatgatgttgcctccatcaggcagacgcagcacctcataatggggcgattgcaagatagcaatgcagttctcacacattttaatgagtattccgaacgatgctttgtagaagtgtctggtgattttgctagtaaaactcgccttctcaagtctatgaaggctgatctcgaccatattttcacaaagctaagagagatgaaagctaggttagcagctacctatccagacgctttccctaatggtgcaatgtcaaagacgatggaccagagaccagaccttgaaagtcctttagattagtgcgtctaacatcaaaattccgcatattagtgacgacatctgttgtcataccaaagatttatttaattcctcattaggcttgaagcgacatatatctgttgccaaaaaaaaaaaaaaaacgagtgacctgtgcttccgcatctctgtgtattagaactgggcttaaatgcttaatatatcatcatctttgttgaaaaaaac

SEQ ID NO: 15022 - DNA, 1899 bp, Zea Mays
cttaagtgttatcctacatctgctgctgcgaaggcactacccgtttgaccggtctcttgatttccacgccttatgtgctctttatgcagtcactgatgttgctcttgtaacatcactgagagatgggatgaaccttgtgagctacgagtatgttgcatgccaagggtctaagaaaggagttctgatacttagtgagtttgctggggcagcacaatcccttggagctggcgccattctagtaaacccttggaatattacagaggttgcagactcaatacatcatgctttaacgatgccatccgacgagagagagaaacgacacagacacaactatgctcatgtcacaactcacacggctcaagattgggctgaaacttttgtatttgagctaaatgacacggttgctgaagctctactgaggacaagacaagttcctcctggtcttcctggtcaaacggcaatccagcaatatttgcgctctaaaaatcgtctgctcatattgggtttcaattcaacattgactgagccagtcgaatcctccgggagaaggggtggtgaccaaatcaaggaaatggaactcaagttgcatcctgacttaaagggtcctctgggagccctctgtgaggatgagcgcactacagttattgttcttagtggcagtgacaggagtgttcttgatgaaaattttggagaattcaaaatgtggttggcagcagagcatgggatgtttttacgcccgacttatggagaatggatgacaacaatgcctgagcatctgaacatggattgggtagacagcgtaaagcatgttttcgaatactttacagaaagaaccccaagatcccattttgaacatcgtgaaacatcatttgtgtggaactacaagtatgctgatgttgaatttggaaggctacaagcaagagatatgctgcagcacttgtggacaggcccgatctcaaatgcagctgttgatgttgttcaagggagtcggtcagttgaagtccggtctgttggagttacaaagggtgctgcaattgatcgtattttaggggagatagttcacagcgaaaacatgattactccaattgattatgtcctgtgtatagggcatttccttgggaaggatgaggacatctatgtcttttttgatcccgaatacccttctgaatccaaagtaaaaccagagggtgggtcagcatcacttgaccggaggccaaatggaaggccggcatcgaatggcagaagcaattcaaggaacccgcagtccaggccacagaaggcgcagcaggctgcatccgagaggtcgtcctcatcaagtcacagcagcactagcagcaaccacgactggcgcgaagggtcctcggtcctcgatctcaaggccgagaactacttctcctgcgccgtcggaaggaagcggtccaacgcccgttacctgctgagttcgtcagaggaggtcgtctccttcctcaaagagttggcaacggaaacagctggcttccagtccagctgtgctgattacatgttcttggataggcagtaaatagattggagcctccgtgctttgccagacaagcacactggagaggggaaaaacccattcattcctcaaatgcgcgacggagttacacccagcgtgttgtacaatcctgtacaaaatttatgctcgtgataaaactgcgagagggtggagcaaatggaaaaggataaaattagtttagatttagatagtttcgttgcttctggtacacaatcgacggctttttttatttctcattacaaattttttgagatgcgcttttgaactggttggtattgttcacatctgaaatacgcctgcgccatgagacatctcatattcttttttatctcagtaactaacagcacataacacgacaaaag

SEQ ID NO: 15023 - DNA, 1432 bp, Zea Mays
caatgacgcaagcttccttttggttaatattttgtaagacatctgatttggcaaggagagcattgcgtgcactaagagggctagttagattgaagtcgcttgttgatggaaatgctgtcaaacgccaaaccgctcacaccttgcaatgcacacaagcaatgacaagagttcaaactcaaatctactctagaagggtgaagttggaggaggagaaacaggctcttcaaagacaactccaattgaaacatcaaagggaacttgagaaaatgaagattgatgaagattgggatcacagccatcaatccaaagagcaaattgaggccaacctaatgatgaaacaggaagctgcactgaggcgagagagagcacttgcatatgcattttctcaccagtggaggaattctggtcgaactataacccctacttttacggaacctgggaaccccaactggggctggagctggatggagcgctggatgacagcaagaccatgggagagtcggttggcggcggcatcggacaaggaccctaaagaacgtgctgtgacaaagaatgcgagcaccagtgctgttcgagtacctgtatcccgtgccatctcgattcagagaccagcaacaccaaacaagtcgagccgcccaccaagccggcagtcactttcaaccccgccatcgaagaccccgtcagcctcaggaaaggccaggccggcaagtccaaggaacagttggctgtacaaggaggatgacctgaggagcatcacgagcatccgctccgagcgcccaaggaggcagagcacgggtggaggctcggtccgggacgataccagcctgaccagcacaccacctctccccagctacatgcagtcgaccgagtctgcacgggccaagtctcggtaccgcagtctactactgactgagaagcttgaggttcctgagagagcgcctctggcccactccgttgtcaagaagcgcctgtcgttccccgtcgtcgagaagccaagcgttgtgccgacagagaagcccagggaaagagtgaggcgccattccgaccctccgaaggtcgatcctgcgacgctcaaggatgcccctgctgcctgaccagtgaccaggccttatgtgattgttaggtttcgtgctcttttaacaccgtgatgtattatctgagttaggttgctttgttcgtgtcatcgtatgatctgtccgggttgattttgagacagttctaactgtgtttacagacaatgcgtgatgctaaatgtatgtgtggttggttggctttaaatgtactgatatgatagtatttgattttaactttgctaaggacttgaggtgcaatgtgaatagatttcagggtgcgggaacaaagtttttctacagtattgactcaacagacgtattaagcaatattgtagtattatatactttgaggtatttag

SEQ ID NO: 15024 - DNA, 1026 bp, Zea Mays
cttatgtccaccgagtcactcagcgcaaatctgcaagcagcccaagaagggtttagactttagaggaaggggacaacggaacccgtcgatggcggcggctgctggcggcgtgcggcgagccctcgcggcgctgcgctccggttccccgtctactatctctgcaacgctctcccgccaggcggcagctcgctctctggagctagcggccgcgtccctgccgcgcgcctctcgccggcgcctcgcgatctcgagggtgccggttgcggcgctcggcggcgtccaggcttcgctgatgccgatgcacaacgccaccgcgtcggcgctgctcacctccatgctcgggcttaaacctggctcttggggctggctctccgaaggatttgctacacctctataacaggaaaaaggagtatccgtgataagtgcctgtttttaaacctttgcactagaggattccaaaaacatttttacatgccttgcggagtacacccttggacttctgctgatggaatctgtactaaaatctgcgacaaaaaacttatggtcctatgtcccaattatcttggttctactatatccatcgaattattcgctttccacgctatctccttttccttgtctcgtgtggcattgccatgggattctaatatgacatcagcatggctagtatcaaatatttgttatccgaagcatcaaagcaccagtatgaatgatctatatccatcgaattattcgctttccacgccatcttcttttccttgtctcgtgtggcattgccatgggattctaatatcacatcagcatggctagtatcaaatatttgttatccgaagcatcaaagcaccagtatgaatgatatatttacatgttttgtgttgttaacaagcatcagccaactgaagcagatcgcagattaccagatatgaatatcacatatgtaatgatatataagcatgcaaattctatctggcaagatttcatttgcatgtctaagcataatgttaagaagggcaggtctgataagca

SEQ ID NO: 15025 - DNA, 769 bp, Zea Mays
ctaaagcgaagatgattcttagttctacggatggaactggatatacaaaactttatgcagaaccctcagctgcaggagtttgaattccagaactttccgacttcttacctccgctgtgctgctcatcgtgttgcacaacattatggcttagagactatagtagcagatagtttagtagaaggctcagttagcaggattgttgcaagaaaaacagcagaaagcaggtatcctgcaatttttttatcagaagttcctagcaatcaagcaagaaatgatcatgaaacagctgagaagcttaagtttgtcatttatcaaaggcccaaagcattccaaaatggaagcgctgattctagaaacaagagtggtgtaccaaaaactgttgatgagagaatagaggaatataataaagcacgagcacgcatcttcaatggttccatttctgcagattctgatgctgcaagtattatgggaactctttctactggcaaagatgaaccagtaaatgttgacccttctgttgatgaaaccaaagtcagcacaatgaacagtcgttccagagttgctgtttttaaggatactgaaaaggatcgtagtgacccagactacgatcgaaactacaaaagcatactatgtactttggccagcctgatctaacaatagggtcttctggagctgctgtttatcgacattggccaaccccaacaatgatgtatccccattgctatgataatgttagtccaatgatgtctcagacgaaatgagtgggata

SEQ ID NO: 15026 - DNA, 492 bp, Zea Mays
agatacgtctcatccgttgtgtcgtcttttttttcggtgtcgcgagctcttcctccttccgcttctcttcgacagaaaactagggttttgctcttggaatctctctccccgctgccgccgccgccggacagtgcaccgacgatacgacctcctccttcctccgatctggcctttttaatccgcggatcccgtacaagatgcttcccctctcgctcctcaagaccgcccaggggcacccaatgctcgtggagctgaagaatggtgagacgtacaacgggcatctggtcaattgcgacacgtggatgaacatccaccttagggaggttatttgcacctcaaaggatggtgacaagttttggaggatgccagagtgttacattcgtgggaacaccattaagtatcttcgagttcctgatgaggtgattgacaaggttcaggaggaaacttccaaaagccggtcagtttgcagcatgttggtatggacagctgtgt

SEQ ID NO: 15027 - DNA, 161 bp, Zea Mays
ctcccgatcagtgggcgcgcgcgctcccgagaacgcaacagactcctctgctgcttggcctttgtgctagtgaagtgatggtgctagctgctagctagctagcagcagcagcagcgatctagatctccagttccttaccacagatgaactcaatcacctgc

SEQ ID NO: 15028 - DNA, 605 bp, Zea Mays
gccaacttgcccggccatctgctgctggcctgctgctgatatgctacaacaacgcctacttcgccaaggtcgggggcatcagcctggtggagatgaactacctggaggtggacttcctgttcggcgtcggcttcgacctcaacgtggcgccggagacgttcggcgactactgcgccgtgctgcggtcggagctactgtgcgcggaggctgccccccgcgccactcaggctgcagcactgctgcctgtccgaggatgacgccggggcccggatgcagcgcccagcagcagctcgctgcatgaatgaaagaaacctaagcccatcgatcgacgactcatccggtggcttgggcgcaggagttgtaagccggtgcaaatttttccaaattattagatgttttgtcttttctagattataaagctttcgatatatacacacatctatatatacagtgtgtctagaggtgtagtggtggtgtaggtcgtcgtcggttgtaccagctgctacagtagattgtgtatacagtgctggtgtctttggtgactttctgaatcgtgtgcgtgttcgttccggtagcgaaggtaacttgaacaagcaatgaggtgc

SEQ ID NO: 15029 - DNA, 1182 bp, Zea Mays
gcgttcttcagtctcgcccaccaaactctgccggtcccgcgctgcgttgggcaagccagtgaaggggcttggcctggggatggggcgggagcgcgcaagccagcggagcatcacgtgccaggcggcgagcagcatccccgccgaccgcgtccccgacatggagaagcggaagctgatgaacctcctcctcctgggcgccatatcgctgcccaccgtcggcatggtcgtcccctacggcgccttcttcgtccccgccggctccgggaacggcggcggcgggacctacgccaaggacaagctgggcaacgacatcacggtggaggagtggctcaacacgcacggtcccaacgaccgcacgctcgcgcaggggctcaagggtgaccccacgtacctggtggtggagcaggacaagacgctggccacctacgggatcaacgccgtgtgcacccacctcggctgcgtcgtgccgtggaacggcgccgagaacaagttcatctgcccctgccatggatcccagtacaacaaccagggcaaggtggtccgcggaccggcgcctctgtcgctggccctggttcacgccgacgtcgacgacggcaaggtcctcttcgtcccgtgggtggagaccgacttcaggaccggccaggacccgtggtggagtgcatgaggaggatcatccgacacaagcggtgctcagtactcataggctttctccgagggcgttgttgctacaaattcacttgcctcttgcctccaaattatatatattacacacactgcatgaaacaagaacacagctgtttgtcatctcttcactataaccttttgaacactctgaaatctgctgtaatcaaatatagactttctctgccatctgctgatcaagtgaccagcagggagagcaatttagacttttttttttgccgaaatgacttttatgtagtaggctcacaccaatttctagttacttggtcaatatttctcttcctcaatgaatgtacaagtttttagatcttgatctagatctacttatgctaagtttttagttaactcctctactagttatacatcaacatagccttttagtctcaagcaagttgtggtaggctatagttaaaatccaacaagatatcaccaaaaagagaaagaggaggaaaaatgtgacaccccaggtgtctatttcgc

SEQ ID NO: 15030 - DNA, 1742 bp, Zea Mays
actaactcccggcgcaagactaaccgtttccatgacatcccagagttgaaggttggtagtgacacaggaggatggagtgagatatacagcttcatttcacgtgacagtgaagccagtgagaccaatgcttttctatttggtgacatgggaacttatgtgccttataacacctacattcgcacacaatctgagagcttgtccactgtaaagtggatccttcgtgatattgaagcccttggagataaacccgcctttatttcacacattggggacatcagctatgctagaggttattcttgggtctgggatcatttcttcagccagatcgagcctattgctgccaatactccataccatgtctgtataggaaatcatgagtatgattggccatcacaaccctggaaaccatggtgggctacatatggaacggacggtggaggcgaatgtggaataccttatagtgtcaagttcagaatgccgggcaattctattctacctacaggtaatggtggcccagacaccaggaatctttattactccttcgactcaggcgtggtgcatttcgtctacatgtcgaccgaaacaaattttgttcagggaagtgaccagcacaacttcttgaaaacggaccttgagaaggtgaaccgaagtagaacaccgtttgttgtttttcagggccaccgccccatgtacacctcgagcgatgaaaccagggacgcggctttgaaacagcagatgctccagaatctggaaccgctgctggtgacatacaatgtgaccctcgcgctatggggacatgtccacaggtacgagaggttctgcccgatgaagaattcccaatgtgtcaacacttcatcaagcttccagtactctggcgctcctgtgcatcttgtgatcgggatgggcggccaagactggcaacctgtatggcaaccgaggcctgatcacccagacgtccctatctttcctcagcctgagcgttccatgtaccgcggtggcgagtttggatacgccagacttgtggcaacaagggagaagctaacactgacttatgtggggaaccatgatgggcaggtccatgatatggtggagatattttctggcctggtatcccccagtaacagtagtgttgctgaggcggtggatggaaccaaacttggcacaggagtcagcaccgtgcggaaaatttctccgctgtacttggaaatcggaggcagtgtgatgtttgcgctgctcctgggattttcctttgggatacttgtcaggagaaagaaagaagctgcacagtggactcaagtaaagaatgaggaatcgtagtagtgttgccaataccgtgagcctggtgcagtggtggtgatccaaacttgtgtgggtgtaattactggagtagaacctaacaaagtgaaggcatttctgacttcttggggggctccgcgtcctcttggtacaactagtgtattgatagtcttgggaaatgaaggttctgatcgcatatctgttgttgtaatagttcaatgtataagcatgtaataagtgatataatgttcacattgctttggttgacacaagtgtgtaacatgtgctaccacaagtgattctgggcgtcctttgtagttgaaccatatttgttttatgatcctgcttttctgtatcatctgcctgcttttgttagcagatgtacggaatcttctgtacttggagtttatacctaacaacatacttatatatttatattacaaacc

SEQ ID NO: 15031 - DNA, 530 bp, Zea Mays
taagaagtcaattccttcactagacttgaagattggcaaattggtcctgagattcgtacagggtttttgaaggatggtaaaccaattaagctaaccaagggtcaagagatcactgttaccactgattatgatatcaagggtgacgaaaaaatgatcgctatgagttacaagaaactgcctgttgacgtgaagcctggaaatgtcatactctgcgcagatggtactatctctctggccgttctgtcttgcgatcctgatgctggaactgtgcgttgtaggtgtgagaacactgcaatgcttggtgagagaaagaactgcaatttgccaggaattgttgtggatcttcctacattgactgagaaagataaagaagatattttgggctggggtgttccaaatgacattgacatgattgctctatcctttgtccgtaaaggatcagatttggtgactgtcagacaggttcttgggcagcatgccaagcgcattaagttgatgtcaaaggctgcaacttcacaagaattttttac

SEQ ID NO: 15032 - DNA, 795 bp, Zea Mays
gagtagatttacgatggaagctgaactgctagaacaatgatcgtaaaccaagaacacaggaaacttcctgaagatttggattaccactcaatgacaaatctatcacttgaagctcgtgagaaactttccaaggtgcgtccacaaacaataggtcaagctagcagaatcggcggtgtgagcccagcagacatgacagttctcctcatttggatggagagcaaccgacgcatggctacccacaggagacagcgagagcagctgggatcagttgcagtcgagtcggatggttcttcagaggaggccgtccaagccagcacggcataaacgtggggagcttctggcagctgaacaaggaacaacaaaattcggtgaggcatccagggagcctgcgcgtctgtggtacaacgatgcagggaggcgccaagtgcatgcatgtcttttcttgacgacatgaggaaatagtcggccccctggttccttcatgttgtgcctcattgtctaccagtatgtgtgcatgttgtttaggaatgctggtggaatacaggttgatatttgcagtagtagaattgagagagcagactgtaaagaacgacaacaaataggggtttaaaacatacattcgcactcacttagctaaaaaaatacactttttgtgtgttttatactttatacttaagcaaaatatagatatttttacgaaattagatgaaaagggcgtgttggatctagcccaccatgtgatacctaaggcctaggtatgacacgatgattgagctgggggtagactgtactaga

SEQ ID NO: 15033 - DNA, 911 bp, Zea Mays
  misc_feature (910)..(911): n is a, c, g, or t
cgaggagagagagagaacggtgcgcccgcctgctcctcctcctcccccttccgtcatttataagcgacggcaacacaggcgacgaagccggggagaggggggcgcacgaggcaatttatagcgaggagaagaggagcggccgggcccgagcagagcaggccgggccagccatctctcctctgcggcgtcggcgcccgggatgggggactctggcggctccgttgtgtcggtcgacgtcgagcgcatctccttcggcggcaaggaacaccatatacaaacgaatcatggacctgtatctgttgcagtgtatggtgaccatgacaagcctgcccttgttacttatcccgatattgctttaaaccatatgtcctgcttccaaggactattgttctgtcctgaagccgcttcactgctgcttcataatttttgtatttaccatatcagccccccagggcatgagttaggagctgctccaatttcaccgaatgctcctataccgtctgttgacgatttggcagatcaggttgtggatgtcctcgatttctttggattaggctctgttatgtgctttggtgtcactgcaggtgcctacattctaactctgtttgcgtcaaagtatagggagcgggtactaggtctcatccttgtttcacctctgtgtaaaggccccacttggactgagtggttatacagtaaggtgatatccaatctgctgtattactatggcatgtgtgggttggtgaaggagtgcctacttcagcggtacttcagcaaggaagtgcaaggattctctgaattgcccgagtcagacatagtgcaggcttgtagaagcttgctagatcagcggcagagcatgaatgtgtggcgctttgtacaaacaatgaatcagagatatgacttgactgaacann

SEQ ID NO: 15034 - DNA, 3328 bp, Zea Mays
ttagatatatttcgcccatttgttggttttcgtgaagttcgtcttgtcaacaaggagtccagacatcctggtggagatccacatgtgttgtgtttcgttgattttgacaaccctgctcaggctacaattgctctggaagcattacaaggttataagtttgacgaacacgagcgtgattcagcccatttgcgtctgcaattctcacgctttcccggtccaaggtcagctggtgggcctcgcggtaggcgttaagacgtgcggacctcgtggttgccgaacctatcgtttatacgagcgatccaactacggtgggctaacgcttcgatatgcgctgaatttcggggcggtggctttttagggttcgtcagctcatttcgtgaatgcgtgaaagggacaatgcaataagtgatattctgccatatgttattagatgccgtataatgtgttaggcatggaaagttattcgacatactgtatctgctgccttagctattgtggtctactgtaacttcattaccttgcttcacatccgagacaatttgagtttgttatcatgtggattatctgttttgaaaatgaaaactagatgatgttagcctattttagtaatgcatattgccccattggtgtttcttgcccatataccaaaatcgtgtactttaatctaggattagtaaaactgtggttgcctaggaactatgttgtaacccactgacacccttagttaagcaccaaaggatgtcaggggctactgtgcctatttctgactttattttgtaaggctaagttcctcgaagatcagctatactaaatggatattagttgctgattgaaactttgatagtgaacttttgaaattttcgttggcataataaatctgagtacatttctcttaaagaagcaaattgattttccttaagtttgatgtgattgttgttggtccaaattactgtgaactgctttggagcttttggggtatctgtagtaatttgtgagaaataactcaataactgagatttgatcaagatgcaaagttaatgaaatgtaatacattctgggatagaggtagtattttgatctgcatgtgtttctaagctacaaataacatggagtgcgagggtattgtttgcatatagtgaactaaattgggatgcagcaatgccagtccaatcctgtttccataagcattgttgaagtagccatgcactgttcagtcatgcatctgtactcaggtaatacaaagttcagttgtgttcatgcattgaaatggtctgctctagaacatgtagcttttggtttaatttagatccactgcatgtcacttgggcgaaatcttctgttcattgattcctttcatctgtcttcctaaagatgtactctctctgttcttttttatttgttgcattttagttcaaaaatggactagcggaccacaaatattcgagaacggaagtagtatatgccaatccgtgtcattttactaattaaattcttggtattatttgtgttcattctcagatggctgttatattgtatatgcgtattgcttaatgggttgaatgtcttacgaattgcttcacatgatgtgttgaaactggctgtgcaatttatttacccaataggtatgcttattccttaacagtttaatgcatggccttatgtgtttactgcagtggtttgcattaataactacatttcggtgtgtgctaatttgcctttctaacccctgtcgacctatcggaatgtgctaatttgcctttctaacccctgttgacctatcggattgtgccttcgccttttgcaattctttgaagtccctgcttattgcgtgccagatgtgtgttgctgttgccattttttcgactgctttgtcgtttctgcgtcagtctgtgtgtttgcatgtctgctgcgtcgtgaacgtttttttttatcagtcgtgcgttattgcactttgcctgttccattttttttaatatttagagctagtttggcaacttcatttttccaaaggattttaagaaatggaagggaaatgagttcattttctctttgggaaaatgagaatcccttagaggaatggagttcctaaattagcccttatacgatatttacatgtgtttgccatcagtgtgaatcttcatactaagggttaatttggaaacttaaatcccctttcggaatcctagagattgagtggagattgactaatatcgcactcaatccccggaatcccctaagttctggaactagccctaaatggtttatatgaatattctcttctaccgagttgtgaactgctgaactctagttctgtgtatctgttacgacacctagcactgtgacacttgaaattgttacagattaagacgcactgacgataccctgcgctcagttgctcgatactcgaggcttgtaggtgattgtatccagtagtttgaagaactggttatctaattatttatgtactgtggatccaccattttggatacgcttcatcaatataaaagagctccaattatgaaagttaggagaaaatggcgatctctaaactattcttgagttgtcgtccagctcccaagactaatggaattgcagtttaatgtctctgatattatattgtaacgtgtcatctcgctccaagcttatacgttggtctgctgttacatgccagttctgtaaggagaaatggcaccgattactggaaattttacaaattggccctactacttgtttagattggacaagctctctcctcgtctctatttaatctcttcctctgtttttctctatttgccccttcgttcactctttctcctcccttttcttgtctcgttatcgtctgctacgccaaaccctagccccaaatcagtagcttgaagctgcccacagcgctccaaattgggatccacagattctgcattcatgaagtgggtggggtaaacggcttggggaattgtgtgtgctatcgtcatttaggcgcaggacgaaagggaagccaccgttgattactcctagactgaattgtaggcaaattgttgaggttcacgcggccatagtcgctatgacaatttctacatggccccagacacagggtaagttgaactgaagagctctgctccaaagaagctttgttaactacgttgtgttctttgttaacctcctgcccattttggcaccgggaggaaagttgcttgtatgctttgcaggatagctaaggaaaaggacattcttgcactgggacgacaacaaaggaagcgcacggagctgggcaattctcagtttagatgctcaagttgggactttggtgggtttaggttatgagtaagta

SEQ ID NO: 15035 - DNA, 1208 bp, Zea Mays
cacaaaagccacgcacgcggggcgcttgtcttgcgcgcacgaaaacccacatccaccgcggcgccacaccgcgtgcgtcggctgcttgctgccccgtgttccttggctcccgccgacaccgagcgccgacaccgagcgccgccaccgccatggctgccccgccccgcgccaccgcggtcctcgcgtggtgcgctcactctcgcgcgttctctctcgtgcgcgaggggcgcggcgggcaactccgtttctcgcgtcgcggcgggccactgattgctctggttctcgttttgtacaggggttccggggaggacgggcagcttggcatgggcgggaacgaggagaaggactgggcacactgcgtggaggcactcggttcctacgccgtcaccgccgtcgtagccggtagccgcaactccctcgccatctgcgaagacggccgcctcttcacttgggggtggaaccagcgcggcacgctcgggcacccgccgaagaccaagacggagagctcccctggccccgtccacgccctcgcggggttgaagatcgtccaggcggcgattggtgggtggcattgccttgcagttgacgacaatgggcacgcctacgcctgggggggaaacgagtacgggcagtgcggtgaggagcctgagaggaaggaggacgggacgagggcgctcaggagggacatcccgaccccacagcggtgcgcacccaagctcaaagtccggcaagtagctgctggagggacacattcagtggttttgactcaagaaggtcacgtttggacatggggacagccatggcctcctggtgatatcaagcaaatatcgacaccagtacgcgtgcaaggccttgagaaagtgagggtcattgctgtaggtgcattccataatttggcactcacagaggatggaattttgtgggcatggggtaataatgagtatggtcagctggggactggagatacccaaccaagatcacaccctatacgcgttgaaggactatctgatctctcactggttgacattgctgctggaggctggcattcaactgcactaactatacagggagaggtgtatgcttgggggagaggagaacacgggaggcttggatttggagatgataagagtagtcgcatggtccccctaaaggttgagcttctagctggagaggatattgttcagctgagcagcagagctcattttcca

SEQ ID NO: 15036 - DNA, 4753 bp, Zea Mays
aaaaatgtcgacgcggtgcaccagccggccgccgggtgggggaggggacggcagaaaaagatcgtcgcaggcccactgactgcgctgtgagctcggatggaatggagaaagaaacaagtacggccacagtttagtaattattcttccgtggaaggtgtcctatactgcaagcctcactatgaccagatattaaaatcaacaggcagtttggagaaaagttttgaaggtgtggcccgatcagctaagtcagaaaaatcaaatggacataagggccaacaaagcagtagattctctaatatgtttgtgggcacacaagagaagtgtgttgtttgcaacaagactgtgtacccgcttgagaaggttgctcttaatggaaattcttatcacaaatcatgctttcgctgcacccatggtggttgtacgctcagcccatccaatcatatcacacatgaaggcaaactttattgcaagacccaccattctcaactgtttatggttaagggaaatttcagtcagtttgaggacaattctgggaatgcaaaagttactattgagaaactgccagaaacagaagaagccaccaagaatcctgatcaaggtgatgaagccacaaggaaaccggtagaaaatgagcctacagatgagaaaacttcaaaaaataatgttgcagctgagaaacaattgcaaagtggtgttgatgtcacaaaaccatctgagagtaccacagcagaaaatgaacgaggtactgagggtgagtcaaagagtaatgttgtcaacaagaagccgtcagaaagtattgtagaaaagccactacagaacagtgtggttgatgtaaagccatcaggaaacagtgcagccatgagaaaaccctggcaacgaagtatgcaaacagataaaccgtttctgagtagcacaagcactgtgaatccatcatcgagcagtgataccactgagaagctatcatcaagtaatggggttgatatgaaacagtctgaaagcagcacattagtaaaaacaacatgtaaacaaaattcaccaactgagaatccaccacagagcgttttaccatcggataagccatcagcgaccagtgtagatgatgcaaagccatcagaaagcagcaaagtgataaaaaaaccatggcaacgcaatatggctgccgagaagcaattacagaacagtgcaccatcacagaaaagtgtagctactgataaaccatcaccaacaaccggcatgaagtcattagataacaccacagaagttaaaagtccatgggggcgcaggatgttcaataacaagtcactaaagcgcagtgtagatactgagaaatcttctgaaaccagtgtggttgatgtgagacctggggaaaccagtacagtagcccctgtgccacagcaacaaactgaaaatgttgagaaaccttcagctaccagtgcagatgatgcgaagagtgcagatgatacgaagagtgcagatgatgtgaagccatcggttgccagtccagatgcgaagagcacagatgatgtaaagtcatcggagaataatgcggcagtagttagaaagccatggcaacgcaacataggcactgggaagcaacccctgaccactgtagttggtccaaagacgactgaaacaagtggaactgtcaaaaggttgtggcagcgcagtgctgcaactgcatcaaaaagtggtacggctgttgtgacaccattgcaaagcagtgtggttgtctccaagccgttccaaagcaacgtagctgtgaaaaagacatggcaaagaagtgtaactccagaaaaccagctagagagtaatatgtctagcaataagccattgccaagcaaggtggttgttgagagtctactgcaaagcaacaccgttgagaaagtgtttcagagtactgtacctactgaggaaccacagaaaggcatcatggccactgaaaatcaatcgcagaccatcaaagttacaaagaagagcaatgaaacatccatggagctatcagtaacaagtgagacaaccaaaccgccaccacttgctgcaaccgtgttgcaaagtgatgtttccacagaacaaccatcacaaactgatatgcctaccatggcacctagtcagatccctgagcccaccgagaagccatcagaaagtgattttaatgctgagaagttatcagaaagtgttgttaaagctgagaagtcatcaacgactgacactgctgctgagaaaccacttccaagtatgatcactgagaaggtagaaagtgtagcaggcacattgaagccatctcaaagtgatacagcccttcaggagatcttagagaggaatatggctactgaggaaatactgcaaactgccatggctgttgaggatgcacctccaaccaatttgatcaccgagaagtcattaatgaaagatgcttcagaggagccagttcaaactaacgaaccatctgagcagccactgaaaactgaagagattgagaagccacaacaaagtgaaaagattgctacggacacgagagggagtgaagtatctactgaggagatgctagagcttgaaagtaatgccactaaattaaacaaggatcaatcagaacttgaagggctttcatctggtaggaatcctccaaacttccaaagcaatccaaatgctgggcagcgatcagagtccaaaggcattgtggccgagaaggcagctgaccatataatggaagctgaagatgatgtggatgctgagcactcatcagaatctcaaagcgttgcacctgctgaggttcgaaaggagcaaccatcagaacatcaaaaggatgtggatatggagcagctattggaacctcaaaatcaggatcatccttggaatccactagatcctgttagtgatacagctgccaaggattcatcagagcctaaaagtgacatagctacagaaaaacctgcagaatctcaaaacaatgcagaacagtcagttgagcagcaatcagaaccgcaaagcgataaatcaactgagaggccagaagtgcatcaaagtaatacatctaatgatgagctttctaggcttcaaaacgatgcaggtactgataaactatcagtacagtcatcagatcctgagagcaatgcatctgtcagtaagccatcagagtctcaaactgatgtggctaccatggaggcactggaacctcaaattgatgctcctcctgataaggcaactgaccagccagtgaaacctcaagatgatgcatctgctaagaatccaatgggaactgaaagtgatgctgtttgtgataaaccttcagaaagcagctcagatactgaaacacttcttgtatgccatcagaacagcagcataaccactgatgaacctgtacaaggtggcatttcttatgatacaccacatcagagaagtgcacccatagaaacaacaccaggaagtgaaacagttgttgacgattgcatacatcacgaagataccagcagcaaaccatcagaggaaaacaaagctattgaggagccagaagaggtgagtgccaagctgccagatgaccatgtaacttctgagaagtcgtcagaggaagacaaagaaaacgcagaggcatcagtagacagtgctcccctggggaacccattggaggtcaatgaggagagctccaatccttcaggggatactgtaactcctgagaagccactggaggaggataagacgagcgcagagccatcagaaagcgatgcatcctttgggaaaatattggaggccgatgaagtgagtgccaacccatcagaggatattgcaactcctgagaagccactggaggaaggtgtgggaagtgtggaaccatcagaagacaattctgttcttgataaaccattggaggaagaagaggttgatgccaaaccggtgaaggacgttgtaactcccgagaagccattggaggaaggctcaacaactgcagagccattagaagacaatgctgcccatgaggaagcaaaagaagaagatgaggtgattgccaagcccctgtccagtgtggcacttgagaagtcactggagggaagtgaggcaagtgtagagccatcggaagacaatgctgctcttgagaaaccatcggaggacgacgaggcaaatgccaagtcatcagaggacagtgtatatgtggagaagccacaacaggaagaagatgacaacggtgtcaaggcattagaggagggcgtgtcccctgagaaatcagccgctggcaaaccattagaagaagacccagtccatgagaagccagcggacgcagtagctgagccgtcatctcaggacgacactgccactgaaaagccctcagctacaactgacactgcagaaactgcatgagacatcagttagctggttaaagttagttagcaacagttttaaacggagtgtggatcgaatactattggtcatagttcggcgtggcttctgtttgtttttttttttggtggggtgggggtggggtataatgcttgagttgtaaaatttgagggaaagaaactatagtattgatttggtttttttacaagcaataatcccctcctccacatgttaggaggaggataccattgaagttctatacataggatttgtgtgcggtttgattttttgtttggaagttgtactttgtaatcgattttgtgcaaatatgactgtgcttgctcattattcggttttctgcgtgtaaattgatctagcaagattttatgtgcaaatggtgtggctaagctttcaataatactag

SEQ ID NO: 15037 - DNA, 1970 bp, Zea Mays
cttcctgtcccattggcaacttgcgcgctactctgactcggagtggccgctactctaccccacccacacccttccgcccgccgccactaaaccctagcgggacacccgccttgctcgcgccgcctcatcctctcactcctctcggacccccggtggccggtgcagagctgcgcgaccgagaaccgaatctgtgagccatgtcgaccaacaagggcagcgcggccaagggcggcggagggaagaagaaggaggtgaagaaggagacgaagctcgggatggcctataagaaggacgacaacttcggggagtggtactccgaggttgttgttaacagtgaaatgattgagtactatgacatttctggttgttatatattgaggccatgggcgatggaaatctgggagctactgaaagaattctttgatgcagaaattaaaaagctgaagctcaaaccatattatttccctttgtttgttactgagaatgttctacagaaggaaaaggaccacattgagggctttgcacctgaggtagcttgggttactaaatctgggaaatctgacctggaagcaccgattgcaatccgccccacaagtgagactgtcatgtatccatacttctccaaatggataagaagccaccgagacttacccttgaggtgtaatcaatggtgtaatgttgttagatgggagtttagcaatccaactcctttcataaggagccgtgaatttctgtggcaagaggggcatactgcttttgcgactaaagaagaggcagatgaagaggttctccaaatattggaactgtacagaaggatatacgaagaatttttagcagttccagtttccaaagggagaaaaagtgagatggaaaaatttgcaggtggcctttataccaccagcgttgaggccttcattccaaacactggtcgtggcatacaaggcgcaacctcacactgtcttggtcaaaactttgccaagatgtttgatatcacttttgagaatgagaaaggtgttagggaaatggtttggcaaaactcttgggcctacacaacccgctcgattggagtgatggtgatgacacatggtgatgacaaaggcttagtattaccaccaaaggtggcgccaatccaggtaattgtgattccagtgccttataaggatgctgacacaactgccataaagggagcctgcgaatcaactgtttacacactcgatcaatctggaattagagcggatcaggacacccgtgaaaattactctccaggttggaagtattcccactgggaaatgaaaggtgttccattgagaattgagattggtccaaaagatctggcaaacaaacaggtgcgtgttgtccgccgggacaacggtgcaaaggttgacatccctgtgaccaatttggttgaagaggttaaagtgttactggatgagattcaaaaaaatctgttcaaaacagcccaagaaaagagagatgcctgtgttcatgtcgtgaacacttgggatgaattcacaactgctctgaataacaaaaagttgatcttggctccatggtgtgatgaggaggaaattgagaaaaatgtaaaaactcggacaaaaggggaacttggagctgcaaaaacattgtgtactccatttgagcagccagaacttccagaaggtaccctgtgctttgcatctggaaagccagcgaagaagtggtcgttctggggccgcagctactgattgcctgtgctgggattatttccggattcagttctattctcatgtcatcactgctgacaaaagccatcgatttcctgtggaccatgctattcgagtttgaatgttgcaaggatgagaatacgtacattcttttactggcgtgcagtgttataattagaaaaaaacgcttcatatttgattgcaacacataattctgactggaatttaactggatctctttatctcttattaaagtagaatttgtta

SEQ ID NO: 15038 - DNA, 260 bp, Zea Mays
atggatagtgtgttagtcttctatccaatcgaagaggttctgatggcggatttcttcatggctgaccagctaaccagccagatcccactgctaagacacctcgagttcacggggtgctacttcatggctaaaactttcagaactcacgcgtatggaagttgtaccagcggctcccaattcaagaacctggcatacgtgctctctttcctgccatactactggtgagcaatgcagtgtctgagaaggtacttggaagaagg

SEQ ID NO: 15039 - DNA, 702 bp, Zea Mays
ccaaaacaaaaaaaaggcattttatacggcagcattctctggtttggctgaaccactaggagtggttgctgtagctttgttgtttccaagcagtttgaatcctgacattcttgaaggcctacttggatctgtgggtggtgtcatggctttcctcactttgcatgaaatgctgcctcttgcatttgactattgtggccagaagcaagctgtcaaagctgtctttgtgggcatggcctgcatgtctgcaagcttgtacttcttggaagtcagcttaccaaaggagataagcttgtagcatcgcgctgcaggtactgggaggccatagcctgtcagtagatcctgaattctaggaggaggaacagcacaataaaaccatgaacagtgactactggtgtgccgccattgatattgtccatcttaccgtgaaaggagggagaaactgcatttccccagaatgtattccccagattcctcgtgggaccatatgaaagaattgaaaaatgtactgtagtactctgtcgtccggcaatggaagcttcgaagtcgtcaactaaactatttctagcactctcgtcggttgacaatggaagattctatgtaaaaacccatcagatagatgttaacctttaatctttaatttcttaaaagtacattgaaataagatactttgctttcaaacaccccctatatttagtttgaacc

SEQ ID NO: 15040 - DNA, 1485 bp, Zea Mays
gctaggagatggactgcgtcgggctgcggcccgggttcagcctcgtggagaaggccgtcgcgctctactgggaccgcggggagaaggagctagctgtcgagtttgtcagagacgtgctcaggagagggggactcggagccggcgcgggaggggagcacagctctgccagtggcgatggtgagcggggagggcccgttggctacctcgcctggaagatgatgatggatggagactatcggaatgctgtcaaattggtcattgaatttaaggagaccggtctcaaacctgaggtgtatagctatctcattggcttgactgccttggttaaagagcaaaaagaattctcaaaggctctgcgaagattaaatgcatcggtgaaggatggctcaatttctaaactggatgctgagagcatgcatagtatcaacaagtatcaatcggatttgttaagtgatggtgttcttttatcgaactgggtagtacaagagggcagcagcgaagttctaggacttgtgcgtgagaggctcctatcattgtatacttgtgctggttgtggcttggaagctgagcaccaactttgggaaatgaagcttcttggccgagaacctgatacacagctctatgatgttgtattggcaatttgtgcttctcaaggggaagctgctgctgttcgccgcttgcttgcaggagtcgagtcaaccagcgccggaagaaggaagaagtctatgtcatggctactgcgaggctatgtcaaaggtggcttcattctagacgcctcagaaacactcattcagatgctggacatgggcttgcttcctgattacctggatagagctgctgtactgactgcactgcggaggaacatacaggaatccggcagcctagagtcctacttgaagctttgcaagcgactatctgagacagatctgattggaccatgtattgtgtatctatatgtccgcaaattcaaattgtggatggcacacatgctttagagttctgatgaaccctttcgtcatatatccactcatggcaggtacaaaatggagatctctaaaaaatgtgtgtggctcaaacgcttgtccctgatgaacaagacatagaagcttcaatttcggtgaaccggttggtacataataatggttccttgtatatttttgaccgaagtagaggtatcaactggttgtttgttgtaaacagcgctgttgtagtactctgaacagagtccatatcgtacatgtaaattctctgtgtcactgttctcatatgcagttgctgttgaaatctgtgcgttactgcagcctgtaggggataggcaaaatggaaacttttgttgatataaatataatgtacagttctgtcgtgactgaacttctaaagttgtaccgagatgaacttctaaagttgtaccgagattacacgatacatctctgtttttctgtttgtggtgtggtttgtggcagtaactgaatgtaacttggtttg

SEQ ID NO: 15041 - DNA, 787 bp, Zea Mays
cagacccctcaaagaaagcagagtaggctgatttgctagtgtagcaaccggattgagtaaacttccacacatgctgatctggcccccctccaagggtcacaccctccaagacatcccaaatctgaagaatatgtatagaaaggcagctgcactttgggttgaactgcgtgttgaactcctatcagccattgaatattatgcagaagataaagtcaattcagctcaaatttggcggctatactgggcaagtcatcagcgtttctttaggcatatgtgtatgtctgcaaaggtacctgctgtcgtgagattggcaaaagaagccttagcagaagaaaaatgtgtggtgattggtcttcagagcactggagaagctcgaacagaggaagctgttgctaaatatggcattgaattggaagatttcgtttctggtcctagagagcttcttcttaagctggtagaagataattatcctttgcctccaaagcctgattgttttgagcaagatgaaggtgaagaaaaagtccaggagtttcagcacaagcggcattatggatctgacatgtccttaaaaggacgagttagtaaacttggaaaaaaggaagaccctagttccagcatggtcatcaattgggtcaaggatgagtctcatctctggtgtagggctggagccagtgatttatctagcatccttatgctccagtgatcaaagtggtatctttattttgagtctccatggtcacgggtctagatgtcttttgctgttatttttctccctctaacctagtgt

SEQ ID NO: 15042 - DNA, 2194 bp, Zea Mays
aatagaaaagcgacggggaaagggtaggaagaaaaaaagagaaaaaaaaacgccggaggccggagggatcacggaatctgagcccaccactcccccgcccccacttgtataaagcgaccccgataccagcccgtcatgggaagaaaaggaaggaagaagggcctcctgtatcctctcacttccctcagtcctcgtccgtctgctccctcctctctctacctagctctagctagccttcctgtagcgcggcggatgtacgcggagtggatggcggcgcacggccggacctacaacgccgtcggcgaggaggagcggcggtaccaggtgttccgggacaacctccgctacatcgacgcgcacaacgccgccgccgacgcgggcgtccactccttccgcctcggcctcaaccgcttcgccgacctcaccaacgacgagtaccgcgccacctacctcggcgccaggaccaggccgcagagggagaggaagctcggcgccaggtaccacgccgccgacaacgaggacctgccggagtccgtcgactggagggccaagggcgccgtcgccgaggtcaaggaccagggcagctgcgggagctgttgggctttctcaacaatagcagctgtggaaggcatcaaccagattgttacaggcgacttgatctccttgtctgaacaagagcttgtcgactgtgacacttcgtacaatcaggggtgcaatggaggtctgatggactatgcatttgagttcatcatcaacaatggcggaatcgacaccgagaaggattacccttacaagggcacggacggacggtgtgatgtcaacaggaaaaacgcgaaggttgtcactattgacagctacgaagatgtaccagcgaacgatgagaagagtctgcagaaggcagttgcaaaccagcctgtcagtgtcgcaattgaggctgctggcacagcatttcagctctacagctcgggtatcttcactggaagctgtggaacagcgctggaccatggtgtcacggccgtcggctacgggacagagaacggcaaggactactggatcgtgaagaactcatggggcagcagctggggcgagtccgggtacgtgaggatggagcgcaacatcaaggcgtccagcggcaagtgcggtatcgcggttgagccgtcatacccgttgaaggagggcgccaacccgccgaaccctggccccagcccgccgtccccgaccccggcgcccgccgtgtgcgacaactactactcgtgccctgacagcaccacctgctgctgcatctacgagtacggcaagtactgcttcgcctggggctgctgcccgctcgagggcgccacctgctgcgacgatcactacagctgctgcccccatgactaccccatctgcaacgtcaggcagggaacctgcctcatgggcaaggacagcccactgtcactgtcagtgaaggctacgaagcgaaccctggccaagccgcactgggctttctccggcaacacagctgacggaatgaagagcagcgcatgagaaaacgcagcgtggcattaggtcgtcagcaacctgggtggtcgattagagcccctgcgtgggaaatggtcacctggccccctgattgacgacggaagcatggctcggcggccgctatctacctatatcgattttagtaggtactcactcctgtacataaaccctgcagaaaaaaagagggttcagttgtttatggaaccctggcaaatttgctttcgcgcacaatgtaaaactcagctaagctccccggcgtagctcgacacagctgcgatctattattatttgatgtaatggggactgatattgcaacgaccagcaatgttatactacattcattttcttggacgcgctctgttatgtgtcggcggtgataccctctgatggtttttgtatttggttcttttactaacggagagtggacaatagattctagcttcattgcatcacatcagtggcagcagataccagcacgagtgcacgagttacacgagcccaagaggccagccaactgttggaggtagagatggcaatgggtaaatacccacgacaaaaaaataaccccaccgggtcacccatatacactggtgggtatggatttacccccatacccatacccacgtgggtatgggtcacccgtacccacaaaaattaaacatctatcaaaata

SEQ ID NO: 15043 - DNA, 796 bp, Zea Mays
aggtacacttgctgccttgcgaagaatagcacatgaagaaggcatccgaggactatacagtggtctggtccctgccttggctggtatcagtcatgttgctattcagtttccctgcatacgagaagataaaagcttatctggctgagcgagataatactactgtagaagcattgagttttggtgatgttgctgttgcgtcgtctctggctaaagtagctgcatcaacattgacatatcctcatgaggttgttcggtcaaggctgcaagaccagcgagcgcactctgatgctagatacaagggtgtagtagactgcatcagaaaggtttatcataaagagggtgtggctggcttctacagtggatgcgccacaaatctattgcggacgacccctgccgcagtgataacattcactagcttcgagatgatccacaggttccttcttgatctattccctgctgaatctgaaccgcacatccaacctctcaagcattgatcatacaacatttgtaccctatccatgctgccattcgagtttaggaccccagcaaccatccagcaatgttgtttactgtgccagatggctgttgtaaaagagagaattgtttttttcccggatatgcaacagtaattcggaagttcaaacaatagtgttggctgagcattagcaacttgtatgtaatagatttgttagcatgcatttgcgggaggtatattgggtatgttttcttgatgatgatgaaaagaaaacaatcttaccacatatgaaagaatgattgctatatttttttcccacac

SEQ ID NO: 15044 - DNA, 2021 bp, Zea Mays
gcaaaattgcaaatggctcctattctgtgaccgaaatttcacaccaggcgctgcaagcgactgcaatggctatgtaccagcgctccaagcgggcagccgggaactagctcatcagtcattactgacggcgtaatcttcatccgagtggtcagtggcgtctacagtcgcagcagcttgtgcgcgcatggctagcaacatgtacggcaccacggtggcctgtaggatgtgctacagagaccagtacaggccgccgccgcgcgacttcacttgcgaggccaggaaatcggaggccaggaggtggggaaacgggtaccacctcatccccaggctctgccagtggaagcccagaggcagcaagtctgatggctcactgctcggcgacggccacggtggccgcgatgctcgctgccactcttgtggttcccataacagctgcgagtgcgaaactagagactgcgatgctatggaagatgctgctgcgagctcttaccgagatttcaagcaacattcaaggggaaatcctcaattttcagatgatcaagtttcatcgaagaataagtcagcctatgctagtcaagggttggctgaagcctgcaaatttgtttacaatgatgctaagtttgtaaatgaaagggctcaaaatgacattctattactttcacgtggcataacaaggctgaacaaacgcgcatgccaggatgctgctgttttgggcctggggtttctcaaacttgatgctcgtgcacggaaggatactcaaaagattgaccacacagtgaaggagagagcagcgcttcttaaccattttgccagagcatttaaggagcgagctcagtcagacttgaagaaagctgcagacaaacattggagtgatggtgccttggaggcagacctgcgacgagctgacttggttgttaaacgacgtgccatggaagacgctttcatggcattgaagtttgttcaggatatccatgacatgatggtgaacagattatatgagcagcttccgaaggacggttcatcttctcgtacaaattcaacagggtttattacgcttgagaagaacgggaaggctcttgaactgtttcctggtgaagtttctgctgatcagatttatgccatagaggaagcataccagagtatggcatctgccttttctgaagctgatggtattgactacacagatcctgaggagcttgaattgttggtagcaactctaattgacctggatgccatggatgggaaaaggagtgtttccttgattgctgaatgttcaagctctccagatgttaatactaggaaagccctagctaatgcattggctacagctccatctatgtggactcttgggaatgctggcatgggtgcattgcagaggctggctcaagatcccaactacgccgtagctagggctgcatcaagagccattgatgaactcaagaagcagtgggaacttgaagaaggtgacagtctgaggtttgtgatgaaccagaatctggcctccagggatactgaggatgacaattcaccagcggatgatgccgcatgagtcataaacaagatgaaagattccagtttcagtggcaatggatcaaagcacaaggaaccaccatgggcagcacataagcattcccattttacgtttaggactgaaaatcagatagatgtgttctagttgaggggggggggggggggggggatgtgttctggaacttgggtaaatgggggaattatgaaaacagtgtaaatagaagtctgctccctttggatattgttcatgcatgaagcaaaatgttatatctgaaaagcgcgtaccttgtaccagagtatctagtcttaggtgctccttgtttttatatatagtactgtaatatggcaaaaattatgtatctggataacacatgtagcttggttttgtcggcactgcatattgaggattgagtatgacttgtaccagcaattaataagtacctttattcgggtaacaattgcacacaggaacatggatccgttataggatg

SEQ ID NO: 15045 - DNA, 1347 bp, Zea Mays
tgacggtcctcgctctcctaaatcccaatattttttcgtttttgtaattttccggcgtgggtggccagagagtgctaacacatgggaaccccttgaaaacctgaaggcctgttctgacattgttgatgctttcaataagcggtcaaggtcgcccagatcctgtggaaagcgaaagcgcaagactccaacaactccaacatccgatcctaacccttctcgtggcaaacgtggtcgaccacctcggtcggaggcccggagcatgcatagcatacatgcctcagaagtgaagaaactgccctgcaggacaagtagtaggagagcaaataataatagtaacaagacctcacctgggggccttggcgcagcagtgaatttgcttgggcaaagaatagtacaggagggtagttctggtgtggtctcagttgggtttccatctcaagaggctcccttatctgttagcttgactgatcaacaagatgcgcagcaccctgctaatggttcattgaagatggacaatgaaatacgagcaatcacacctcagggtggacaggtgacaggtgctaagaagcgcaagtctggatgtgtaagaaggtttaagcaggatgaagtaacacatgagcaaggagatatccgtgatcgaacaagtgacaagccaggcaacgagactgttgattccacagaaggagatcctggtgataagaacaaaggggaggactctggtaaccaaattcatatgcctaagatcattaagatcattaagccagtgcgctattttgccacagttatggatggtgtgcagcaagttgcaataacattcaaggctctcaggtctgacggggaaatggtattcgtggacgataagcagttgaaagctaaggagcccctggtgcttattgattactatgagcaacaccttcgctacaaccccacctcgtgataaggatgcattgacgctgctgggtttcagttgcatgtgctgcacctatgtttggaacaaatggaaatgtatttaaatgtagcattttttgtgctagatgcatttgtagtattatttgagtaagtagataattagtaagtagccaatgctgagtgcaagtgaaacatgatagcatggtttgtcaaactaactgctcgatattgttactgttttcaaattgtcttattaatcgtgataatcatgattaatcgttcaagtcgatttggaccaatagtgattaatcgtcaaagtcatccgattaatggtgattaatcatgattaatcgtacaaatcggttagctagaatgactagcaagttgtacgacttcaaaacattattgcgtgtattatatgctaagttagttgcttca

SEQ ID NO: 15046 - DNA, 1409 bp, Zea Mays
cttctagcatatacttgtctgccattatagatcatgaaaagggcgtcggagactctaatacctgtaactctggagcttggtggcaaagattcatttattgtgtgtgaagatgtagatttacccagtgttgttcaagttgctactagagctgctctgcaatctagtgggcagaattgcgctggtgctgaaagattttatgttcacgatgacatctattctgcctttgtttcacagatagtgaagacagtcaaatctataagtgttggccccccattatcaggcagatatgacatgggtgcaatctgtatgattgagcactctgagaaacttcagaatcttgttaatgatgctctagacaaaggtgccgaaattgccgtcagggggagttttggcaatcttggtgaagatgcagttgatcaatttttcccaccaactgtcctggtgaatgttgatcacacaatgaaaattatgcaagaagagacatttggacctattataccaatcatgaaattcagttctgatgaagaggctatcaaacttgcaaacgactcaaaatatggtcttggctgtgctgttttttctggcaaccagaagcgtgccatcagaatagcgtcccagttacactgtggggtagcagcaatcaatgattttgcttcaagttacatgtgccagtctttgccattcggtggtgttaaagacagcggattcgggagatttgctggcgtagaaggcttgcgagcttgctgccttgtgaagtctgttgtagaagatagattgtggccatatattagaacagtgatcccgaagcctatccagtatcccgtctcagagcatggatttgagttccagcagttgcttgtggagactctgtatggctatagcgtgtgggacaggttgcggtcccttgtgaatcttataaagatggttaccgagcagaattttgccccgacttcaaatgcgaccacgaagaaaaggcgatgagacgaatgcccggggggttcattgaatctgtttatggtaagtctgatctctggacgctgtaaacctccccaagctgctgtgatcggccttgtttgctctctgaaacaatctcgagcctgggagcttgtgtattcaagcgctttagctttcatttcagaaccttcttttctctctctctcccttgcttattaacacccaaatgcgtgggcaatggaaatgaaattccactgtggatgtgctaggaactgtcaatgtgctgccgctgctgtgatttgtgaacatcatcggtattgagggtgaaggtgtggtgtaccatgcatgtgctgggattaaatgccctcgcgcatgtagcaaacagtacgctttcgcgcaattaattggcctgcagcctcctctttcgcgcatcccttgcttgagacaagaccgcc

SEQ ID NO: 15047 - DNA, 1226 bp, Zea Mays
ggctgaggctgccgtgtccacgttgcactccacattcccgtttcatttcctttcatttcactcctcgcctcggctttgttggaacgtaaaaaaaaaaaaaaatggcagctccctcgtcgtccctcaccccgccgccgccggcagcggctgtggcctccacaacgctgtccgggaacctcacggcctcctcgctcctgtctattacgccgccgcgaccgcgcctcgccgcctcgcaccgccgggcggtcgtggccgcggccgcgtcgccccgtcccccgccgacaccggagggcgacggcgacgagcaggaggtggagagggcgatggggatggacggtggcatccccgggacctcgggggagtttctgcgccgcgtctcctcccgcgcttacggcatgcggcgccacctcatggagtcgctcgactccctcgcctacgacgtactggagacaaacccatggagagaagattccaagccagtctatgtgctagccacaagcgataaccacctatggacaatgaaaactcgcaggagccgcaagtgagaatttattgatgctgttacatttagcttgtcacgagtctgtaatttactgaacaacatgaactgctgatgttatctatcattgtcttctgcagtgaagtcgaaagggaacttggaaagcttttctcaaacggagggggttctggagttggaactaaatcgaagtactctggcaccaagtttaacatggttgtcgaagatatcagagatggagtactggtatttgaggatgaggatgatgctgtaaaatactgcaaccttctgcagggcggcggccaagggtgcgagggaattgcggagatagaagcatcatcagttttcagcatgtgccgtaaaatgaaagcccttgctgttcttttccgccgtggaaagactcctccattgcctcaaagcctcgagcgcgacttgagggcgagaaagaggtcactggaggactagtgctgtctgtttacgctgcatagaagtgttaattgtactcatctagctgttggaagcatgggccctaggccttgtatacatcatagtagtacatagcagtccctagctgaactggaaccgagcctgacagaaaacacagacataattgctcgagaccagaaatctctttgaaattggatggatgttcttgtaattatgagcaacatgtttacaatgaataaaatgcgatacatcaaaaaaagaa

SEQ ID NO: 15048 - DNA, 1574 bp, Zea Mays
cgagttcccggacccgagctccccgtcgcccccctctctctcgctcacgccctttattaacgcacagaggacagcacactgtattgcgggaactgaaagcaaaccaaaaaagaaagagagggggagagacacagaggcctcactccacacactgtcttgtctctcagtcccagagctttcttggatcgcgaggaatccactggaaattttgcaattgtagtagagaactgtatcgtccgacgaaggtgcatggtgttggccatgggtcacggcagggaacagagacgagcaggtcggcgctctccccccagctcattgatcctgtcctcgctataaggtagtcctgcggtggcctccgaatttcactcgatcgaacacgacatgaagcggccacgcggcgccagtccccctctggctgcgatgaccaatccgaacgatcaaggagctcaaggcgaagctcggggacgaggaggcagcggcgagcttcacgtcggtcaaggcggagccggcggcctcggacgggcctccccccgtaggggtggggtcgtccgagagtgactccagcgcggtgctgaacgacgcggacccgcccgtggcggaggcgccggtgccggaggtacggggtactcttcttgacgcgcccggcgccgtggcggcgaaccatggcggcgtgttcttccacgggagtttcctgaaggtggaggaggacgagacggggctcctggacgacgatgagccctgcggcgggttcttctccgtggagcagccgccgccgatggcgtggtggaccgagcccacggaacactggaactgaaccgaggcggaggtagatgcagcgcagcgtagactcgggatctgggccgagcggtggaggaataaagaattcggagcgagaggcgggggcttttctgcaaattttgtaaaatggagttttacgtagccctctttcgtcaattctcgcgcgaatattttagcagtagcagtagtctttaggaacccagtcgagatcagtacctggttgcgtttggactcgaatgcaaaaaaaaatgcaagaaaaagagatgagaccaaacactgatgcagaaaggggagagagggacagtgggaagaggagtgtagaggaagagctgagcgaggtagggagtaaaggacaagctgtatgtcactgttagtgggcccagggccacgtgaaagtcaggcattgttggcgcccaattgaccgccggacttgtcagtgatgcggatcggcgacgtgaacgtgtctggccgtgcgctcccccaatggcctcttccgcggaagcgtggctctggctccttcgtcgacctgtcgtgcgtctctgtatctaattttggatgctcgccgacgccgctagatagctgtttggatgccgtgccgtgagaaatggcgatcgtttttgtgccctcttgctcgagcagatgcttgtccttgttataaaaaaaaaccctgcgaggtgttatataggctagtgtggggttctatctttttctccaataaatatgtagccctttataataactaatgaataaaagataacgcaagaaaaagattttct

SEQ ID NO: 15049 - DNA, 1864 bp, Zea Mays
tctctctgcctctctggtttctgaccattcttgacgcggtcacagatctatccgacaagatggtgaagatctgctgcatcggtgctggctatgtcggtggcccaaccatggctgtcattgccctaaagtgcccagacattgaggttgtcgttgttgacatctccaagccccgcattgaggcatggaacagcgacaccctcccgatctacgagcccggcctcgatgatgttgtgaagcagtgcaggggcaggaacctcttcttcagcactgatgttgagaagcacgtcgctgaggctgacatcatcttcgtctcggtgaacacccccaccaagacccgtgggcttggagctggcaaggctgccgacctcacctactgggagagcgctgctcgtatgatcgccgatgtctccaagtctgacaagatcgttgtcgagaagtccaccgtccctgtcaagaccgctgaggctattgagaagatcttgacccacaacagcaagggcatcaactaccagatcctttccaacccggagttccttgcagagggcactgctattgaggacctgttcaagcctgacagagtgctcatcggtggccgggagacccccgagggcaggaaagccgtccaggttctcaaggatgtgtatgctcactgggttcccgaggacaggatcctcaccaccaacctgtggtccgctgagctctccaagctcgccgccaatgcgttcttggcacagaggatctcctctgtcaatgccatctccgctctctgcgaggcaaccggagccaatgtctctgaggtggcttacgccgtgggcaaggacacgagaattggccccaagttcctgaacgccagtgttgggttcggtggctcatgcttccagaaggacatcctgaacctggtgtacatctgcgagtgcaacggcctgcccgaggtggccaactactggaagcaggtgatcaggatcaacgactaccagaagagccggttcgtgaaccgcgtcgtggcctccatgttcaacaccgtcgccggcaagaagatcgccgtcctcggcttcgccttcaagaaagacaccggtgacaccagggagaccccggccattgacgtctgcaagggcctgctgggcgacaaggcccagatcagcatctacgacccccaggtgacggaggaccagatccagcgggacctggccatgaacaagttcgactgggaccacccgatgcacctgcaaccgacgagccccacggccattaagcaggtgagctgcgtgtgggacgcgtacgaggccaccaagggcgcccacggggtgtgcatcctgaccgagtgggacgagttcaagaccctggactaccagaagatcttcgacaacatgcagaagcccgccttcgtcttcgacggccgcaacatcgtcgacccggagaagctgagggagatcggcttcatcgtctactccatcggcaagccgctcgacgcctggcttaaggacatgcccgcggtcgcttaattcgtctgaggtgctccattggattggatccggggaaggaagaggaactggttgaccattcttcattacagtttgttttttgcaggattcttaaaagttggacggcgctgctagtattccatgtttcgtgttttcatattggaggacgtctgtagatgtaaaaaatcctcgggcgcttgtgctcggcttgaggaaatatgcttgtacggttgtaccctggacccgctatagctggttggttcttcaagttgtgttcctatagaagccaaagttactacacgatcgatatgttctttttgcataataacaatacttgtctcacgtttcatcctttcatctttccacggagaatgttttcttct

SEQ ID NO: 15050 - DNA, 997 bp, Zea Mays
cagagaggattgaaaaagaaggaaaggcttgtgtcattgttgtgaacaaatgggatacaatcccaaacaagaaccacgagagtacaacacattatgaacaagatgataatttctgctgctgctttggttgagaaggaaaggtctagaagactcagcacctccattcttaatcaagttattagagaagctatagcattcaaatcaccaccaagaacaagaggtggcaaaagaggtcgtgtctattatacaacacaggctgccgtcggtccaccaacattcgttctatttgtaaatgatgcgaagctcttccctgacacgtaccgccgttacatggaaaagaaactccggtcagacgccggttttccaggcacccctattcggttactgtggcgtagcagaaggcggccagacaaacgaggtaaatctgctgacagtagagcgcagagcccaggaacccctagtgaagtggctctagccgcctaactaaaccgcggcctccagaaatgctcgccacagatcagctcgaccactgggaatggaattctatcgaggcggcggcagttgcttgctccaagaacctggatcggctgaggagctagctgttcatggagtagcgctctcatgttcgggccttggagattttgttgcgtctatatactactagtacggatcagacggagaaagcacattgggccaatgaatgaatagtcacacttcaccgacagagctccaagcacgctttttccacagcgctcttggaacatgtaagattgtaccgaaagaatggcgttagaatgaccatgtaaatgtaatcgtagactgagttctcggatgtgtgggtaaacagcatacttaggtgccgtttggttgttttgtttacgaaatgtaacttaattggtaacggtaatatgttaggagtattttattttgaacgagaaaaaggcgtgcggactgccaattacatattcaagaagatatacagcgccaaaactgtggg

SEQ ID NO: 15051 - DNA, 2505 bp, Zea Mays
caccaccaagatattgttagttctttacaggatatgcgatgtactggatcggaagtacgtgacagcaaaaagtcgagttctacaccctgagttccgtggtcgaatggtctcggcattccttttgcaccatttctctgaggtttctgattacaactttacagctaacatggagacagagctagataatgtctctgctgggtcaactgaatggaagggtcttctgaaagactactgggaacgattcagcaaatattgtgcagatgtgagtaaactggatggcagaaaggtagagagaatgcttgaagaaaaatttggtcctatcctcttttccgatgtttacaaggattgtagaatttgccctagttgttctgaaggaaccttgagattcaaagttagtaggtacggtgaaggctattttgtaggttgtgatcgacatccaaaatgcaagtacattgctcgctcactgtcacagcaagaagatgaaactgaacccatagaagaaaatgcaaaatcttttgaacccaggttacttggtgtcatgcctgattctgatcaaaaggtgtttttgaaacaagggccatatggctactatgttcaagttggagaggacaaaaaaggtctgtttccaaaaagggtttccctttccaaggtcaaagatatagactctgttactctagaagatgcaattgagcttttgcaatatcccaaaatcctgggaaaacatcctgaagatgataatcttgtacttataacacattctaaggttggatacaacatcaagcacaggagatttattgctcaagtgccaaagaacatggacccaaagaagatgacacttgagcgtgcactcaagcttctgagtagtaaaagtgtcagacggattggtcgtctaaaggggaaggtcgaaaagaaggaacccattgaatggcattagctgagcctgcctgcactcgtgtgtgcaaaaaaaaaaaaaaaattcagagagaagtcaacattcatagcatgcagaggttcagcctttcgtgtgtttaactgcttatgatgagagcggagaagggggccccatgtgtgacaaagaacaagtgccaagggaatgcacaaccagacatattcgggtcatatctttgatttcatatttttcctttagtcatcaacatcataagctgcattgaacgcgcggacacagaataccagactataaaattctgagcttaacaaagatgagagggtggtttcatcacctattttacataatcgctgcatttcctaattactttcacattttgtactagagataaatgcatcttttaccacaggaaacccattttagttgtgaccgtcgtgtaggttatgtactcatgtgtaagaattgtatatgctacttcacagctgaaattccatctgttttgcactccttttttttaatttgttttcaccggttgatcccgaataacggctagtcttagtaatgctgtcgcgggaatttttttttttacttttgaatacctttacgaacatcgtaagtttttcaccattcaaccgattggatccacttttaaatgtctttagttcagtagcactacttagttttgtctatgaaaaaatgtctcaccaataagtactggagagatgtaaaagtaaaactgagctgtggtataggtactagaagacgtccacgttctttcactcatgcatagcatagcctgttggtcaaagtaaatatcagacagagtaaaatacatccagacagcaaacttcaatttcagacattcctgttctagctcctggttcgttgacacactaaagcacacgttcacctctccattctcggtcacgcagagacctcagcgccaccacacgctcgccatccacctactcatacctgtagatgaagtcggagttgccgaccatggcattgagcacctgcgagacgaggaagccgctgccggcgatgacggccacgatgagcagcgccgtgacggggttcttgagcagctccactatgggctgcagcaccgtgtacgccacccctgtgctcaccgtcacaacgtacagcgcgtaccgccgcatgttgtcccagaactcctccaccagggggccctctggccccagcgccagggcggggcctggccccgcggacagggccagcgccacggtcacgcccaccgtgatgccgccgaggagcgcccacgtcggcagagcgcacgtcctgccgccgccgccggcctcgttattattgcccgctgcagcgagctcttgacgcaagtggctctcctcctccctagctgctgcgatgctttcgtgaggcgctatggcaaggaggcgttttgcgtgctgctgcggggttggtggttcacaggaggagagcccagctcggacgacggcggtgaggccatggccgcgtccgggagacagccgatgtaggtggtggaggagagagagctggttcatcttgtgcaggcgccgtcgcttggtggttgttttttgtgataaggcttctccaac

SEQ ID NO: 15052 - DNA, 1515 bp, Zea Mays
aagattttttgaagtgcaaatttatattcagaaactttgttgtactctgtcagtgatggatttattccaagatagacaagggatatatttctccatacttcatcacaaatcaagacaaatcaattgttgaattcgaaaatactagagtgcttttaactgatcagcgtgtgaatgatgttcaagagatacttcccttgctggagaagacaacacagttgagtgtccctttattaattattgccgaggatgtgtcgcatgaggtatattcaacactggttcttaacaaactgaatggattgctaaatgttgcggttgttaaatgtcctggtttgggagatgaaaagaaggccattctccaagacattgctattatgacaggtgcagatttctttgctagtgaccttggctggggtcttcatggcattacttctgatcagcttggtatggctcagaagatcacaataactagtgaatccacaactatcatagcacatccttcaatgagaccagagattgaggccagaatcatgcaactgaaaaaagatctagaggagacaacgagttcctatctaaaagaaaggttctctgcaagaatcgctaaactttcaagaggtgttggagtcatcaaggttggggcagccactgaagctgaactcgaggataggaaactgagagtagaggatgcaaagaacgcaacttttgcagccatcagtgaaggcataactcctggtggtggggtgacatatgttcatttatcaaagcatattcccagcatcatggaccttgtggacgacacagaggagaaaatgggtgtaaatatagttgggaaggcacttcttgtccctgctatgacgatagctcgcaatgccggggcagacggtccagctgtcgtggagaagcttctcgccagcgagtggcgggttggttacaatgcgatgactgacgagtttgaagaccttgtcgctgctggtgtggtggacccgtgcagggtcgcgagatgcgtgctccagaactctgcttctatcgcagggctgattcttatgactcaggctatgatgtttgacaagatcaagaagaagaagtctcccatccccgagattcctggtattccaccgcttcagataagccaaaaagctaaggcttgagctgttggatgctgccctggtgttgttggctggatgagttgtgttgacctaggaagcagcagaatgcccagtgagctgcccaaaccaggtagaacagtgagcacttggaatgcccatgttacactcgttatataatttggtggtcggtgcagtattacttgtcatgtctgcataaattttgcattggcgggtgagtcggcaaccaatttatgtctgacttgggaacgtaaacgaacgaatggttgatttgttgctacatagagggccccctttgggcatcatctcgagcaaagctattttgccttgtatctccctttgaaagcagatctgtttcatcaattaacatacgaggtaacacagtagcttgtag

SEQ ID NO: 15053 - DNA, 1355 bp, Zea Mays
gtagaaactagccaaaatcatgcctacagaccacaaagaatagagctggctaaatgcatagcgaacccatcctgtgcagcaaacgtagcatgcttgaacacgtgcaacaatcgacctgatgaaactgaatgtcagataaaatgcggagacctgtttgagaacagtgtagtcgatgaattcaatgattgtgctgtttcacgcaagaaatgtgttccaaaaaaatccgacgtcggcgagttccccgtccccgatccatcttcgctggttaagagcttcaacatggcagattttaatggcaaatggtacatttcaagtggcttaaacccgacgtttgacacattcgattgtcagcttcacgagtttcatgtcgagggagacaaattgatcgcgaacatcacatggagagtccgcaccccagactctggcttctttaccaggtcaaccgtgcagcgttttgtgcaggacccatcgcagcccggcatactctacaaccatgacaatgagttcctgcactatcaagatgactggtacattatctcatccaaggttgagaacaaggatgacgactacatatttgtgtactatcgtgggcgaaatgacgcatgggatggttatggtggttctgtattgtacacaagaagtaaaactgtacctgaaacaataataccggagctggaaagagctgcaaagagcgtaggtcgggacttctcgacgttcatcatgaccgacaacacctgtggtcctgagcctcctcttgtggagagaatcgagaaaactgtggtggaaggagagaagaccatcgtcagggaggtgaaggagatcgaggaggaggttgaggagctggagaaggaggaggcgtcactgtttcagaagctggcagaaggtctcatggaggtgaaacaggatttcatgaacttcttgcaggggctgagcaaggaggagatggagctgttggatcagctcaacatggaagcgactgaagttgagcaagtcttcagccgtgcactaccgttgaggaagctaaggtagctgcagagcaaaggacttggagaaaacaagccatcaagtactggccgaaacggattctatttgccacagcagtacccacagtagagattgttgaacagatacaacaaacatttttaattttcttttctttttcttttcttttcttttcttttctttgtttacccttttctgtggtcaaaacacatgcctacgttagccctatttgtaaagcatcaagagacaacgtaactttttcttgccaaacagagaaaaaaaacaagtgtacttaagactacgctgaccatctcttgcatgacaattgtttgttgttatagtttcctttgcca

SEQ ID NO: 15054 - DNA, 392 bp, Zea Mays
ggggctctcaaagggccttgcatctccagcgtcggcgtccacgacgccggggaccagcgaccatgcggccactttcctgttgcgctctcgtccgtctccacaatttgtgcagaccaaagacaaagtaagagtgtgctgaaagaagaaattgacctacttaaggtggaaccaaacgaaagcgaagtggatctagaaagaagcatttaacgactggccgcaccagaccaaaccgtagcagaactcaactgaaggcaactgcgggcccgcggccgcaatgagtcaacaggaatgcagtctatcagatgatgaaaagcagaaggaatcccttctcagagagtgaaatccaaaactgcgacatgagaaacacaacgcgcgcgaagggcgcgtgagat

SEQ ID NO: 15055 - DNA, 784 bp, Zea Mays
cagatgtcaggctcaggtcatgagtctgattgctagctaccatgggcccctcaatgagagtaaaaatcctgttgttagaagggtgctcactattaacaactcgaggtctagaatcggtgataacctcatggggcgacctccagagtctagaagttgttacctgcaacaaaatcaaggatgaggaaataactcctacccttgcagagcttttctccaatctcaaagagctgaagtggcggcccgacaacaagtcacttcttgctgcaagcctcgttggcactgggatgggaaagaagggcagggtatttttcaaaaggcttatcttacctgcccatcaacgaatcaaagggaaggtgctcaacaattcagcaggtgttgctgcttagttggattgctagtcgaaactaggctaccgcacaaagttcctagttcttgacttgatcaaagtcaaccacgtttcttgatactcaaaagccgtacacaatgtggcatctgttcttccacttaagaccaaggacagtcataactagtcagaacctggtagtttgatgatgcacagtttcgggtaccaggcgcctgatttgtgtttgtacctgtgttcatgtgttgtaactgacaagctgaggtttgctcagaggagcctgaccgtagtatttctgtatgaggaaaagcattgcttcataaattatggcagagttaaattatggatagaaccagtagaaccacatgtttacagcacatggtctaactgtcgaatgaaagtgtgcctgacgtctgacctgca

SEQ ID NO: 15056 - DNA, 194 bp, Zea Mays
taggtagagttgaatctgtcttttagcgaagctgccaatggctgcataaagcaagtgtcctatcatgcaaaaaatgtttgtgattcatgtggtgggagaggtcacttgccaaatgcaaagatatatgtttgtccctcatgtaaaggattgggaagagtaccctaaacgttttgtgtgtcttgccctgtctcatg

SEQ ID NO: 15057 - DNA, 3157 bp, Zea Mays
tggcactaggcctggtcagtggtcacgcccggttcccacatgtcagcgccaaacccgtcgtaactcgaggcccgccccgaccccgagtccacctctttcacccagcccggcgaccccgccgcgctcctgcctcgcctcgcctcgccgtcggcgaccgaccccacgtctgcccggcgatgtcctcctccgtatccattgcggcagagtgggatctcctctccgatcgcttctaccgccggctcacactctactcacctctcccatggtccaccccagccgcggccggcgcgacctcgtcctcctccggcgtcagcggtgctgtgatcggtcgccttgacctgtccacccacatcgtcgccgccgcgccctttggaggcccgatcgccgccgtccgcgacgactctaagatcgtgcagctccactccgagccatcccgccgccgcgtcctcctcttctcctcctccggccacccaattgcctccgcgccctggccaccccttctcccacgcctccactcgctcggtttctccagctccctcagcctcctcgcacttctctccgacggctcgctcctccgcttccgcctccccgatctgcaacccagcccttgctccagtcccgttcccctgctcccgccggcctccggcggcgtcgccgacgctctattctggggcggcggtgtagccatcctcacggaagacaaccgcgtcgtggtggccactgacatcgaggtcgacgatcctcacccccgtcacctcgccgacccaggcatcggtgatgaggaacatgttctgtgtatggccgtggtggaggcacagtttgtcatgtcagggagcccagaagtgctgcttgctgttggcgaccgggtcattgcggttgacgaggatggcgtacaagtgcttggggaagagctggagattggacccgtgcagaagatggcagtttcacccaatggcaagctcctcgcagcatttgcacatgatggtcgccttctcgttattcccaccgatttctctaggatcatattcgagtatgagtgcgaatctgcattgccaccagagcaaatagcttggtgtggactagacagtgtactcgtctactggcctgaagtgcttttgatggttggtccaaatggagatcctgtccaatacaattatgatgaacccataaaactgattcctgagtgcgatggtgtaaggatcctatctaactcaagtatggaatttctacaccgagtctcagactctaccacgtcaatttttggcattggaagcatgtccccagcggcattactgtatgatgctcgtgatcactatgacaggcaaagtgcaaaggcttatgacaactatcaattaatatcatcttcattgcctgaggcaattgaggcttgcatcgacgctgctggccatgagtttgatgtttcacgccagcgcacattgctgagagctgctacatatggcctagctttctgcagtcgatttccacatgaacgctttcaagaaatgtgcaaaatgttgagagttctaaatgctgttcgtgatcctgagattgggatgccactgaccattcatcagtacaagctgcttactacatcggtgctcattggacgtctcattaatgctaatcagcaccttttggcccttcgcatctctgagtaccttaacctgaacccggaggttgtgataatgcattgggcatgtgagaagataacagcatcaacaactcttccagatacagtccttcttgatggtctgcttgataagctcaggctatgtaaagggatatcatatgctgcagtggcagctcatgcagataacagtggtcgacgaaggttggctgcaatgctcgttgatcatgagtcacagtcctctaagcagatccccttgttgctcagcatcgatgaacaagacaaagcattatcaaaggcaattgaaagtggcgataccgatcttgtgtaccttgtgctattccatatttggcagaaggtagctgtagagaagaaagctcctttggatttttttggtgttataaatgcaaggcctgtggctagagatttgtttatggcatatgcaagacattctaagcatgaagaattgaaggacttctttttatcgactgggagacttcaagatgccgcctttcttttgttgaaggaatcatgggaattggagaagaaccccatggcaagcaaggggtctcctctccatggtccacaagtgaggctcattgagcaggcccatagactttttgctgaaaccaaggaacatgtttttgagtccaaagcttctgaagagcatgccaaattgctaagatcacagcatgaacttgaagtttccacaaagcagccaatatttgtgggttctagtgttagtgatacaataaaaacctgtattgcaatgggaaacgagcgtgctgcactcagagtgaagtccgaattcaaggttcctgataagaggtggtactggcttaaaacgtgcgctttagccacagttggaaactgggatggtttggaaaaattttcaagggagaaaaggccaccgggaggctataaaccttttgtggaagcatgcattgatgctggtcaaaaaaatgaagctgtcaaatatattccaaagttaacagatcctcgtgaaagatctgaggcatatgctcggatgggcatggcgaaggaggcccaagatgcagcctcacaagctaaagatagtgatgagctatttggccgcctaaagattacacttgcacagagcagtgctgccgcctccattttcgatacattgcgggatcggctatcctttcaaggagcatattgatcaacgtgattttgtcgtaggcccggatgtgcacctcgatgttttgaacagaccggcaatttatttatttatttgttttctgctctgttgtatgtatgaagaattaacctcagtgtgaatacatgtccatggaaatttacggtcacagaactgtgcagccagtgcacgtgtggttcacctgtgacattttggatttctagggtatatggggacacgaagtggagtagctctgtctgtggtgcttgagtgggaggtgcatctgaatagaacctcctctcccatccctctcactagcgtgcttttgcgatagctatcatcatgctgatctcaatctagtcactttgcac

SEQ ID NO: 15058 - DNA, 116 bp, Zea Mays
agcaatgggaatattattaaaagtcacctacaatgcttcaaagttagcaaagcttatgatgagcatatagaaacgtcactgaagatcttaatgtgcatatacgaacatgactgcag

SEQ ID NO: 15059 - DNA, 2161 bp, Zea Mays
aaagctggcagtcctgttcatatgtaatgctatgacaacagctatcgccattgaagatgtgagaagagaagtgagaatactgagttctctgacaggtcacagtaacctagtgcagttctacgatgcttttgaggatgaagataacgtgtatatagttatggaattatgtaaaggaggtgaactgctggacaggatattggctaggggtggaaagtactctgaagaggatgcaaaggttgttatggtacaaattttgggtgtcgtatcattttgccatcttcaaggtgttgttcatcgtgatctgaagccggagaatttccttttctcttcaaaggacgaaaactctcccttgaaggtcatagattttggcctgtctgactttgtgaagccagacgaaagactaaatgatattgttggaagtgcatactacgttgctccagaggtgctccaccgatcttacggcactgaggcagatatgtggagcatcggagtaatcgcctacatcttgctatgcgggagccgacctttctgggcgcgcacggagtcaggaatcttccgggctgtcttgaaggcggaaccgagtttcgatgaggccccatggcccactctcacagctgaagctaaagatttcgtaaaaaggcttcttaacaaggattaccgcaagaggatgacagccgcgcaagctctgagccatccgtggatccgtaatgctcaacaagtgaaagttcctttggatatgatcatctataagctaatgagagcttacatcagctcgtcttcgctgcggaagtccgctttgagggccctagccaagacgctgacgacgaaccaactcttttatgtaagggagcagtttgaactgctgggcccaaacaagaacggctatatctcattgcaaaatctgaaatcggctttagtgaagaactccactgacgcgatgaaggactctagggttgttgactttgttaacacggtgtgcactcttcagtacaggaagctggacttcgaagagttcgccgcttccgccatcagcgtttaccagatggaagccttggagacgtgggagcagcacgcgcggcgtgcgtacgagctgttcgacaaggaaggaaaccggcccatcgtgatcgaagagcttgcatcggaactcgggcttggcccgtcggtgcctctccacgttgtcctccaggactggatccggcacgccgacgggaagctgagcttcctggggttcataaagctcttgcacggggtgtcgtcgcgctcgatccccaaggcctagccatgcgccatccattactcatccctgcgcatccatatccatcaagaaccaaggagatgatgaccggtggctaagccagtctctggctggtgcgtgcgtgcgtgcgtgccgtgtgtattgtgttctgttcgagagtggctggagggtggtggacggcctgaaaccgttgcatgatgaggagagatgcttggtagtcctgtgaggtaaaagaggcagtaacaaggctggtgcctgtgccttgtaccacttgtaccccatcccttgccacgtggattgatggctgtcgtcgtcgttgtactgaagtaaggtgctgtgtagacgagtgtacagatgatggaggataggagaaaatgagtactacgatggaagggccgtaagatttgcggctgctgtgctgtttgtcaatcgccaatgggcaatggctgcttgcagtgcagctgtggcctgtgtcgagctctctcctctttgcctgcgccgtcagagaacaggaacgtcgcagcgcgtcactgcaggtctctctgttcatggcggcgggcgacgacgacgcaggcgctgtacgtgagcttgctgctggtgtgtaggttgccgtgcatgcagcggtgtcgccacacggcgctggtcctggacgtacgtacggcggagcaggtccggtcgagcccggccgccggggtgcggggccattgacagctagagcggcaggaggaggaccacacggccggggacccaaattaaaacctctttcccgtgagtcagtcagacagactaccaaatgcgaaaataaaataaaaaactcagattatacgtatatagctagaatatggtttaaagctatagtaccacaagacaaagttaataagtaactaaacatgctcttctttagtc

SEQ ID NO: 15060 - DNA, 1419 bp, Zea Mays
aaccaaacacacccttactcgcatagagaaactttgttgaaagtatggctggatattcaattctgtgctacctacttcaggtgaaagatcgccacaatgggaatcttctaattgatgaggaaggacatattattcatattgattttggtttcatactgtcgaactctcctggaggtgtaaacttcgagagtgcaccatttaagctaacgagggaactccttgaagtgatggattctgatgcagagggaactcccagtgagttctttgattactttaaggtgctatgcattcaaggtttccttacttgccggaagcatgcagaacgtattatacttcttgtggaaatgttgcaggattctggctttccatgtttcaaaggtggccctcgcacaatacaaaacttgaggaagaggttccacttgagtctaactgaagagcaatgtgtatccctggtgctctcactgatcagtagcagcatggatgcttggcgcactcggcaatatgattactaccagagagtattgaatggaattttatgattttccccacaggagcaacggattcattcagaaaccaattttcttgtatccttggagcaaaccatgggattgcataggtcagttttgggctgatctatgctggcaccccatatcagatttccaggagaggactaggttattgatcactgtgttttcatgtggcattgcacatttgtggtcaactagggaaacagattggtgccgcattgtactttcatgggaccccccctctgaaagagttgagaagtgtacagtcatcggcagtcatctagttagcgctttgtgctaggaggttgtgaccagtggagctctatttggcatattggaatttggaatccggctacattgttgtacagacctttgattgacgtagcttggagaggatgtaggagtgaacagggccatgctttgaagcgaacaagttataggcatatgggagctggggatcatccgagacagatgccgctcgaagtgtcactgtacttgttgtgtggtatccctatagcaccaaagtagatggagatgtgctttgctaaaaaaagataaagacccagtgttggccgctctcatatgtcactaggtctgaaaggaaattggccgctaatttgcgcgaggcctgtccttcagagaggtgctttgctgcatttgtaaattatcattactgtacagggaccatactgtcttagcattctgtttttaagttgttaagattttaattccttctttgtgggtgtcttggtcttcgaagatctaggtgatagcttgtttgactagcactatgatcagtgttcgaaagtacagttccatgtgtcatgaagaaaaacactgcaagatttttaatacatttttgatgtactatgagagcaaatttctatttcga

SEQ ID NO: 15061 - DNA, 3101 bp, Zea Mays
cagagattgagggtacgcagtttttgcaaaaaaatgaggctaagaagagatgttaacctaccaaagcatattggggtaaataaccttgggacttctttttcaagagaaagttctgctgctgctgactgggcgccggaatttgaatccccactctggtccgatcagcatgtgctagttgctaaccaaggaccgaatggcaatggctggtggtctccacagcatcattcttctctccttgctgattccagattgcacagaacatcctcatcccctcagcaacaggaacaacacaatcatgatgcacctattcttggaccaaggccatctcctttgcaccggacatcttcatacccgcaaaaggagcctcagtacaacccagctgaagtcattccaaatgcaccatacatgtcaaactatctacctggtgggccacccaattcagtgcctcgacaaccacatcagatgaacatgccatctttcaatgaatttcagatgcatatgtctgcgcaaagtgagaccccattctcccagtttcctcgtggagggacacctccagagccattatttggtggaaaccggggtcatatgatttcaacaggcttctcaactaacagcagtggacaacgagaccatctgctgaataatgggcagtttcatggggaaactgccagcatcatgccaaatttgctgccaaaccatctacaacgtccgaatacattcatgccccctcaattgttgacagtacgccaacagcatggcatgctcccaattcagcaatcttcaaagcagtcatcaagaacacagacacacatgtttggcccccagcatccaccacaaatgatgaataggtttgataattttgggatgcctgagttcagtgatccaagagcaagatcatcaatgcaccatggcaggcaaggtcaacattttcctctccatggctctgagtttggtattatgaagatgggtaatgggaggtcaaggtttagatccaagtatatgtccactgaagaacttgaaaacattttaagaatacagcatgccgccactcatataaatgatccatacatcgatgattattaccatcaagcttgtctggccagcagatatgtggatgcaaggtcgaagcaccgcttctgcccaaccttgattcgtgatccatcatcctgtacacggagtaaggatgagccacatgcataccttaaggttgatgcccttgggagactgccattttcttctgtacggagaccgcgtccactccttgacgttgagccagcttctgcaactgatgatgacaccgttatttcaaagcctcttgatcaggaacctctgctagctgctaggatcacgattgaggatggactctccctattacttgacatagacgatattgaccgcttgcttcagtttagccagcagcaagatggtggtttcgaacttaaaaatagaaggcaatctctacttggtcagctggcagaatcgctgcagttggttgatccactaggtgcaaataaaaacacacatctgtccgcaaatgatgatttggtatttcttcgcattgtttctctacccaagggccggaaactactttcacgctatatcaacctcatggtacctggtagcgatcttgcaaggatagtttgcatggcagtattcaggcacctgaggtttgtgtttggaaatctgccctctgatgacggcgcagctgagacagtaactaaactggctagcgctgtagcatcatgcattcgcgggatggacttaagtggcctcagtgcttgtctcgcagcaattgtgtgctcgtctgagcacccaccccttcggccccttggccatgctgctggcgatggtgccactgtcgtcataaaggctgtcctggatagagcaacagagctcctcaccgagcagcctgccgcgccagactatggcgctccaaaccgagccttgtggcaagcgtcgttcaatgccttctttgggctgctcactaagtactgcatgagtaagtttgatagcatggttcacacgatgcacaagctcggtgctgctgctgcaacagcgatacgcaaggaacttccggttgagcttctgcgcgccagccttcctcacacggatgagcagcagcgcagactactgctcgagttcgcccagcggaccgtgcccgtctctggccatggctccgacgggtgacggacgggcgggtggcggctggtggaaccatggcatctgaaacaataccagcttaaggtggtcagcgaatattggtgcgctagatgcggtattttattctatcatacgcagacctgcccaatgaatcgagcgttccttgagctgcagttcagatgggcatgccggcgttaagtggatgtatgtcccaggtttggatccgtctgtttaggctaatagtattctctctgcacggttgcatcgcatcaccactggatagattagcatgattagcttccgtctgcagggctgtgtttcgttggctctgggtgggaacggaacccccctgcacgttccttgaaggcaattgcaagaaaatactgcgagctgttggtgtttcggtttgcagtgtttgtttgtagtggcgtcaaggcttccaaggttctcatctcatcactccggacgggtgccaggaagatgtggtttaacacatgtataaactagcaaatgcttggaaggttgatatttggttctgtagccagccattcgaagattgttgggtggggggttttgtttcctgttatattcgcaactgaatacattatcttgcgaagctgttcagtctgtaacgagttcattgggaattccactatatatccttgttatggatggtcaggagctttgtatttttgtgattctgggtattacccttgtgttccataaaggacgctttcttcctcgctcctgaatccattgcatcgtgtcctgtccgaatgggtgatctacacttttagctttgcctttgccctctaaagataatagtcaaattaaaggactggattcaagaatcatcattttctaaaagtcgatttggaaaacaactctagacctgtttttagtggctttcgaatggaactgtaaaaacatatatcgaaaaa

SEQ ID NO: 15062 - DNA, 2003 bp, Zea Mays
ctccatgtggatagtgttcattctgagcatttcataggtcttcttggtccacaatgaagacgtgaagttcataataacaaggaagggagggggctgaaagaagcggggaatgtcgtcgatactaaaagtttgcggttggattctcctataactgatggtgaggaaaaatcaaagctgcaagctgtttctgaagaaagtagcaaaatggttgcaacccctgtagagtattcaaccaatgagatcattgatggcagcatggttaatactgttgaagggctcaaggtttatgaaggattactaaatgtaaccgaggcaaataagatcctttccttagtcaatgaaacaagagcctcttaccggcgaggggggcttgaagacagaaggttattattgctaaaagaccaatgaagggtcatggacgggaaattgttcagctgggtgttcctattattgatggccctcctgatgatgaaaatctaagagcaggaaattatacccttcaagccagattattgtgtcattgacatcttcaatgagggagactattctcatcctcaccaatccccttcttggtatggtagacctctttgtaccctctgcttaacagattgtgatatggtgtttggccgttatatatcaggagaaaaaggcgatcatagaggtcctctgaagctctcgctcgcaactgggtcacttctactcatgcaagggagaagtattgactgtgcaaagcgagctattcctgctacacgcaagcagagagtcatactgaattttggaaagtccgtagcaagaaagcacatcccagctgaaagtgcctggtctactccattaacacctcctatgccctggggtcagtcatcaaggccagttaacggctcccgccatccccaaagtcctaaacactatgggtatgctccaatcagcggtgtacttccagcaccaccagttggagctcatcacgtcccaccgtctgatgggatgcagccactatttgtagcccctgctcctatttctgctgcagccatacctttcacgccaactgttcccttgcaaaatacatcagctgcttggatacaagaagttactccaaggcctgctccgccacgattccctggtcctggtacgggggtcttccttcctccgggatcaggccaccctctgcctcatcagatgatgccggcttctcatggccatggcgaacccaactctccacaaggttcatccgcttacctgcatagtaaggtcaatggcaaggagacatctaatggcaatctttctcctaagaactcgccgagaaagacatcttgcacagccgaggagaaaccagaatgcaatgggagcttaaatggtggtggcggctctgcggatgagaagtcaactgtaggtatggagcagcagaatggtgttcagaagaatgttgggagtagcaaggtccagccacatggacatgcaactgaatagagtgggacttatagtacatagacaacagaaaactgaagagacgaggagttgaattttgggccgtgaatttgcggtagtgcgcagagctcagcagaggtctttgctggcactctcttgtccctgacaagaatcatcgtgtcaagttctcgagacggaaaacatttgtcctaaactttgtagctgcactgttgcaaatctagattatcgacattgcctcgggttatcatctgctatcagagtcgtgggcagtgaaaaccatttctgatggtttatgttgcccaaatattatcgacctagtacatctgaaatgggaaaaaatgtggacgaaatttcttgcatcgaactctcttgtgatcgactggcctttgatgcatctgtagcagactacttatggtagactgttacttgctgatagatggttctgctacaggtgtttgctgtggatgtcaattataacctagactgtgaacttatcactcttttgggtcctgaacgttttgcaagtgttcttattcaggacgtgggcaaagcatatggat

SEQ ID NO: 15063 - DNA, 215 bp, Zea Mays
aaatacatagaagctctgaatatggacatgtgcatcttgtcaaataatagagtcgccgtcttgtatgaggttgttacaagaaacaacgctctttgtcctgaattttaccactctgtatccatgctgactggctgacataagctgtcatcccgcaaatcttaaactctcctgacaacttcgggatctcaccaagaatgcaagatagcaagctcgtg

SEQ ID NO: 15064 - DNA, 2336 bp, Zea Mays
gaaacaaacaggggctttcatttctccccgccctgcagcacgaccgcgaccagccaccgtctccgcccccgccccggttgcttcagatctcctcctcccccacccggccacccccagccgcaccagccaccggccagctcctccgcaccaggataatctctgcccttcgtaccccctcgccattgcgcgcgcatataaatcccacatccccatcgctctcgcctctgcccacccacccgccgcgcccctactgcgcagcacgcacgtcccctccgcggccctggatctaggctgatcggtcgccggccgggagcgaggatcgggatctcggcccggggctgcccccccgccggaatggaggtcttcggccccgtcacgcccggacaggtgtcatttttgctaggtctattccctgtcctcatctcatggatctactctgaaatcctcgaatacaagaaatctttgtctcatgggaaagttcattcagacgctaatttggataatggaaccatcaaggaggatgaaaagtcagtattacttgaaggaggacagttgaaatcaccatctacaaagttcaggaacttgtctaccaaagcgaatttgttacggtttataactatggacgagtcttttctgcttgaaaaccgtgctgtactgagagccatggctgaatttggcgttgttctggtttacttctatatctgtgaccgcacagacatatttccagaaagcaagaagagctacaatcgtgatctgttcctgtttctatacattcttctcatcatagcatcaacacttacttcactaaagaagcatcatgaaaaatcagcattttcaggaaagtctatactctatcttaatcgccaccaaactgaggaatggaaagggtggatgcaggtcttatttctgatgtaccattattttgctgcttctgagatatacaatgcaatccgtgtgttcattgcttgctatgtctggatgactggatttgggaatttctcatattactatatcaagaaagattttagtattgcaagatttgctcaggctataaagatccatcgccatccaaggcacacttacccctgctacatgagtggcatttccgatctggcctcgatcgatacatatggattattggaatgatttatgcttacttccatcctaatgttgaaagatggatggagaagctggaagaatctgagactaaggttagattatcaatcaagggaaccattgtcactctttcattgacggttggctttctgtggtatgaatatatatacaagctagacaaagttacatacaacaagtaccatccctacacatcatggatccctataactgtttatatctgcctgcgcaattgcacccagcagttgaggaatgcctctttagctcttttcgcatggcttggcaagattacactcgagacttatatttctcagatccatatttggcttaggtctagcatgccaaatggacaaccaaagtggcttctttgtttcataccagattatcctatgcttaacttcatgcttactacagcgatctatcttcttctatcataccgtgtgtttgagatcacaaacgtcttgaagtcggcttttatccccagtagggataatagccgcctataccaaaatttgattgctgggatcgccatctcagtgtgcttgtatctctgctcgcttattcttctgaagattcctggtgtatagggatgaagatcttgatagaaggtttcttgtaaaatgtttgcttgataggatgtttcagctcgggcctcgatccccttttgctgttgtggagatagttgggatgcgcggagaagcggctaaagttggacatacggggaattgaattgccagaggctgcagatacagaagtccgaatcttgatctttttgttcattcaaaacacggatggatacaacaagtaggcaatccttccattcttttggaagttgtagcaactgttcgctagactatgttgatgcaacctcgttgtatgagttatcctgtagaactgcaccgtgttgtgccataggtattctgaagctgtaaaaaaaacgacgggcatttcttcttccttgaaaagaagaaatataaaggcagaggcgcagagccctttcttctcctaattgtaatgtcgtgtttgctttggagtttgaaccatccagtctatatcctgcttcttcaagtgttcgtgctcgtgctgtacgtgcgtacccgcgggctcagtcgaccggtggacggtggtagactgtatgcacggctcaaacttggtgtatgtgtgaaaaattacccgccactgttgttggttacattgaaata

SEQ ID NO: 15065 - DNA, 1400 bp, Zea Mays
aacgagccgagccgagccagctcgtttccttaacgagccagctcgagctcggtcgagccgagccgagtggctcgatatccaccccgataatcacgtaaattcttttttgtgcgtgcattggcgatagcgctgcctcctctttgtagctgctacctgctagttctcacgtcactgtagtctgtaacgtcgtcttcttactccccctatccgacgccgggacaggaatcagcttcccctccatgctccggctggagcaatatctccggttgctgccggcgaccagccacgctacagcgcccgcgttgatctcgggttactctttcctctccagtcctctccctcgcctcagtgccctccggctagcccgctcgcggcctcccccgctcaggggcaaaacgtcgagccccgtgcgcgcctcggcggagccggattctacggtaaagcgcgcgcccgagatggcccagagggaggtggcgcgggtggtcgcggatcaggcggtggcgcgtttgggcgcgcggctgctgccgtccgccgtgcctgccgacgtcgtcgagtttcgcaacgccgccgggaacgccgtcggctcgctcgacgtgcaacggggctctcctggctcgtcgattgatttcatgctgcagtcctcgcttcactgtgaagtcccgaacggtgccattgacatcacctcaattctcattttcctgaacgcctcgacggacgcaccacatttcctactggagctcatacaaggcagctcaacttcaatggtggtgattctggacctgcttccacggaaagacctcgcgtttcacccggactacctgcagaagtactacgaggaaactggaatggatgagcagcgcagaaagatcgaggagctaccgcaggctcgtccatacagatctccgtcactcttcgtgcgcagcgcatgctcgcctacagcaataatggtgagcattgactgtggacaagggggtgagaaagccttggaagagataatacatggacagttagcaaaggtcattcaggaggctcttcagacttggcttgacaactgtgttgattccaccatagagatggatgaggcggagagggactgcctgctcaagagggaccggattgtaaggtcgaaatcgatagaggttgacctgactgcaaaccttcccaggatgtttggtccggatgtgtctagtcgggtcataactgaaatccgcaaggcctttggtgtacaagagccgtaagtcgttcataaatacaagcatgtagttactttattgtagagaaaaattgttgtgagtccatgaaacccccttatttgaacaatcgaaagtatatgtgctaaagttgtgaaaaaaaaaaagaaagaaaggcaaccgcaaagttataacaaaggctaccccaaa

SEQ ID NO: 15066 - DNA, 363 bp, Zea Mays
gtaaaaagtccctaacgaagggccgagcgtcgtaaaaagtccatttttttcagatgaactagtggagtgatggcgatcctggcgcggccggacaagacgtccaaggtgcggcggttctggaactggtaccaccacaacatcgggcgcgcggcgatcctgctggccatcggcaacatcttcctgggcctctccatcgcgcaggagaccagcgcctacatcgtctcctacggcgtgttcgtcgccgtctgggtgctcgccgtcgccgccttcgagatgaagcgctgctacgccgacgacgactgatgagctagcgacaccaccaaccaggatgctgtggtgtggtgcgtaccagcaccgaccaca

SEQ ID NO: 15067 - DNA, 2283 bp, Zea Mays
ctcggatgacatctcagagttgggactagcaaggtttcattgcgctcaattgctatgtctaccacacaagcctcagaagcagctgctgacaaaggattgcctctggcagtggacgctaccatgattgatgagtatgcctcccagtcaaagttgctgcaagaatttgttaaaatcccaactattggcaaggcttggatcttcaattccaaggatgacgacatgtccaaagcagtggtttcgattggcaaatcagatcttttggccaataagaggagacaattccttttgaatactcacatttcaaagagtccctcaaagtctgtcgattttcagtggtcccccttccctactgaaataagtggagtgtcagcaatagttccatctccatctggagaaaaacttcttctagtacgcaattctgaagatgattcccctacaaaactagagatttggggcccatgtcagttagagaatgagatacatattgcaaaatctgttcatggatcactctatactgatgaatggtttgaagggatatcatggaaccaggaagagactttcatagcttatgttgccgaggagcctcctcaaccaaagccagtgtttaatgattatggattcaagaaggaaggtttatcagaaaaggactgcaagagctggaagggacaaggggattgggaggagacctggggagaaacctattccaagaaaaggattcctgcactgttcgtcatcaacatctccagtggtgaagttcgacctgtcaagcaaatacctagatcattaagtgttggccaagtgatttgggctccatcatcttcatatagcttggtttttgttgcatggtcatctgacaatgggttccaagggacaccaaggaagcttggtattaaatactgctacaacagaccatgtgctctgtatgctgctcctgatcctttcggacaagaagctgagaaatcattaactgagggcaataagggtgaaactacaactatgatcaaattaacagcaaacctgagcagtgcctttttcccacggttcagtccggatgggaagtatcttgtcttcatctcagcgaagagtgctgtagatagtggggcacacaatgctacaaattcattgcatagaatcgaatggtgtacagatggaaaactggatgggagccttggagttgctgacgtggtgcccattgtgctgtgccccaaagataactgttttcctgggctatactgctttggcttgcttagggatccatggcttaccgatggacaaactatgattatatcttctgtctggggaagtagggaagtaatactttctgtaaatgttgtgagctgtgaactttcaagagtgagtccccaggactcagattattcatggaatgttcttgcagttgataagaacaacattcttgcagtttccagcagccttattacactccctcagatgtactatgggattaaggtttctcagactgaaagcaattgggagtggcagggagtttcaactcctttcccaaagccatctgataagatcagctccgtactagcagagcataagttcagcatactcaaaatcccaattagcaacccttctgacgaacttgccaatggggctaagcttccttttgaggctatttttgtgtcgcataaggattctgcaagtaatccaacaatcgttgttcttcatggtggaccacactcagtttatccatcaagttattccaaatccttggcttttcttttttcgcagggatataatcttcttgttgtgaactacaggggttcattaggctttggggaagaagcactgcaatcccttcctggcaatattggttctcaggatgtcaatgatgtattgacggcattggaccttgttataaagagaggactaatagatccatccagagttgccgtagttggaggttcacatggaggtttcctgacaacacatttgattggccaggctccagacacatttgttgcagcagctgctcgaaacccagtatgtaacttatcattgatggtgggtacctctgacatccctgattggtgctttgtcgagatttatggaaaagaagggaaaaagtacttctcagagtctccttcagtagacgatctttgtcaattccaccagaagtcaccaatttcacatattgcaaaggtcaagacaccaacactctttcttcttggagcgcaagatctcagagttcctgtttctaatggcctgcaggcctgatgcagtgatgagagctgtctcagttgagtcactaggttagag

SEQ ID NO: 15068 - DNA, 656 bp, Zea Mays
gaccttatccaccaacctccggtccacggtgactggccgcaagctcctcctctcccgcaaacacccacgcccactccattgctcctctcctccaacatcgctcacgcggtctcctctccccgctcagctccgctccgctcccggagacacgcaagcttcccgttcccgggaacgcgcactaaagatgcctccagccttcgccgccgcaccttcctcctcgatatgtggcgttcgcatcccaactgtgcgccgtttcgaagcgcaaagcacggtttccacgcccagatttatgcgtaatcgggtggcagccggagatgttgatgtatatgatctccaagccttatgcaataaggtaggatggccacgcaggcctctttcaaagatagcagcctcattaagaaatagctacttggttgctacactatattcaataattagatcttcagaaacagagggagaagagaagaaacagctcattgggatggcacgagcaacctcagaccatgccttcaatgcaacgatttgggatgtccttgttgatccttcataccagggtcagggtcttggtaaagcactcatggagaaagtaattcgtactttgctccagcgagacatcaacaacattacactgtttgcggataacaaagatttctaca

SEQ ID NO: 15069 - DNA, 1100 bp, Zea Mays
aaaacctcagctccaaagctccattacaaaacggcttggaaattggaattctacgatttctagcttggaaatgccagaacattacaagaaaataaaggagaggcgcggctgctggatctccactgctctttggctctttgcttccctggtactacctagtagaaaatgcgcatctgaacggcaggcagcgccagcgatatacacctcattcaattcatcagcaggtgaaaaagaggcaaaaagaaagagaaaacagccgaaacgccttcccctccctgcgccgctttccgctacgcccggtccacgcagcggagccgtgggcctgtaggggactcggtgctggtacgtcatgtcagccgccgagccgtttcctcgctcactgctggtgctgctgcgcctcgacgccgccgccaacggcaacgccgcgccgccgctgcggctgcccaggcagtagaagcggatctgcagaagttgtagcaggcctcgaggttgccggcgtcggcgcagcgcttgaggaacctctgcgccggctcggaccacgccgccgccttgaccgccagcgacgccggcgaggccttggcgaacaccatgtcatggctgccgagctcgttcagcctcttgcacctgcaaacgcgaaagaccaggtcggacggcgccgaggaggcggcggcgagcttggacaggatggagaggacaaggtcatcgggaagcgcgtccaggtagtccggctcgccggcaggccgcttcctgcgcccgccgcagtcgcactctccggcgacggccgacggcgacctcttcctcttctgacccaccaaggcaaccacctcgccgccgttggaataccgggacccgctcctcgtcctcatctctctgtacctccgcaggagtcgtcgctgccggggggaaagcgggacggggcgagcggtgggagaaaaaaggttaaacgaccgcgcgcgcgggcgggcgagacgacagggagaagtgcggagcggtgtgcttgtgtgctagaagggcgagcaaggcagagggcttttatataggaaaggagctaggaggcgaaggaggagcgtctccgccgtaccgtgggccgtggaggggtc

SEQ ID NO: 15070 - DNA, 1539 bp, Zea Mays
ctctcttccctgtgaactttttcttaaatcaatcgatcaatcacgcgcacaagaaccggcaataaatcgcggaattcccaacgccgcaccttcaccgccgggctccccagtccaatccaacccaaccccagtccggcgacggttccgggagaggagtgggatggacggggaagcgatccggatgggtggcggcaacttggcgcccgcctacctctccggcgccgccaccgccaccgccatcaccatgcaggatccgaaccagaaccagaaccagaaccagaaccagaaccaaagccagttcctgttcagcgccaactccacggcgctgcagctgttcggaagcgccgcggtccccacggttggtcctgctggttatataaattacactggaaacacccaccttcctgttatgaaccaagcaagtacttcaaacatcggcgcagggaatgagaacttgctgaagcttcaggtgccattgagcgactatcaccaacagagtgctggccggttagcacgtgttggcaatccgggtgctgtatcgactggtctaaggctgtcttacgaggacgatgagcgcaattcgtccatcacatctggcagcggtagcatggcctcgttgcctgccacgatgtcctgtgtcgatggtttcatggctgaactggacaaggaaagcaaagagattaacttctacttgagactccaggcagaccaaatctgcaagcggatgaaggaggcgaaccagcggtggatggtctcgttcctggcgagcgtcaatcaggcggtggggaagaagctgcgggacaaggaactggaggtggaggcggtgaacaggaagagcaaggagctgaacgagcagatgaggcaggtcgccatggaggtgcagtcgtggcagtcagcggccatgtacaaccagtcggtcgtgaacaccctgaagaacaagctgatgcaattggtggcgcagaacaccaacctcgcgagagaaggcatgggcgacagcgaggatgtagcctccagccaaagccccgacgccggaggagacgccctgggtggtctcaggggcacggctaccgtcgggctgggggcctgcaggtgttgcggcaggaaggaggcgtcggtgctggtgatggcgtgccgccacctctgcctgtgcgccgactgcgacaaggtctccgacgtgtgccccgtctgccggttccccaagagcggcagcgtggagatcaacatgtcctgacaaggacctatgctatgcaaggacgtcgtgtcgaccaaaatcatcatcggcggggcagggcgggggtatacacagtgactagtagatggtgtacatgtcagcatactttttccttgacttgggatttcttcttcagatggtaaaggaggagatcaatatgtcctgacaaggacctatgctatcgatcgaagttggcggggcggaggtatacacagtaactagtactagatggtgtacatgtcagcgtgcttttccttgagttggcatttcttcagatggtaaaggagacgatcaggtttgcgtattgc

SEQ ID NO: 15071 - DNA, 1496 bp, Zea Mays
ctagtagttacactagcgattggtgcattcacaaacatgttattatgaaatggtacagccatatacatgagaagatcatgagagtcccgtatggagtggagaaggagttcttcagatactcgcttttccttgttttctgtaaccgcatcaccacatccatggtgtctgcaatggtgttactggcaagtaagaaatccttggaccctgtggctccgctacacaaatatggtgttgtctccatatcaaatatactgaccactacctgccagtatgaggccctcaagtatgtaagcttccctgtccaaacgcttgccaaatgcgccaagatgatacctgtcatgatctggggcacaataataatgagaaagaagtatgttgcaaaagattacttcttttctgtcgtcgtgactatgggttgcgcattgttcattctatatccggcgtcgatggatgtgagtccatttaataaaggcagagaaagcactatttggggtgtttcactcatgctcggttatcttggttttgatgggttcacaagcacgttccaagataaactcttcaaagggtatgacatggaaatacacaaccaaatattctacacaacagtctgctcttgtcttcttagtttaagcgggctgattctccagaatcatctgattccagctgtggattttatgttccgtcacccagattgcttctccgatgttgtaatcctgtccagcgttgcaacagcgagtcagttcttcatatcctacaccattcggacatttggcgctctcacatttgctaccataatgacaactagacagcttgtgagcatattgctgtcctgcatctggtttgtacatcctctcagctggatgcagtgggttggcgcggccattgtgttcgtagccctatacacaaagagcttcctgaggagtaaaccgcagaagctagcggggtcaagcccgccacgtggttccagtccgaaccctgttagcaatagttgacaattggtgacataataacataggaaacaatggacttgttgcggtgtaacgggacgaagtctccgtgtctgagatcaatggcaccatggctgcatatgcaaggcgaggtaactggacagataggttccagatgttgctgtgttactgctccctgacattttttcaaggtcatgaaggtggccattttttcaagctagtcgaccctagtgttagtttagtgtccagagacccaattttgtagcccagtgagctgtgttaccaattttgtagcctcaacaaagcatcgtgtgtgtgtgtatttgtcgagcgttggcgactgagagttgaagaagtcacagcagaccatctgcaaaaactcaccagataactagaactgcgatgcgtaacaaattgcaaaacacaggagattgtcagctaacagctgtggtccgatgtaaagatcagcagataacaactgaaggcctgtttaccatggtttttgagtataccgtagtattttatacc

SEQ ID NO: 15072 - DNA, 384 bp, Zea Mays
atctccctcctccactcgggtcttcacgatgccgccgccgccacacgacatcgcacatccgctcttctccctcccctcgctctcggcggtcgacgtgcgctcccctggtgccatcgcttgtgcccggctcccgccatcgctggctccccgatggacctcgcggctagtgtggggccatggatccccgacggatcgagggtcgcgccgcctcatgagaaaaatcatctttttggctcgaacagaaaatacctgaagcttcaatttgacatcgtgtagcaatgaatgcgtgcaaggaatgctcttttacatgttgagaatgaagaaaaattagatgtcgtggaggcatcccaaaacatggtttcaaattaggacttagccattttt

SEQ ID NO: 15073 - DNA, 76 bp, Zea Mays
atattattacacataccaagggagacagaaaactcctcccgataagttcttaaacaaaagtcctaatggaggatcc

SEQ ID NO: 15074 - DNA, 2192 bp, Zea Mays
gccgtccggacgagaaagggcgggaagtggcggaggccttgtggcgtacgcggattccgctgcagagagcgcgccggacccatctcaggatgctcccaggaagaaggtggtggttcttgggactggctgggctgggacgtcgttcctcaagaacctcgactgctccaggtatgaagtgaaggtcatatcgccccggaactacttcgcgttcactcctctgcttccgagtgtcacgtgtgggactgtcgagccgcgcagcattattgaaccggtacggaggatgtttgagaagaaaaacaaggatgtcacattttgtgaagccgagtgtttcaagattgatgcaaatagaaaaactgtacattgccgttctgctgttggaactaatcttgatgggaatggtgattttatgttggattatgactacttagttgttgctcttggggctactgtaagtacatttaacactcctggagtgctggagcactgctgctttttgaaggaagtagaggatgctcagaagatacggaagggtgtgatagattgttttgaaaaagcatcacttccaaatattagtgaagaagagaaaaggaaaatcctacattttgtagttattggtggtggacctactggagttgaatttgcagcagagatgcatgattttcttgtcgaagatttagtgaaactatatcctgccattcaagacctcgtgaagataacaattattcaatcggcagagcatatattgactatgtttgatgaaagaatagcttcatttgctgaacaaaagttcaagagggatggcatcgaagtgtgcacgggcttcagagtgataaaggtgtctgatgatttgattacaatgaagagaaaatctgatggtgaggagttatcagttccttacggaatggctgtttggtctgctggcattggtactcgtcctgtcgtcatggacttcatgcaacaaattgggcagaccaatcgtcgtgccttggcaactaacgagtggttaagggttcgcgagtgtgaaggcgtctatgcaattggcgactgtgctacagtgagtcaaagaaaaataatggacgatatttcaacagtattcaagatggcagacaaggacaattccggcaccttaacactaaaagagatcaatggtgttttagatgatatatgtataagatacccgcaagtagagctgtatatgaaaagcatgcacatgcttgacattgcggatttaataaaaggcgcagttggcgattctcacaaggagtccatggtggttgacatagaggagttcaagaaggctctgcgccacgttgactcccaggtgaaaaacgctccagcgacggcccaggtcgccgcacagcaagggcagtacctcgcccagtgtttcaacaagatggagaaatgcagagaggagcccgaaggccctctgcgcatggcaggggggtccggccgccacttcttccgcccgtttcgctacaagcacttcgggcagttcgcgcctctgggtggagaacaagccgctgcagagctcccgggcgactgggtctccatgggccacagcacgcagtggctctggtactccgtgtatgccagcaagcaagtgagctggcgcacgcgggtgctggtggtttccgactggactcgccgcttcatattcgggagggactcaagccggatctagctgccaaggattctcttctgcacaggggggggggggggggggttcgttccgtccgaagaataatcggtttcgctgctgctggagcttgagcaagcaaagctgtttccccgcgcctggccctgccggcgaaactgctgttctttcttctgctacatggtagatggctctcaaagcctcacgccggttactttcactgaggttttagctctggtttatttgatgtccataggttttcttcctttgcttgtgatctcaacacatccatcactatgattcatttgtgtgtgatacatattgcaacttcagttaaaatccaaccttttcttaggaacagggctctaaaatccagcgtcctcgtcagccttctctcacattggtcttctagtctcttatcacttttgtgcaatttattgtaaatctagtgtttgtcttacaaaatcaatgtcaatttatgtacaacatctgcatctgtagataatccaaagacaaacttaggcaccctaccaactaa

SEQ ID NO: 15075 - DNA, 1056 bp, Zea Mays
tcgacctttgcaaaagaaataaaaatcggtagtggtctcttactggtggcggcgtagaggtgacgaaaaaaccttgacaatgagcagcataggcacaggttatgatctgtctgtcaccaccttctctcccgatggccgcgtcttccaggtcgagtatgccacgaaggctgtcgacaacagcgggaccgttgttgggatcaagtgcaaagatggcattgttctgggtgtcgagaagctggtaacctcaaagatgatgctggagggatcaaaccgtaggatccattcagtgcacaggcactcgggcttggccgttgctggtttggcagcagatggcaggcaaattgtttcaaggaccaaatcagaagctgccagttatgaaaaggtctatggagaacccatttctgtgaaggaattggcagatcgtgtggcaagttatgttcatctttgcacgctgtactggtggctcagaccttttggttgtggtgttattcttggaggttatgatagggatggaccacagctttacatgatagagccctcaggagtttcgtataaatacttcggtgctgcattggggaagggaaggcaggctgcaaagactgagatagaaaagttgaaactttcagagcttacctgccgagaaggcattgttgaagttgcaaagataatttatgcagtgcatgatgaagctaaggacaaagcttttgagttggagttgagctggatctgtgaggaatcgaagcgccagcatcagaaggttccaaatgagctgttggagcagggcaaggccgctgctcaggcagctcttgaggacatggatgctgaaagaaacaccattgctaggcccgaacttgttccatcatctttcgttgcttttgaaatctttggtccctttgggctgccgggctgggctggacgtggcaaagaattgtcagattttactttcagttcgatgtaaaatctcatagatgtacctaacgaaactaggctccgttcatcggttcatggaagtttgaatctagacaggagatatcagggccgtgttgaaacagcggc

SEQ ID NO: 15076 - DNA, 207 bp, Zea Mays
cacacccccccacagaagaagaacatgtggttcaagaggagccacacaacgaggagtttgatctgatctaggtggcgtctcccagttgactttatggtgccaaggatggaccttagttcgttttatatttaacttttattttgtaagacttccgcaatgtaatacgtactctgttgttattgtgacatttatctctatacactctgt

SEQ ID NO: 15077 - DNA, 113 bp, Zea Mays
tgccaatcgcaagatgcagttggtggacgacctgaagaatgggcttaaccagtggacgctcgtcgagcgagcatcatctagcaggcactatctagtgttaaattccaggcaag

SEQ ID NO: 15078 - DNA, 2003 bp, Zea Mays
gatctgagggagcagcagcaagaggttcacctggcatgcaattacctatggctgcataccttggagagcttgttctaagcaatgatgttaaggtacttgtggcacaaaaggctggctccacactagtcaatatcatgaaaaaagggaatagagaggccagagaagcagctttgaaggcattgaaccaaatttcatcttatgatgttagtgcaaagatattaattgaagccggtattcttccgcctctcatcacagacctctttactgttggcagtaatcagcttccaatgagattgaaggaggtctcagcgaccattcttgcaaatgttgtggcatcgggtgcacgttttgagtccattccacttgatcataataggcagaccttggtgtctgaagacattgtacacaatctgcttcatctcataagcaacactggacctgcaattgagtgtaagttgctccaggttttcgttggtctaactgactcttcgacatctgtacaaaatatagttgatgctatcaaaagttcaggtgctattgtcagtttaattcagtttgttgaagcacctcaaagggaagtacgcatgaattccatcaagctcttgaataacatatcaccttatatgggtcaagaacttgctgatgcttttcgtggaaacttcagtcaactaagcagcttggtcaaggtaattgtcgataacaatggtatttctgaagagcaagcagctgctgctggccttgtagctgatcttcccatgggggactcagtcctcaccagacgtcttcttcaagatggggcattcgcagcaatcatttcaaaagttttaagaatccgacaaggggagattcgtggggggcgttttgttaacccattcctcgaaggtctggttagaatagtctcccggatcacatttgtcttggatgatgatccggatatcattgctgttgctcgtgattacaatcttgcttcactcttcactgatctgcttcagatgaatgggcttgacgtagtccagattgtctctgctgtttcactagagaaactctcgcagcagtcaaaacatcttacgaagatactgcctgctcccagcccagggctgtgcttttcaatatttccatgcctcagccagaagactgtagcaactggggtctgtagagttcactgtgggatttgttccgcaagggagagcttctgtctcttggaggggaaggcagtggagaagttagttgcctgcttggataataataacgagaaagtagtcgaagctgctctagcagcgctgtccactttactggaggatggagtggacattgaacaaggtgtcatggtgctgtgtgatgcagaaggaatcaacccgatactcgcggtattgtgcgagaacagaaacgaggcactgcgccagagagcggtgtgggcagtggagagaatcctgaggacggacgaaatagcgtatgagatatctggaaaccagaatgttggtacagccttggtggaggcattcaggcatggcgactctaggacaagacaagttgcagagcgagcattgaagcatgtagataagttgcccaatttctctgggatattttctaagatgggagcacaatgaccacgttccatggaagtactcgtgttctatttgacatgaggcaggcgcagatgaacacttgtgttcccagcaggccttcattggttttgctgactcgcactccagctagatgttgtagcgatctgattggtggaagaagaattaagtattgcacgtgttgtatagtgtgtatttgtacctgtagacttgtctgtactttcgagattggtcagattcatagaataggttgctatccctgttgtgtggagacaatacataatgcataaccgccagcactgggtggaaaaaaaagggaagaaatgtgaagtcgttgcgtcagatatgacatggttttctggtgtatgtcttaatgtctacagaggcaaagtgcaaaggactgtttggttcgctgtctaa

SEQ ID NO: 15079 - DNA, 1350 bp, Zea Mays
gcagttggagattgggttttaaatagtgatgaatatctgacggagaacaatgatttcatggtgattggggtaattgggccgcccggtgtaggcaagtcgaccatcatgaacgagctttatggatatgatgcgagctcacctggaatgcttcctccttttcctacacaaactgaggaaaccagattgatggggaaacactgtactactggtattgacatcaggatatctaatgagcgagttatactccttgacgctcagcctgtgtacagtccctctgttctaatcgatatgatgaggccagatggttcatccacaattcctgtccttaatggtgaacccttatcagcagacttagctcatgagctaatgggaatccagattggtgttttcttggcatctgtttgtaatatagtgttggtcgtgtcagaaggtatgaatgatttgtccatgtgggagctcatgcttacagttgatttattgaagcacgggatacctgatccgtccgtgttgacgtcatcagcttcccaagacaaggaaaacaaaaacgaagaccaaacgggctgcgaagactatatttccgatctctgtttcgtgcatactaggctgcaggggcaagatttttctccttcaaagttcatgcttctaaggagaactcttgagaagcacttcaactcatccacttttagagtcgggagctctaatgcaacgggtcatgcttctgattcgctggttccttcaagcacgaaagttgaagatttaacctccagtcggcaggacatatttcttcttcccctgagagggcacgacgactcgacaaagtttgagtatggaacgtactcgtgcatgctaggcatgatccgtgatcagatcctgtcatggccggcgaggtcattctcgaagaacctctcggagcgtgactggctgaggagctcagcgaggatctgggacatggtgaagaagtcccccgtcatctcggagtactgcaaggcgctccagagctcaggatggtttaggaagcaaccgtagtagtgtctagcagctacttgttgggatgcgcccgctttggccggcttggaaaaccagagaatcgccatcagatcaaatgaattcgcttgctctgttctgttcaatcagtcgactctgatgagataccgtgcatgtgtttgttagtttgttgggctttgtgtaatgagctcagagccagcgacagcaggtggcagtcagtcgtgtacggctcatgcttctctgcgtgtcctgtgctatgatttgaggctgtttcatgcgacgtctcataaatttcatcttctaaaaaatatatatttactgttctttacagcactttcaaaaaaa

SEQ ID NO: 15080 - DNA, 1447 bp, Zea Mays
agactgtcacggttcccctctgtgatgccatcctatttgtgacaataaggcccttttccaagagcttgtatcgccggatcaacaggttcttggccgagctgctgtggctccagcttgtctgggtggtggactggtgggcaggcgttaaggtacaactacatgcggatgaggaaacttaccgatcaatgggtaaagagcatgcactcgtcatatcaaatcatcgaagtgatattgattggcttattggatggatattggcccagcgctcagggtgccttggaagtacgctcgctgtcatgaagaagtcatccaagttccttccagtcattggctggtcaatgtggtttgcagagtacctctttttggagaggagctgggccaaggatgaaaagacactaaagtggggtctccaaaggttgaaagacttccctagaccattttggctagctctttttgttgagggtactcgctttactccagcaaagcttctcgcagctcaggagtatgcggcttcccagggcttaccagctcctagaaatgtacttattccacgtaccaagggatttgtatctgccgtaagtattatgcgagattttgttccagccatttacgatacaactgtaatagttcctaaagattcccctcaaccaacaatgctgcggattttgaaagggcaatcatcagtgatacatgtccgcatgaaacgtcatgcaatgagtgagatgccaaaatcagatgatgacgtttcaaaatggtgtaaagacatttttgtggcaaaggatgccttactggacaaacatttggcaacaggcactttcgatgaggagattagacctatcggccgcccagtgaaatcattgctggtgaccctgttttggtcgtgcctcctgttgtttggtgccatcgagttcttcaagtggacgcagctcctatcgacatggagaggagtggcattcactgccgcagggatggcgctcgtgacagggctcatgcacgtcttcatcatgttctcccaggctgagcggtcgagctcagccaaggcggcacggaaccgggtcaagaaggaatgaaaacggagggtggaaatgtgattctgggctctatttatgggcagctttcaaaatgactcgattcatattaatgtatacagcaccaaattccagacagaaacaggatgctctgctcctcttgtatttgtgtgcaggaaagaattttagggagttcatttttgcccccctcttttgggcagaggaactgtaggacatgaacttgatgttggtacatttgccctgtagacattctggaagcctttcagtagttcatttatcagtaaagcttgcatctttcatccatgtagttgtgcaccttgtctgtcactcatcacaatgttgttgtgttctaactgttctgtgatgaaaagcaagggatacagtatgttcaataaagc

SEQ ID NO: 15081 - DNA, 1528 bp, Zea Mays
ctttgcctctcggtggattgcatcgtgtcctttcattgatgaggtgaaggcatcgggaaatgtgttcgggaactacttccaggttgcaacctatggcgaatcccatggagggggtgttggttgcgttatcagtggctgcccacccagaattcctctcactgaggcagacatgcaagtagaactcgatagaagacgtccgggtcaaagtagaattacaaccccaagaaaggagactgatacatgcaaaattctatcagggacacatgatgggatgactactggtacaccaattcacgtctttgtcccaaacacagatcaaaggggtggtgattacagtgaaatgtctaaggcgtacagaccatcccatgcagatgcaacctatgacttcaagtatggagttagagctgtgcagggaggtggaaggtcatcagccagagaaaccattggcagggtggctgcaggagctcttgcaaagaaaattctaaagctcaaatcaggagtggagatcttggcatttgtttctaaagtgcaccaagtcgtacttccagaagatgcagttgattatgagactgtaaccttggaacatatagagagcaacatcgttagatgtcctgatccagaatatgcagagaagatgattgctgccattgatacggtacgagttagaggagattcaattggtggggtcgtcacatgcattgcaagaaatgttcctcgtggtcttggctctcctgtttttgacaaacttgaagctgaactggcaaaagccatgctttctcttcctgcaagcaaggggtttgagattggcagtgggttcgctggtacggactttactggaagtgagcataatgatgagttctatatggatgaggctggaaatgtgaggacacgaactaatcgctcaggcggtgttcagggagggatatcaaatggtgaaattatttacttcaaagtggcttttaagccaacagcaactatcggaaagaagcaaaatactgtgtcaagggagcatgaggatgttgaacttttggcaagggggcgccatgacccctgtgttgtccctcgagctgttcctatggtggaatccatggctgcgctggtcctgatggaccagctcatggcgcatattgcccagtgtgagatgtttccgctgaaccttgccctacaagagcccattggctctgctagcagtgcatctgaactgtcaccaaacctatcataatgtttgtcgtggaacatgtcccagctttccttctatcgaaattctggtctttgctaagcagtttgcaattcggaacccccataaaccctcgactattgtacctagagataaagtgaacggatatcaagatagaaatgcattaatgtttttgtgatgtgtagtataactgatatttaccccttttctttttttgagagaggacgcatgatgtcgtttgagcaataaagtttaatttgggagagataacagtgtcttcatatgatcagcacttgaacggtctatataaaggaattctgttaagaccac

SEQ ID NO: 15082 - DNA, 3024 bp, Zea Mays
gaaaactatttgttgcctggcaagatgctactgttgcctagcacatgcctgccattgaccgactgctcaggcaaatcctgctggacgggcacgacctcaggtcgctggagctgcggtggctgcggcggcagatcgggctggtgagccaggagccggcgctgttcgcgacgagcatcagggagaacctgctgctggggcgggacagccagagcgcgacgctggcggagatggaggaggcggccagggtggccaacgcccactccttcatcatcaaactccccgacggctacgacacgcaggttggggagcgcggcctgcagctctccggtgggcagaagcagcgcatcgccatcgcccgcgccatgctcaagaaccccgccatcctgctgctggacgaggccaccagcgcgctggactccgagtctgagaagctcgtgcaggaggcgctggaccgcttcatgatcgggcgcaccaccctggtgatcgcgcacaggctgtccaccatccgcaaggccgacgtggtggccgtgctgcagggcggcgccgtctccgagatgggcgcgcacgacgagctgatggccaagggcgagaacggcacctacgccaagctcatccgcatgcaggagcaggcgcacgaggcggcgctcgtcaacgcccgccgcagcagcgccaggccctccagcgcccgcaactccgtcagctcgcccatcatgacgcgcaactcctcctacggccgctccccctactcccgccgcctctccgacttctccacctccgacttcaccctctccatccacgacccgcaccaccaccaccggaccatggcggacaagcagctggcgttccgcgccggcgccagctccttcctgcgcctcgccaggatgaactcgcccgagtgggcctacgcgctcgccggctccatcggctccatggtctgcggctccttcagcgccatcttcgcctacatcctcagcgccgtgctcagcgtctactacgcgccggacccgcggtacatgaagcgcgagatcgcaaaatactgctacctgctcatcggcatgtcctccgcggcgctgctgttcaacacggtgcagcacgtgttctgggacacggtgggcgagaacctgaccaagcgggtgcgcgagaagatgttcgccgccgtgctccgcaacgagatcgcctggttcgacgcggacgagaacgccagcgcgcgcgtggccgccaggctagcgctggacgcccagaacgtgcgctccgccatcggggaccgcatctccgtcatcgtccagaactcggcgctgatgctggtggcctgcaccgcggggttcgtcctccagtggcgcctcgcgctcgtgctcctcgccgtgttcccgctcgtcgtgggcgccaccgtgctgcagaagatgttcatgaagggcttctcgggggacctggaggccgcgcacgccagggccacgcagatcgcgggcgaggccgtggccaacctgcgcaccgtggccgcgttcaacgcggagcgcaagatcacggggctgttcgaggccaacctgcgcggcccgctccggcgctgcttctggaaggggcagatcgccggcagcggctacggcgtggcgcagttcctgctgtacgcgtcctacgcgctggggctgtggtacgcggcgtggctggtgaagcacggcgtgtccgacttctcgcgcaccatccgcgtgttcatggtgctgatggtgtccgcgaacggcgccgccgagacgctgacgctggcgccggacttcatcaagggcgggcgcgcgatgcggtcggtgttcgagacgatcgaccgcaagacggaggtggagcccgacgacgtggacgcggcgccggtgccggagcggccgaggggcgaggtggagctgaagcacgtggacttctcgtacccgtcgcggccggacatccaggtgttccgcgacctgagcctccgtgcgcgcgccgggaagacgctggcgctggtggggccgagcgggtgcggcaagagctcggtgctggctctggtgcagcggttctacgagcccacgtccgggcgcgtgctcctggacggcaaggacgtgcgcaagtacaacctgcgggcgctgcggcgcgtggtggcggtggtaccgcaggagccgttcctgttcgcggcgagcatccacgagaacatcgcgtacgggcgcgagggcgcgacggaggcggaggtggtggaggcggcggcgcaggcgaacgcgcaccggttcatcgcggcgctgccggaggggtaccggacgcaggtgggcgagcgcggggtgcagctgtcgggggggcagcggcagcggatcgcgatcgcgcgcgcgctggtgaagcaggcggccatcgtgctgctggacgaggcgaccagcgcgctggacgccgagtcggagcggtgcgtgcaggaggcgctggagcgcgcggggtccgggcgcaccaccatcgtggtggcgcaccggctggccacggtgcgcggcgcgcacaccatcgcggtcatcgacgacggcaaggtggcggagcaggggtcgcactcgcacctgctcaagcaccatcccgacgggtgctacgcgcggatgctgcagctgcagcggctgacgggcgcggcggccgggcccgggccgtcgacctcgtgcaacggggccgcgtaggacggaatggatggatggatgggtttggttcctcgagagattgatgggtgaggaagctgaagctccggatcaaatggtggtactccatgatcgcaacaatgaggggaaaaaaagaaaggagaaaatacggtggttcatatgattgtacaatttgacgatctgtttgagtcggggttttaggatgatgtaaaccttcactcgccttttttttactcttgtttctcatccgcatcagtatcatctatctacatacagtgtcagagatgggaactgatccgcatcatcatctacctcccaaggcaccccagattgtattaatgtacttagttagcctgttttatatatacttataagtaccaaatagcag

SEQ ID NO: 15083 - DNA, 1586 bp, Zea Mays
ttaaaacccaacagaggccaaaaatcaagggtagtgatcaactatgacttccccactggtgttgaagactatgttcacaggattggcaggacaggaagggctggtgccactggtgttgcatatacatttttctgtgatcaggactcaaaatatgctgctgacctaatcaaaattcttgaaggggcaaaccaacaggtgccccgtgatttagaggatatggcttctcgtggtggtgggcgaggtaagaagaggaaccgttgggcatcccgctctgaaaggggtggtccacgatctgaactggattcaaggtacagcggcagagatggattagcatcttccgggagatcagagagtggtcgtggcagtcatggaagggatgattatggtagccgtggcaggtatgactctggtgaaactgatgggcgatctcgtaggtctgctagaggtcgcagtagaagtcgtagcccaagccccaagaggtcacaccatcatgaagctaggcgtagccgaagcaggagcaggagccgaagctgtagaaactttcgtgctagccgcagcaagagtcacagccctgttgctagcagtaggcatgaaaaggctgctgttatttcaggatctactcaacctaacttggggtatgcagagcacaaaagccctccaagatctcactctggggatgaccatgtgaaccaccctgatcaaaaggatgaccacatgggagatgggaagatggaaagggttgatcttgatcgctcgcccagcccacaatatgataagtctgctccatatagtcctgcgtacaatggcaaagccagtgactcgatgagccctaatgttcagccaaaggcagatgccaaatatgtcaaaccttctgggaaacctgagcctgcatctccattgcgccacagcaaaggcagagatgatgatgaaggtatcatagacgacgatggagagattgctgagggtgagatgatgatgaaggtatcatagacgaggatggagagattgctgagcgtgatttgcgtgcaagtgcagctgtgtagagaatggtaataactgacggagaatggcctgcatcttctgtgacaacaagactgttatgcaaactgcagtcgttcccatctgcaagagtccagaatgtagaaatgcatttgtgccattaaatgtctcgtaggacctatgataatacatctgccatatatgaacaaaaactgttgatgtatgtcctgttgtttgttaaacttcaatgacttgtgttctggtgtcttactgctagttctgttaagtgatttatgataaaacatattgtcaggtctggaagtgataaatttatgatacttgtcaggtctggaagtagtttattatattggcagctccctggttggagattcctaggattgcaaaacctggcttgtttgagagcaagggcattggaggggattgatccccttactatcttatagcctgatttgttgtgttgttttttctcgaggtgtttggttgcctgcatctggtcggattctgctttccagatgtaaaagacagtctagagcctggcatcacggatagcgtacggtacgaatttg

SEQ ID NO: 15084 - DNA, 2385 bp, Zea Mays
aacggagggagtatatcaaaaaaagacatccaaggaaggaaagggtggaggtggaagccgcaaaccaaaccctctctgcctcgtcctccctcctcctgcttcgtgcttccccttccccttctcgtctgcggcgccaagctcgagctcatcgccaccgagcctatccgcgaggaaggtaaattagttggagacttcgtgatggctgctgcgaagtcgggcgtagacgtggaaacgagggacggcggcggcggcggctccttcagcgaggagaggtttgttgataagctcaacaagctcaacaacacaacagcgagcattcagacactttcacattggtgcatttttcaccgcaagagggccagaaggattgtggacacatgggaaaagcatttcagtactgcaacaaatgataagaaaatatcattcctgtttctatcaaatgatatcttgcaaaacagtaagcgcaagggaggagattatgtgcatgagttctggagggttctacccagattattgaaacatttctacgaaaatgggggagaagaagcaaagaaactagtggcaagactaataggaatttgggatgaccgcaaagtttttggaacccgtattgaaagtctgaaagacggcatttttggtgacaaccctcctatattcgatcacagtgggaataataataattcaaatcctagctctaaccccttaaattccaaagttggaaggaaagattccagtacagtactaaaaaaactggctgttggtggtatgcctgaaaagattgtgactgcataccaatctgtgtttgatcagcattttgatgaagacacagctttaaacaagtgtaagagtactgttagtgttctggaaaatctaaagaaggatatagaccttgctagtaccgaaggtgatccgcctgcctcaacaatgatttctgacctacaagaacaggaaacaatcctgaaacactgcattgcacaacttggaagtgtagatgcagcgaggatatcactgataaaccaattaaaagaagctctcaccgaacaggagtcaaagtcagaggttcttcgcagccagttgcaagttgctcgagcagaggctgaacatgccattcaacttaggcaacggtttggtggtgccgttgtcgcaaatggcacaggatctagttctagtccgctgctgatgtctcctcagttacagtcgctgaatccagcaccctcactcgcccctccaatcggtgcagccggagatgagcccaagagaacggcagcagcaatggccgacaagctggcatctctgtcagcgccggtgcaggtcctgagctccatcttctcatctttcgtcgccacacacggcgcttcgctatcttccatgaacagcggatctcctcccagagaccaactctccggggcaccgccgggcttccaggtcgaaaagaggcccaggcttgagagaaccgtgctggccagcgacatgggcgcgcctccattctccatgcaagcaccacggctgcagcagccggttggatcgatgcccacacaagcagcgacacagatgaaccaagcgccaggcctattcgcaccaccgcctccaccaccgttgccgcctcttctgccaccgctcctgcaacagttcggtcaaagcgctggaggaatgatggggatgggaccgttcgggatgatggctggctccatgccgcctcctccgccgatgtccagcatcatgccagcaggttttccagcgccaagcggtccacctccacctccgcttccaccggctcagacccaaccccagcagcagcagcagtctcctcctcagccgccagcgccgcagcagtcagcagggttcttccagacatcagcaggcatggggtacttcccagcagtgcaggtgcagcaatctccgtccgcccaacgacaatgactctatggtggcatgacatccatcggggcgggcttataaaaggcagcacctcgtgctaaattttgtacattagacataattacctggtgtcgagcttatacgtgactggccctgctgcaagagaagcagcaggaccaatggtcacgattagaaaaaaaaagattgtagaataggcatgggggcttttgtttggtccgagttgttttaactcttcctgtttgtgtcgtgtgtgcagtagttagactttgcattgatcccctgaggcgcaagaaagtggtgctggaattgttgcttaatagagctgccctctgatatagcagtgcccttttaggggctggggcgctgggctgaagcagtgttagaacttaactggtcatagtgtcatagatatgatgtgaactgcaaatacttgtcctttttgtgacttaaatttattttctattttctatttagttttgaatagag

SEQ ID NO: 15085 - DNA, 3299 bp, Zea Mays
gtcccactcctcccgtctctattccccaattggccctcgcctccattaccttccccgtccccctcgtacatttcgacatcccctcccccccgactctcccgtcccgctcccgccgctaccagcgattccaatccgccctcccttccgccgctcaccgccgcggccccgccgcaagcgtttcgcctcgatatctccaccccgccttgctcgagccacgctcccaccgtccaggcgtccgctgcggaggtgtcggtggcccatctgaacaggctctcctcgtcggggcttttttgcttcggagggagaggcttcctgttcggcgcgccgtgagaagagcaccggccatgtcgcagactaactgggaggcggacaagatgctggatgtttacatatatgactattttatgaagagaaatttgcaggcaactgcaaaggccttccaagcagaaggaaaggtctcttcagatccagttgccattgatgcacccggtggctttcttttcgagtggtggtcggttttctgggatatattcatagcaagaactaacgagaagcattcagatgttgcagcctcatatattgagactcagctcatgaaggccagggagcaacagcagccacaaacacctcaacagaggcagcagcaaccacagcatatacaaatgcaacaaatgctgttacaaagagctgtgcatcagcagcaacagcagcaacagcagcagcagcaacaacaacaacaacaacaacaacaacctcagcagcagcagcagctgcaacagcagcgcagagatggttctcatcttctcaatggttctgcgaatggaatttctggaaacaatcctttaatgcgacaaaaccaaagtactgcaaatgttatggcaacaaaaatgtatgaggaaaggttaaaggtaccttcccagagagactctttcgaagaggcatcattgaagcaaagatacggagagaacgctgggcaactacttgattcaaatgaagcatcattgttgaaagcagcttcaagtgcacaatcctcagggcaaattttgcatggaactgttggtggcttatcaggcactctgcaacaagttcaggccaggagcccccaacttcctgggcctgctcagggtatcaagacagagattaatcacgttctgactcccagaggtgcaggcccagaagggtcatttataggtgtccaaggatctaatcaagctgggaacaatttgactctgaaaggatggccactcacgggacttgagcaacttaggtcaggaattcttcagcagaagtcatttatacagaatcaacagcaattgcaccagcaaatccagatgctgactccacagcagcagcagcagcttatgctgcaggctcagcaaaatatgtcttcaccaacatctagtgacgtcgacaacagaagattgaggatgatgctaaatagaaatgctgttcttggccgggatggacagacaaatagtggtagtgatattattccaaatattggctctcctagtcaaagtggcggagatatagatatgcttataaagtagaagaaacttgctcagcagcagcaactattacaacagcaaagcaatagccaacagctcccacagcaacatcagcttcagcaacctgctgtctctagccagcaatctcaaagttcaaatcaacatcttcaacaagaaaaactaggaattggaagtatgcctgttgatgggggcataccaaactcatttgggggagctgaacagacagcgaaaaagagaaagaagccaggctcatcctctggtagagccaatagttcaggcacagccaatactgctggtccctctccaagttctgcaccctcgacaccttccactcatacaccaggagatgcaatgtctgtgccacagctgcagcagaatggcggttcagctaaacccatggtaatgtttggctctgatggaactgggagcttgacatctccagcaaacccattggatgatgtggaccgtttgctggaagatggctcattggatgataatgttgaatcttttctatcacaggatgacatggatcctagggacaacttggggcgatgcatggatgctagcaaaggttttggtttttctgaggttgccaaagcacgtgcaagtgcagccaaagttgtctgttgccacttctcagctgatggtaagctgcttgctactggtggtcatgataaaaaggttactttgtggtgtacagattctctgaagcctaaatccttcctggaagagcactcgtttcttatcactgatgttagatttagcccaagcatgtcgcgccttgcaacatcctccttcgacaaaactgtgcgggtttgggatgcagataacactgactattcactccgaactttcacgggccattcagcatctgtcatgtcacttgattttcatccaaacaaagaggatatgatatgctcctgtgatggtgatggggaagtgcgcagctggagcataaataatggtagctgtttgacatgtgttaaggtgtttaaggcaggtgctactcagatgagatttcaacctcgtaagggaaagtatctagcagctgcctcagagaaagcaatctacatacttgatggggagacacaacatgcttgtagaagccccttgcaggggcacaataagaatattcaatcgctttgttgggactctgctggtgaatatctggcttctgtcagtgaagactcagtcagaatatggtcattcagttctggacgtgatggtgaatttgtgcacgaattgaatcgcagtggaaatcagttccactcatgtgttttccacccaacttatcaatccttgttagtgattggttgttacgagtccttggaactttgggacataagggagaagaacaccatgaccttcaacaatgcgcatgacggtttggttgcagccctggcagcatccagtgcaacagggaaggttgcctcagtaagccatgataggactctcaagctctggaaatgacttgtatgaaacccatgttggacttctgtattctggctgttagatgatagacaaacaagactttgccaaaaatgaccacatgacgaaaaggttgctgacaagatactctggagccgcgtgggctcaagaactaacagtgttttgttttgtggtcgttgtatgctgttcagtatgccactgaagcttgtaacttgtaactcgtaatagaaactttggttgaagaaagattgtacctcggacaagtggcaaatatttattctctaaaatattctgcattttgttttttgaccttgtaaaaca

SEQ ID NO: 15086 - DNA, 2250 bp, Zea Mays
cacgcggaggattcaatgcgcacctccggaggctggcaaggaacgtggtcctcaccgggaaggtgctgctcaacggcaagaagaggcggctggattacggcatcgtggcatacgtgacccaagagaacgtgctgctgggcacgctgacggtgcgcgagacggtgacctactcggccctcctccggctgccgtcgagcacgcgcaaggcggaggtgcggcgcatagtggacgagacgctggacgagatgggcctccgggagtgcgccgaccgccacatcgggacgtggcacctccgcggcatcagcggcggcgagaagaagcgactgagcatcgcgctggagatcctcacccgcccgcgcctcctcttcctggacgagcccaccagcggcctcgacagcgccgccgccttctccgtcgtccagacgctgcggcagctcgccgtcgacggcggccgcaccgtcgtctcctccgtgcaccagcccagcagcgaggtgttcgcgctcttcgacgacctctgcctcctctccagcggggagtgcgtctacttcggtgacgccaagctagcgacacaggttttgttgttttagctgtgccatgccaactgactgatgatcatcgatattcagcttcgaatgcgtttttttgagtctgatcacgcgtgcgtgcagttcttcgcggaaacggggttcccctgtcccagccggaggaacccgtccgaccatttcctccggtgtgtcaactcggacttcgatgatgtcgccgccaccatgaaaggctccatgaagctgcgagcagaggcagagctcgatcccctgttgaagtactctacctcagagatcagggaacggctagtggacaagtacaggatctcagattacgccatgatggttaggagcacgatacacgagataaccaagattgagggtgtgatggaggatgtgatccgtggcagccaggcgagctggttgaagcagctccgcacgctgacaagccggtccttcaccaacatgtcccgcgatctgaactactactggctgcgcatcatcatctacatcgtgatggccatctgcctgggaaccatctactacgacgtgggcaccagctacacggccatccaggcgcgcgcctcgtgcggcggcttcgtgtcgggcttcatgaccttcatgtccatcggcggcttcccgtccttcatcgaggagatgaaggtgttcaccctcgagcgccagaacggacactacggcgtcgccgcctacatcatctccaacttcctctcctccatgccgttcctgctcgccgtgtcctgggccagcgcgtccatcacgtactggatggtcaagttccggccgggcttcagctacttcgccttcttcgccctcaacctctacggcggcgtctccgtcatcgagagcctcatgatgatcatctccgccctcgtgccaaacttcctcatgggcctcatccttggcgccggtgtcatagggatcatgatgttgacctctgggttcttccgactgcttccggagctcccaaagatcttctggcggtatccagtgtcctacattgtctatgggtcatgggggttgaagggcgggtacaagaacgacttgatcgggctggagttcgagccgatgatgccagggcagccgaagctgaccggcgagtacatcatcaccgagatgatggggctgagcctgaaccactccaagtggctggacctcgccatgatcttcgtcctcctcttcgcctaccgcctcaccttcttcgtcgtgctcaaggtgaaggaggccgctgcgccatacatccgcgtcgcctacacacgattcaccgtcaagcgtctcgagcggcgcgcctccttcaggaagacgctggccatggcgtccatgtccaagcggcacaacccgccgcaccccatggccatccaggaaggactcagctcgcctatgccgtactgagctgagccgaggcgaaggagagagcggagggagacggaagtggtggtcgatatcacagttacttgtggatgtgcttacagatttgtccgttccattgtttagtttgtcagagagcgttgtcaaagataccccacgcgatagtcggtcttcagagcattcgtttcactgtaataactctgaacaccatacacatacaagatagtgctgctgtgcgtacttgtttttttttgtaaacatgaaaccaggcaatgatccttatattaagaaagtcacgcagtcaaaacttacttattattaa

SEQ ID NO: 15087 - DNA, 2298 bp, Zea Mays
cgcctccgcccgcagccacagtccagcagctccaggcccgcctgagtacctgaccagagagagctatatctacttcgcccgcgcccgcggatcccctcgcctcgcgatcgccaccacagaccacaccaacaatcccctcccttctccccggggccgggcttgtcttcttcctcccgattcgttttctttttcttttcttccgctgctgcaaaatctcgcgctggcgcggcccgaggccagaggactccgatccttatccctcacgcatctcccgcctcgcctccgccacacgttccgcgcctctacagctctcgacctcgtctggatttttttccccgacccgattttcgcatcagctccttctgcccaccgggctcgtctcctcccctggtttctttttcgtcacttgtcaccgctagttcctttagagaaggtgtacccccattattccattagcggcctcactgacgagagagattttggcgtgactatccagagtctccaatcttttacacccaaaactcttctcagctaccggtgcggcatatcgcccctgtcggcggcgaacatttgagttctcgcgacgtgtctcgaggattctgtggtggaagatcggatcttttgctgcggattccagttgccaaccaagatgtcggctctcctcgatctactgatggggatctttcgccagcagaccctcggcggcgccgccctggagctcgccgcgctggcggcgccgctctcgctcgccgcgctcgtcggccttctcatcgggtgggcgtggcgcccgaggtgggcgggggtcgtcacggtcgacaacgcccaacagatggcgcagctccccgcggcggcgcctcctccggaccgcgccaccgccaccgcggtggtctctcgcaacgaggcggccgccgtcgtaccgaggatttgctgcgccggtgtctgcagaactgtggtggctcatgcggcggccgaggacgagcagcagcagctggcggtcaacaccggtgacttgctgcacctctggcggctcgtcgacgagaaggacggtggcccgtcgtggattcacatgatggaccgcaccttaccaaccatgaggtaccaagcctggcggagagacccaccgagtggtccaccacagtaccgcagcagcacaatcttcgaggacgcgtcaccggaggttgtgagagatttcttctgggacgatgagttccggatgaagaacagctgggacgacatgcttcttcagcacgagacgctggaggagtgcaccgagactggaaccatggtggtccggtgggtcaggaagttcccgttcttctgcagcgacagggagtacatcataggccgcaggatatgggcgtctgggaagacattttactgtgtgaccaagggtgttcctcgtccctccgttccaagacaaaacaaacctcgccgtgtggacttgtactactctagctggtgcatccgtccagttgagtcgagaaaaggcgacggtgcaatgagtgcatgcgaggtgctcttgttccaccacgaagacatggggattccatgggagatcgcgaagcttggcgtccggcaggggatgtggggctgcgtcaagaggatagagcctggccttcgggcgtaccaggtcgggaggaccgccggagaggctgtttccaagtgtgctgccatggcacaggtcaccaccaggttcagtgccgacgagctcgtcatcgcagggccgggcaacacggaggccagttcttcttcgtccggcgacggcgcagaggttggcaaggtgacgaagcactgggcgaacagcatacccaaggttctcatggtcggtggcgctgtggccctggcctgctgcaccttcgacggtgggttgttgaccaaggccgtcatcttcggcactgccaggaggtttgcaggagggccaggaaggcggtaggtacggtgtaacggtggacggaaagatccagcggcacaacacaaaacaagtgttgctgcactgcagcccgctgcgggttaataggttagaaatatagcatttgttacgaggacacatatagaagtattatggaagaaaaccgctgttagataagaaatacactgctgtgtattagtagttaataacaagaattcttggtttttgtatgtaaccatattgtggatcggatccattgttcttccccatggacactactactaccagatcgatgttgaccttgtggcagttgctgcagtttttttttgacagagtgtgcttagaataagaaaatttttctccaaagtaggcaaagatttgaacgtatt

SEQ ID NO: 15088 - DNA, 2256 bp, Zea Mays
aactctaccaaaataattagttttaaattttgttttaaaaaatagaaataaaaaaacccaccgcgttcgtgcgtccgtggagagggacggagaccagtcgcccgccgacccgtgcgtctccactcgtccacgcgcaaatccccttcccaccccctgaccagaccaaaggcagtagcaactagcaatgcagcttcctcctcgtcttcctcctccacctcagctgctcatgctcctcccagtcccctcctcctgcccccaatcctcttccgcccctccctcgggcctcttccccatctcctgatcacactcgctcgcgcgccatgggcggccgcgcctcccgccaccgcgcgcagccgcacgaccagtcttctcaccctcctcctcggccgccgcccaagcagcagcagggccagcagcaccccaacaaccgccccaacaagcccaagcagcagcagcagcccccacctccacgtcctccgccgccacaccaggctccccccgccgcctcccccgccgccccgggcgcggccaccgtcggccgcgtgctgggccggccgatggaggacgtgcgcgcgtcctacacgttcggccgggagctgggccggggccagttcggcgtcacctacctggccacgcacaagcccaccggccgccggtacgcgtgcaagtccatcgcgacgcggaagctcgcgcacagcgacgacgtcgacgacgtccgccgggaggtgcagatcatgcaccacctcacgggccaccgcagcatcgtcgagctccggggcgcctacgaggaccgccactccgtcaacctcgtcatggagctgtgcgagggtggggagctcttcgaccgcatcatcgcgagggggcactactccgagcgtgccgccgccgccctctgcagggagatcgtctccgtcgtccacagctgccactccatgggggtcatgcatcgggacctcaagcccgaaaacttcctcttccttaacaagagggaggactcgccgctcaaggccacggatttcggactctccgtcttcttcaagcccggcgagcagttcagggatcttgtcggcagcgcttactacgtcgccccagaggtgctcaagcggcgatacggagctgaggcagacatatggagtgccggagttatcctctacatcctgctatccggcgtccctcctttctgggccgagaacgaggatggcatatttgatgctgttttgcgaggtcatattgacttcgcatctgatccctggccttccatatcgaatagcgcaaaagatttggtcaagaagatgctgcgccaagaccccaaggagcggcttactgctgctgaaattttgaaccatccatggattagagaggatggagaggccccagacaagccactagacataacagtaataagcagaatgaagcagttccgggccatgaacaagcttaagaaggttgccttgaaggttgttgctgagaacttgtcagaggaagagatcgtgggcttgaaggaaatgttcaaatccctggatactgacaacagtgggacaataacgctggaagaattgagagctggtttaccaaagctcggcaccaaaatctctgaatcagaaataaggcagttgatggaagcagctgatgttgatgggaatggcaccattgattatgttgaatttatatcagcaacaatgcacatgaatagactagagaaggaggatcatatatttaaagcattcgagtattttgacaaggatcatagcgggcacattacagttgatgagttggaagaagctttgaagaagtatgatatgggcgatgaggcaacagttaaagaaattattgctgaagtagacacagatcacgatgggagaatcaactaccaggagtttgttgccatgatgaagaataatagccccgagattgttccaaatcggaggcgcatgttttaagaaagacttctaagatatatttttccgcggtcagaggggagagcaactgatactcgaaagtgggattcagcctgggcatatgtgcaatgatattacagactttggacaagtcatcagtcatgggtgattgcctttgtgttgcttccattttcgaccatctcatcctacgatctttccaagttatctttaatgaggtgtgtcgtgtggtctatgtttcctgcctctggatcttttatgtaagagaaacggacttgtaaaacagttccaaattatcatataccaggcgaaaagtaatgcgatgaaaaaaaacaacaac

SEQ ID NO: 15089 - DNA, 765 bp, Zea Mays
gatatctataattcagttatcataacatatggtcagtagatgaagcacatccctgtatggctcctgaaggtggcgagagcgtcgcagatgttgctagtagattttcagctgtgctgttatctgcagagacacagtttcatggctctgcaattcttattgtcagccatggggacccactacaaatctttcaagctgtcctcagtggagccaaggagaacatgtctttccttgacgatctcaccaacctgaaggtgaaagatactgacgatctcaccaacctggaagtgaaagacacgatggtggcatccattctgtcacagcatcgtaagtttgcgctcatcacaggagagctgcgccgagttgtgtaacttgctgctgcttgggtttaacgtcgcctgtcaattgaccatatgtaaacctgcaatgtttgcctagcacattcctccgtaacttgacagggatatgaaattcgtctcctatggaatgctataacctcagaagtcttaaattattttgaagaagcggcctaaatatttggttgcttgttgaattgtacgattgaaacccagctgccttttattttgtccttttttgcagtgttttgctaatttctcttacgaattacgatttgagcttcggttcatattttacttccaggtcagagcttgagcgatttggcttgtttgcccttgtaatcttcaatcatcggggccagagctatttgttggccactcgttttttattctttcggaatataaaaaataa

SEQ ID NO: 15090 - DNA, 1436 bp, Zea Mays
cgcgtcagcagcaactagcaaggccgccaagcggcccaggagtccaggacccaggccagctccaagcgaacagcctacgtacggctctatacctctcgccctctgagtctcgcgcggcgtccttagaatacggtgcagcgagcagcaagtcgccgagcagccgagccaccgccgaacacagggcgccgccgagcagccgagccgccgccgagcgccgagtcttctctgataaagcggagaaattggtagcagaagcagctgggtatggttcacagttggttttgtttccggaagtctttgttggtggctacccacatggatctacctttggactggttgtcggcaatcgcactgccaagggaaaggaagactttcagaagtatcacgcatctgccatagatgtgcctggtccagaagtgtcccgcttatctgcattagctggaaaatataaggtgtttctggtgataggggtggttgagagggcaggatatacactttacaacacggtgctctccttcgatccactgggaaaatacctagggaagcaccgcaaggtcatgcctactgcactagaacgtgtattctgggggtttggagatggatctacaatacctgtctacgatactccgattggaaaaatgggtgctctcatttgctgggaaaacagaatgccacttctcaggacggccatgtatgccaaaggtattgagatatattgtgctcccacggttgattgcatgccaacttggctgtcttctatgacacatatcgcccttgaagggggatgctttgtgctgtcagcgtgccagttctgtcgtagaaagaactaccctccccctcccgagtacacattttgtggcctagaggaagagccatccccggaatccgttgtttgttctggagggagtgtcatcatctcaccattgggaacagtgttggcgggtcccaactacgaaagtgaggcccttctcactgctgacctggaccttggagagattgttcgagccaagtttgattttgacgtggtgggccactactcgcgacctgaggtgctgagtttagtggtgaagagcgatccaaagcccgccgtctctttcatctcagccgctggtagggacgatgactatgtgcagacctaatgacaaacatatctttggtctttagcttccttatacggcaatcgcatgcatctgtataattgtgggtttccggaacgttgcacgttccgtcagaataataataaactgttatgtacaataaaatagtaacaataaggctttgttcggttattcccattatacatggattggacgagattggaaaaaatttaaaagaagtttgacttgtttgagatttaaactcacccaatctcactcaatctatatggattgagagctaactaaacaacctaatggatatctatatagattgagagc

SEQ ID NO: 15091 - DNA, 652 bp, Zea Mays
gagcgaagtgttatccgtcctcttagtgcttcagcgcgctgaagcgggctttaagatgtcagaagcactcgagaaagataaagaaattgatgaagaggaagaggagtatgtattgctagagttggacaattgtctttattcagacatgtcgccaggtgctccgttcgtactctccggtttggatacattgacgcctaccttgataataggtgacagtcttaagatgatcggagaatatgaagaaactattggcacctgctatctattctctgaaactgaagctgaaccgaaacctacaagtaatgagatggcaccttctgaagaaaacacagacaaacaagttagcagcagtaaggaagcgccgtcgaaggaggtgaaccatctcgccagcgttcaaaagatcctcaaatttcggccaatcaatgcggagcattcgcagcatcgagcatatcagcacaaggacaaggaattctagaaaaaaattgtagctggctatctgccgttatcttcttcattggccatccaaacgaggtggtttgtacactttgctttgttctatacataatctgatctattgtatcgatctgtcggtaattgtttctcagcattccccaaggaaatcatacaccaagcgggagaatttttttgtcat

SEQ ID NO: 15092 - DNA, 5613 bp, Zea Mays
aaaacagaagaatcctggaaattatatgccttctgccatttcaattcccgtggggagccatgttctgggcctgggcgcaacaagtattgaagaaacaactgccactatgataactcaggctcctgcagtttcaaaatcagaacgaagaaaacttccaggaggcagtcaacaaggtattcagtttgagagttcagcatcaaaaacaaagatggtatcagctgtggaaccagcacctgcaaatgttgaatgcatgcaaggtactgaagttaatagttcagaacagacaatagtttctgctactgaaccagcacctgcaaatgatgaacacatgcaagagcaaccaacaaatatcgtttcatctgtggaatcagaaccttcaaatgatgaagagcacacaaagcatgaagtgtttcttgcgactactggtgataatatgcttgcttctagtgcaggaactgaaatattgcgggatacagttgagcatgctgcttgccagccagaagcagtatgcacagatggaactgcaaggcagtctgaattgtcgcaacttgatagaaaagcctttcatgatgcctcatataaatacactcatgggtccactaaagatgatggtatcttgcccagtgaaggtacttctgttgatgttactggttctaagcaggatgatgtgaacattgttggcacacaaactgatgatgtttctcggggttctagtcattttccagttattttacaatcaactgagtcagatcggcctccaggtcaagtgaagaatttggagagtaggatggagcaggtgaaaacagaagaagctttggttaacagttctggtggcaatcaaactcacagtctgggcgatgaaccttctcataatacatcattagcaagaaattctccctcagaacactcgaatgagcgttgctctgatcaagtaattggtgaaaatttcaaaagtaaagaaaatattgttgaagtccattctggcattaatactgatggccccgatgaagctctgaatgcattgcacacccaatctaaggaggccagcatgacagatattggtgtacctactgatggtgatagatgtgaaggtaaagggactagtgtcgaggtctgtgctgacatgaatactgatgggcctgtggctacccaggatgcttcgtccacgaaatctgataaagagtcctgcatgatggaatgtggtgtgtctaccgatggctgtcccacagtttgcaaaacacacaatgatctccagggtcatgtatcttgtgaagaaacctttgttaggactggtggtgatgacacaacccatatcaccaatgcaaattatggttctaataatgaaagtgaggccaccattgctagtcctgttgaaaccacacaaaaactgatggaagggagcactgttattgtgtcggagaattctgatttaaataagcaatgccacacattgcatactagaaatgatcctcctgcaaataccctgttgatagttgagtctaacaaagttacttgtgatgctgaaattgtttgtgctagcaggttagaatcttctggcattgaggctgaaacagtgggtatccaagagtcagctcttactgattttgagggaacaaaaggaactggggatttgggtgacagaactaacagtcaactgcatgatgatgttcatgggacatcatgttccacgatagctcttgtatctgagaaagaaccttccgaagatcttaccaccggtagccattcagaagcatctaatttacttgctgctgtagaacaaactcaagaaactactgttgagaaccaagagatcatagatgcagtagtgtttatggatgcctgcaaggcagaacctgttggtgattttactattgctaaaggagctgaacagactgtagaaatggttcattatgttgataagcaatctgctgtattagactatgttgagacacagacaaaacgaacttcggtttgtggttctacgctaaatgaatcccctcaggctgcagggttggaagaagactgctctgtactgaagcatggtgatcctacttcatctgagcttcttactgtagcacctaatccaatcggtgaaacttctgttattcaagtggaaccagaggcaagaaactcagatggatactgcacaacagaggctggcagtgctttatctgaaactgtcatgggattggagccaaataaagaaactgcggttccaatgcaagagaatattggagaagctaatgataattttaataattgcgaagcacacaataattcggagattcatgcatttgaagtgtcgatggaaacgcagtcatcagaagtcaaggaagtatcttctattcagtctggtgcagcaaatttgagcacacagacaactgcactgcctgatgtaacaggacaaaccagtatggcatcgactggagaactagtatctacaaatgaacacatacacatgcaaggcactgaaatcaattcagagcaacaaacaaagatggtttcacctgctgaatcagcacctgctaatgatgaacacgtgcaagacattgtgattcttagttcagaacagcaaacaaagatggttttagctgcagagattgacgcattatgcgtccaggagactgcaattattgatcttgggggagcaagaggaacagttgacctgaatgacataagaacacaggttcctgcattacctggaagggatgtgctaggtgatgaaattaagggttcagaacaagcaaaaatcgaatcgattgcagagatcgaaacagtgggcgtcaaggagaatgtcattgctgatcataaggaaacaggtaacaacagtggcgtaagtatacatgcgcctctattagttgaatctggacaaaaggcatcacctggagttgaattgcgtggtattgaggttgatgctcatgttttggaacaagcaaagatggtttcagctctagaaccagactctactccagacgatctagggcgtcacacacatgaagtgcatgtaactgttgatggtgctatattatcatctagaggggagcaggacattgcaagataacataagcagtggtgctgatgtggacctaataactagccaaaggaaaacagactctgaaggtatcgaggatccttctattgtgattagcgtagaggagttccaatgcctttatgatgctaacagggaccatttttactgatcctcctgtgactaccctggtgacagctgaatctgataaaggtacttgtgatgcagaagtttgtgctgacaagttagaaccttctggtggtgaggctcattgttcagaacaaataaagatggcttcaattgcacaagcggtgtctagcatggctttagtaggatattcttcttcagaagactcaatggtggatgctgctgcccgagtaactgatgctgattttgtggatagtaaagcagctggtgtttatcgccaagaaactatgcctactcaaaccacctctaccctcccagagaacatggattctcctgcaactgctgctaccatggttgaatcgaagtttgctgcctcgtctgagcacgttgcaggacccgagccaattgatgaaacttctgttatgcaagtggaactggcaacaagcacaggggatggatgtgcagcagatggtcacaatcttgtttcatctgaaactgttgttgaagtgaagcttgctcaagaaattgttgttcctagtccaggtggtagcatagaagctaataatacttctaccatcagcgaagtatacaaagatacccagtctcgtgcatctggtgaagcatgcaatgatggtcagtctcatggtgatgaaaatatgaaacttggtgaagcttacactgaactgcagctggcaccttcctctggtgaggaggccatgacatgtatgtgtagtgagctgcccagccaggaggtggaggctccaagcagtgaccctttggagaataatgaagaaacgaaaaatgaagctgctgctcaaggatcagtaaatgaggattctgctcctcgtgctgaaaatgcaaagattgatgaagctgacacagaacaggaactgcttccatctggtgaggccacggtagacgaatccagcgagctactcagccaagacgaaaaggtggctcgtaaagatgcaaagatggaagagtctgctgctgctgctgctgcacagagacagctaactactgaagttgctcatgcaagtgaaaacgcgaaacttggtgaagatggcacggagctgcaactgccaccaccttcaatggtagacatatctagggagcaactcagccaggaagtggaggttgcaagctctgggccttcaggaactgatgaaactgctgagatgaaacggctaaacactgaacattcacctggtgatgaaacttcaaaacttgttggaactgatctaggactgcaattgtcaccttctggtgatgccatggtagatatatctaataagccacccagctgccaagacgtaaaggaggccccgagcagtgacattttgggaaatgatgaaaattcagacaccgagaagactcctgctgccttgcatggacggctgaacaccgaacttgctcctagtggcagaaatacagaatttagtgaagctgacactggaaaacaagagacacccgtgtctgctgaggctatggtagaatcatcgagcgagcctcgcagccatgaggcaaaggaagctccaacccctgacctgtctggggatgatgaaaaagcgaagtcagcaagggctgctgttgttgcggaactttttggagatgcaacagaaggtggttcggatcagccattgccgtctcctagagaacaaggcaaggaagcagaggccgatggaggcttttagagtaaagttgcaaatattgtatcaagagatactagaatccgtgtaagtaagaactgctaatagtgcttttagttgtaactggtgtaagcttctactcagaatcaaaagcgacgtgctgagattacagcaacagtggcctacggcagtttactactgttttgtgcaatattgctgctgagttttgttgagacaggcaattgatctgtcatctgtctcgtcttgcatcgaagttggcagcaccatggtgaggtgctcccgccttaacctggaagcgctgacagagggaagaacaatactctctggtttcctaatgttttcctgttcactgttttgatttgatgctgcattgcagtagtgtgacttagtaacataatggtgcgtttggatagacggacataccgatccagaatcatctgaacctaaatattgagtacaagcttagattatctgtttggtctgctttatgtctgggtgcaatgctctctgatttctggacggagtggtaccgcaatccaaacagactttaatgtttgggtgcttcaggtcataatcaaccatctaatttactttgcaaatgaatgtttcaaactggactgctcaagcctaccaagtttaatggtccttcctagtattgaatccttttgagtctagcccgtttcctcatttgaattttcactgttagtgtgcctatacttgcctcacgtagaattttgaaagcttatggttgggtgcgttgtactcgac

SEQ ID NO: 15093 - DNA, 1295 bp, Zea Mays
tcagcttctggtacctgacatgttgctactaagacagtagtataggaggaaaagagacaggctaattgaacgcgcttctgttgcacgcttgcctttgaaatggggcaatgtccatgcatattgctacaaatctgttattgatggcattgagcatattgccatggtgaaaggtgatattggtgacggccaagacattttggtgagggtgcactctgagtgcctcacaggcgacatttttggatccgcaagatgtgattgtggcgaccagcttgcgatggcaatggagatgattgagaaggctggaaggggtgtattagtctatctccgtggacatgaaggaaggggtattggtctgggccacaagcttcgtgcttataacttacaggatgatgggcgtgatactgtggaagctaatgaggaacttggtcttcctgtggactcacgggaatacgggattggcgcacagatattgcgggatctaggagtccgttcaatgaagctgatgactaataaccctgcgaaatatagtggtctcaagggctatggattgagcattgcgggcagggtgcccttgattacgccaattaccagtgagaaccgtaggtacctggagactaaaagaacaaagatgggacatgtatatgggttggccaatgcgcaggccaacctagcaaatggcagccagagcacagaagagaatcattaggcccccaagcatgtttccattattattccagcaatccagcttggtgacacaaaagagtgatatgattcttcgtttggggagttcctgaaatcttctcccccgatatttccgtagattctttcgcaaaaaagccgatatttcggtagatcgatttgttcttcaattgtaactgtaggtttcaaggtggctaatgagtaatgagcctaataatgaacggtaggtttcaagatggccagtaatgatatacacggagttagtcgtcataatgtactgtgttgagttttacgactttatcgccttggtgtggttgtcctgatggagttgtgatcgaatggtgtggcttttcactgccctttccttcacccactaaaaagcatagaatgtggagaattttaccttgagccattatagaagtttataatactttatgtgccacgaaatttttggttgtccctcttcatttcttcgtgcaaagttttctggttgtgtgtgccacttctgtcagtctcgtcacgtcgaagaatcagttcttatctgaggtctcttatctcatctcctattatgtcttttatttcaaactttactataa

SEQ ID NO: 15094 - DNA, 989 bp, Zea Mays
tgaaaacgatagaagaccttgttgttcctgcttcagttgatcagttgctatcggattacgcaaaacgatttcaccagataaaaactccacgaaagctattatggaagaaaaatcttggaacagttaagttagaactgcaatttgacggaagaagcgtgcaatttactgtagctcctgtgcatgctgcaatcataatgcggtttcaagagaaatctagttggacttcaaaggcacttgctacagaaattggcatacctatggattctcttaacagaagaataagtttctggacaagcaagggggtcctgactgaatcagcaggaccagatgccgatgatcgcaccttcactgttgtcgatagcatgtctgatgtcaacaaggacagtattgtgaatgaacgcatggcagagtatcagatgactgaggaggaaggtgaaagctctgtggcttcagtggaggaacagcttaagaaagaaatgacagtctacgagaaatacatcgtcggaatgctaacaaattttgggagtatgtcgctggacaggatacataacactctaaagatgttttgtattgccgagccatcgtatgacaagtcgctgcagcagctgcaaagttttctttctggtctagtagcagatgaaaagctagaaacgagggatgggctgtacttgctaaagaggtagcagccgtttctatactaggatagtgggttgttagactagggttgtacacttgtactatttgctaatgagttgtttagactagagatgtcaggtaatcagatataacacacttcattatcaaagctatgttatcgggttcagaggcagcttacatatcctatctcacatcctcctttattttaaacttcattatgtaaacaatgactatgaaggtgttactatggaggtatttgagatggctctaggttctagatccagtatggagctgtagtttatgtcagtttatttaaatagttttaaagtatt

SEQ ID NO: 15095 - DNA, 6620 bp, Zea Mays
cagaaagtgtttttttgcctttttatcttcgctcgttttccttcccccgctctctctccaccccctccgtcctccgatccaaactaccgacgaacgccaccacccgaattcgaaaccctaggcggccgctgtagaacacgtgaggctgtagtgcctcttgttcggtggagccggcccgcggcagccggctatgtcgacggaggacgagaagctcctcaaggaggcgaagaagttgccgtgggacgagaggttgcagcataagaactggaaggtgaggaacgacgcaaacatcgacctcgccgctctatgcgactccatcaccgaccctaaggatgcccgcctccgcgagttcgggccgttgtttaggaagacggttgcagattccaatgcgccggtacaggagaaggcgctcgatgcccttctcgcgttccagcgagctgctgacgccgatgcatcaagatacgcgaaggaggtctgtgattcaatcgtggccaagtgcctcactggccgaccaaagactgtcgagaaagctcaagctgcattcctcctatgggtggaactggaggcatcagaggtcttccttgaagctatggagaaggctgtgaagaacaaagtggctaaagcagttgtacctgctattgatgtgatgtttcaagcactaagcgaatttggaactaaggtagtgccacccaaaaagattctgaagatgctacctgagctgtttgaccatccagaccagaatgtccgggcttcttctaagggtttgacactagagctttgtcggtggattggcaaagaccctgtaaagtctattttatttgagaagatgagagatactatgaaaaaggagttggaagcagagttggcaaatgtgtccggacttgctaagccaactcgaaaaataagatccgaacaagaaaaggaacttgaggaggagtctgtgcccgagacaagcggggctaacacttctgaagaggcagcgacagatgcccctgtggagatcgatgaatatgaccttgttgatcctgtagacattttaaccccactagaaaagtctggattctgggacggtgtgaaagcaacaaaatggtctgagagaagggatgctgtggcagaattaaccaagcttggttcggcaaaaaaaattgctcctggtgattttcatgaaatttgccggacactgaagaagctcatcacagatgttaatttggctgtttcggtggaagctactcaggcaattgggaatttagctagaggtttaagagcccaattttctggaaatgcacgaatgctccttccggttttacttgaaaaattgaaagaaaaaaagccaacaatgacagaagcactatctcaaacacttcaagcgatgcacaagtctggttgttttacacttattgatgtgattgaagatgttcgtgcggcagtaaaaaacaaggtgccccttgttcgttctttaacgctgacctgggttgcattttgcattgaaaccagcaataaagcaactgtactaaagttgcacaaggaatatgttcctatctgcatggagtgcttgaatgatggtactccagaagtacgagatgcatccttttctgttttgactgccattgccaagatggttggtatgaaaccattggaacgatccttggagaaattagatgatgtgaggaaaaagaagttatcagatatgattggttcttccagtgacagtgttttgagttcaggaacagctccaatcacaacatcaggagcagccacatctgctcgcggggttgcagatagcatgtcaatgaagagatctgctgcaagcatgcttagtggaaagaagcctgtccaggcagcggctgctaccaagaaatctggaccgtccaaatccactgcagcaaaaaagacagatggtgggtcacagtctaaggcatcagctgctcttgagattgaagacgttgagccggcagaaatgagtttcgaggaaatagaagagaggttaaagtctgttgtgaaagctgagacaatttcccagctaaagagctctgtctggaaagagcgtcttgaagctattggcgtactcaaacaagaggtggaaaatcttacggaacttgataagtctgctgaacttctgattcgtttgttgtgtgctgtgcctggatggagcgaaaagaatgttcaggtacaacagcaagttatagaggtcaacacctatattgcctcgactgtaaacaaatttccaaagcgatgtgtggttttatgccttcttggcgtaagtgaaagggttgctgatataaaaacacggacctctgcaatgaaatgtctcactgccttctgtgaggcagtgggtcctggatttgtgtttgagaggctttacaaaataatgaaggagcacaagaatcccaaggttcttagtgagggtattctttggatggtctctgctgtggaagactttgggatctccaatttaaagctaaaggacatgattgatttttgcaaagacaccggtcttcagtctagtgctgctgtaacaagaaatgctactataaaattaattgggatgctacataagtttgtgggcccagatattaaaggctttttaagtgatgttaaaccagcacttctaagtgccctcgatactgaatatgagaaaaatccttttgagggtgctgctgctgctgctccgaagagaacagttcgagttctggataccgcatcttctgtatctgctggcttgtttgatgggttgccacgagaagacattagtgctaagataacacctactttactaaaaaatctgggcagtccggactggaaggtacgattggagtccatagatgcagtcaccaaaattgtggaggaggctaataaacgtatccagcctacaggaacagctgacctgttcagtgcacttagaggccgtctttatgacagcaacaaaaatttagtaatggcaaccttgtccactattggtggccttgcatatgctatgggaccttctgttgaaaagtcaagcaagggtattttggcagatgtgctgaagtgtcttggtgacaataagaagcacatgcgagaatgcacattgactgctctagattcatggattgctgcagcccaacttgacaaaatggttccatatattatagtgtctttgggtgatcagaaaacaggttcagaagggcgaaaagatctctttgattggttgtctaagcacgtttctaaaatgagtgatccatctgaggctttgcctttgttgaagccatctgcatcttctttgatggataaatcttctgaagtccgcaaagctgctgaatcctttatgaatgaaattctcaggatctgtggccaagaagtggttggaaggaacttgaaagatttgccatcacctactttggctattgtatcagaaaggctgaaactgtctactgtacatgaaggattttctgaatctgttaagatggtgacaacaagcatgagtttgccatcaaaagctggtttgaagaacaataaacatggtcttaatgatcgtggttctaatgtgggcaaacttgtgtcccaaagaggacttcccgccagggcatctgttactatggtttccacccaagaccctgcacaatcccaagcattatttaacataaaggactcaaacaaggaagagcgggagagacgtgttttggtaagaaaattcaagttcgaagaaccacgtcgtgaacagatagatgaactaaagattgatttgtttaagcatttccgagaagatgtaagcctgcgattatggaactcagactttaagaggcaaatcgatggtattgaattgctacaaaaggcacttccttcaagttggaaagaagtgattgaacttcttgacatattattaaggtggtttgtcttacgcttttgtgaatcgaacacaacatgtttgttgaaggttcttgactttcttcctgagctttttgatattttaaaagaccagtcatacatgttgacagaagctgaagctgcaatttttcttccttgcctcatagagaagtctggtcataacattgaaaaagtcagggaaaaaatgggggagctgataaagcaaatgatcaacatttactctcttcccaaactaattccctatatacttgaggggctccgctccaagaataaccggacaaggatagaatgtgttgatattgttggatatttcattgaccatcatgggaccgaggttggtgggttgatgaaaaacttgccatctgttgcagcactgacagcagagcgtgatggtgagattaggaaagctgcccttaatacgcttgcaacagcctacaagaaccttggggatgatgtatggcgatatgttggaaaactctcagatgcccaaagaagcatgctcgatgataggtttaaatggaaggcaagagaaatggataaaaggcgagaaggaaggcctggtgatgcacgagcagctctgaggcgttcagttagggagaatgggtctgatatagcagaacaaagcggagaagtagtgtcccgtccagtggctggatcaatgatctcaagggacttcggatatgcagatgctcatatggataggcacatggtacctaggcagattccaagtacaagtggtcctgtggactggcgcgaagctctcgagatagttgcattaggtttgcctgagcagtccgttgaaggtatgaaagttatatgccatgagctaacacaggcagctgaccctgaaagcacattgcttgaagatcttattaaggaagctgacagattagtgtcatgcttggctgttatggttccgaaaaccttcaattttagcttatctggtgcttcttcaaggtcttgcaaatatgtgttaaacacactcatgcagacatttcagatcaaacgtcttgctcatgctgtgaaggagggtacccttgacaaccttattacggagttacttctttggcttttagatgaaagggttcctcttatggatgatggcagccaattactcaaagcactaaatgttttgatgcttaaaatcttggataatgctgagagaacatcctcgtttgttgtgctgattaatttgctgaggcctttggacccttcaagatggccatcgcctacaccaacggagtctcttgctgtaaaaaatcagaagttttcagacttagttgtcaaatgtttaattaagttgacgaaggttcttcagagtacaatatatgaagttgaccttgatcgaattcttcagagcatccatatttatttacaagaacttgggatggaagaaatacggagaagggctggtgctgatgacaagccattgagaatggtcaaaactgtcttgcatgaacttgtgaagcttcggggaacggcaataaagggtcacctttcaatggttcctatagatgctgaacctcagccaataattctagcatacattgatctcaatctccagacccttgcagccgctagaatgttgacgccatcggggcctatgggtcaaactcactggggtgatgctgcatcgaacaatccaaatccatctactcactcagctgacgcgcaattgaagcaagagcttgctgctattttcaagaaaattggtgacaagcaaacatgtaccattggcctctatgaactgtatcggataactcagctctacccaaaggttgatatatttgctcagcttcagaatgctagtgaagcgtttagaacctatatcagagatggcctagctcaggtggagaagaatgcagcagctggaagaatgccttccagtcttccattatccacgccgcccccaatagcagcaatacccaatccaaaatttgcaccatcccctgttcacacaaaatcaatcggtaaaacagattataacgaagataatgccagtggtgagacacaacccttcagaggtcaaggtgccatcaccgaccaacaaactgatagataccatacctcaggcacgttggatgctcttagggaaaggatgaaaagcattcaagcggcagctataggtcattttgacggtgctcaggctcggccgttggcaagtatgaacggaagtaatatggtgcatgggggaactcgattggacggtgaaccccaacaacgaagtaatataccacccatggatgagcgagctctatctgggctgcaagcacgaatggagagactaaagagtgggtctatggaattacaatagatacgataacaattctgagaaataccaactattgtagttctttgtaaatttgaggcatagtgatggtgttctttgtagataggtatttgaatgtcggaagaactatatggcacggggtcaacatttcgtaacccatgtgtcaagccattcttgcagagcctttggatgcagttttagataagaggtagccaaatgttttccttgttgctactccaagggctaattagtgttgacacattttgccgtactgtattggttttcctgtggtgtacagcaatagaatttttcattctaaattaactggaaatgttacttgtgaaatatatggtttttgaaatgcatatccgtatggtttcacatttatttgattatctgaatgggattttgattggctactgttcttgtcaaaattgaactacagtttagaaagaaatgtgttcac

SEQ ID NO: 15096 - DNA, 3634 bp, Zea Mays
tcttaaatcccctgcgaggctgcgtctctcgaagtccaaaacgccccgccctggaaccctaaccctacctttcctctcccgccaccgcccgccccaatggcgaagccgatgaagtacgacgatgaggaggagatctcgtcctccgccgaggaggaggaccagtccgacgccgccggctccgtatctggcgaggaaggggatgacgacgacgaggatgctgcggcgccgcccgcggaggaagctgagggcgaggggcagcaggaggaggaggtcgacgaggaagagatcgaagccgtcactaccggcgctggagctgaggacgaggaggacgccggtgccgttaccgccgctgaaggcgacgacgagtcccagtccaccgaggacgacgagcccgtcgcgagggacaaggacgatgacgacgagactgatgcagtggttgggaagcgagagaaagcaaggctaaaagaactccagaagatgaagaaacataaaatccaagaaatattagatactcaaaatgccgccattgatgctgacatgaacaataaagggaagggacggttgaagtaccttcttcagcagacagaaatatttgctcactttgcaaaaggaagtcagtccaacgagaaaaagccacgcgggaggggacgccatgcatcaaagatgactgaagaagaggaagatgaagaatacctcaaagaggaagaagatgcccttgctggtgcagggggaacacgtttagtttcacagccttcatgcatcaagggaaagatgcgtgattatcaattagctggacttaattggcttatacgattgtatgagaatggtatcaatgggatattagctgatgagatgggacttgggaaaacacttcaaactatttcattgctgggctatctgcatgagttcagaggtataactggtcctcacatggtggttgcgccgaagtccacccttggcaactggatgaaggaaatccaacgtttttgccctatcctacgtgctgtgaagttcttgggcaatccagaagagcggaaccatataagggacgatttgctacagcctggaaaatttgatgtgtgcgtgactagttttgaaatggcaatcaaagaaaaatctgcgttgaggcgcttcagttggcgctacataattattgatgaagctcaccggataaaaaatgagaattctcttctatcgaagactatgaggatttacaacactaattatcgtctcctcatcacaggcactccactccagaataatctccatgagctctgggctctcctcaatttcttgctccctgaaatatttagctctgcggaaacctttgatgaatggtttcaaatttctggggaaaatgatcaacaggaggtggtccagcagcttcataaggttcttcgcccatttcttcttaggaggctcaagtctgatgtagaaaagggtctacctccgaagaaggaaaccatacttaaagttggaatgtctcagatgcaaaagcagtactatcgcgctctgcttcagaaggatttggaggttattaatgccggtggtgaacgcaagcgattgcttaacattgccatgcagctgcgcaagtgctgcaaccatccatatttgttccaaggagctgaacctggcccaccctacacaactggtgaacatctagttgagaatgcaggaaaaatggttctactagataaattgctgcccaagctaaaggagcgtgattccagagtcctaattttttcacagatgaccaggcttttggatatcttggaagattatcttatgtatagaggttatcagtattgtcgaattgacggaaatacaggtggagaagatcgtgatgcatccattgaagccttcaataagccaggaagtgaaaagaatccacaagctgatctgcaagctcaggaccgtgcacataggataggtcaaaagaaagaagttcaagtgttccgcttttgcactgagataatgcaaacgaaattacagtacactatcgaggaaaaggtgattgagagagcatataagaagctagcattggatgctttagttattcagcaaggacgattggcagagcagaaaactgtcaataaggatgaccttctgcaaatggtgcggtttggtgctgaaatggttttcagttctaaggacagcacaataactgatgaggacattgaccgtattatagctaaaggagaggagacaacagctgaacttgatgcaaaaatgaaaaagttcacagaggacgccattaaatttaagatggatgataatgccgaactgtatgattttgatgatgagaaggatgaaaacaaggttgatttcaagaaacttgttagtgataactggatcgagccacctagaagagaaaggaagagaaactactctgagtctgattactttaagcaagcgcttcgccaaggtgcaccagcgaagcctagggagccaaggattccaagaatgccgcacttgcatgatttccagtttttcaataaccaaaggctaaatgaattgtacgaaaaggaagtgcggtacctcatgcaagcaaaccagaagaaagataccattgatggtgaagacgaagatcaattggagcctttaacagcagaggagcaggaagagaaggagcagttattagaagagggttttgcatcatggacaaggagagacttcaacacatttattcgtgcatgtgagaaatatggtcgcaatgatattaaaagtatatcctctgaaatggagggtaagacagaagaggaagttcaacgctatgctaaagttttcaaggagagatacaaggagctgactgattatgatagaattataaaaaatattgaaaggggggaagcaagaatatcccgcaaggatgagattatgaaggctattgggaagaagttagaccgctacaagaacccatggttagagttgaaaattcaatatggccaaaataaagggaagttctataatgaggaatgtgaccgctttatgctttgcatggtgcacaaacttggatatgggaactgggatgaactgaaagctgccttccgtatgtctcccttattccgatttgattggtttgtgaagtccagaactacccaagagttggctaggcggtgtgatactcttatcagactggttgaaaaggaaaatcaagaatatgatgagcaagagaggcaggcaaggaaggagaaaaggcttgctaagaatacgactccaacaaagagagcagcactaaggaattcagagggtgagagtgctccgttgagctcattcaagaggcgacggcagtctcttatggacgattatgtgggctcgggaaggcgaaagagagggtgatgtgatgtttgacatcctgcctttggagctctcagcgagatgcagtctctgcaatgctttaagccctgctgtagattcggacttcgcaattgcaactgttgctacacttttggtcagtgatgatgcctttcgctgcaacagttgaggctccagttcaatatttgaagataaatccggtcccttctgtctagggatggccatgggtacctgatacccgttcggtaaaaaccgtattagagcacatgtgatcatttgttatacccctcggctatggtagtcatgggtatgttctttc

SEQ ID NO: 15097 - DNA, 909 bp, Zea Mays
tgagaattaggcgtcttgagggtacccctaattatggtccccgacagcagcattactcagagttgcctgatatcaagcgtgccattgcaaatacccatgtcattgaaccataggcacttgttgagttctttggcacattgtcaagagagtgggctttggaatgcatgaaagaccttctactggttaatctgaggggaaatcttcagattgttgtgcaggccacgaaagaatactctgagcagctaggggttgatgcttgcatcaaattatttgagcaattcaaatcttatgaggacctttactttttcttgggatcttatctgagctccagcgaggacccagatatccatttcaagtacatagaagcagcagcaaggactggacaaatcaaagaagttgaacgtgtaaccagagagtcaaacttctatgatgctgagaagataatgaactttttgatggaagcaaaattacctaatgcccgtccactgattaatgtttgtgatcgctttggttttgtgccagatctcactcactatctgtacacaaacaacatgcttcgatatatcgaaggctatgttcagaaggtgaatcccgggaatgctccattggtagtggggcaattacttgatgatgaatgccctaaagattttatcaagggtttgatcctatttgttcgttctctcctccctgttgagcctttggttgatgaatgtgagaagaggaaccgcctacgtttgctcactcaattcttggagcacttgtgagtgaaggtagccaagatgtgcatgtccataatgctcttagtaaaatcatcattgacaacaacaacaatcctgagcatttccttactaccaacccattttacgactctcgtgttgtgggtaaatattgtgaaaagcgggatcctac

SEQ ID NO: 15098 - DNA, 1008 bp, Zea Mays
ccactacatataattttcgcgggatttcgacttgggtgtcgtttcagatacttgcgttgcaatggaagagtgggttgctcatccgacagaacacacagccctggacgaggttatcccctgcgtggagcctgccacggcgaacgaatccctgtacagaagcaggcaggtgacgttcgagctggtgaacgtggtgaaccaggtgatcaccaacgtgtcgaacaggaacttccccccgcagctgacgcctttgtactacaaccagtcggggccactgatgcctctgctctgcaaccccttcacgcctgatctgagggaccgcaactgcagcagaggagaggttaccttggacaacgcaacccaggtgtggaagaagtacgagtgccagagcaccaccgtctcaggaggagccgagatctgcgcgacggtggggcgtgtgacccccagcatctacgggcagatgaccgcgggcgtgacggtgagccaggggctgtaccagtacgggcctttcctcatccagctgcaggactgcaccttcgtgcgcgacaccttcacgaccatcaaccagggctactgcccggggctggagcgctacagcaagtgggtgtacgtgggcctggtgatggtctcgttggcggtgatgctgtcgctcatcttctgggtgatctacgccagggagcggcggcaccgcgtgtacagcaagcagcaccagccgtacccggtggaggacaagccggcggcgacggtcccgggcgcttgaattgatatggcccgcccgttccagtgctccggcctactcccgtgccgctgtgcatactgtactccgcgcgctagttgggttttacgtggtggtgtaggtggatgatgtaccctggattgttgttcgtttgcttggtgttgctgtatgtttgctgattttaagttgttgtgcattctcgtactgacggtagctggacaatgaattgattgtgttgggattggttattattaggtgttcttcagttcgtttct

SEQ ID NO: 15099 - DNA, 3305 bp, Zea Mays
gagggctgtgcgggcatacctggtctctccgaattgtccagttttttggtgtctgtccgccgggttcttgagctggcttggggatctgtagctttgagagcttcatcggggaattcctgcggcttgggggggttcttgcggttgtgttgagtggcctttcttgtggaagtgcaggtattgagctcaggctgctgaattcatggtcctcatttacctcaaaattcttgaacctttttaattaaaattcttgattttttatgtgggtgctcggggaaaccatccccacttctcaacctgggctcataattcttgcttaatttcttgaattcagcgtttcttggtggtgcttgattattgccgtctgatattgcacagtcctgagtttctagttgcttcgtcagcaaccggtagaggtgtcttttttgcgggatgatagaattgagcttgattgcggtggagcccttttggatttgcagccgattcttgaatcttttcttttctctctctccttggatgcctgcatgaaagccatgctcttaaagcacggttccttttcttttcttcctatcagtttactcatttcttttctggaggtggctcttgtgttggattactcccttaattactctcttatatactttatatgacaaaaatcttagctccttttttttatccaatccgagttgagtcttattttcattgtctgtgaaaacaaagttttgcctaggacatttctcctgatctcacctctttcatatcattaaaaaactgaaagttacagctgcttcagtcatttgaacaagacatccccgtcttttctaggtgcaggagctctaataagcctagtgcgcacttcagtcatcagccaagtgattgaaaagggcaagtcagctgaaatattggttccgagggctctgtagttgcttatccacgctcgcctatgcctttgcgctgatcttgacaactcaaagcttggatatggctacttattactcgagccctggcagtgaaagagattcacaaacaatgtactcagcagagtcaggcaatgtatcatatcccgtgccatcagccctagggaactttctttatacgaacaatgcatcttctggaccttatacagaatttagtggaattgtccagcctcagcagaatttcatggaacttactggccatccttcagcaatgtcacatgattcgtcatccaatgaagctaccaacatgggcagttcactcactgaacagcgctcttttggtcctttgaaagatatgagaaatgagatgttgatgcatttgatggatggagcacacagcagtggcagtgatctcatccacaatgatgctcatagcactgtacagctcgaatttggcatgttaaacaaccacaactcaacaagtgttccattagcaccaggccaagggctgtctctgagcctcaatacacatatcttggcgccttcctatccacactggtctgcaaagcaagacttactaacaccaaattcttaccagggtgatgacaacagaatgaagaatatgcagtctgaggcctcacaggcaatccggaactctaagtatctgaaggcagcacaggagttacttgatgagattgtcagtgtttggaagtgtgttaaacagaaaacagataaaggccctgctgaagcaggaaaggctgatggaaaagagactgatggggggattaaaagtgagggggtatcttccaatccgcaagagtctggtgccaatgcagcagctgagctttcaactgctgagaaacaagagctccagaataagatggcaaaacttatgactatgttggacgaggtggataggaagtacaaacactattatcatcagatgcaacttgtaatgtcatcgtttaatatggttgctggtgctggagctgccaagccttatactgcagttgccctccagacaatctcacggcatttccgatgtctaaaggatgctatcaatgatcaaattagtgttatccggaagaaacttggagaggatgacaatacatccggcaaagagggcaaactaacccgccttcgttatattgatcagcaaataaggcaacagcgagctttccaacagtatggtatgctacagcaaaacgcttggaggccacagagaggactacctgaaaattcagtctcgattctccgggcttggctttttgaacatttccttcacccgtatccaaaagattctgaaaagctaatgttatcgagacaaactgggttgacaagaagtcagatttcaaactggttcatcaatgcccgtgtccggctgtggaagccaatgatcgaagacatgtacaaagaagagattggtgaagcggagctagactccaactcttcctccgacaacgggcagcgaaacaaggacaaagcaccatctcccgaagaaaatgaggacctgcagaccccaacaagccaggcttgccaaaccagccagctcggccagtccaaagccatcgttggtggagtgatgggctttagtggagtgctagccggcggcttccacaccgaggccaaccccgacgacagcttcatgagcctgatgctaaaggcccagagacctggtgaaaccgaaggcaccggtctcctccacgatgccgtcgctcaccactcggacgacggcgcccggttcatggcctaccacctggcagagttcgggaggtacgggaacagcagcaacgtctcactgacgctgggcttgcagcacgccgagaacagcctcgcagtcccaccaaacactcagccaggcttccccggcgtcagagaccaagacatgtacaacgccacggctcctcctctcaacgtcgcctccacatcttcagagtatgattcggcgagccaaattgatcagcaacagcaacggcagcggttcgagccgtcacctctgatgcatgatttcgtggcctgaatttcagctcgcccactggaaaacgtgggggaaaactactgccaatttgtagtgtgtgccaggacgaataacttgcctggactgaattttcaggcgtgggactgttagctgtagttaacgattggggatttggggggtacagtacaggaggtatatagcgtaaatgtgatgtaaatttagtgggggtgatagcggtaaagaaatcctgtaaagatggaatgcatttatacgtgtatttaagggccatgctgtaaaaatagatttacctgtaatgagtacttatgatccagtatatatactgtgcacgttgttgaaaccaaaaaaaaaaaaagaagaggggggtgggggtaaactgaaatggattgcaggag

SEQ ID NO: 15100 - DNA, 1779 bp, Zea Mays
gttttctgtccgcgccaccgctcctcgacccccgcccaacactcccagccgtcacgccgtcgccgccgcgagtccttcattcaccatgatcatctccaagaagaaccgccgcgagatctgcaagtacatcttccatgagggggttctatatgccaagaaggactacaacctggccaagcaccccaagcttgacgtgcccaacctggaggtgattaagctcatgcagagcttcaagtccaaggagtatgtcagggagaccttctcctggcagtactactactggtacctcaccaacgatggcattgagcacctccgcagcttcctcaacctgccgtcagaggttgtgcccaacaccctcaagaagtcctccaagcccccgtcccgtccctttggctctggcccaccgggtgaccgccccaggggtccccctcgctttggggaagacagacctaggtttggggatagggatggcaaagacggaaggcccgggtgtgttcagaacacatgcgcccacagggcatgcccgctgcatcttggttcagtgaacgagggcaggatccagtgcccttaccatggttgggagtactcgaccgatggcaagtgcgaaaagatgccatccacaaagatgctcgacgtgcgcatccagtcgctgccatgctttgagcaggaagggatggtctggatctggcccggggacgacccacccaaggctaccatcccttctctgctgcctccttcaggatttacggtccacgcagagatagtgatggagctaccagttgaacatggactcctcctggacaatctcctggaccttgctcacgctcctttcacacacacgtccacctttgccaagggctggagtgtgccaagtttggtcaagttcctgacacccgcgtctgggctccaagggtactgggacccgtacccgatcgacatggagttccggccaccgtgcatggtcctatcgaccatcggcatctccaagcccgggaagctacaagggaagagcacgaggcagtgctccacgcacctccaccagctccacgtctgcctgccctcctcccggaacaagaccaggctgctgtaccggatgtcgctggacttcgcgccgtggctcaagcacgtgccgctcatgcacctgctgtggtcgcatttcgcagagaaggtgttgaacgaggacctacggctcgttcttggccagcaagaggggatgatcgacggcgccaacgtctggaactggccggtgtcgtacgacaaactcgggatccggtaccggctgtggagggacgccgtcgagaggggcgccgacgaccggttgccgttcagcagcacccaagctgagagtttgtcgtagcgaccggaacgggacgggacctcttcctcgtcgcatttctccgcaagacgacggacggacagccagagttaatgtgacctaggcgtacgtgcgtctctctctctctctctgcgcggttcatcgttcacctcgggctgctgcgcactgaaggattctggaagggtgaaggttgacggccggagacgatgatgggcagcatcatggtctatggtgtccacatgcatgtacactactagcgacgacggcatcatgggatgcaattgtaatctgagattgatctcttttttttttcaccctttctgtgtaaagattcagcaaattgttgcgttactcttccaaagcatgtataatcaactacggagaagtgttcatatatataaatatgagaaattgcagctattgctacagttcatctgccccgt

SEQ ID NO: 15101 - DNA, 4840 bp, Zea Mays
agatggccggctttatcagctgcggcagcgagattcaccgggggaagtatttgcagcgaccgcgccggtccccgccacaaaatcagctacccaccaccgtccgtcagcggcggcggcgagagcatggcggccatcgtggcggcgcgggcgtcggcccccggcagagcggccgtcagcaccatcgccgcgttccacagccacgcgtccccttcccgcgcgctcccgctcgcctcctcctccatcggcggcgccaggcggtaccaccacgcccccgcgtgctgcttcgccaccaagcccaccgcgccggccgctgccgagctcgtcgaccaggacctcgccacggccacgcaggaggccgccaagccacgccggaaacgccggtctcggaaggcgaagaagtccgccaccgccgccaaggaggaggatgggacggacgacaagccggtggcggcggcagaggacgaggcgaaaaggaagaaggaggcggccggcgccgaggacagcgcccgggcattggtggccggcctcgacgacgtgatcgtcaaccccgtgggtctgggtcggcggtcgcggcaggtgttcgacgaggtgtggcgcaagttctcgcggctgggccagatttcgagcgcctcgtccaccgcgctggcggaggaggagcaggccgtgcttatccgtggaggacctatgtgcgagttcactgtgccaggggcgcaggacaccaccgtcctcgtcgtcggtgccaccagccgcatcggccgcatcgtcgtgcgcaagctcatgctccgcggatacaatgtcaaggctttagtaagaagaaacgaccctgaagtgatagatatgctcccaaggtcggtggatgttgttgttggtgatgttggtgatcctgcaactgtcaaagcagctgtatcaggctgcagcaagataatctattgtgcaactgcacgctcaactattacaggagacctaaatagggttgataaccaaggagtaaggaatgctagcaaggctttccaggattactacaacgaattggcccagctcagggctggtaaaagcagcaagagcaaactcctgatagcaaaattcaagtctgcaaagtccttgaagggttgggaggtgcggcagggttcttacttcccaaatacttttgtttctagatttgatgaaggtatcgatgcatcactggatttttcagaagatcagcaggctgttttctcaggatttgtattcacaagaggtggatatgttgagatatcaaaaaggctttctcttcctctaggttctaccctagacaggtacgatggtttactcttttcagtgggaggaaatggaagatcatacgttgttattcttgaaactggtccattggcggacacgacccagagcaagaagtattttgctcggatgactacaaaagtaggtttttgtagggtaagagtgccgttttcatcttttcggccagtaaacccacaagatcctcccctagacccttttcttgtgcatacactaaccattaggtttgaaccaaaaaggcagagacctggtgaggcatctcaaaattctagtgatcctcgaaactttgagctaaaactggaatacatcaaggctttacctactggtcaagaaacagacttcatattggtgtcatgttcaggttctgggattgaatctaacagaagagaacaagttctcaaagccaagaaggctggagaagatgcactgcggaggtcaggccttggatatacaatcgtgcgcccgggtcctctgcaggaagaacctggtggccagcgcgcgctgatcttcgatcaagggaacagaatctcccagggtatcagctgtgctgatgtggctgatatctgtgtcaaggcactgcatgattccactgcgagaaacaaaagtttcgatgtatgctacgagtacgtcagtgaccaagggaacgagctttatgaacttgtggctcatctgccagacaaggctaacaactatctcgcaccagcactgtctgttctagagaagaacacctgattgatgcgcaccatcagactcggacatgtaatatacgagtcatacgacgtgtatattttctcctcctgtaaagccatacgtttttcctatacaagccttgtgtcattcacatggtatgccgtttggcccttctgtaaagatcattgcacagaccgactccaggaaacaaaattttatttttgcaatattgcattgtatgataagttctcctgtccccactccttttcatctaaaactgtaaaagtttgcataatttcaccaagaagaacagtacagtggaaaagaagagaccaatctttgaagcaaaggaagcagtgcacgtgcacctgatgaaatgatggctggtttgctcacaatcttgaaagagaatgcaaagcctgaggctgcaagagtggtccggactctggagtactctctctttctctgttgggaaagttggtttcggcctgttctgctgctcaagcagcatacggcagctcacgcctatggtggacaaccaaagattcagtgctctgattcttcttggtttgtctttctccggcagatctctaacgagtagatgttctctcttcttttcttttcttctttttttgaaagcttcactctaacctgaaatcggctttacttaaatttcgagccaacttaatcttcttctttgccaattcttttttaaagaaaagtttgagagatgcctctagttttttttttgggggtgtgtgtttgcgactacagagtctgaaatcacaaatcagagctgtatagggagcaggtggcgactgagtgactgacaaacgtggggaagatggagacaaagaaacgcaagcctgtggtctactaaagacgggggcatcgccatcgagggcaaacggaggccacaggattagcagcttctccgtgctgctgcgtctcctcctcatcgtcctctccagtgtccagctcggccatggcgttcaccgtctccttctcccccgccaacgttcagatgctccaggctaggagtggccacggccacgccacctttggaagctgttccgccgtgccaagagccgggccaaggctgcgttccacggccgtccgggtcagcagcgagcaggaggcggcggcggccgtcagggcgccgtccgggaggaccatcgaggagtgcgaggccgacgccgtcgctgggaagttccctgctcccccgccgctggttaggccgaaggcccctgaaggaacgccggagatcaggccccttgacatggcaaagcgcccccgtcgcaaccgcaaatcacctgctcttagggctgcattccaggagacgagcatctcgcctgctaactttgtgcttccattgtttatccatgaaggagaagaagatgctcctatcggagctatgccagggtgctataggcttgggtggaggcacgggctgcttgacgaggtttacaaggcccgcgatgttggtgttaatagttttgttctctttcctaaagttcccgatgcattgaagtctccaacaggagatgaagcgtacaacgataatggtctggttccacgtacaatccgcttgctcaaggacaagttccctgatattgttatctacacagacgtcgcgttagacccttattcatctgatggtcatgatggtattgtgagggaagatggtgtaattatgaatgatgaaacagtttatcagttgtgcaaacaggctgtttcacaggctcgtgccggtgctgatgttgtcagccctagtgacatgatggatggccggattggagcacttcgctctgctctggacgccgagggcttccatgatgtctccattatgtcctacaccgcaaagtatgccagttcattttatggccctttccgagaagctttagattcaaatccaagatttggagataagaagacgtaccagatgaacccagctaactacagagaagccctcatagaaaccgcagcggacgaggcagaaggagccgacattctgctagtgaaaccgggattgccgtacttggacattatccgactgcttcgggatcattcagccctaccgattgctgcttaccaggtctcgggcgagtactcgatgatcaaagccggcggggccctgggcatggtggacgagcagaaggtgatgatggagtcgctcatgtgcctgcggcgagccggcgccgatgtcatcctgacctacttcgcccgtcacgccgccgcggtgctgtgcggcatggggcccaagtaggaggcgaggcccgcccgccattcctgccctgcactgtcattgtggagttgagcgatgagttggcttatcgtatgttttgggggcctggcactggcagaggattgtccgaggccttggatctcttccaataatctgcgccgggagataataagttttggagttatcgcatttcccggtactaatcttctgcgtgttgctagtactgaaaaaggtttggattttgaagcgattttagacagctggattagtacctcaacgaacgaaggatttcaggggaagcgtgcgtatcattcttgaaggcgtcgcactcccacctcccactcccacgtgatttcacggtggaccctggaacaacctcgattggacagtacactactagctgctcgtggtcatggctcaggactatctatccatctatgcaaatgaactaggtcaaggtacaaaattaattatgcttaattaaaagcctgcgacgagataaatttattaagcttaattaatctataactagtaaatggactaattagggtttatagtttcgtcttaccgtttagtctttaactatgtaattaattttctaattaaacccat

SEQ ID NO: 15102 - DNA, 3027 bp, Zea Mays
cgcacgctgccgtcgaccgctagttgaccttcccttccctcagaaccctaacgagcggtgagccgcctctctcgagcgcctaccactctgccccctgcgccgcctgcggcctgcccccaactcccgcaccatcgcgaagtcctcgacgtctaggtcgccattccagtaccttctagaatatcaggatcgccagcgccgccgcatcgggcggccctgtggcccatggacaagctccgcgtccaccgctgcaccggcgacgcggtcgagtggtccccctctcccatcgtcgcgctcgccgcctctccctgcgcctcccaggtcgccgccgcgcgtgaagacggctcgctcgagctctggctcgtctccccgggctccgtcggctggcacaaccagctcactatacaaggcaacgccgcgtcgagggtcacatcactggtgtgggggcggagaggtggagtgaccggccggctgctctcgtccagcattgatgggtcggtgtccgaatgggatctctttcacctgcagcaaaagactgttctagatactgttggagttccaatctggcaaatggccatcgaacctttggatgatgctaaaaatactgaaaataatagctcagagtttgctgtcaatggtcatacaaaccaaaatgactccagcgattctgactttagtaacattgatgatggtgacaactctgaggatgaagatggttctaccaacacaagatcttcatatcatgggaatgatttccagcgaatggctcttgcatgtgatgatggttctgtacgattgtttaacgtgcctgattcaggtgcattgacttactatagatttcttcccagagtgagcgggcggtctctcagcgtgacatggagtagtaacgccaaatttgtattttctggcagcagtgatggtttaatcagatgctgggattcaacatctttccatgaaatgtatcgtattactgctggattaggaggggctggtacctcacctgaactttgcatctggacactattgtttctgaggtgtggaactattgttagtggagatagtaccgggagtgtacagttttgggatagccgccatggaacacttctgcaagctcactcctatcataaaggcgacgtgaatgcactaacaactgtgcctggtgagaacagggtattttccgcagggtccgatggccaggtaattttatacaaaatatcaaaagatgaatttggtgctactaaaaatgtggtcaaagagcaagttcacaaatgggtctatgtgggatatgtgagagctcacactcatgatgtaagggcactgaccatggctgtacctatctgtagagaagatacatcacctgaggaaaaggtggtgaagattcgccggcgtgaaaaacatgaatttagttaccacaaatgggctcatcttggtgttccaatgcttatatctggtggtgatgacaccaagctgtttgcatattcagcaagagagtttactcagtttgcacctcataatttctgccctgcacctcaacgccctttgataaagatggctagggatagcacagtcaatggagattctgtaatgcttgtccagtctccaaactggttggatattttacttgtgacagttcagaacaaattgacgactccaagtacatcatcatctagaggagatgctacagtccgacaacttgctcgtttgaaaagcaaggggtccagaaaaatcatttctagtgctgcctctgccaatggaacacttttggcctattcagatggtgtgagaccctgcctctttgcactaaggcataagggtggaaagaagtatacccttgacaaattagagctaccaaaaggattgccctgttctcagagtatggcgtttacggttgattcgtccaatttgatacttgcgggacgtaatggaaaaatatacatcattgacattgcaacaagagaaatttcaaatgtatttcaccctacaagaaaggcagatggagcaaaaatctcaagagaatcacctataacgaagatgttcctaagtgcagatgggcaatggctggctgcagttaactgctatggcgatatttatgtatttaatcttgaggtgcaaaggcaacactggttcatatcccgaatgaacggtggttctgttacatctggtggattttgccccaaaaacaacacacttgtgataactacatctaaaaatgaggtgtatgtatttgatgtggaagcaaaacaattaggcgaatggtccaagcgatatacacaccagttgcccagaagtttccaggaattccctggagaggtcattggcttatcatttcctccgcaaagctcatcgtcagttgttgtatacagtaccagggctatgtgcaacatcgatttcggattgccagttgttgaggatgttggcttgccaaatggatcaggtgcaccagcagagaaggcagacgcaaaaaagagtaaaaaaacaaggcagaagcgtaaggcccgtgatgaagagtctacagaggagaaaaggaacaacttcaacttctttgcgtttaaagaaccagtgctctttgttgggcatctacaggacagttcaattttaatggtagagaagcgatggatggatgttgttgaaggtttcagcgcaccagttgacagacatatatatggcacatgattcttgctaacatcggcctttggcgctcgtgacaagcaaaccattgtttttgtttttttttctcaagtaatgcaaaacatccgtcctcaagcatgtcaacggttgaaaggggctacaagatattgcagcacaaagtgaaagctgcacgtagactttagagtcggggattgtggcaatggtgtattttcttttgttctctagtaatgtagtggactccctgcgccagtttgtcataccttgtcgctgcgcaaaattttgtcacatgtaaacactgtatcatcacttctgttattgttgagctgatatcttctgtttgcctcagaaaaaaataatagtaggaaaaaaacagtaaaacta

SEQ ID NO: 15103 - DNA, 1129 bp, Zea Mays
ttcctcctgtcagggcgcgtgcatcccctacgaccagggcagcgtatatccttgtcgctcttcgtcgtctccccccacaactgttatattcccaccggcgccgccggctcttcgtcgtcctcctccgggtgtgccccagttcgctgcccgttccccagccgccgatccctcgatctccgctagcttcgttccttcgtacagagtgagaagctattgggcgatcttgggggtctattttccaaaaagtggaagccaaagaagaatggcgccatcaggggtcctatgctaactagagatgattccttcataaggaaggggagtcatttggagcaaaggcagaaactagggctggcagatcatccacctccatcaaatgcgcgccaattccgttctgaaccctcatcagcacttgagaaagttgagatagagaaggcaaagcaggatgatgatctgtctgatctaagcaacatactgacggagctgaaagggatggccgttgacatgggctctgagatcgagaggcaaacaaaagcaatgggggatgcagagaaggattatgacgagctgaacttcagggtcaagggagcaaacactcgagctcgccgtctcctcgggagataaaaaaatgcatatattcttgtctcttggatggtccataacacattaactatatgggggcatcaaattctgatgattttgtgcatcagattttgattagcattgttaccgtggacatgtcggcgtgtatggtagttgagacatattttatatgtttgcttcttttttctatttttttagcattgcacgagcttaggatttcagtggattttacatggaaaaccttgtctgattagaaacttcttttcgggtaaataatgctgatacatagtgatttgtcgccgtacactcttcacaccatcaagtacctacgtatgagtagaaactttgccagcgatttacgaatgtaaacaccatatatactgatacggggcctgttgcatttatgcccgcattttatattgaaattgtgatggttgggttttgacaagtggaacccaaacaagaggaagtgtttgagcacagtaacgagacaaatatgaaataacggctcaaatgtcgtcaaccgttg

SEQ ID NO: 15104 - DNA, 1122 bp, Zea Mays
gtggcatctcccgttctgccccagccgtatagtaggtgccgtgccgcaagtccggcggggtgcggttcaccatcaacggcttccggtacttcaacctggtgctgatcacgaacgtggccggcgcgggggacgtggtgcgcgcgagcgtcaaggcggccagcaccgggtggctgcccatgtccaggaactggggccagaactggcagtccaacgccatcctcgtcggccaggcgctctccttccgcgtcaccgccagcgaccgccgcacctccacctcctggaacgccgccccgagcacctggcagttcggccagaccttcgagggcaagaacttcagggtctgatgcatgggatgggatgcgatgggatgggacttgggagaagaagccaaaactcttttctttctttctttctttcttcttatacgtaattattactactcactcctgctaccgtactactgctactggagtactaagcgcgtgttactgtgttagagggtggtgggtgttgtcaatgcctgttttaaggtcacgccttccgcccgccttaatcccaggtccaggtcctctctgaaaaaatggagtcttttcttctgaacaagatgtgtggatgggattctctagagtttgtcagggtatattgccgtctcttcggtccctagcacttctctatgcatcaagtttgtgcctttggcttgggggtgactggtgggtttctgtgtgagctgctcaagtggctgccgagctgcggctccaatttggtggcagcgcggtgagcgtagcccgcagctgctcgtcatcttctttcgtcccgtcccgtgtctctctgtctgtctccatgacaggaacacacatttgttatctatctcgttctacatcatggttcattgccagtaagaaagttagttgatgtgctcgcgtttctgccccgttccctttttgcgtgaatgctgctggcaagaaagggctccttcctccgtttgtgtgccgagatcgaagtccgtgaaagggataaagcacaaagcgaaagcgcgccgcgggaaccggggggccaagggccttccgctttgctcggttcggtcttgtctatttgcttgagttcggacgccaggggtcgcgc

SEQ ID NO: 15105 - DNA, 459 bp, Zea Mays
gcaagatgccactataagtaatgcctcagcagacggcaccatggatgaaagcagaactaggaggactattatcttcagtccaaagatatgtaacaatgtagatcttctggttggaaacataattcatatcttcccaccatggaaggaagttaaaatacaagaagagcatgtgattatttgcacctacttctcgcaccaccaccggacttgatactcggagatatttctgtgctagctgcaaagctagaggcagaccgccagcataaccgttgctgacagtttaatgttgatgtactcgcagggtctattctgtttgttttgtaatcacaagtgtactggctgcaaagctataggcagaccgcaagcataaccgttcctgatagcctaatgctgatgtacttgcagtctctcttctgttttacaatcacaagttactgaggcctagttcggattctctaa

SEQ ID NO: 15106 - DNA, 1041 bp, Zea Mays
aagcgtcacctcccgccgggccccacttcgtgggcccaacgcgaacactacggcccacgataaaaggagacgttggatgctttcctcctcccggaccccaaccaaaaccccttcttgatcttgacttcttcccaaccgactcccagttccactctcgcttccttccctccctccctcccacgcaaatggtggccgctcgcctccgcctctcgctgctactctccgtctgcctctcctccgcgtgggcgcgcccacgcctcgagccggccatccgcctgccgtcgcagcgcgccgcggcggccgacgaaacggacgacggcgacgtcgggacccgctgggctgtgctcatcgccggctccagcggctactacaactaccgccaccaggcggacatctgccatgcataccagatcatgaagaagggcggactcaaggatgagaacatcattgtctttatgtacgatgacatcgcgcatagcccggagaatccgaggcctggtgtcatcatcaaccatccccagggtggcgacgtctatgctggggtgccaaaggattacactggtcgagatgtcaacgtcgacaatttcttcgctgttctgcttggcaacaaaactgcactcaggggtgggagcggcaaggttgtggacagtggccccaatgatcatatctttgttttctacagtgaccatgggggtcctggtgtccttggaatgcctacgtatccatatctctatggtgatgacctcgtagatgtcctgaagaagaagcatgctgccgggacctacaaaagcctggtcttttaccttgaagcatgcgaatctgggagcatctttgagggcctcctgccgaatgacatcaatgtgtatgcgaccaccgcgtcaaatgcagacgagagcagctgggggacgtactgccctggcgagttcccgagccctccaccggagtatgacacttgtttgggagacctgtacagtgttgcttggatggaagacagtgatttccacaatctgcgaactgaatccctcaagcagcagtacaagt

SEQ ID NO: 15107 - DNA, 1013 bp, Zea Mays
aaatgtttttgtaatttttttattccgtcgagtaacaacaaaaaaattggtttgtagatcaatcggtgatgcttatctcaagaagcaagagttcaatagggaacccctatatgtgaaatttcggcttcgtgaaccttttcacaagccgatactaagttcagaaccatcgatcaatgtgcaaccactacaaccacacgaccagtttctcatatttgcatctgatggactttgggagcacttaaccaaccaagaagctgttgatattgttcacagtagcccccgcagtggctgtgctaggaggctgataagagcggcgctgcaagtggcagccaagaaaagggagatgaggtactcagacctcaagaagatcgaccgcggtgttcgccgccacttccacgacgacataacagtcatagtagtgttccttgattccagcctcgtgagcaaggcgagcacgcaccgaggccccactctttccctgcgaggcggcggtgccagcgctggtctgcgcagcaacacgcttgcaccaacgtcaatgtggctatgaggaggctacaccctgactggaggacgttttctttcctcgtgtcgaatgtgttatatatgtacttgtaccggccaaggtcatccatctcccctcaatggtgtaaagaactaggagaggcgtggaagctcctctccagcgtctttgaatcccctcaatggtgtcaaggtgtggactcaagtcaatagcttcgctgttctgatgatgctctgtggaaactcgaatccttccacctgaaaaccaagtagtatgtcttctagtgctggaattaaccctagtgcatatatacatatgaaataaaaaaaagccaaaaggaggagtaacttatttaactgatgctgtgaggtgtatgtatgttttgtattgtatgtgtactgattttgactgccactgcatatactgttgttaatcgacccctggtaaagtgaaatcgctgatttcgtcctactattatcagctgttcccagta

SEQ ID NO: 15108 - DNA, 96 bp, Zea Mays
aatccgctaaggagtgtgtaacaactcacctgacgaatcaactagccccgaaaatggatggcgctgaagcgcgcgacccacacccggctatctggg

SEQ ID NO: 15109 - DNA, 1677 bp, Zea Mays
ttagctaggatatgtgcaagaaatttatgcaagtcgcaacaagatctctggagacaggtaagaacttaatgcttgggattgaagcatgcagtgaagtccttgaatcaatggaacctgatattgacgatgacacgaggcacgagtttttgtgtactcgagcagcattgtacctaaagaggaaatggaaaaatgatgtttacatggcgattcgagattgcaatagaacgtggaagattgatgtcacatcgtatcaagcacacttgcatatggctgaggcactattgcagttaggaagactgaaggaggcatctgagcatgcagaggtggcaaatggtcttcttccacctcattgtccattgagggagcaggtggatgatttcaagcaacgcatcgcttcagctgagcttgagaagaacagagcggataaaaatgggagctcaaaagctgatactcatggaaaattacgctcattgagtgagatactctttagacctgatgttggtggttcatcacaggagggacgagaagattcagattatgatgatgatacggaaatggactatgaaacaacggtatctggtcatgaaagccgagagaatgatcaaggtgtcttccggggtagtttaagtttccaatttcatcaaagagaggatcaaaccaatgtacacactgatgagaatgggtcagttgagtcccctcgaaaagatgattatgcttttcagtcagatgttgccattgatatgaaacaaagatatgttgcacactgcaatgtagggacagatataaaacaagccagttttcttggtgagcaaggggagttcattgccagtggaagtgatgatggtagatggttcatatgggagaagagaacaggaaggcttattaaaatgcttgcaggggacggagctgttgtgaactgcatacagtctcatcccttcgactgtgccgttgcaacaagcggaatcgataacacaataaagctatggacacccgatgcaaatgctacatcaatggtttctggacctgaacttgatgtattgagtgccatagagaataatcagcagaagttatgtcggaaccgtcactttgtactgccttctgaatttttagaacgatttcagatgcatgagttttcagaaggtttcgagtgtgcccagagctgatttactatcgctggagctgcttgaggaaaagggtaatacttggaagaatgatatcatccaagctacaagcagcctatgtttgaattagtgaaatcggaaggccttgttgccattatagagtgtagacgcacctggatagataaacaggtgtgccggtgctgaaactattgcttgagatgtcaataaacactggaattatgttgttgtttgggggtggtataatgattcatacgtgtgtaatgcagtgtggattcattcccttgtacagattgtagataggtgagattctgcaataagtgacaatcacagatgtacatgtgtggtattcttgtctctgcgtgccgcaggtaggtcatgctagtttgtggctgacgattggggtatatcttctcttaaagacttgctgggtctggatgtggtgtaggaactgtgttactttatgtttcctaaatatgttactctttccatcccaatttataattcatttaatttcttttgttcttcctgcgtgcat

SEQ ID NO: 15110 - DNA, 7178 bp, Zea Mays
ccccaggaaaaaagcgaaccgacccaactctgaaccctccaagtttcctccctcttcaccccaaacaacaatcacagccctctctccctctcccctcctttacgtcgccgcctccgaatccccacctctttgctcctccgccatcctcctccgcggccgatgtgtgtgccccgccggcccaaaaccctagaggttacgagcaggtaagggtttcgatcggagatggcggctgcggctgcggcgatggccgcacatagagccagcttcccgctgcgcctgcagcagatccttgctggcagccgcgccgtctcacctgcgatcaagatcgagtctgagccgatgctccagttggaaccaaagttgccagatgttacagagctacatgtcctgaaaagggataactcaaatataaaaacatcacttgtgattgatgacagcaagagaaaagattcagaatccttgccaaatgttgggttactagacatggaggaccagtttcaacttttgaagatctgttgtaagtgcataggaaaacagttaccttcggcttccatgcatgctattctccagctctctgcaacactgacaaaagtccatgcagctgctatttgtttccttgaatctggtggtttgaatgcattactatcactgccgacaagtagtttgttttctgggttcaacaatatggcttctacaataattcgtcacattttggaggaccctcacacccttcagcaagcaatggaattagagatacgtcacagtcttgttacagctgctaatcgacatgcaaatcccagggttacaccacgcaattttatccagaatttggcttttgtcgtgtatagggacccagtgatatttatgaaagctgcccagtctgtgtgccagattgagatggttggagataggccatatgttgttctgttaaaggatcgtgagaaggaaaggatcaaggagaaagataaggacaagtcagttgataaggataaagcaacagtcgcagtcactaaggtagtttctggggacacagctgcaggatctcctgcaaattctcatggaaaacagtctgatttgaattcaagaaacgtgaaatctcaccgcaagccaccacaaagttttgtcactgttatagagcatctcttagatctgctgatgtcctttgttccgccaccccgtccagaggatcaagttgatgtctctggtactgccttatcttcagacatggatattgactgcagttctgcaaaagggaaagggaaagctgtgtctgtcccacctgaagagagcaagcatgctatccaagagtctactgcatcccttgccaaaactgcatttttccttaagttgctgacagatgtattgttaacttacgcatcatccattcatgttgttcttcgtcatgatgctgagctgagtaacatgcacggtccaaatcgaacaagtgccagactaactagtggtggaatctttaaccatatcctgcagcatttccttcctcatgctacaaggcaaaagaaagagagaaaaaatgatggagattggatgtataaattggcaacaagggctaatcagttcttggtggcttcatctattcgttctgcagaggcccgaaaaaggattttctctgaaatctgcagtatatttcttgatttcactgactcgtctgcagggtacaatgccccagtaccaaggatgaatgtgtatgtcgatttactgaatgatattctgtcagcccgatcaccaactggctcctcgctgtcagcagaatctgcagttatatttgttgaagctggtcttgttcattcattatcgacaatgcttcaagttcttgatttggatcaccctgattctgcaaagattgttactgctgttgttaaggccttggaactcgtcagtaaggaacatattcattcagcagataatgcgaaaggagtgaactcgtcaaagattgcttctgacagcaacaacgtgaattcatcatctaatagattccaggctcttgacatgacttctcagcccacagagatggttactgatcacagggaaacgtttaatgctgtccgaacttcacaaatatcagattcagtggcagatgagatggatcatgatcgtgatatggatggcggctttgctcgtgatggtgaagatgattttatgcatgagatggctgaagatggaactggtgatggatctacaatggaaattagaattgaaattccacgcaatagagaggatgatatggcccctgctgctgatgacactgatgaagatatatctgccgaggatggtgaagatgatgaagacgaagatgaggagaacaacaatctggaggaagatgatgcccatcggatgtctcatcctgacacagatcaggaagaccgtgaaatggatgaagaggaatttgatgaggatctgctagaagaagacgatgaagatgaggatgaggaaggagtcatccttcgcctggaggaggggattaatggcattaatgtgttggaccatgttgaagtatttggtgggagcaacaatttgtctggggatacgctgcgtgtgatgcctctagacatttttggtacaagaaggcaaggccgaagtacctccatatacaatcttcttggtagggctagtgatcatggtgttcttgatcatccacttctcgaagagccttcttcaacaacgaatttttcagaccaagggcatccagagaatcttgttgagatggctttctctgatcgaaaccatgaaagtagctcctctcgtttggatgctatattccgcagcttgcgaagtggacgtaatggacaccgctttaatatgtggctagatgacggtccacaacgtaatggatctgctgcccctgcagtacctgaaggcattgaagaattgctgatctctcatctgagacggcccactcctcaacctgatggccagagaacacctgttggtggtgctcaagaaaatgaccagcccaaccatggatcagatgctgaggcaagggaagtagcaccagctcagcaaaatgagaacagtgaaagtacactgaatcctctagatctgtcagaatgtgctggccctgcacctcctgatagtgatgcacttcaaagagatgtgtccaatgcaagtgagcttgctacagagatgcagtatgaacgtagtgatgctataacacgtgacgttgaagcagtgagccaagcaagcagtggcagtggtgctactttaggggagagcctcagaagtttagaggttgaaataggaagtgttgaagggcatgatgatggtgaccggcatggaacttcaggcacctcagaacgtttacctttgggtgatattcaagcagctgctcgatcacggaggccatctggaaatgctgtgccagtaagcagtagagatatgtctctggagagtgttagtgaggttcctcaaaatccagaccaagaacctgatcagaatgctagtgaggggaatcaggagcctaccagagcggcaggtgctgactcaattgatcctacatttttggaggctcttcctgaggacttgcgagctgaagttctttcttcacgtcaaaatcaagtaactcagacttctaatgaccaacctcaggatgatggtgatattgatcctgaattccttgctgcacttccccctgatataagagaggaggtgctagctcagcaacgtactcaaaggatgcaacaacaatcacaagaattagaaggacaacctgttgaaatggatgctgtttcaattattgcaacattcccttcagaaatccgggaagaggtgcttttgacatctcctgacacactactagccacactcacgcctgcactagttgctgaggccaacatgttaagggagagatttgctcatcggtatcacagtagctccctttttggtatgaactccaggaacaggagaggtgagtcctcccgacgtgacataatggcagcaggacttgatagaaacacaggtgatccctccagatcaactagcaagccaattgagactgaaggtgctcctcttgtcgatgaagatggccttaaagctcttattcggttacttcgagttgttcagcctctatacaagggtcagctgcagaagctacttgtgaatctttgtactcatcggggtagcagacaggccttggttcaaattctagtggacatgcttatgcttgatctgcaggggttttcaaagaaatcaatagatgcacctgagccaccatttaggttgtatggttgccatgcaaatatcgcatattcacgccctcaatcttcggatggtcttcctccattagtctcacgtcgtgtgctcgaaacgctcacgaacttggcaagaagccatccaaatgttgctaaactcttgctctttcttgaattcccttgcccatcaagatgtttccccgaagcacatgatcataggcatggcaaggctgttctcctagatgatggtgaagaacagaaaacctttgcacttgttcttctgttaaatctgttggatcagccactttatatgagaagtgtagctcatcttgaacagtgcaagatggtaaaaataactccgacatttctgtatcatatggatcagagttgaatcctgaggatggcagcaaagcccctgctgttgacaacagaagtaacttgcaagctgttttgcgaagtcttcctcaaccagagcttagattgctatgttcattgcttgcgcatgatggattgtcggacagcgcttatctccttgtaggtgaagtgttgaaaaagattgtggctcttgcccctttcttctgttgccatttcataaatgagcttgcacgttcaatgcaaaacttgacacttcgtgcaatgaaggagcttcatttgtacgagaattctgaaaaggctcttcttagctcttcatcagccaatggtactgcagttcttagagtagtgcaggctttgagctctcttgtcaatactcttcaagagagaaaggatccagaacagcctgctgaaaaggaccattcggacgcagtttcccagatttctgaaattaacacagcattggattctctgtggttggaattgagcaactgcataagcaagatagaaagctcttcagagtatgcatcaaatctaagtcctgcttctgcaagtgcagctatgttaacaacaggagtagcacctccattgcctgcaggaactcaaaacttattaccatatatagaatcattttttgtgacatgtgagaagttgcgtcctgggcaacctgatgctgtacaagatgcttcaacttctgatatggaagatgcttcgacatctagtggtgggcagagatcatctgcttgtcaagctagtcttgatgaaaagcaaaatgcttttgtgaaattctcagagaagcacagaagattgctgaatgcattcatccgtcaaaactctggattgctggaaaagtcattctcgctgatgttgaaaattcctcgcctgattgattttgacaataaacgtgcatattttcggtctaaaatcaagcatcagtatgatcatcatcatcatagccctgttagaatttctgtgcgtcgtccatatattcttgaggactcctacaatcagcttaggatgcgatctcctcaggatttgaagggtaggctcactgtccaatttcaaggagaagaaggaattgatgctggtgggctgacaagggaatggtaccagtcgatatcacgagtcattgttgacaagagtgcccttctgtttacgacagtcgggaatgatttgacgtttcaaccgaatcctaattctgtgtatcaaactgagcacctctcatacttcaaatttgttggacgagtggttggcaaagctctcttcgatggtcagcttttagatgcccacttcactagatctttctacaaacacatacttggtgtcaaggttacataccatgacattgaagccatcgatccttcgtactacaaaaacttgaaatggatgcttgagaatgacataagtgatgttttggatctcacctttagcatggatgcagacgaagagaaactgatattgtacgagaaggcagaggtatttgctgtgcttgtgtcacaagaatttgtggttttgatcttttctatgttgtaagtcccaagttatctttgcaggtcactgattgtgagttgattcctggagggcgtaacatcagggttactgaggagaataagcatgaatatgtcgaccgggtagcagagcatagattgaccactgccatcaggcctcagattaatgccttcctggaagggtttaatgaactcattccacgggagctgatatctatcttcaacgacaaagagcttgagcttctgattagtggtcttccagatattgacttggacgatttgaaaacaaatacagaatattctggctacagcatagcctctccagtcgtccagtggttctgggaaatcgttcaggggttcagcaaggaagacaaagctcggttcctccagttcgtcactggcacttcaaaggtaccgttggaaggttttagtgaacttcaagggatctctgggccacaaaggtttcagatacacaaggcatacggcagcacgaaccatctgccttcagctcatacttgctttaaccaactagacttgcctgagtacacgtccaaagagcagctccaggagaggttactgttggcaatccacgaagcaaatgaaggtttcggatttggctaatcagtcatgctcgtttgtccgtgagagtctgtacagatactgagcattgcaatgggcgagcagcacgtgtgtgctgatccttaccacattctgaactccacgtgtttgatggccggggagaacatagaagaatctccgtgggagaggtactgatgagagagagcgactattttgtgttcataatattcattacctttttttagcttttttcggtcgttgccccgttcgtagtttttgccttacattggacttcgctccgattttttttctctgcttttccttcatagactggtgtaagatgtaaccgaacactatgtcaaatgcaaatcatcttagggccccttcgattattactgaatggaggcatggaataatttctagccgtactgtttctctactatattaaagcatcagttttagttacacgattgtcctgcatctataaaaaaactaaaattatacataattagct

SEQ ID NO: 15111 - DNA, 2749 bp, Zea Mays
cttccctctcgttctccgcttccgcctccgcctccggccacgagtcaccagggaagggacaaacgcacaaaatcaacgaacgcccagcgcccagtcaaacactaccccttcctccctcccccctcgccgcctccccggaccccgccccgaccccaccgaacccatggcgtcggagatcgaggtgctcgaggacaccaccacctcctcgacttccctcgtcgcggccgcgtccacagtcccttctctcgcggagggcgcggaggcgccggcggaggacgactcgctgaagaacgacgtgtacaccgcggcggcgtacggcgatctggagaagctgcagcgactggtggagggggagggccgcccagtcaccgagcccgacggcgggggctaccacgcgcttcagtgggccgcactcaacaaccgcgttgccgccgcgcagtacatccttgagcatggagcagacataaatgctgtggatcacactggacaaacagcacttcactggagtgctgtacgtggtcatattcaagttgctgaactacttctgaaagaaggagctaaggtggatgctactgatttatacgggtatcaggccacgcatgttgcagcacagtatggtcagactgcattcatttaccacattgttgcaaaatggaatgctgatccagatatccctgataatgatggaaggagccctttacactgggctgcttataagggatttgcagactccatacggcttcttttgtttttggatgcttataggggacggcaagacaaagaaggttgtactccattacattgggctgctattcgggggaatcttgaggcatgcactgtcttagttcaggttggcaaaaaggatgatttgatggtgaaagacaaaactggcttaactccagcacagcttgctgccgataagaatcatcggcaagttgcatttttcctcgacaatgctagaagggtacacggcaaaggatgtggtgcgaacaccagatttgggaaattgtcaaaattagggctcgctcctcttctttggtgcaccattattggcatgcttattacatacacacactctgttatatcaggacaatatgccatgactacgacagcaccatttgggatattcgcatggtcaggagtttttcttgcaactgctggcttggtcatgttctataaatgtagcaggaaagatccaggttacatcaacataaatgcaaggggctcgcaaaatcaaagggatgatgaaccgttgctgaagatggagttagaaaatcctgcacttctttctggcaactggtcacaactttgtataacctgcaaaatagtcagacctgttcgttcaaaacattgttctacatgtgatcgctgcgtggagcagtttgaccaccactgcccttgggtatctaattgcataggaaagaagaacaaatgggaattcttcatgttcctcactctagaagtttttgcaatgatcattactggctctgctgccattataagaattgtaagagatccaaattctccatcatcctttggtgcttggattcattattctgcgtttcagcatcctggggtggtttcatttctcgcattggattgttttcttttctttggtgttgcagttcttacagttgttcaagcatcacagatagcaaggaacattacaacaaatgagatggcaaactccatgagatatgcatacctcagaggcccaggtggcagattcaggaatccgtatgatcatgggattcgcaagaactgctctgacttcttgttaaatggatacaatgaggacactgaacggctagagcagacattgcccactgatgaggaaatgggaatgatacagatgacaagtgcagtttcgcagcagaacggtgacaatcatttacatcatggtaatggcactgaccatagttgcgctgtttcacaagcaaactcaaaacctcatagccaagtgggttcgtctcagtgttgtgaccacagtaagaggactgataggacaccgttgggcctaggattgggccttggacgaaacagtgcgtcccggcagtatgttcggtctcttatcccattgtgatccatcatttggcgatcatgtgtttgtttgactgtagattggatttgttcacttattctgttatacgtgcccttgacatggttcaccatggctgggcagggttaacgttattgtgccatgagctccggaatactaagatatatctggtgttgtagtttagcgttgaactcagagaagttgaaggtaacgacctggtttgcgagtatcagctgatcagcagtctggaatcagagagtttgtgcagaaaatgtaagagttatggactcatggcagatgcagtagcatgagatgtcttcagaattgttgtgtacatcaggttcggtggtacccccattgtttagcgtgatacgagtttggaaaaaaaaaaagtagtcgtaaattgagaaaattgtaaattgattagtaagctcactgcaacactagctgttttcctagttttcattcatttttgggtctggttattgttatgaaccacggaaagaattttcggttttcgggtatgggtacctcagttatatttggtctggttatggtacttactggtggtgcatgtttgtgtgagtgcttagagtttaggctatggccatcagatcatgtatatgactatatgactgtgtaaaacactgttttttatctgattgtgtaaaacagtgtttttgtaaaaca

SEQ ID NO: 15112 - DNA, 632 bp, Zea Mays
aaaaagatgttttccgagctgccccagaggcccagcccacggtgtcagtgtcacctctgctatttcttcacccgtccgttcacttgcgttcatccggcctacgttaaaatctctccatcccggcgacgactggcgacagccgctgccggcctactccaggtccccaggtctacgtcggacccttcgccgcggcgaacaccaccagagatctgtcactgattttgcagtcctcttgtcagatggcgagcacggggcggtcgatgctgctgtcactgctcctcttcgcagtgacgctgtcgctgctggagatgtacagggccaagttcgcctcgtcggagctcatgaccattgccggtggattcgtctgctccctcctattcctgctactcctcacctttattggaaactatcaagaagctagtggagatagaactgggtggggtgcagttgttgtagcacaacttgtagctcttattgtagccggcactgtccaccgtgtctgtatcacaacatgcttcctgttttccgctggactcctttacgaggttgacaagctctctggcatgatccttgcgaggagtgagtctaaggaccgcccctactagcgcggagatcggtggagagaggaggca

SEQ ID NO: 15113 - DNA, 3307 bp, Zea Mays
cttggctgccctgcatggcgcatctgcgggtgctttcctaggcttggtagatacaggtctgggattgccttttcctagttcaacatggagggcgctcttgttcagtctgctattgttccagccgtttacagaagcagctcaggtcggttccgtgtgcgtgcaagggccagaacaaatgctacaatggtgcggaatacgccaacaaggactcttactcttggtggcttccaagggctgcgtcagacaaactttttggatacgaggtctgtaattaagcgtgactttggatcaatcgtggcaagccagattgcaaggccacgcgggtcagcctcaagaggggtggtccgtgccatgtttgagcgcttcactgagaaagcaatcaaggtgattatgcttgcacaggaagaggcaaggcgcctgggacacaacttcgttgggacagaacagattttgctggggcttattggtgagggcacaggaattgcagcgaaggttatgaagtctatgggaatcaatcttaaggatgcccgagtggaagtcgaaaagataattggacgtggcagtgggtttgtggctgttgaaatcccattcacacctcgagcaaaacgtgtattggaattgtcccttgaagaagctcgtcagcttgggcataattatataggatctgaacacttactccttgggctacttcgtgagggtgaaggtgttgctgctcgtgtgcttgaaagccttggtgctgatccaaacaacatccgtacccaggtcataagaatggttggggaaagcacagaagctgttggggctggagttggtggaggaagcagtggccagaagatgcccacacttgaagaatacggtactaatttgacgaaattagcggaagagggcaaattggacccagttgttggtagacaggatcagattgagcgcgttacccagattttaggcaggaggacaaagaacaacccctgcttaattggagagcctggtgttggaaagactgctattgctgaggggcttgctcaacgtatttccaatggtgatgttcccgaaacaattgaaggaaagaaggttattactcttgacatgggcctccttgttgctggaaccaaataccgtggagagtttgaagagagattaaagaaacttatggaggaaattaagcaaaatgaagatattattctctttattgatgaagtgcacacactgattggagcaggtgcagcagaaggtgcgattgatgctgctaatattttgaagccagctcttgcaagaggtgaactgcagtgcattggtgccacaacactggatgagtataggaagcatatagagaaagatcctgccttggaaagaaggtttcaaccagttaaggttcctgagcctactgttgatgaaacaatacagatcttaagagggctccgtgagagatatgaactccatcacaaactgcgatacacagatgatgctttaattgctgctgcacagctgtcttatcagtatatcagtgatcgtttcctgcctgacaaggccattgacttgattgatgaagctggatcccgtgttaggctgaggcatgcccagctccctgatgaagccaaagagctggacaaagagctgcgacagataaccaagcagaaaaacgaggctgtacgcggccaggattttgagaaggctggtgaattaagggaccgagaaatggaactgaaggctcaaattacggccattattgacaagagcaaggaaatgattaaagcagagactgaatctggtgatgtcggtcctcttgttactgaggcagatattcaacatattgtctcctcttggactggaattcctgtggagaaagtgtcgtctgatgagtctgaccgtctcctaaagatggaagagacactgcatacacgtatcattggccaggacgaggctgtcaaagctattagccgtgctatccgccgtgctcgtgttggcctgaagaatccaaataggccaattgccagcttcatattctctggaccaactggagttggcaaatcagagctagcaaaggctctggcagcctactactttggctcagaggaggctatgattaggcttgacatgagtgagttcatggagagacatactgtctccaagcttattggatcacctccaggttatgttgggtacactgagggaggccaactaactgaagcagtccgtcgccgcccatacacagttgttctctttgatgagattgagaaggcacatcctgatgttttcaacatgatgcttcagatattagaagatgggcgattaactgatagcaaggggcgcacagttgacttcaaaaacacactattgatcatgacatctaatgtgggaagcagtgtcattgagaaaggaggccgcaagatcgggtttgaccttgactatgatgagaaagacaccagctataacaggatcaagagcctggtgaccgaggagttgaagcagtatttccggccagagttcttgaacagattggatgagatgattgtattccggcagctgactaaattggaggtgaaggagattgctgacattatgctgaaagaagtgtttgacaggctgaaggccaaggagattaatctccaggtcacggagaagttccgagatagagttgttgacgaaggttataacccgagctatggtgccagacctttgcggcgtgctatcatgaggcttctggaggatagtctggcagagaagatgctggctggtgaggtgaaagaaggtgactctgccatcgttgatgtggattcagatggcaaggtgatagtcctgaatggtggtagcggtgttgctgagccactggaacctgctctcagtacctaaccgaggtcaaaatcatcattggtccgaaatatggccttctttacaagtcagctgggtttctcgtgatggtaaaaactagactgacattacttggccgcccattagttgctttatctttcgtttattttcttttttgttggaagtgaggcagtagggttgctatggaaatgaatagatggagaagcatttagcagacatataatatatgctagacttttgagttgccttgttttgggaagaaacttggaattttcagtttgatgcacttgtattattattaggccttggtagcaacaagatacggatgtcgtctctacgtttgctgttgtacttcagtgtaacttgcctcccgaatgtatgagtattatttatcaagtcccaaataacagtgacggattgctacattctgttttttttgtttgtggatctgaaaattggaattcttagcttatctcca

SEQ ID NO: 15114 - DNA, 3861 bp, Zea Mays
ctaaaacaatttattactcgtccacatgcgaagccgaaggtaacactatcgcaacggtctgctggggctggtggcaaaacaaaaggaacaaaagaaaagagaaaaagaatcggcaccgtctcctgcactccagagtcatcagaagaccctccccaagtcaccgaacaagatcgtcgtgggcagcactcgccactcgctctcgcaggcggtgaggcggcgctatcagagcggacttcgccctccccccacccccacccccacgtccccctacaggtagccctgcaaccatggccgcggcggccgggctcagccgccggtgcaccgtccgctgacaagtcgacctttctcctacgacagcaaccgtcttcgtccggtcctggctgtttaaaaggagaggaaaggcaggaggaggggaggagttagtgttaagccaatgggggctattggaggcaatgagtcggtgcagtgggataaagtggctggagctgatgctgttaatggcggcggaacaagtgtgggcaggatggacaggatacaggtgctggtcaggctgaggccactgagcgagaaggaggttgcgaggggagagcctgcagaatgggagtgcatcaatgacaccactgtcatgttccggagcacgttccctgatcgacccaccgctccgacggcatacacatttgatcgggtttttcattctgactgtagtactaaagaagtctacgaggaaggggttagggaagttgccctctctgtagttagtggcattaactcaagtgtttttgcatatggacaaacgagtagtggaaagacttataccatgaatggagtaacagaatatacagtagcagacatatatgattacattaataagcatgaagagagagcatttgttctgaaattctcagcaattgaaatatacaatgaagctgtaagggatcttctgagtgcagaaaacactcctcttagactctgggacgatgcagagaagggcacctatgtggagaaccttacagaggttgtgttaagggactggaaccacctcaaggggcttatttctgtatgtgaagctcaaagaaggacaggggagaccttcttgaatgaaaaaagctccagatctcatcagatactgagattgacaattgaaagttctgcacgggagttcctagggaaggacaagtcaactacacttgtcgctagtgctaactttgttgatctagcaggaagtgagcgtgcatctcaggcgttgtctgctggcacgaggctaaaagaaggctgccatattaacagaagtttgcttgcccttggcactgtcattaggaaactaagcatggggagtaatgcacacataccatacagagattcaaagctcacacgcatattacaaccatctttaggaggtaatgcaagaacggctattatctgtacactgagccctgccactagccatattgagcattcaagaaatactttattatttggaagttgtgcaaaggaagtagttacaaatgctcaggtaaatgtggtcatgtctgataaagcactagtaaagcatttgcaaaaggaagttgctaggttggagagtgagttgcggcaaccagcttcaaattccagtcttgaagcattagtaaaggaaaaggataaccaaattagaaagatggagaaagaaattaaagaactcaagtcacagcgtgatttggctcagtctagattgcagaatttgctggagactgttggggaccaagtgaagcactcgggctcagggaagcgttcagcccgcagtcctccatcaattggaatatccccaggcatcagcagggatgatagttctcagatctctcacgatgattcagatcttttcaaggacgtgcgatgcattgggaccagtggaacaggaggaaatgaacagttggacctgtcagctggtgaaagcagtagccttcaaggtttaaacatgaattctagtttgcatggaagcggttcaaatgcatcagtgaattctaggcgctcaaggctccttagtgaatctcctatcacattggagcagcatttggagaatatcaaaaggccttttgttagtcttggcagagatctaggatcgtcgacacataactcatcaggctccagaatacttggtagaagcaggagctgtagatcacttatgggttctaccatgtttgatggcatggagatggatgatggcacccctctgcatagaagtttggttggtttccctggaaggcctgaagggaatcatagaaggggatcaacaccgaaccatgacgcagaaagtgaaactctttcaagagcaggatccgtagtttcaaccaagacaaatgctgcatgcgatgcagagtttactggtataggtgaatttgttgctgaactgaaagagatggctcaggttcattaccagaaacagttaggcaatcagattacaaatggagaatttgtagacataaagaacattggtttggacccgattgctgatgcttcgcaatcaccttctcgctggccattagaattcgagaagaaacagcaagagatcatcgggctttggcacgcgtgctgtatttccttagtccacaggacctactttttcttgctattcaagggagaacaagctgattcaatctacatggaagtggagctccggaggctatcattcctcagagatacctactctcggggaaacacccctagcaatgcggtggtaggcagcttgaactcttcccccgctgcgagcgccaagaagctgcagcgtgaacgggagatgcttgcgaggcagatgcagaagcggctcacggcagaggaaagggagcgcctgtacaccaaatggggcatttcgctggactccaagaagaggaagctccaggtcgctcgccggctctggaccgaggccgaggacctagaacatgtcagggagagtgcctcccttgtcgccaagctgatcgggctccaggagccagggcaagtcctcagggagatgttcgggctcagctttgcgccgcagcagcagccgccccctcgccggcgatcctccaatggctggagatacgggatcccttcgttcggctgatcggatcggatgaacggtgcgagcgactgacctaagagatattaaggacactaaggatgaatctggcaggttctctggtgtcttctcttctagtggttcaccaagacatggtttctcaagaagttcaagcagattgtccatgcaggatgatactgatgatgcagattttccttttgctgtggatgatgtttatccagattcacggccagggagtagtagtggaaaggacacaggggatcaggctggttcgtcatcccataaatcccaagatgctgctgttgggtatctcgtccacctgctgaaatctgcacgtccactgagagattctacctactcatctcatacatcaaggggtgaatctaccgaagcaggaagcaccagctctttcttgtcccgcaggacatccgacgcactggaggagtttgaatctttcaaggaaacaagggagaacctgctagcacgtagtagatctcggctgcaagattcattggataagccctagtgttgatgcagtctgtggttcgattcctcaaaaggtgaagggtccaaactgtagagtaaagatcatatggcgagcctgggtaaactctttatttcagactagtccgtgtgtaaatagctaattaactggcgcttgattccgaaagagaatacacaggtcgccgttgattctattgttggaaacttgtcattcttaaactcaaagcaggaatatcgtgtgcctttgttcatagtgtttgtttacaagtgaaatcaacatgataatccatctttatcaaaataga

SEQ ID NO: 15115 - DNA, 107 bp, Zea Mays
gcctttcaccaccatggagccatacaatcctgaagccgacccggctatgaaagaagctttggatataatgaagtgggatgaagtcttcctcgaaagcctctagtcat

SEQ ID NO: 15116 - DNA, 991 bp, Zea Mays
cacaagggaagatagaggaaagggagagggggttgagaccagcaagaagacactgatcctccatggtaccaagactagtgctgtgttgaactctgtgctgtcagatatttaccacctaaagcgtgataatgctgtgaaatataccaagaagaatgacaacattaggccttttgaaagtggtggagaatcttctctggagtttttctctcttaaggcagactgtagccttatagtgtatggttctcattcaaagaagaggcccaacaatctgattttgggtagaacgtatgaccaccacatatatgaccttgttgaagtaggagttgagaactacaagtcaatggaatcttatgtttatgataagaagctagcaccattacttggatcgaagcctttctttgctttcataggggaacactttgagagtgctgaagagctgaaacatttgaaagaagtgctgcttgatcttttcagaggagaggtcgtagagaatctgaaccttgctggtgtggatcggatctatgtgtgcactgcaatctctcccactaccgtctacatgatgcactgtgctctccgtctaaaaaggtcaggtacatctattcctaggatggaactggtcgaagttggaccttcgatggatctggttgtaaggaggcacagacttccagctgaaagtttaaagaaagaagctatgaagaccgctgaacatgctaagaagatgaaaaacgtcactaaggatccagtgcagggcaagctgggcaaggtctacatgccagaccagcaggttggaaagttgaccttatcaaacgacataaagggactaaagagggagcgccgtgaagccaagaaaaaccaggactcaaagaagcaaaaggtcaaccccgagtaaagatcactgaagtttacctttgcattggatacagagatttggagtactgcgactatgacgaatagatgggtgaaggcatacgtcgtcggcgaatagaaatca

SEQ ID NO: 15117 - DNA, 1929 bp, Zea Mays
gaaagccggtttcattcaattatatcaccatttaatgcatgcttcagacaaaatattgcagttgtcacaatctatgcctctttgggggagggagcgctatgtcactcactaaatgagaccgaggtaactactgttgtatgtggacgaaaagaatttaaaaagctgattgatataagtgggcaacttgacactgtgaaacatgtcatctacattgatgaggaaggcatctcagttgaagtgtccttggctgaaaactgtactagctggacagtcaagtcatttgaagaggtagagagtataggcttgcaaagacctgttgaagcaaacttgcctctcccatcagatactgcagtgattatgtatacgagtggaagcacaggaatgcctaagggagtcatgatgagccaccaaaatgtcttggctgtagtttcagctgttatgacgattgtgcctggtcttggcaagaaggatgtgtacctggcatatcttcccctagcacatatccttgaattggcagctgaggcaatcataactggtgttggggcttcaataggttacgggtcacctttgaccctgactgatacatcaaataaaataaaaaaggggacgcaaggtgatgcttctgtactgaagccaacgctaatgactgctgtacctgctatacttgatcgtgttcgtgatggtgtacgaaaaaatgtagatgcaaaaggtgggttagcgaagagattatttgatattgcctatagccgtcgtctagctgctgtcaatggaagctggttgggtgcgtggggactagagaagcttttgtgggatatgctcgtcttccgaaaggttcgtgcaatcttgggaggacggattcgctttattcttgcaggtggagcacctctgtcaggggaaacacagagatttatcaatatatgtcttggggctccaatatctcaaggatatggcttgactgaaacctgtgctggtgggacattttcagagtatgatgaaacatctgttggtcgcgttggtccccctttgccttgttcatacattaagttgatagactgggccgaaggtggatacttaacaaccgattcaccaatgcctcggggtgaaatagttattggaggtccaaatgtaactaaaggctacttcaaaaatgaagcaaaaacaaatgaggtgtacaaggttgatgaaagaggcatgcgatggttctactctggcgacattgggcgcttgcacccagatggatgtcttgaaattatcgaccgcaagaaggatatagtcaagcttcaacacggtgaatatgtttctctaggaaaggtggaggctactttgagtgtgtgctcatacgttgaccagatcatgatccatgctgaccccttccacagctactgtgtggcacttgttgtaactgcacagagtgagctgaaatcctgggcctcaaaacaaggaatgacatatagtgatttctcagatttgtgccacaagcaagggacagtcaaagaagtcctccaatctttggtgaaggctggtaagcaagcacggttggagaagtttgagatccctgccaaaatcaagctgataccggagccgtggacgccggagtcaggcctcgtcacggctgccctcaagctcaagagggaggtgatcaagaaggcatacgagatggaccttgcccagttgtacagtcagtgacctgccgctacagtttctcaacgataggggtgatcctggtagctaccggcaacaacagttttttttatttgtacctcgtactatgttcctgtctttcttttaagacaatagttgactggtaaatcagttgccgataatgtgtagccttccattgcccgcccaaagagaactataattagcccttatttatttggctattatcatattcacctcaattcaaatacgttagccattataattgaa

SEQ ID NO: 15118 - DNA, 3426 bp, Zea Mays
aaatcagcagaagcagctgatcgatttactcaccaatatgttctctccccctctcaccctaggagcttttgttggcaactgggggaaccatagtgcgggggttcctcgcccccctctttccatgggagcttagaagctgttggatctctgcaagtgaccatgagccagagttttgacatcaacgtacttcgtgaagaagcaaggagtaggtggttaaagccttctgaagtgtactatatcttgcagaatcacgagaggttccctatcacccatgaggcaccaaagaagccacccagtggttccctattcctttacaatcgtcgtgtcaatcggtatttccggagagatggtcacacatggcggaggaagaaggatggaagaacagttggggaggctcatgaacgactgaaggttggaaatgttgattctttgagctgctattacgctcatggggagcaaaatccatgtttccagagacggtgtttctggatgttggaacctgcatatgaacacattgtgctggtacaatacagagaggttgctgagggcagatattattcatcacaactatcaaatggccccccagaacctctttcatccttgggatatccaaatgccatctgtggaaaccaataccacagatccacttctggcactagtgagggcagtgagtcccatcagagctattccaatttgagttctgtaactgaagtaagttcctattccggtaacaaggagtacaacaaaaatgatggcagtttactaagcataccagaggttggacacacttgtcaacaaaatcagactggtaatggtaactcaaaaaataaatctgagcttaatatggctttaaagaagatagctgagcagttaagtttgggtgaagatgatgatgatgactatatttactcaaatcaaactcattccatgggaggtgacaaccaaataaaacaaattcgacaagaaggaacacagaaaggtttgagtaggaatatagcaccatcatgggaagatgtactgcactccagttcaggtttaccaacttcatccatataccagcaatctgatgtcaagtatcagaaaaaatcagaataccagccaccggaaatcctggacagcagtgatttgcgcatacaactttctgctactaaaaggtttcttttaggaccagaagccagcattgactcaccatctttgaactctgtgctgagaaacagagtcaacagtgtaactgataccatttcagcttatgacagtagatttgaaagctctctgaacccagattggcaaacaaaaacagcattaacatttcaaagcaattctcagggctctgaaataacggagttgtttgaccatgatcattttgaaccctactccagagaagatacaacaatttccttaggacagacaaacaagtttaacattcgtgaggtctctccagaatgggcattttcctatgagatcaccaaggtcatcattacgggagattttctgtgtgatccatcgaatttgtgttgggctgtgatgtttggtgacaatgaggtacccgttgaaatagttcagccaggtgttctccgctgtcacacaccactgcacagcaatgggaatctcagaatctgcattacttcgggaaacagagaagtttgtagtgaattcaaagactttgagttccgctcaaaaccaacctcttctagtttcacagacattgcaccatcttctagacatctgaaatccagtgaagagttattacttcttgcaaaatttgctagaatgcttttgtctgggaatggaaaccgtgaagttccagatggtgatccccaatctggacagtgtccaaaacttaagacgaacgaagagctctgggataggttgattaacgaacttaaagtagggtgtgaaaatccattaagctcggttgattggattgtggagcaactgctgaaaagtaatctacaacagtggttatcagtgaagctcagaggattcaatggaacggattttttatccaagcaagagcagggtattatacacttaatctctgccctaggctatgagtgggcattgtctccagttctcagtgctggtgttggtctaaattttcgtgattcaaatggatggactgctcttcattgggctgcttattttggaagggaaaagatggttgctgcacttcttgctgctggtgcatcggcaacagcagttactgatcccactgcacaagacccagtgggtaaaacagcagctttcctggcttctgaacgagggcatacgggacttgcaggttatctttctgaagtgtcgctaactagctatcttgcatcactcactatagaagaaagtgatgtctcaaaaggatcagctgaagttgaagcagagagagctgtggaaggcatatctcagaggaatgcccaacggcatggtggcacagaagatgagctatcaatgaaggattctttggcggcagtgaggaatgcagctcaagcagcagctcgcatccagaatgctttccgtgccttctctttcaggaagagacagcagaagactgctcgacttagggatgtgtatggaatgacccaagaggatatagatgaacttgcagctgcatcaaggttgtaccaccaagctcatgcttcaagtggtcagttttatgatagagcagctgtttcgattcagaagaaatacaaaggatggaaaggtcgcaaacattttctcaacatgagaagaaatgcagttaaaatacaggctcatgtaagaggccatcaagtgagaaagaaatacagaacaattgtaagcactgtcagtgtgctagagaaagtaatacttcggtggcgccggaaaggtcatggcctacgtggcttccgagctgagcagcaaccaatggtcgaagcaatagaggaagatgatgaggaagacgacgatttcgatgatgatgaagcagtcaaggtcttccgtcggcagaaggtcgatcaagctgtaaaagaggctgtgtcaagggtgctgtccatggtagactctaccgaagcgaggatgcaatatcgacgaatgcttgaggagtttcgccaggcaactgcagaattggaaggatcaaatgaagtgacatcaatatttgacagtgacttagagttattagggatcaacaatttcatgtaaagagcatttcggtttcaagatctgagcaatgacataaattaagtatctacggaatgggtttcacctgctactaactaggacctgataatggtcgtcagtttatacagtgtttacgaaatggaaagtagattattgctgctatgatgtattgccactctatatttaggtgtattttcccagtggcagttcaatgaacactacattgtggtgtttgtaacttttaataccccgtttggatgtagatattagagtacaaaattgaaaattagaatcagc

SEQ ID NO: 15119 - DNA, 1750 bp, Zea Mays
  misc_feature (1)..(2): n is a, c, g, or t
nnaaagagacaccaattgtccacgacctgatcaacgcctttcagatgttggccctccacttcctgtggatcggcctccgtcacctccgccgttgccatcatctcctccacctgtgccacctccacctgcccatgttcatcagagtgcacatatgcagcctaaattacagacgacatctgatcacattgggccacatcctccaagagctacatataatgttcaaagtcaacaaccccattctattgcagaccacccaggtaacatgaattcttccgttgcaccattgccacccccaccttttaataactcaggatatggagggcaaccaaatcagataccgcctcccccaccatcggcaccactcaatcctcctggtccccaaggcagtttccctgctctcccagcaccatatcatgggaataactatcatcggcctccaaccacatcaatgcctaatgagggatataatctgcaaccagcaccccctccaccgcctccaaatcaattcccttctgtgccaccagaacaccaacataggccgcatcactggggtaataactgtccaccgtgtcctgagagatatcggtacaatggacatgatcgaggtcatcacagacatgatcgaaggcatcatgcgcacgacagacaacaccattatgatgatagaggataccgctatgatgatagaggatatcactatgatgatagaggccattactttgatgatagaagacatcagtttgatgacagagggcatcacttcgatgagagagctattagggggtcaatgcacaatgaggctgctgacaggtcaggatatccttttccaccaggacctcctccgattcctgaccattttgaagctccaccaggcccaatgcactatgggcgaccatcagatcctccaccagggcattgtgcaggctggtctaggccgcctaggatatctaataactattctccctcaagacattctgtggagcctccagtttcccatgcagctggagctggaggacatggtggatggagacctagataaccttttggaatattgaagtggccctgacgcttttcttaagtctgtgggggatttaacctgggagagtccggtggtctctgcttcggattgaaggcactcacggaccactccaggaaagcgggagctgctggtacctgcctccttgtacatatgtatctcaatgattctatggcggtcgcgctgcctgatttgcccttgtatccatcctaccacacggggagctgaattgtagggataggggtgtcttagattgtacttactatttgttggtgccagtctccgattccattgctgatgtccgttcctgaattcctcctggcctcagccgaaactgttgagagtacaccgtacatatatgccaaaaaagagtgaaatacaagtcattttgccctttgcacctctgctgtgctggtgacttgaccgattcgtaaaaagcccctgcatctgctaagacctgcgtgcattgcattgcttgtcaaggtacagagaacaaactgatgttccatctggacagtttcagctctgattgttcatttattttcaaccctattctcgtgtgtgtatgtatatatagagagcgagttcatacggtggaactaatgacttgcgattgatcattattgtttccctagaaaactaaaatctttcgttccgtttaatttatgaatggtgatatggctggtgtcgttccaaagattgacaacaccacta

SEQ ID NO: 15120 - DNA, 2089 bp, Zea Mays
cgggccttaagctcacgccggccctgtaggcctgtactatacctgtacgcttcaagcaaaaccctacctgatcccaccagcgtggtagagtctgctcaacaccaaacttcgacgactgcgccggccgtcggccgtcgctgccgccctattttgaccccatcgccggcgacgataatcgccagtttgtggataagggtcttttaagtcttcatatgaaactatccttttgatatacagctgaaggacaataactatcatggatgctactgcaaattcagatgtgcaaagggctgaggaatttaaacttaaggcgaatgatgccttcaaggcaaacaagttctcgcaggctatagagctttacagtcaagccattgagctgaatagttcaaatgcagtttactgggcaaaccgtgcatttgcacacacaaaattagaggaatacggaagtgctgtgcaggatgctacaaaagccatcgaaattgattctagatattcaaaaggttattatagacgaggcgcagcttatcttgccatgggaaagttcaaggaagccctgaaggattttcagcaggttaaaaaaatctgcccaaatgatccagatgctacaagaaagttgaaagagtgcgagaaagctgtccaaaagatccgttttgaagaagcaatatctgctggggatgatgagaggcggtccgtggcagactctattgactaccatatcatagaagtagagccacattatgcgggaccgagaattgatggggaagaaataacgatagagtttgtcaaagcaatgttggatgaatttaagaagcagaaatgcatacataaaagatatgcttaccagattgtgctaaaaaccttggatttgctgcgatcgatgccttcccttgttgatgtggatgttccaaacggtggacattttacagtttgcggtgatgtgcatggccagtactttgatttgctcaacatatttgacctcaatggccttccatcagaagaaaatccttacctcttcaatggcgattttgtggaccgaggatctttctccgttgaagtcatactcaccctttttgctttcaagtgcctctacccaaaagctatgtaccttgcaagaggaaatcatgaaagcaagagcatgaacaaaatatatggctttgagggggaagtgaggtcaaagctgggtgagaagtttgttgaactttttgctgaagtcttttgttggttacctcttgcccatgtcatcaacaacaaggtctttgtggttcatggagggctatttagtgttgatggggttaagctttcagacattaggtccattgatcgtttttgtgaaccacctgaagaaggtctaatgtgtgaattactatggagtgaccctcagcctcagcttggaagaggtccaagtaaacgtggtgttgctctttcctttggcgcagatgtgactaagaagtttttacaggaaaataacctggatcttattgtccggtctcatgaagtaaaggatgaaggccatgaaattgaacatgatggaaagcttataacagtcttctctgcgcctaattactgtgaccagatgggcaacaagggtgcatttattcgcttcacagctccagaaatgaaaccagatattgttactttctcagctgtgccacatcctgatgtgaagccgatggcatatgcaaataacttcctcaggatgtttcaatgacggaatataacaacattgtttagcaatttttatcagatgagtctgttgtgtgtcagctcccaaatcacatttcttggctaggtttaagtatatgctcccttgtacaacaaatcaaatgatgcaagggattcaactgtcgatttacttggatggtacatccatttttgtgcacgagttgtgattcttgtaactatccgtaaagtcttagatcattagattttagtttacttgtaaaattgctaaatcgtcatttcctgtcttgcttatcagtgagttacacacgtttagtgcttttatcaaattacatgtgtttcagcggtacaattcctaatatctgagtaatccttccattttaacccacaatgttcttacatagtttgg

SEQ ID NO: 15121 - DNA, 6573 bp, Zea Mays
cgcacatcgcggcctcgcgagcggacgccagccacccagccccgtccgtccgatctggccccttgaccgcttaagctcacctcagatacgattagttacactttttgttccttccgtaatcgtcgccttcgatttgttgctgctgcagctgctggccaggccatactactagagagggacgccctcccttcctctcgcttggcttacacttctccccatcccccaacacaaacccaacacaactccgccgtgtcgcctacacgcactggccacgaccaaaccctaggcgccgccgcccccggggcccccagggctgtcgtagggaggagaaggaggaggagatcggtgaggagagaaggggatttatgtcccagcgaggggacaggggcgaggggcacgccaggagacccggccggtccagcagcttcggcggccaccgcggaggcggagtcggtggcgcgggcaagggcggcgcgggctcctcaggccagcctcctctctcatccaaccgcagctttagaaagcctggcaatggccacggcgggcaccagagggtggtgaaccagcccgacaccactggcttccagcctgcaccagcgcctggcacccaccaaactcctgcgcgcccgccacctgcgcctcagaatgcagccgtgcatgttcctgtctccgcatcacggccacaacaccaggatccacatgtgtcatcttcattgtctgccagcgagaaaccggctaatccgccgttaccactaccgaaagctacacatgctgctccaagggctctaccaaaaaactctaacacagcgcttcctcagggaggatcgcaaggagaaccatcaaaggggtttaactttcagtttggtagtataaatatgaatgggctaccgcaatttcctgccaggacaagctcagctcctccaaatttggatgaacaaaaacgtaatcaggcacttgtggaggaacttaaggttacacctgcccctgtgcaaccagctctgaaacagcagcagttgcagcagcagccacagctgccgccacagctgccgccgcagcaggttccccagcagccacagcagcagtcagcaagaaaggaagctgttggttccagccaacataactccatcaatccccatattacatcgcaattgaaaagagatgtgcacccatctccatctgtccctaatgttacatctcttagacctaccgttcaaattcctggtgttcagatgccgatccccttccatcaccagccggcacaagtttccttgcagtttggtggtcatggggcacaactgcagcctcaagtcgtgcctagctcatatcaaatgtcaatgggattgacaggcagtagtacacaagtcccacagcagctgtatgcccctactctgcagcatcatcaattgcaacagcaagcaatgatgcatcctggccagggtatgggttatgttccttccgttgctcaccaattcccacagttgggaaacattcctatgaacatcgcatcacaatatgctcagcaacagccaaacacgcatgctgctgcacgtaagactactgtaaaaattactcatccagacactcatgaagagttgaagctcgataagaggatggactcttctgggcagagagctgcaccgagcttgacacaacaatcccagcccgttggtaattatgctcctcatattggcttctttcatcagccacagagttcctacaatcagtcaggaatgtattaccctactacagctggtgtgaaccaggttgctactggatcttcaggtcctagatataattatcctgtcactcagtctgggcaagcgatgacatatatcagtccatctgcagtgcctccggtatctgctcagtcccaatatacagttaaaccgcaccctattgggttggtgactgaaaaatctagtactcatgtcacaataagtgctccaccagctaaatctgagcctcctaagttacgtgctgctgaggattctgcgtcaagtcggcaaaaggataatgaaattgtttctgggatcgctgtttctagtaaatcaatccttgagaaggaggagagtaacgatcctttagtcacagtgaagcattcgactgtaataagcccgtccttgccaattcatggtgcaaaatcacaaacttcagtgacatcatctcctgttgtgaattcagtctcacctgtggcaggagttgatggaaaaagcatagaatctattcaaaggactggatcatttaatgataacaagaaaattgtcactaaaaaggatgtcaggatttcatctgaaccaccgaattcagcttcatctgttgaagataaggtgcaaactgtaaaggctggaggcagtgatcaccaggaaactaacaacctgaacaatgagttggatttggccagctcatcttcatgctcaacggttccactggcagtaagtaggatctttccagggaccgtttcagtgaatgctaacagcacagcagtaactgctgctgatgttcctgggacagatagaagctcaagaagaccatctcccgagggtactggtgagcctgcagtagaaagcttcactgttttggctgttgaatgtgacaaaaggaagcggactgatgaagttgcgacagatcctagcaaggataatatttcttctgatgctaccaaacatgaattgcctgatgcatgtgcagtggaccctactgaacaggcatcagcagtgacttctaatactgatgattcatatgcatcccctatagtaaataatcaggagcagttgctgaaagagtctgctccatctgcttctgaggaacaagctatgatgaataacttttccaagaattctgagacttcacattttcttgatagcaatgctgtggaagtgagaactggaacttcagagcctactgttcaaagttccaatgacgaaggtgactcggatattagtccagaaacagacctagctgtttgcaatgttcctctagtttcatctgagggacaactgaaatctgagagtagggctgatgatcaacaggctgctgaaccaacagtttcagttcgatcagtatccagggaaaagcctagtgttgagatcgccaggtcaaagtccgcagctgggaagaggaagaagaaaaaggaaatgcttgctaaggctgatgctgctgggtcttcagatctttataatgcatacaagggaccagaagagaagtctgaaatggttggtactgcagatggtgctgatagttcttcaatagttgacacaacacatgtgctgcttgatgaagcagaaagggatgttagtacgtttgcagatgattgtaagaaaaaagttgagcttgatgattgggaagatgctgcagacatgtctactccaaagctggcaccagattctggaaatcaggctggcaccacccaagtgctagattcagatacaagtgaagcaaacagcaggaagaaatattcacgggattttctgttgaccttgcaacaccactgtactggtcttcctgttggatttcagatgaatgaagctgtcaatgcaataatgaataatttggttggaaagtcttatgttgttgaccgggaaccttaccctagtcctggaaggggtttggaccgcccaacttctcgtggtgaccgccgtggtgctgccatgactgacgacaggtggactaagacgggtgttcctctcagtcctggtcgtgatgttcacatggacctgccaaatggaacatcagttgtcaactaccgtagctcaggaggtaatcatggtgttttaaggaatccacgtggccaaccatcaaatcaatatggtggtggtcttcttgcaggacctgtgcattctgttgggcctcaagtacctcgcagcggctctgattctgatagatggcagcaaaagggtctcatgccttcccctgtcacacccatgcaaacaatgcacaaagcagagaggaagtatgttgttgggaaagtttctgatgaggaggaggcgaaacagaggcagttgaaaggcattcttaacaagctgactccacaaaactttgaaaaactgtttgaacaagttaaggaagtcaacattgacagtgtagcaactcttactggggtcatttcacagatatttgacaaagctttgatggaaccaactttttgtgaaatgtatgctaatttttgcttccatctggctggtgccttgcctgacttcagtgaagacaatgaaaagatcacattcaaaagattgcttttgaataaatgccaagaggagtttgagagaggtgaaagggaagaagctgaagctgataaaacagaagaggaaggtgagatcaaacagaccaaagaagaaagagaggaaaagagaatccgtgctcgaaggcgcatgctgggaaacattaggttaatcggagagttgttcaaaaagaaaatgttgacagaaaggattatgcatgagtgcattaaaaaattgtttggaaattgtgatgatcccgatgaggagaacattgaagcactatgcaaattgatgagtacaattggtgagatgattgatcgtgcaaaggcaaaggagcacatggatgcatattttggtatgatgcataagatgtcaacaagtcagaagttgtcttctcgtgtaaggtttatgttgagagattcaattgacctcaggagaaataaatggcaacagaggcgtaaagttgaaggccccaagaagattgaggaggtgcacagagatgcagctcaagaaagacatgctcagtcaagtaggctaggacgtggtccagctgttagttctgtttcaagaagaggagcaccttctatggattatggctctcgtggctcatctgcgttagcatcctcaagttcccaacaagggagcattcgtggaatgcctccacactcgcgtggttcacaagacatccgatatgaggagaggaaccagtttgacaatagaactgttcttccccagcgtgtagtcaaggatgaagctatcactcttgggccacaaggtggccttgctaggggtatgtctataagagggctgtcaccagcatcaaatactgaacttccttctgttattgaccaccggagaatattatctggttctaatggttataactctgtgactgattggacatcatcatctggaagagaagattctagctcaataattccagatcgaacctctggccgaacttctgcttctagtcaatctgctggaccttcacagaggcctgccagccaggaaggccgtccaggaagtaaatcatattctgaggatgaattgagagaaaaatctgttttggccattcgggaatattacagtgcaaaagatgaaaaggaggttgctttgtgtattgaggagctgaatgctccgagtttctatccttctgttgtatcactttgggtaaatgattccttcgagagaaaagacatggaaagagagttgttggctaaacttctcgtcagcctttgcagtggtcgacataatttgttgagcaagcaacaactcagtgatggcctttcatctgttcttaccttattggaagatactctaagtgatgctccaagggccaccgagtaccttggacgactttttgcaaggtttgtggaggaaagcatattgctcttggaagagacaaaggggattcattcttgaatgaggttaagtcaacttcgagtttaaaattggttgatttcagaccacatcatcttaagcgatcaaagttggatgccttcatgtagctacatgagttattattacctgattcaccaatgggtgcggccgccaagcagtttactttgttcgcacgcaaatacccatcggcctttttgatgtactgtgaaaaattcctctgatgctactcctacttgctgtacctgatcgtgcactatttataagatggaaggcgatgggtcacccattttttcagagttgatgctggttgtaaactactgtcaatgaagggtcatgggtgggaagcagctagctaggcccccataagaggatcagggaatatttttgcgatcacagggagaagtctgctaaccaatattagttggtagttgggggaactgtaggttgaacttaatgcctcctgcgggcttctgaccaaatactcctttgtgatcagaattggtagtcggttaacttagcggcattttcgtgatagccaatgtttctcgtgatggtctgaatatgttgatgttgcttaaattttgctgtaatttgctatttttcctcgttctttgtttttgtacttattgagaattgatgcctcggattctctgatgtatgtatgattgggctcaggctcagggcactttgccatccctattttgtcatttcggttcttccttagcgtggaacgtaatgagtgtgagaaagtaaaattggtgaaagtgaaaatgggaactgagagcactttttttattgcattctcatacaagtgaaaagtcacatgcgaagacgtgcgaaagtgtagaatgtgcaaagggatatgtcccatgatcatttggttcatgcgactagtgcagtgcagtaataactgtttacatcatgtaacacttttccttaagcaagtggagaa

SEQ ID NO: 15122 - DNA, 376 bp, Zea Mays
ctcaaccctccattcaaggacggattttggtgggtggcttgtgcgccataaataccccacatcaggagcctcttttggtgcgcgcgctgtcactctagcgtgtctttctccccttcctgctttccctctccagctctcatacacaaacacacggagctagcagcacggatcgagagaacaatggaggaaacaagcaggatccctgggtacttcaagaacaagggcatcctgatcacgggcgcaacaggcttccttggaaagatcctcgtggagaagatactgagggtccagccggacgtaaagaggatctacctccccgtgcgtgcgccggatgctgcatcagccaagaaacgggtggagactgagacactgcatt

SEQ ID NO: 15123 - DNA, 145 bp, Zea Mays
cgaatccgtgcgacgcggggctggatctcagtggatcgtggcagcaaggccactctgccacttacaatgccccgtcgcgttttaagtcgtctgcaaaggattcatcacgccgcccgttgggaagggagcttcgaggcggcccgcc

SEQ ID NO: 15124 - DNA, 881 bp, Zea Mays
gtgatctcatccgtgcacgtttagtgctgtgcccgctgtacttctaccacgagaagcacccagtcaacctgatcctgctcggcctcttcaccgttgccatcagctttgctgtgggcatgacatgtgccttcaccagtggcaaggtcattctggagtctgcaattctgacaacagtggtcgtgctcagccttaccgcatacactttctgggccgtgaataggggcaaagacttcagcttcctgggtcctttcctgttcgccgccatcatagtgctgcttgtgttcgcactcatccagatcctgttcccactgggcaagctctcccagatgatctacggcgggctggcgtcgctcatcttcagcgggtacatcgtctacgacacaaacaacatcatcaagcgctacacgtacgaccagtacgtctgggccgcagtctcactgtacctggacgttatcaacctcttcctgtccctgatgaccctcttcagggcagccgactaggcgctctgctctcatcctgtctatctacgagtcggtgcctgaatgctcccgtggttaagctccggtacccagaattccagttccaagaatagagttgtatatagctacccgcgttgcctttctactagtatggtcttattcggcttgactcggttcggtcagagtcttgatacgtagttggatcgcgaacaaatgaaccttgcatgggagtatggagagccgtctgctttatgatcctcatttgcctgcccaccacgttgtatcagctgaaagctgaaaacaacatgtgggctgttgtctgccaagaatagaattgtgaaccactggagaaccgtataaaacgggccacctaccgcctgccctatacaccgtccgaactgc

SEQ ID NO: 15125 - DNA, 4195 bp, Zea Mays
gtaggtagttgctgctgtgctgttcccccccgtctgtccctgagaggcccgcggcgtctccgcttcgcctcaccacccaccacctcctcctcgccggtacccctcgccggagccagcgagcttccggcgaagaaatccggcgggcacaccacacgggggcggagcaggggggaaggggtccggcgccggaatgggggcaagcggccgggtgctcaacgccgtcgtcgctggtgtcgcgtcgctctagggttaggtaggtgtccgtagctttctccttcgctccccctccctcccctttgccgcccggcgtcgcattggggtcccgtgccgaccgccaggccgcgtgatccacccgtgctcgagctcggagaggctcccggttgcgtggcatggggccatctcttccgcctgctgccgctgactgggaattcggcaccatttcttcgctctgaggagtagtaggtggcagcagtcgccgatctggatgccatctcaagtcatggatccgaggcgccacctctcccagttcagcaatccaaccgtggctgcgtcctccttctctgaggagcagtttcgccttcccacagagaggcaggtcggattttggaagcaggagtcgctgcatcacattggaagcaagtcagttgcatcttctccaattgaaaagccccaacccattgggacaaaaactgtgggtcgggtagaaccacaaccatacaagctgagagaccagaagactgcatttagccttgagcacaagacttttggtcaagagagacatgttaacctaccaccatctctgtggagagctgatcaagaccctaacctccaatctgatccatctttatttcccgatggaaggaggactagtccaaatgaggcctacaacgagaatgggcttttctcaagctccctatcagaaatttttgacagaaaattgggactgagatccatggatgtgcgtctacgccagccagttcaaaaggttgatctaactcatgtagatgatgagccctttgagttaacagaggaaatcgaggcgcaaataataggaaacatacttcctgatgatgatgacctactatcagatgttcttgatgttgggtacacagcccatgctaacatgggtgatgatgtcgatgatgatatattctacactggaggcgggatggaactggaaaccgatgaaaataaaaaaaatacagaacttaatggagctaatgatggtcttgggttgctaaatggcacaatgaatggtgaacatccatatggggaacacccttcaagaactctttttgtccgaaacattaatagcagcgttgaggattctgaattaaaactcctatttgaaaattatggagaaatcagcaacctttacactgcctgcaaacatcgtggttttgtgatgatatcttactatgacataagatcagcatggaatgccatgagggcacttcaaaacaagccactcagacgtagaaaacttgacatacattactccattccgaaggacaatccttcggagaaggatattaaccaggggatgcttgttgtatttaatgttgacccctctataacaaacaatgatatccatcagatatttagcgaatatggtgacataaaagagattcgcgatgcaccgcaaaagggccatcacaaaattatagaattttatgatgtcagagcagccgaaggtgcagctcgtgctttaaacaggagtgatcttgctggcaagaaaataaaactggagactggccgtctgagtggtgctagacgttcaacacagcacatgtccaaggagttggggcaggaagaatttggtgtatgcaaactgggcagtccaagcacaaatagcccttcattgccttcattgggttcatctaatatagcagcaatgacatcttgtggacgtgaaaatgggagtatgcatggtttgcattctggacttctcacatcaatgagcccgttcagagaggcttcatttctgggtctatcatctaccctaccacagagcctgtcctctcccattggaattgcttctgctgcaactcatagtaaccaggctccccttggtgagctcagccactctcttagtcggatgaatgggcatgtgaattatggttttcaaggcttgggtgctattcatccccattctcttcctgatgttcacaatggagcaaataatggcaccccttacaatctgaacaccatcacacctgttggtgtcaataagaactcaagaacagctgaagcagttgacagcagacatcttcataaagtgggttctggcaatctcaatgggcactcatttgatcgtgccggtgaaggagccatgggattttcaagaagtggaagcggtcataactgtggtcaccagttaatgtggaataattcaaataacttccacggtcatcccaattctcctgtgctgtggcaaaatcccggatcatttgtaaataatgtaccgtctcgccccccagcacaaatgcatggagttccaagagcaccatcacacatgattgagaatgttcttccaatgcatcatcatcatgtgggctctgcgccagcaatcaatccgtcactttgggacaggcggcatggctatgcaggggacttgacagaagcatcaagttttcatcctggcagtgttgggagcatgggatttcctggtagccctcagcttcatggtctggagctaaatagcatattttctcacactggtgggagtcgcatggatccaactgtgtcttcagctcagatcagcgcaccatctcaacagagaggtcctatgttccatggaaggaatcctatggtcccccttccttcatttgattcacctggtgagcggatgagaagccggagaaatgattcaggtgttaaccagtctgataataagcggcagtatgagcttgatgttgaccgcataatgcggggggaagactcacgaactacactgatgataaagaatatcccaaataagtatacctccaagatgctcttggctgctattgatgaaagtcataagggcacttatgattttatttacttgccaattgattttaagaataaatgtaatgtcggctatgctttcatcaacatgaccaatcctcagcatatcattccgttttatcagagttttaatggtaaaaagtgggagaagtttaacagtgagaaggtggcatcacttgcttatgccagaatccaagggaaaacagccctgattgctcatttccagaactctagtttgatgaatgaggacaaacgctgccgccccatacttttccactcagatggtcctaatgcaggagatcaggaacctttccccatgggttcaaacatccgagccaggtctgggagatcccggacttcttcgggtgaagaaaatcaccatgacatccagacagtcttgaccaacggtgacacttcttccaatggagctgacaattcaggtcccaccaaggatactgagtagctgaactgcagcttgctgcatcgctaaccacaaaggcccaaacttaggctgctgcagaagttttgtctctggcgggaagctatatgcaagagggtggtaccggttcgttccccagaatctatgtgcttgttaacctgaaggccgagaaaggcgaaaaggcgcagggagagcctccagattttggtcgctgtaagaattaaccccatgttgtacagctggtcccagtaatttgtgctgaggggagagtgaaggagtcatttgatcagtttttagtggtggtgtgtggagaggaagagtcttgcctgcttttcctttttgaactttcttttgtgccttcacctgtgttacattttgagtcgagggctcctcttaaattgtgtgcagaggggctcgattttgttaccccagaacaaggcgcatgtgcgtcggcgtcgtcttctgccaccgtatctatcgaccttatgtacatcttcatctatatatagtatgagttttgatgtcatctatttcttggatgtctcacaaggttatttatttgtatctacgtgtctgttatgcttgtggtgtgtaaagcctctgtgaatcttatgcttggttgcttactatgtgagcatgaatgcaagctgtgagcgtgtaatccttgttcaaatccagagtataccaacaatagctaattgtttgtacattgctatggtttctatatgtagatcttgcttaaatggg

SEQ ID NO: 15126 - DNA, 1211 bp, Zea Mays
ctgcccctcagagcaagtccatcctcgaatctttgaggaggagagcgcgcatgatgacagacggtttcaacagctgccgaaacgtggtgtgcaatttcacagaaggtaagcatcaagatttctgttggtttgcagcgaatagagtgtggtttatttttgtgactggttgtgttgctgcaggagctatgtactctttcccccaaatacagctgccagcaagagccatcgaggcggcaaagagagccggcaaagcagcagacgttttctactgcctcaagctcctggaggcaacggggatttccactgttccgggatctggttttgggcagaaggaaggggtgttccaccttcggacaactatccttccagccgaggaagacttccctaccatcatgtcgagcttcaagaagttcaacgactcatttcatggagcaatacgagggctactccaggatgtgatgtcaacatgaaaagaagcgaccgcgccaccattttgcttctactgcccatactagtagaaacagtgatcggtgcactatgtgatattttgctgctgcaactgcggccttagtctgctatgtatgtgttgcctgttctgaaagagtaaagaagcgaccgataatgtatatcctgagccgcgcggcggggagaaagcatttcgcttttaagggaaagggaagcatcagcagcgccgccgccgctagagccctagacagacttaatcgctatctgggtcagtccaaaacagtcggaaacaaacccgacagaggatattttactcttgaatttacctggagccactggcactttgctgctgcctgtatccgtggtgaggactccgaacggtccgcgcgctcagattcagttactatctaattggttgcccgcatcgctttattctggatctctacgtgcattgactttgattaagtgtgtgtttggttgcccgcacgtggaaggcgtggattgtacgagccgatgcaaaacaagccatttagaggccaaaatgccggtatctgaccaaccaggctcaggctagactgcaaccacggacacacttaaccaatcagcaggttaggttttcgagtttcttgttatgattattaactaaatttgtaaaattagtccggtagattgctttgtaacgggtccaatcccctcctctataaatatagaggaatacggccgattaatcatcaattatcgaatca

SEQ ID NO: 15127 - DNA, 1799 bp, Zea Mays
ggctggtggccatggctacgtgagcaagtgagcaacgcgtgttccgccgcccctccgctccggagtgcagagaccacacaagacaagagggagagagccgagaaaggaaaacgaaaaaaaaaacggcctttccttccccccgcccaaaccaagaaagtgagagcgcgcagcgagcccctgccggcgactcggcagtccgcactgaggagtgaggacgattcgttcagcttgctcccaacaaattcgttggaggacaggggaggggcggggtcgtccgccgctggttctgtagtcagccaggtatcagcgtttgaggctaaaaaatggagcactgtacagcttttatatgtacttcagcacagtggcctcactcaataacgaccactcgacgagtggcataccatagatctgcaaattcaagtttctcagcaccccaaaggagaaggcggtcaacactctatgtcatgaatgccgcatcaaccagtgctccaatttcacctcaaaacataacccaacttccacggacgaacagcacagttatcaaaagtatatccagcgacaaacccagcagtgcaatggagcaacttgatattgaacgtggtgtctgtattccgttccgaaagtacactcctgaaatggtcaggaaaaaagtattggattcaagaggttccatactgtcccttgcgagccggggagtggagataatttggaaacttggattttactggtcatctcttgtgtatgactttttggttggacaggatgaagaaattgttccatatcgtgcccggcagctccgtaatcttttatgtgatctgggcccatctttcataaaagcaggacaggttctagccaacaggcctgacattattcgagaggattatatgaatgaactttgcatcttgcaagatgatgtccctccattccctaaccaggtggctttttccataatcgaggaggagcttggccagcctatagagagattgttcagcaaaatttcatcagagacaatagcagctgctagtttgggccaagtttaccgagccacacttagagaaactggcgaggatgtcgctattaaggttcagagaccagggattgaaccaataatataccgagatctattcttgttccgcactttggcttcatttttgaatgggattagtcttcagaaactagggtgcaatgcggagcttattgttgatgaatttggcgaaaaacttttggaagaacttgattacactcttgaagctacaaatattgaggacttcctagaaaattttaaggatgatccaactgtcaagatacctcaagtgtataagcagctttcaggttcccgtgttctggtgatggagtggatagatggaattagatgtacggacccacaggctataaaagaagctggaatcgatatggaaggttttctcacggttggagtgagtgctgctttgcgtcagttacttgaatttggtcttttccatggagatccacatcctggaaatatttttgcaatgcgtgatggtcgtattgcttatgtcgacttcggaaatgtggccgttcttagccagcaaaacaaacaaatcctaatagacgctgttgttcatgctgttaacgaagactatgctgaaatggcaaatgacttcacaaggttgggtttccttgctagtggaacagatgtagccccaattattccagctctggaatctatttggcaaaactcagcaggaaaaggcttggcggacttcaatttccggagtgtgactggcggctcttgcttgtataaatatacaacctcatcg

SEQ ID NO: 15128 - DNA, 772 bp, Zea Mays
gaagtgaattagaagcaccgattgcatcatccacgtacaacggtctggaaggaacacacattaaagtaactgagtttgtcagagacaaagattgccttgtatgtgggcctggtacccttgttgagctggatacgtcatctactctttcagatttcatcaagatgcttgaagagcaccccaagttgcggatgtcgaaagccagcgtgacgcacgaaggtaacaacctgtacatgcagtcaccggaggtgctggagcagatgacacggccaaacctgagcatccccatgtttgagcttctcaaagaggtcccatacaccactgtccatgccacgggcatggcagagaacaacgggaaaaaagtgtcctcgttgaggaagctccgtgtggccttcaagggcatcgaagacgcctccaagatggatacgaccgtgagctcatgatgccggtcgtcgtcgtcttgttgctaatttcaagtctcccaggaaagatgaggattaacccaatgtttttggacaggttaagtgtagttttcgagcgccatattacaaattgaaatgtgcgcctgatactgttcaaacatgaagaaatttatcgtagatgatactatggttttgtgagaatctacttcttggtgtttcgaatcttgctcgacaagtaaattaaatttattgtgcgtattctgagttttggagcgtgtacgcggtggagaatgtaagatttatactagttcggacagaacgttcttactttcagtcattgtggcttatgctat

SEQ ID NO: 15129 - DNA, 2149 bp, Zea Mays
tgatgaggagttttttgcatctaacattgttacttgtgttggtcagatcattggaattgttgttgctgatactcatgataatgcaaaaactgctgccaacaaagctccgcagaagcatcagaagtatgttgcaagtgttcttggtcttccacaatcaaaagtcgtttgcaagactaagcgtattggtggtggatttggtggaaaagaaaccagatcagcaatatttgctgctgcagcatctgtaccctctttctgtctgagaaggccagtaaagcttgttttggacagggacgttgacatgatatcaactggacagaggcacagtttccttgggaaatataaggtgggatttaccaatgaagggaagatactggccctagacctggaaatttataacaacggtggccattcacttgatctatcccttgcagtactggaacgtgctatgtttcattcagaaaatgtctatgacatagaaaacatcagaatcaatgggcaagtatgctttacaaacttcccaagtaatactgctttccgaggttttggtggtccacaaggcttgttgattgcagagaattggattcaccatatagctacagaactccaacgaagtcctgaagagataaaagaacttaattttcacaatgatggagttgtgctacattatggccagttgctccagaattgtacaataagttcagtttgggatgaactaaaagcatcttgtaattttgtggaagctcgcaaagccataaataattttaacagtaataaccgctggaggaagcgaggaattgccatgattccgacaaaatttggcatatccttcactgcaaaattcatgaatcaggctggcgctcttgtgcaagtttacactgatggcactgtcctggtaacacatggcggggtcgagatgggacagggtttgcacacaaaggtagcccaagttgctgcctcgtcattcaatatccctcttagctctgtatttatatcagagacaagtactgataaggttcctaatgcatcaccaacagcagcctctgctagttcagatctgtatggagctgcagttttggatgcttgtcaacaaatcaaggttcgaatggaacccattgctagcaaaggaacccacaactcgtttgcagagttggctcaagcatgctacatggaacgtgtggatctctctgctcatgggttttatgctacacctaatattgggtttgactggacgattggcaagggaactccattcaattatttcacgtatggagctgcatttgcagaagttgagatcgacaccctaactggggatttttacacaaggacagctgatattgttatggatctcggattttcaattaatccagcaattgacattggccagattgaaggagcttttatccaaggattgggctgggcagccatagaagagctaaaatggggggatgataaccataagtggattcgacctggacacctcttcacctgcggtcctggttcttacaaaataccctctgtaaatgatatacctctgaatttcaaggtttctctattaaagggtgttccaaatccaaaggctattcattcttccaaagccgtgggagagccaccatttttcctaggttccgccgtcttatttgcgataaaggatgcgatctctgcggcaagggctgaggaggggcacttggactggtttccactcgacaacccggcgacaccggaaagaataagaatggcatgtgtggattccattacaaagaaatttgccggtatagattatcggtccaagcttagtgtatagcggctgctgggctggtcacgggagaataaattggaaacagaagcccgcatttgtaaagtttcatgccctttgtgctaaaaagaatgggagggacggtttagtgttacttgtgggaaactttaaccctaacaaaggattgggtgatgtattaatagactgagttagttgggtctgacatacacatggatgagaagataattatacggtaaaccctaaggccctgttcggtttttagggattggagccccggattgattcctagccggattacttctctaatttatatagattttgatgagctggaacaaatcttggtttattcctgtacaaccgaacaggccctaaacg

SEQ ID NO: 15130 - DNA, 1083 bp, Zea Mays
attgcaaaaaaaaaaaaaagttggtccgctcccaccctccgtccgaccgtcctcgacctcccgtcccgccgcctcccacagtcgcaaccctagtcccacccgccgtcctcccgccctcccgcttcccattttcagtcgccgagccgcgtacagcgcacgcactgcacgcgcatcggcacttccagcgacgcgtcgtgagctcctcccttcgacccttcctgtggcgcgtcgtaagctctgtgcaggcgacggcggcgcgctaccagtgacggggggatacggcggcatcgtccccctcggcccctcctccatcccggtgcggcggcgccagcctacagggcaggagtaccaccaagcgagcgcgatggtgagctccgcactgaggcgctgtctcccctgccatgcctctctctgtcatgccttccctccccatccgctgctggccgctgccggcgtcttccgtcgttcattccagtccggggatggtgagactatggacgaattcgaagaacggttgtttgggggcaaggacacagacaaaggatcactctacgagaagctcgatagggctgagaacactggtaggagatacaatatgggctctgggatgggtggtttgactgggttaagtgacaagagcagatctgggttgtccaagggtggtttcacttggttaagtgacagtagcagctctggtttccctgggtttcctgcatctggcgacaggagcaattcaggatggatggatggttatgattcttttaatgatggcttaaatgatacgattgctaatgcggcacgcaacatccaaatggaggaggacgaggacgtcgacggtgactgggaagatgactttgagttcaggcctgatgtgcggtttaggcaaggttcaacgtattctgttcgggaccttgaccttagaaaacctgcagccgcaaagaaccctcctagacgacagtttgaaacaactacagcggaggtactgaagaaggctgattttaggaatgttagattcctctccaactttcttacggaagctggaattatcatcaagagaagccaggttactttattcttcttgga

SEQ ID NO: 15131 - DNA, 999 bp, Zea Mays
aggccacacagaggggcaaccaaagtcgttgccgcagaaaaaaataataatcacaagcgttctaccggtggaggacaaccattaatcagcaggctttggggccaaaagaaacggagaggagaaaagcgggggcggcaagcaaccacgggcggagctcggagcgtcctcctcctcccgtctataaattcccctccttttcttcctccatatataggggccatcagatccaagaagagggaagagcaccaaggaccttcggcgcccgttcaggatccacatcttcccgagcgagttcttggttgacctcttcctcttcggaccacctccaaggctcttggtgtagcttgccactctcaccaatcaagttttcatgtctgatctcgacattcagatcccaactgccttcgatcccttcgctgaggccaatgctggggactctggtgcggcagcagggtcaaaggactacgtacacgtgcgcatccagcagcgtaatggtcgcaagagcctgaccaccgtccagggattgaagaaggagttcagctacagcaagatcctcaaagatctcaagaaagagttctgctgcaatggtacagtggtccaggacccagaacttggacaggctgcccgctataggtcattcagctccagggtgatcagaggaagaacgtctcgaatttcctcgtccaggccggcattgtgaagaaggagcacatcaagattcatggtttctgagcaaccgccgggtccatagcaaaccaaccctgcatgcagggccagcttattatatataatatctgaggtggagcatatctatctggctgtgtactgcaagcaggcctagtacgccgcctgcgcgttcctcctattacacatataggcccctccctgcgtgtatgcttgttaccgtcgtgtcgaaccttgtactacgaggctccatcgaacatcgatggcttgcttctttatcagaacatgtttgaataaacgctatttggtaaaaac

SEQ ID NO: 15132 - DNA, 163 bp, Zea Mays
atgcctatttagtgctactgaggaagttagctcatggtcaaatggtgattcaggagaaaaaagtccacaagcttgctccccttcacaaacacaaaaggaaaaacgtttttcccctgaatggtgctctagcgctagaaaaaggaatagaaaaactgtcttccac

SEQ ID NO: 15133 - DNA, 1304 bp, Zea Mays
tcaagaactgtctgggtgctgaagctgccaccacctgaccaggtatgctcctctatcatgttcagcaagggaatcaaaacatgtttgacatacatagaagctgttccctggaatgagaacgaggaggagaagctgaagaatctctttgcaagattcacttttgacgaagcaatatcccaggatatactggcaagactgcgaccacacaactggaaaagctcagatgacctcgctgtacagcttattcaatctgtcactaacagcaccagcactatggcaagaaaagacatgcaatctttggtgaatggtcttctaagcaaaagttcagtctatcaaaaggactcgtcaggattaaacaaggagagcctgtatcagatctgttattcatgtctagagtcactggtggacctctttgaagaggccatagaaccaacatattacacaggtcaggctgtggtagttagagggagcaaaccactgatcgagcgaatctctacgcaaacagagaacctcaattggctattggatattctagtaaacattgacattgcagaagaatttgtagaactgtgggcgaagcaaggcaggctcattaggatgcacgagcaagcatcagcgatcgtcaggtatgagctaagtcgaatatcagctggtgtgttcattgcacttggtaaaggaaaagtgcagtgtcgtggtgacgtacgaagcctcctctttcatggatggttcagcacaatgttgttggattttggctggcttcagcgctgccccaaaggtctcgacctaagatcgttggaggagaatttagggcgaggccttttaaccctccctctcaggcagcagcaatgtttgttcgaggaatggttccagttctatgcgaccaaaggacccgagtgtccgaaccttattagagctttccaggtatggtggagaaggtctttcattagatcattggtagaacctcaaaactaagtttttccttgatgtactagtatgttgcgtgtatgatttgtaaaattgcaactgttctgatgacccttaaaaatgttttttcgtttgtagtttagttcttcccattgtatgtgaatagctggatgaatttgcttgaggataacatctgcggcgtggagtatgtaataacccaacccagtcatatgtcgaacttttgtactttttgtagcatgacagtcaatagtgtccgtggatttaggggtgtttgaatgcactagagctatacaattagttgaagacatcaaaatagtctaactaatagttcaactattagctaatagctagttactagc

SEQ ID NO: 15134 - DNA, 99 bp, Zea Mays
gcgaggtccgtgcggcacctgctaagggttcgatagaaggcctgaatcaagggtcattgccattttcgcagttgtcgagtcttattggtcatggtgagc

SEQ ID NO: 15135 - DNA, 968 bp, Zea Mays
cactggatgtttggaagttcatcttcgctacttggttgctcagatatgatgaaccaatctctcttcttggttggagaaatcgggggcaatgactacaacggacctcttctttctggagttcccatggagaaaatccgtgccatcactccgagtgttgttgcaaaaatttcttctacaatcagcgaattgattcggctaggagccaagactcttgtggttccaggaaacctcccaattggatgcatcccagactatctgatgatattcaagagcaataaggaagaggattatgaaccacagacaggttgtcttaggtggatgaacgagttctcacagtatcacaacaaggttcttgtggagcagctcaagaagcttcgcaagcttcatcctggagcaaccatcatctatgctgattactatggagctgctatggaaattttcctttcccctgaacaatatgggatcgaatatcccctagtggcttgctgtggtggagaaggaccctacggtgtgtccccatctacaggctgtggattcggagaatataagctgtgcgataatccagagaagtatggatcatgggatggcttccatccatcagaatctgcatacagggccattgctatgggcctgctactaggttcctacacaaggccgtcgatcacttccaccaccacttcatgtccacagcttatggagctcggctcttctgctgaatacaaacccctctacgacctgtagtaattttgtaattatattttattgtgtgtactccctcgcccagttctatcagtaccattttgtaagtatttgtactttgtaacttgtaactaataacttatcaaactagctactacatatttgttagagtgcacggttactcggttagattcagattcgtttgaaactgaaaatgcggaagtataaacaaatagaagaaaatacataagtgagaccaataccgaggc

SEQ ID NO: 15136 - DNA, 168 bp, Zea Mays
aatctgataacgctgccttcccgccgttatcctttcccacgactcctctcccccgcgtgagaacatgccccgcgtccttgtccaggcaccattgccgccggccgctgcctcccttgcaccatcggcctctacagaggccacatcttctccagtcgtggccgcctcttc

SEQ ID NO: 15137 - DNA, 1553 bp, Zea Mays
caatttgagtttttcttttacagttaccgtaagctctagtcaatgaaaatcccaaacacactttataagaatgggtctgcctttcttcctcatccgtgatactccctcagattcttaccaaaacagaggagcccgtcggccgtcgcaaaaaaaaaaaaaaaacaaaacaagaccaccgcaccatggaatcgctgacgcttcgcgcttcgacggccgcctcgccgctgcagcgacgccggctgctccccggacggcagcgcgcgacgtacgtccgcgccacggcctccgccggcgagccggacctctccgtgcgcgtgaacgggctgcagatgcccaacccgttcgtgatcgggtcggggccaccgggcaccaactacaccgtcatgaagcgcgccttcgacgagggctggggcgccgtcatcgccaagactcctgcaagaatatctcttaagtctggatgtgaaggagtttctgcaattaacacaattatgagtgtaatggggattaatctcaaaacactgcgtccggaaccttgtgttgaagggtattctacacctgggggttattctgcaagagctgtgcaccctatagcacttgctaaagtcatgcagatagcaaggatgatgaaagaagagtttgctgatggacagtctctctctgccattggtggtgtggagactggcaatgatgctgctgagtttattcttcttggtgctgatacagtacaggtatgtaccggtgtgatgattcatggttatccccttgtgaagaagctttgcgcagagttacaggatttcatgagagagcacaacttttcatcaattgaagagtttcgaggggcctcgcttccgtatttcacgacgcacacagatctggttcaccggcaacaagaggcggtcaggcagaggaaggccatcaagaagggccttcaatcagacaaggaatggacgggtgatgggttcgtcaaggagaccgaaagcatggtatccaactgatgcatctctgccaccccccaccgggccattccttacaccatgctccaacttcatctttttaataaacgcgcaccagaaatgccacacaccaagcatctagtcctcatctgtacatggttctgaaccttgggccttcagtctatagaacaggccatgaatccacacaaagtcgtgacaacgggtgacattgagcgatatatttgtcatgtgaacattaatttgtagcactgagctgagggcttgaccttgtaaaatcttggagacttcaatctcgcacaggttttctcaggagtttataattatacgtgagtgatgtgtgaggacatgctggcctcagcttcaagtcaggtccgacttcaagtcttctccaaagcccaaaagctcgtcccagcactgatgggcgatcgcgtagctgacgaacatgctgcagttgcgagcgatccacggcgttgctctgttggacgggtactcagatccagtcttctctaacaagtcaagttcacatcaaacatgaatcttcgtattatttataatgaacggaaggggaaatggggccag

SEQ ID NO: 15138 - DNA, 2589 bp, Zea Mays
ctgcgccacatcccacatctgtgagacacgagccgccgccagaagaccaccgcgcgccccggcccttcttccacgcctccgtcttccgcgcctggccacggcccaccgccgtccgcccttcgacgcctgacgcgccccggcaccgcccaggcaaggcggccgccggtagctacggacagcccaccgcgtccgcggcaccgcccaccggcagcagctaccggcaaccgcgcccgcggctctgtacccagggagtagcctatcatggggaagaggccgaggacaactctgcggcgcacgccagcacggggccttccaaagtccaagcgggccgacgagctgccatcgatgcctgattctgacaacgacgaaattgatgcatttcacaagcagcgggacatgatccctttcgacgccaatgatgtaagggagtcggaggatgatgatgtggagcagcccgtgtttgacctcaagggtgtttctgatagcgaaagtgatgacagcaaaggagaattgtccggtgacatggctgaagctgattatgaaggatgggacaaagggtatatttcgaaattaaaaagagcacagagggctgtcaaacaaattgctggaggtgatgatagcatggatgagcaggaggatgaaacacaagaaaatgtttggggcagaggtaaaaatgcatactatgctcctggtgaacaatctggtgatgatgaggtggattacgaggaggcacaaaggatacaaaaaaataaggaaaaaaggctgtctatgaaggattttggattagaagatggtgaaagtgatgaagagggtaatgcaacaaaggtatccaaccatgaatccaaaatgaaagaagactttgctgtcttatcaggcgatgagaaaatggatgtgctatacagttctgcccctgaactcgttagcttgttgtctgagttgaaggatgcccatgaagaacttagggccataggacagctaacaagtgaggtcacgtcttgtctaggcaaagataaaatgcaaccttttgaagtgaagaaagcttgtttgcttgctcattgtcaagctattaccttctatctccttatgaaatctgaggggttgtccgtacaggatcatcctgtaatttctcgcttgatagagaccaagaatatggtagagaagataaagcaaatcactttgaatccagtgagccaaaaagggtgcgctgatgaccatagtatgcattgtggcaccatccaaacagataagatagtctcattggacaaacaggagggcaaatttagcaatgtactagcactggataaagtgaaacaaggtgctgaagtctctgaatcaagaaagagtgagccttgtaataacgattatcatgaagttaatgaacagaagaacaaggatgaacgaatgggcttgcatagccttgaaatgttgaaggtaagagcaaaccttgaggaaaggttaaagaaaaaagggctctataatttgacacgctcgaagccagagaagtcgtcaaaaaccaggacaactagtgataatggcctgcagacattggatgattttgatgatgaagtgctgaagaataaccaaatgatgaagcctagcaagcttgttgcagcagctgctaaatcaaataaaagcatgtttgtttctggtgatgatgaccttccgaagagagataatatcggagaaagacggagaaaacatgagcttcgcgtcctatcaagagtaggggctaactcagcagaggatcatgagctgccagatggtgacgcttctgaagaggaggaccaccatgagttgccagaaggtggtgatgaatctgaagacgacatccatcgggatgtcaaaagaaagaggactgaaaagctatcaaccaagaatgctctgtactcgccaactccgggcgttgaacatctggaggaagaaacagaaggcgatggcaagaggacgatttcgtatcagatcttgaagaacagggggttgactcgttccaggaataagaagaagaagaacccgcggaagaactacagggataagcacaagaacaagcttgtcaagcggaaaggccaagtgcgtgatatcaagaagcagtctggtccgtatggaggtgaaacgtctggcatcaacccgaatgtcagccgcagtgttcggttcaagagttgagttgatgcaagtagtatatttaggttggacatggaaggagttgtttctggtcttaacttggcattttctttattttttgtttgcatgtcattcgaacgcataaactccagaatttgtcttacggtattagatgagtacaattttgcttgcgaaaaatatcattatcaccgttgcctgtgtgtgtgaaaactaggtggtataattatcaaggaaatttgtatattatttcgaaccatatatattagtaggggctgtttatttagataaatgtccttaccgtgagacattgctagtagcatgacagcatgcataacatggcagcctttcattcttgacaataaccagctgtggaactgatatgggtccctaggtaattctacacatatgcagcctgttcacttggctttaatccgaacccgcttagacctt

SEQ ID NO: 15139 - DNA, 1477 bp, Zea Mays
gtattgatgttaatctaccactgctgaaggaacaatatgtccaatagggccacccattggtgttatgcctgtcagcgcccaattcgtcttcgcgggcaggatatcatatgtcccaactgcagtgatggttttatccaagaaatcagtgagatgggtggcgtactgaacacttatgggctaactgaaccggactttgaagagcgccaggccagaagatttggaatgatggatgccatatcttccctcatgcggcaacggctgtcagaaataggaagggatagtttgtttgatattcacggtagacaagggacaggtactgaatatggaaggaggtcaactgctattcctacgctggtatttggtggcatcccttctcctgcagttggtagcagtgatatcaatgttgtcatcagggaaggccgcagagctggcgctgcccgtccgaatttcagtagcttagttgttggtcccagtctggaagctctatttgagcagctactactccagaacaaccgtcaaggcccaccacctgctccacagtcagctattgactccatgcctgtggtaaagataaatcgcaggcatcttgacgaagatccacagtgtgcagtttgcaaagacaaattcgaggttggagcagaggcgcgggagatgccgtgcaagcacttgtaccatactgactgcatcatcccctggctggttcagcacaattcctgccctgtttgccgtcatccgctgccatcacagcgatcaggcagtagtaccagcagcgcccgtgtgccttcagcatactacaacgaaacagcttgccctcctgcggtcgccagggcagatttcgatcctgtgccttcagcatactacaacgaaacagcaactgatcctcctgcggtcaccagagcagatttcgatcctgctccaggaaactacggcagcgaaagccaggaaagtcacgtccccttctcctttctctggccatttggcccgtcgagttcttaccaatatgaagaaaatgttgatgaacctgcagtatacgatccaaaccagatagcatattctgcgtggcactatgaccactgactgaaaccctgagttaaaatcaagatatctgcaattcgtgccttgagctctcagctttggtgaggcaaagggctgcttgccgtataaaaaatggatggttattgtgttcagtgcatacccttgctacgcatgtccgttgtggagatatcagctgtgtatagaactgggcgcaataaactctgctgtaatgcccgtatatattccttttcggtatatcaagtctaaagctacataatcctgtatgtgcagtaatcggtgaactgagtgcatccagaatatcatgtcatgataaacatgattataattacatggttgtctttttagactgaacacagcatgtcttctgttccggctatactgaaactgaaagatacaccaggatgtgtttggttgaaatgtg

SEQ ID NO: 15140 - DNA, 914 bp, Zea Mays
  misc_feature (1)..(1): n is a, c, g, or t
ntgcagggctgtctgtgctgggcgtgggatatggcaagtcacgagtggagacagtcaatatcttgttgatctcaacaatcagaaatgtggatgctataggtgggatgttactggagtgccatgcttacatgccgtggctgctatccacgagttcaaacataagccagaaaattatatgtcattattcttcactagggagaaatatgtagccacatatgagggtatgattatgcctgtgccagacaaaaggcaatggttaagcacagacttgccagatgtggatcctccattgtatcatgcccagcctggaagaccaaagaaaaagcgagttagagcgaaaggagaacctcatgttgaggcaagagcctcaaaaagggctgcagtgaaatgctccaactgccacacttatggtcacaatgttaagggatgtggagtgccacttagagctgattgggagcctaggaagggagctaagtacacgaggacccgccgacatttgaaggaggatcaagaattaggccacaaaagttgtcaccgatcaggaaaaggaatgcttgaagtattatgtgtcgtgttgttagctgaattttaggcctcaattggtgttcctatttcatctcactactggaatgcttgctgttttggtggtttcagtaattaggccacaaggtgaacgcctgctatgttgagatgaagtaggaacgcctgctgttttgctgttttgtttgcctaagctagctgcttaaatcagccaaacccaccaacatttgaaggacctagaatttgttactgcaaactgtgtctgtgtttcaccttgttttgtgattctgaaagactgaaaccatgtacaaaactgttttgcactttgctgtaaagcaatgcgtaatgcacctatgaaccctgttgctctgcac

SEQ ID NO: 15141 - DNA, 845 bp, Zea Mays
ctagaggcggttagaggtgttgggaggcatcacagaagattgtcactgttgagcagaaattgacacgaggatggggaggagaaaatgcgtatcatgttagtggatatcgttatttgcttgttgatccggagagaagagtatcaagagcctccccacctgggaaagtcaccaccctagcaaaggattctctacttgccctcaacatgctaagacaagaagtagatctagagaagtcaagatacaagagaggcgacccttgtcatgataaggatttcgaagtatgtatcagaacaaaaaacaatgcgtgggttattgctaaaatcagtcaaggaagggagctttacatggctctagagaagggtggtgaaacgcttctatatgcatccacagctgtagagaaattcagcaacaggtactgtgagggagcattctctacagattagaagcaccagagggagatcttagcttttccatacattacctattatgtacatcctgtttttttcccagctgtatcgttgccccctattgttgagagactcggaccactctttgcgaagggaataaggagttcgtatcagttgtacagctgctctgctgtcgtgtgctatctgcaaaagaatagcctagtctgggaataacgcagagcgggatagagtttgtttgttcacttatgcccttccttaacgcagagcattgtgcgtgttttcattttgctgtaacagccggcgatttacctgcagactgggaaagtaacttagcgtttaatttggtattctgcattttgatggtctcatatcatatggttcgagttgacgggttcgttctgcctccggagaggagag

SEQ ID NO: 15142 - DNA, 351 bp, Zea Mays
gactaatcgcggtttgtcagatgacttgaaaacacatcaatagactggaatgatgagctgaatgaccaccctggtaccaatgaggatattgcacctattgataatgatgggagtgagttggcatctgaatcaaagcaaggtgctactaatcgtttagaagaaaatgaatgggataaacttttacgtgtcagatgggagcaatatcaaatagaggaggaggcatctcttggtcgaggtaaacgtttaaggaaggctgtttcttacagagagacatttgcaacacttcctaatgaagcattaagtgagggctctgatgagggagatgaaccaaagagagaatatacagcagct

SEQ ID NO: 15143 - DNA, 1108 bp, Zea Mays
gatcttgagcatccatggctacatgactctaaaaacacgccagacgtttctcttggcgatactgtccgagcaagactgcagcaatttgctgcgatgaacaagttaaagaagaaagcactaagggtgattgctgagcatctgtctgcggaggaagtagctgacataaagcaaatgttcgataagatggacgtgaacaagaacggcaagctaacattcgaggaattcaaggccggcctccgtaagctgggaaaccaaatgcatgattcagaccttcagatactgatggatgctgccgacgtcgacagaaacgggaccttagattacgaggaattcgtcacggtgtctgtccacgtgaggaagataggcaacgacgaacacatccagaaggccttcgcatacttcgaccggaataagagtgggtacatagagatcgaggagcttagagaggcactggctgatgaactggatggcagtgatgaagacatcatcggtggcatcatccgggacgtggacacagataaggacgggaagataggctacgacgagttcgcggcgatgatgaaggccggcactgactggaggaaggcctcccggcagtactcgcggcagcggttcagcaacctgagcctgaagctccagaaggacgggtccctcggcgccgacacacggtaggccgccgagtgtagtggtggtgctggtgttcgtccgtctctttgcttgcttgcttgttttgctgtgcggggtttttgttggttggtcagacagtcagtcaggtcattagattccacctccacgttctgtttccattacacggtgaaccctcagctggagctgtgattcttgggcttgtgattgtagaagaaagatgcacgtacaacgtacgtattgtagatgggtgcagcagcgtgtgctgacaaagaatgctggagtagcacaagacacgagtagtcttgctttgcttgtaacttgtaagtagaatttgttttgtgtgcttgcaatgcatgacgatggtgattgccctgcaaaaccgtgtgaatgcctgcacgcaagctgctcgcgtcgcgaccctcgctcttgctggctgtaaagaaggacggtgtggttttag

SEQ ID NO: 15144 - DNA, 454 bp, Zea Mays
caggaacatccacctgtgacaagaatggagcaattgaagccattggttgcacaacttgatagagtgaagaatattcctgcaccagagtttgggagtctacaaacatgggaaagagcaaatattggtgcttttgcaattggtgaccctgctgcagctgattcttctaggaattcacaagggcagtatggtacaccaatgccatacattggagagacaaaggttgaagttgatctgttgagtgatggtgtgaaagaaggtgctgaatcaggtaaaactgattctgaactgaaagttttacctccatggatgatcaaggatggcatgaatcttactaaggaacaaagaggagagataattgcgccacaaaaacttgagaaatctgatgccggagatgacaagaagcatgacttgaaagatgatgattgttttcgctcagctcaggaatgaacacata

SEQ ID NO: 15145 - DNA, 1571 bp, Zea Mays
caggacgttgctgcactggaaaatgctaaaagacagatgcttcttggaaccctccatattcaaacacagttccggggtttgcattctcggcggggatatcaacgactaaagaaaggggcgatgaatttgcaatcatttatacgtggtgaaagaacaagaatacactttgataatcttgtcaagagatggagggcagctgttctcatacagaaacacactaggcgtcgacttgcagctaacatgttcaatgatcaactgaatcatgtcattcttcttcagtccgtgacgcgtgggttcctggccagaaggaaatacaagtgtctgcagaatgaaaaggagtcaaaggccagtcacagcatagttcaagggaacacaaggaagaataactcagagtcaagaatatgccatgaaatgaatgggcattatcctcacgaaccagtcatcactgagcttcagggtcgtatcacgaaagctgaggctgcattgcggggtaaggaggaggaaaatgtaatgctcaaacagcaattggaacagtatgagaggaaatggtcagaatatgaagccaaaatgaaatgtatggaagaggcatggaagaggcagctctcttctctgcagctgagccttgttgtcgctaagaagagcctagctgctgatgatgcagccactagagcagctcggactgattgtactcctacacatgcgcagtatgactctgaagatacattatccaccgggactcgtacacctgaagtgatcgagtcgaaacacgacaaccacaaccctgaagctaaagtttcagcaggaaactcggataggcgagtgaatgctgtgaaccacctagcaaaggagtttgaagacagacgacaggtgttcgaagacgatgcgggcttcctagttgcagtcaggtccggtcagattggttcaaatatgaacccagatgaggaactccggaagctcaaggaccgctttgcgacatggaaaaaagactacaaatctcggttgaaggagactaaggtaaaccttagtaaggttggcacccatgatgagaaatcacggaaaagatggtggggaaagaagagctcgaagtgaaacgtgtaagagaatctccacaacattttgcaacgacactgggtcaaggaaagtggccaggaatgccagggcaggcgagaagaatctgcctctgatcccaaaagcttggtgagatgatgaactcccatgttggtggcagtgccgttactcatctgatgtcacgagtgtcgaaaagatcaaagtagacaataggtgaagccagagttctgtacatgtatattagtcagctctgagtcatcacttgacagtgtgtttatgtcatcgtgtatgtagagtgataaatccgaggcgtggaagggtaactaaatgcagattatccaccatgagcgaagagatgcgaaagcagagtactgtaatatgtgtacagtgagaacattgttgaaatgtgcaaggcattttactctgaaaactgtgattgcatcgccccatattttgcactatcttttgagacctttacacttacacatcagttttattttttt

SEQ ID NO: 15146 - DNA, 670 bp, Zea Mays
gcggctcagccctatcccagttccgtccgtccgttctgacctcggctcgtcgggcagcggcgcccggcgcaccacacaggctttctccaactctccgccctcgccatggccatgaccgtggcagccgcctggcttccgtcgaccgcctctcgccggagaatcttatcctctccgctccctccgttcgcggcccctatctccatccacatgccacggcgggcgccgcctcccagtcccatccatccaaagccgcgcctcttcgtcgcctacgcgcagctcgatttctccagagctgttcaaacagcatggagggtcggtaacgatgctgtggaggcaggaagtaatcttgtcccaggttcagttccacgaccaattgccaggataggtgttgcctttgctgctgtgtcagtcgcctttttccttgtcaaatccattgtgtccactgcattatttgttctggcaatgatgggccttatatatctcagcttcctggctatgaacccaaaggaggcatccggctctaggctggatgaagcaatgggcaacccatcggaggaccctgttgaagaggcccgtaggataatggacaaatacaagtaattaacctgtgcaaaggtgctgtactctcagaggtatgatttgtctgtagagcttccttgcgtgacgtgag

SEQ ID NO: 15147 - DNA, 127 bp, Zea Mays
cggaggaggggaagaaggtgaatagaaatcaggattcagggagagggaaaggaagaggaaggcgaaggcgataacgtcttccacgcgcggcgacacagcaagaggggagaggacgagagtgacgggc

SEQ ID NO: 15148 - DNA, 3676 bp, Zea Mays
cgcgtaacccacatggtccacaaccccccggctgtctctacctccttcctcgctcacctcctcacgacgtgaggaatcgatcaggccaccgccgtacccgtcggagatccgctccgcccgcgcgatttcgatccgaaacacctcgtcggatcttcagggatctgactgaggggcagcgcgccggctgctgacacggcgggcacgcgcgcagccagccatggcgcgtggtggcggaggcggctgctgcccgccaatggatctgatgcgatcggaggcgatgcagctggtgcagataagagcccgtttcaacggacatatgctgcccagattaaaaggtgtagtgaaatggctcgtaaattaaggttttttaaggagcagatgtcaaaagctgacataacagcctctcctacacaactaaatggaactcatatggattttgatgaattggagataaagcttggagaactggaagctgagctaactgaagttaatgcaaacaatgaaaaattacagaggacctataatgagctattagagtaccatactgttctccaaaaggctggtgaatttttctattcagctcaaagaactgctgcagcgcaacaaatggaaatggaggcaaatcaatctggtcaaacttcactggagagccctctgttggaacaggagatgacaactgatccatcaaaacaagtgaagcttggctcattgagtggacttgttccaaaggaaaaggcaatggcttttgaacggatcttattccgtgccacaaggggtaacattttccttaggcaagagcctgttgatgagccagtcactgatccagtttctagggagaaggtaacgaaaaatgcatttgtcatattctactctggagagagagcaaaaaccaaaattctgaagatatgtgatgcctttaatgcgaaccgttacccgtttccagaagatgttggcaaacaacttcatgctgttcaggaggtatctgggaagatctcagagttgaagacaacaattgacatgggtttagctcatcgtgacagtatactaaaaaatattgcttctgattttgaacagtggaaccatctggtcaaaaaggaaaaggcaatttatcacaccttgaacatgctaagtgttgatgttacgaagaaatgtttagttgctgagggctggagtccaatttttgcaagcattcagattcaagacgctcttcagcgtgctactcttgatagcaaatcccaagttggctcaatatttcaagttctcaacacaaaagaatctcctccaacatatttccagacaaataaatttacttcagcgttccaggaaattgttgatgcgtatggtgtagccaagtatcaagaagcaaatcctggagtattcaccattgtgactttccctttcttatttgctgtcatgtttggtgattggggccatggaatttgcttgttacttgcaacactctatcttataatccgggagaagaaactagcttcacagaaacttggagacataatggagatgatgtttggtgggcgttatgtaattatgatgatggcagttttttcaatctacacaggattaatatacaatgaatttttctctgttccatttgggcttttcggtaaatctgcctatgcatgccgtgattcttcttgcagtgatgctactaccgaaggacttcttaaagtaagagatgcatacccttttggtgtggaccctgtctggcatggtagccgcagtgagctaccgtttctcaactcactgaagatgaagatgtcgattcttcttggagttgcacaaatgaaccttgggattgtgattagttacttcaatgcaaaatttttcaggaacagtattaatgtgtggtaccagttcattccccagctgatcttcttgaacagcttatttggctacctgtccttgctcattattattaagtggtgcacggggtcgaaagcagatctataccacgttatgatctacatgttccttagcccaacagatgatcttagtgagaaccagttgtttagtggccagaagacagtgcagcttgttctacttctgcttgctttagtgtctgtaccttggatgttgattccaaaacctcttcttttgaagaaacaacatcagcaaaggcatcaaggtcaccagtacgctatgcttcagggcattgatgaatcagtgggagcagaattgggggaacatcatgaggacgcacatgaccacgaggagtttgagttcggtgaagtttttgttcaccaactgattcacacgatagaatttgttctgggtgcagtctcaaacaccgcttcataccttcgtctttgggctctgagtcttgcacactctgagttgtccactgtattctacgagaaagtactaatgacggcatatgggtttaacaatgttttcatccttattattggtgtcgtcatcttcatctttgccacgattggtgtcttgcttgttatggagaccctgagtgcattccttcacgcgctgaggcttcactgggtggagttccagaacaagttctatgaaggtgatggctacaagtttgccccattctccttcgcgctgattcgtgaggaggaagattgagcttgtctcaacatttgtatttattgtagccgataaaaaatctttggtggtctttgttcccagaccaaatcattttttcatctgttgtgtcggatgtggatcataaaccaccgtccctttgtttaaactgggacgaacagcatcatttttccttagctatgcagaggattcttgggttggttggcaacagatatggggtgatgtcacccttgtatgatgctaataagtagttgccgattgggcggtgtgttggatataaataagcactgtattgaaggttagacaatctccatcacgttcattgtcaataaaataaagagtgctatttacgctgctggtgttaatcatctcctggtctgttgttaaccattgtcagtgcttcatcttatcccattgatactctgaatcagctgtctcttataaccaaagcaaaagctaaaccagaatcacgttataaaagtagttaaacatgtcgagtctgtctgcttgtgggcaatctagtaacataggtagctgcagcctagtttcgtcagtcgtcaacgacgttgggaacgctgctggtgctgcgcctagagctgctgaaaggtcccgtgacagtccggccaacgaacttgccggccttgctgagtccgctaccgaacgcgccaatgccggagccgacggcgccgatgcccgtgccaaccatcccaacgccggagccggccgcgctgacacccgtgccggcaacggtgccggccgccgcgatgcccgtgccggccacgttggtgaccgtggacgccatgccgcttgccgcgtccgcggcgccgctgacggcccccgtctcgctcttcaccttccgccgctcatccacggtctgcttctccagctccagggcctcccgcgcctctgcgttggtgaactggtggtacgccaccttaatgctgagcacgcccctgtccttcttgtccttgaccttggtcgtgtccagcgacgacagcagctgcagtttcacctcctgcacggtttccatctccaggtcgctcaggggcagcttggcgatgccaagcctcttgtcttgcttcatcttgtcctcatc

SEQ ID NO: 15149 - DNA, 2308 bp, Zea Mays
atcttgtgggatccacatggtctacatcctgccgcgctttggagctacatctttccttttcactgagtacaagtatgttggattattcatgggcatctttgcaatccttatattcctcttccttgggtctgtcgagggattcagcacgaagagtcaaccttgccactatatcaaggaccagacttgcaagcctgcccttgctaatgccatcttcagtactatagcttttgtgcttggtgcagtcacctcactagtttccggctttcttggaatgaagatcgcaacttatgcgaatgcccggacaactttagaggccagaaagggtgtcggaaaggcatttattactgccttccgagctggtgcagtaatgggcttcctgcttgctgccagcggtcttttggttctttacattgctatcaatttgtttggaatttattacggtgatgactgggaaggtctttttgaagctattactggttatggccttggtggttcttctatggctcttttcggccgcgttggtggtggtatttataccaaggctgctgatgttggtgctgaccttgtggggaaggtagaaagaaacattcctgaggacgatccaagaaacccagctatctctttggctcatatgctgaatcatcatgtgctgctcttgttgtggcctctatctcgtcttttggaatcaaccatgaatttactccgatggtgtaccctcttctcgtcagttctgttggtattatagcatgtctcataacaacgctgtttgcaactgatttcttcgagataaaggctgtggatgaaatagagcctgctctcaagaaacagctcataatttccacaattgtgatgaccattggcattgcactaatcagttggcttggtcttccatacactttcactattttcaactttggagtccagaagacagtgcaaagctggcaattgttcttgtgtgtggcggttggtctctgggctggcctagtcattggttttgttactgagtactacacaagcaatgcctacagccctgtacaagatgttgctgattcctgcagaactggagcagctactaatgtcatttttgggcttgctttgggttacaaatcagtcattatcccaatttttgctattgcgtttagtatcttcctcagcttcagccttgctgccatgtatggtgttgctgtggctgctcttggaatgctgagcaccattgccacaggtcttgctattgatgcatatggccctatcagtgataatgctggaggaatagctgaaatggctgggatgagccataggattcgtgagagaactgatgctctagatgctgcaggaaataccacggctgcaattgggaagggttttgccattggctctgcagccttggtttcccttgcactatttggtgcgtttgtaagccgggctgctatctccactgttgatgttctgactcctaaagtattcatcgggcttattgtcggtgctatgctcccgtactggttctcggcaatgaccatgaagagtgtgggcagtgctgcgctcaagatggtggaggaagttcgtcggcagttcaacaacatccctgggctcatggaaggcaccacaaagcctgactacgcaacttgtgtcaagatctcaacggatgcatccatcaaggagatgatccccccaggtgctcttgttatgctcacaccactgatcgttgggattctatttggggttgagaccctctctggagtccttgctggtgcccttgtctctggtgttcagattgccatttctgcatccaacactggtggtgcctgggacaacgccaagaagtacattgaggctggagtttcagagcatgccaggacccttggcccaaaaggttctgaccctcacaaggcggctgtcattggtgacaccattggagatcctctcaaggacacgtctggcccttccctcaacatcctcatcaagcttatggcggttgaatcccttgtcttcgcccccttcttcgccgcccatggtggcattctcttcaaatggctctaagccagcgagagacgcaggataaaggccgtagttttgcaagccttcgagcaactgagtccatcttcctaagtcatcagccccagcgagacattgaagcatggggaaacttaaacagtatggtgatgattaatctcagcattttttttcttgcagcaatcaatatggactttgcttaaaatttcgttgtcttttcaaaacgatatgcaagcaaaatggaagtgatgttctttgaaactttgtttcaatgctatagcaaaggtttgcattttac

SEQ ID NO: 15150 - DNA, 1847 bp, Zea Mays
cactatggtgaaatggtgcatgattctgaagtaaacgatattgttactccctataggacaagttataaagggatgggatttgggcatcaagaccatgaaaaaaggcgaaaatgctgtgttcaccatcccaccagagcttgcatatggtgaagatggctcaccaccagtcatccctccaaatgccacactgcaatttgatgttgagcttctgtcatgggtgtgtatcaaggacatttccaaggatggaggcatcttaaaaaaggtagtagccaagggcgataagtgggagaaccccagagatcctgatgaagttgttgttaagtatgaagcaaggcttgaggatggaacagttgtatcgaaatctgatggtgttgagttcactgtgagagatggcgtattctgccctgccatatcaaaggctgtcaagactatgaagaaaaacgagaaggcccacctcactgtcatgccacaatatggctttggtgtgaaaggtagacaggcatctggagaagaagcttctgtgcctcctaacgcgacattgcacattgatcttcaagtggtgtcctggaggacagtcactgagttaggcagtgacaaaaagatccttaagaagatccttaaggagggcgaaggctatgattgtcccaatgattgtgcagttgtccgagtgaaacttattgggaagttggaggatggtaccttgtttgtcaagaaaggtcatgatggtgaggagccatttgagttcaagactgatgaggatcaagtgattgaagggcttgacaaagcagtactcagcatgaagaaaggagaagtatccttggtcactattcctccacatcatgcctttggaactaatgaaacaactaaagatctggctacagttccaccaaactcatatgtttactacgaaatggagcttgtctcatttgataaggagaaagattcatgggacttgaagaacgttgctgagaagattgaagcagctgctaagaagaaagaagaagggaatgtgtggtttaaaattggcaagtatgccagggcttctaagagatatgaaaaggctttgagctttgtcgagtacgatagctccttcactgaagaagagaagcagctatcgaaaccacttcagataagctgcaagctcaacaatgccgcatgtaaactaagacttaatgattacaaggaagcaaaggaactgtgtaccgaggccttgtacagaagggcacaggcacacatgcatcttgttgatcttgatttggcagaggcagatatcaagaaagctctagaaatagatcctgacaacagggatgtgaagatggggtacaagaggctaaaggagaaggtcaaggagtacaaaagaagggatgccaaattatatggcaacatgatttccaagttgagcaagcttgaagacacggaagataatggccaaatgagtcaggcagtaaacaagaagcgtgagctcttatggccactggcggaaatgcttaggagattcttcactgccgatggtagcaagggttccacgctgtggcttgtgctgaggctattgatcccggtaatagtattggttgcagtttgtgtgggttacttcatgcacagcagtgttgaagagatagactgcatcaactgttagttgagcagggtatctgtgctcaccttctgtcctttttcaggtgagtgtttatcgttgtatagatctgatgagtactacacgtatttgttggttgtgtgggttgaggacttgagggcgaagtattcacgtgtactgtactgttaaacttgacttgtctaatagttgcttccactgtctcaaaaagaaagataatcttgttttttcagttgtc

SEQ ID NO: 15151 - DNA, 1948 bp, Zea Mays
gaatttgccccgtcaggatgccctccgattcgtccgtaggacctggtggagacggagtgccagaggtggaagagcaaaggcgtgaacataaagtacgaggtgagggggaaccggaaggggtacaaggccggcgcgctcaaggaaggactgaagcacgactacgtcgcagactgcgaatacatcgccatgttcgacgccgacttccagcctgactctgacttcctcctcaggactatcccgttcctcgtgcacaacccggagatcgccctcgtccaggctcgctggaagtttgttaattctgacgagtgtctgctgacaagattccaagagatgtcgttggactaccatttcaagtatgagcaagaggccggctcctcggtgtattcattctttggcttcaatgggacagctggtgtctggaggatctcagcgatcgatgatgctgggggctggaaggaccggacgacagtggaagatatggacctggctgtccgtgcgatgctgcagggatggaagttcctttacgtcggcgacattaaggtcaagagcgaactgcctagcacattcaaggcgtaccggtttcagcagcacaggtggtcatgtgggccggcgaacctgttcaagaaaatgatggtagagattttagaaaacaagagagtgtcgctgtggagtaaaatccacctatggtacgatttcttcttcgtcgggaaagtcgctgctcatacggtgacattcatctactactgcttcgcgatccctgtgtctgttctgttccctgagatccagatccctctctggggagttgtctatgtcccgacagtcataaccctcttgaaggctcttggcacaccgagttcctttcacctggtgatcctctgggtcctgtttgagaatgtcatgtcgttgcaccggattaaggctgcagtaagtggtcttctggatgctggtgggcgagtcaatgagtgggttgtcactgagaagttgggcgacaccagcaaggcaaagcctggcaccaatggatcagacactgctgtaaaggtgatagatgtgaagctaacagaaccgcttgttccgaagctagtgaagaggcgagcaagattttgggagaggtaccactgctcagaacttttcgttggaacctgcataatcctgtgtggtttctatgacctgctttttgcaaataagggatactacatttttctcttccttcaaggcacggcgttccttgttgttggttttgggtatgtcggcacactacctccttgcactgcataagctgtcatggacaactgatattacctgctcaccagaaactgagcaagcaaagctcctctctcctgcacatatcaaactcttgaattcaatgatagttgagcaatgttcccccatcagtcttggcctgacatgatccaccgccgagaaggttgttcagatatcgccgtcgttctcctgtcagtgttggtcagatttgagccaaaccattctttattgtcagaaggccattcaaatagtgtcaccattgcaaattttataataacggtgtttaccgaagcatcatgaaaagaaaaatgattggtgcagcagcatttcgttcgcattccatagagatgcagttcacatccagtatttttttttggaaatctagtgttattactcagagttcagatccataatggaagattgttggcttcctcagttcataacctgtgtaggcttaaaacttgtagatgtaaattgttattaacactaatattttttattgaatccgggtattattgaaatgcaagtgtagcatgcatttcttttcctgtaagaagccaaagatgacttctgagtaacacgtctaatcagacattttacttgatgtggcacatggaatagtggatctattttaactatgtagcagcaaccatttggtcatactggtcacgcatgattgaagttgtga

SEQ ID NO: 15152 - DNA, 3176 bp, Zea Mays
ccaaaatttactccagtttctctttcttcttatctctcccccaagcctgtctctctgacgcaatgccgtttcccaccgcgcggtggcggcggcggcgcgagggcaccgcctctcggtggtgcgggatcttggtcctggctctggtggcgctggcggccggtgcgacggcggagacgtcgccgttggacgtggcggcgatgcgggctgtggcgaaggcgcttggcgcggacaagacgctgggatgggacgtcgcgggcgacccctgctcgccgaagcggtgggacggggtgtcctgcgactcgtcgggtcgcgtcacggcgatccaggtcggggcgcgaggcctgacggggaccctgcccccggaggtgggcgacctcaccgagctcacccgcctcgaggttttcgacaacaagctctccggcccgctgccctcgctcccgggtctctcctcgcttcaggttttactagcccacaacagcagtttcgcctccatcccctccgacttcttcaaaggcctcaccgggctcaccgccgtcgctatcgactacaacccgttcgcgtcgtggtcgctccccaccgacctcgccgcatgcgcctccctcgccaacttctccgccgtcagcgccaacgtctctggcacgctccccgacttcttgggtttgataatctatgggatttgcaacttcgcgacaacgagctcacagggccggtgcctgagagtcttttcaagttgaaggccctgaagaacgtgactctgacgaataatttgctgcaggggccgatgcctcagattcctaatcaacttcatgctgacatcaaagcagattcagagcggttttgtgtgcaggaagccgggaagccgtgcgatccccgtgtgagcctgctgcttgaggttgctgctgggttcatgtacccgaaggcacttgctacggattggaaggggaatgatccgtgtgtgtttccgggcgttagttgcatacaaggtaacattactgagctaattttcaccaataagggtctcagtggtagtatctcaccgtccatcgggaagattagctcacttaaggtgctaaatcttgctaacaataacatcactggtactgtgcctgaggaggttgccgcgttgccttcgctgacagaggttgatttgtcaaacaacaatctatatgggaaacttcctacatttgcttccaagagtgcagtggtgaaaactgctggtaaccctaacataggcaaggatgctcctgcaccaacagcaggatcaggtggtagcaacgacagtctatcggggggaggcagcagcggaagcattggtaacaatgggggttcctctccatcttctgttggagtcattgtaggctcagtggctggtacagtcgttggactaggccttgttgctgcattgggattctattgttacaagaggaaacagaagcctttcggaagggtgcagagtccacatgccatggttatccatccgcgacactcaggttcagatgacatggttaaaatcacagttgcagggggaaatgctaacgatggtgctcgcgcaagcgagacatatagccaagcgagcaatggtccacgcgacatccatgttgttgaaagtggaaatatggtcatttcaatccaagttctccgcaatgtgaccaacaacttcagtgaggagaacatccttggtcgaggagggtttggcactgtttacaagggcgagcttcatgacggcacgaaaattgctgtaaagcggatggaggctggtgttatgggtaacaaggggctaaatgagtttaaatcagagattgctgttttgaccaaggtccgacaccgcaatcttgtttcactgctgggctactgccttgatggcaatgagaggattctagtgtatgagtacatgccacagggggcactgagccaacacctgtttgagtggtctgagaaaaatttgcgaccattggaatggaaaaaacgacttagcattgcacttgatgttgcaagaggcgtcgagtaccttcacagccttgcccagcagacctttatccacagagacttgaagccatcaaacatacttcttggtgatgacatgaaggccaaggtggcggactttggattggtccggcttgcaccagctgatgggaagtgtgtctccgtagagacaagacttgctggcacttttgggtaccttgcaccagagtatgcagtcactggacgagtgaccacaaaagctgatgtcttcagctttggtgtcatcttgatggaactgattacaggacgcaaggcacttgatgagactcagcccgaggatagcatgcatttagttacatggttccggaggacgcagctcaacaaggaaacattccgcaaagcaatcgaccctgtcattgacctcgacgaggaaacctacgctagtgttagtaccgtctcagagcttgctggccactgctgcgctagggaagcgcaccagaggcctgacatgggccatgctgtcaatgtgctctctaccctttcggaagtttggaaaccagccgatccggactcggatgacagctacggtatcgaccttaacatgtccctgcctcaggctctgaagagatggcaggcgttcgaggacagcagccactttgacggtgcgacctcgtcgtttgttgcgagcctggataacactcagaccagcatccctacgaggcctcctgggttcgcggactcgttcacctctgccgacggaagataaagacatttagcgctgctagtaagggtgtgcaaaaaccttatgtttccgttgaaatggaagctcgggcgatccttgttcattcttttagtctcttcacccccgccaccaatctttccatgtctctttattcgtctctgtactgccgtgtagctgctctttggtcgtgtatgctgtgatcttgtcccgaaaattgcctggaagttcgaagactttgctaactggtctatgtcgtttgctaagattaaagtagaagaatgctagagctgtatggttgtatcgggtactgacaatttgcaaaggaaggtgaccctgtgttcgtcaaaaagaagtatggccctggcctgaagcttttccaacgcctaagctatgatcatttcactcgctgtacttactgtcatctactgtgagaactcaactatttgtcatgatctggtctcttatccgctgg
